United States Patent Application Publication US 2012/0159672 A1 - sequence listing, part 9

SEQ ID NO: 18918 - protein, 239 aa, Triticum aestivum
  peptide (1)..(239): Ceres Seq. ID no. 12614196
  misc_feature (49)..(239): NCBI GI NO: 34912188 NR Description: P0700A11.20
  misc_feature (48)..(173): NCBI GI NO: 34912180 NR Description: P0700A11.16
  misc_feature (63)..(239): NCBI GI NO: 31415965 NR Description: hypothetical protein
  misc_feature (54)..(130): NCBI GI NO: 34912184 NR Description: P0700A11.18
ISSSLSHTHTKPLQASITIPCLRLLMAAATGAKQQHPHPAPPPGATVVDPKFEWAEKAGTYVLRLTLTGFRKDDFRVQVDGAGRLTIRGTRPGASLHKVFQLPSAASLDDIAGRFEAGVLTLTMPKRAGAPKEEGAPTEQVDGDGKRRDAGGEKKVPEPAPSGDAAPTSIEEIRTKPKEEQQRPKKEKELDPKAPQAAAAAQTPEKQAPNPTSSDKTMAVVDRECLAETVRRRGEEERA

SEQ ID NO: 18919 - protein, 214 aa, Triticum aestivum
  peptide (1)..(214): Ceres Seq. ID no. 12614197
  misc_feature (24)..(214): NCBI GI NO: 34912188 NR Description: P0700A11.20
  misc_feature (23)..(148): NCBI GI NO: 34912180 NR Description: P0700A11.16
  misc_feature (38)..(214): NCBI GI NO: 31415965 NR Description: hypothetical protein
  misc_feature (29)..(105): NCBI GI NO: 34912184 NR Description: P0700A11.18
MAAATGAKQQHPHPAPPPGATVVDPKFEWAEKAGTYVLRLTLTGFRKDDFRVQVDGAGRLTIRGTRPGASLHKVFQLPSAASLDDIAGRFEAGVLTLTMPKRAGAPKEEGAPTEQVDGDGKRRDAGGEKKVPEPAPSGDAAPTSIEEIRTKPKEEQQRPKKEKELDPKAPQAAAAAQTPEKQAPNPTSSDKTMAVVDRECLAETVRRRGEEERA

SEQ ID NO: 18920 - protein, 151 aa, Triticum aestivum
  peptide (1)..(151): Ceres Seq. ID no. 12614198
  misc_feature (104)..(151): NCBI GI NO: 30526291 NR Description: latency associated nuclear antigen
  misc_feature (78)..(151): NCBI GI NO: 30526291 NR Description: latency associated nuclear antigen
LILSLSHTHKTTTGIHHDSLPTPPHGGCHRRQAAASAPSSTTGGNGGGPQVRVGGEGRHLRAPPHPDRLQEGRLPGAGRRRGPAHHPRHQAGRLPPQGLPAALRRQPRRHRRPLRGRCAHAHHAQACRCAQGGGCANRAGRRRREEERRRR

SEQ ID NO: 18921 - DNA, 1490 bp, Triticum aestivum
  misc_feature (1)..(1490): Ceres Seq. ID no. 13502983
gtgctctgctgccacccccaaatctcctccccactcccgaatcaaatcccccgtcacctccgccaccaccccaccccacctatccccaccgccggcgcgagcacgggagcgcgagcgcgagcggagcgatggccggcgcgggatcctcgtcgggcggctcgggcggcggcggggggagggagggcgactgggactgcggcggctgcggcaaccgcaactacgccttccgctccctctgcaaccgctgcaagcagccgcgcctcctcgtcgaccccaacaccccgcgcgactccaagtggctcccccgcgccggcgactggatctgcaacggttgcagtaacaataattatgcatccagaaagaactgcaagaagtgcaacctgcccaaggaggaagcagcgatgccgcagttatcaatgggaggaatgatgccagcctatgcagattatatggccagggtacaggagattgccaatgctgggtataagatgaactttggcaatccagctatgcagcagcagctactcgcaaacgcaaactggccctatgggatggctggtagatatggtatgcaatcgtctgcttggccgttcgccggcaacagcacaaatcagtttcaaggtgttccaaaggactggcgtagtggtgactggctctgcagctgtggattccataactattcatctcgtgctcagtgcaaagagtgtaatgcacctgtcccatcaggcatggcctctacaaccatgaaatccacaggagcagatagttcttcaacattaggtaataagcgtttggcatcagaggagcttgctaatgactgggataataaaaggctaaatccaggaaatgctaattatccactttcagcagcaggctcagataatttatttatgggtcaaggtgctggaaacaataatggccagacaacttattctgcatatgacaatggaaactcaatggcatctggacaaattccagggatgtctggtgtagttggtaaaggagcaaaatggcgtgaaggagactggttgtgcaccaactgcagcaatcataactacgcatctcgtgcattttgtaacagatgcaaaactgcgaaagagtcttcggttcatccgggtgcgctataataatagctttgcttgtacttttgcgaccaagttattgaagcgggtgtggagtctcctggttctgccacggctgatcggtcgctgccgtcgccaggattgttgttatgtttgtggtttggccctgcagtacttatgctgctgttaaaattgttctgtctgaatctaatattgtttgtgggagtttgcatttgtctacgccgagcactagaataaaacgtttcctgtatgtcgaagtgtaccatctgttttttgtttttgtgtgtgcgtgtgcaacgatttgatttgttcttcagtacctcaacagctatgatgtaatgtaatgctggatctatttcatgtggcaatgctggattttattgtttt

SEQ ID NO: 18922 - protein, 374 aa, Triticum aestivum
  peptide (1)..(374): Ceres Seq. ID no. 13502984
  misc_feature (59)..(88): Pfam Name: Pfam Description:  Zn-finger in Ran binding protein and others
  misc_feature (134)..(374): NCBI GI NO: 38345582 NR Description: OSJNBa0027H06.18
  misc_feature (56)..(183): NCBI GI NO: 15227939 NR Description: zinc finger protein -related
  misc_feature (259)..(366): NCBI GI NO: 15227939 NR Description: zinc finger protein -related
  misc_feature (200)..(290): NCBI GI NO: 15227939 NR Description: zinc finger protein -related
  misc_feature (41)..(132): NCBI GI NO: 15865325 NR Description: putative non-ribosomal nucleolar protein
  misc_feature (213)..(371): NCBI GI NO: 15239445 NR Description: expressed protein [Arabidopsis thaliana]
  misc_feature (102)..(242): NCBI GI NO: 5679336 NR Description: putative zinc finger protein [Oryza sativa]
  misc_feature (102)..(242): NCBI GI NO: 5803246 NR Description: ESTs AU077984
  misc_feature (102)..(243): NCBI GI NO: 19114486 NR Description: RNA-binding / Ran zinc finger proteinrotein
  misc_feature (59)..(85): NCBI GI NO: 19114486 NR Description: RNA-binding / Ran zinc finger proteinrotein
ALLPPPNLLPTPESNPPSPPPPPHPTYPHRRREHGSASASGAMAGAGSSSGGSGGGGGREGDWDCGGCGNRNYAFRSLCNRCKQPRLLVDPNTPRDSKWLPRAGDWICNGCSNNNYASRKNCKKCNLPKEEAAMPQLSMGGMMPAYADYMARVQEIANAGYKMNFGNPAMQQQLLANANWPYGMAGRYGMQSSAWPFAGNSTNQFQGVPKDWRSGDWLCSCGFHNYSSRAQCKECNAPVPSGMASTTMKSTGADSSSTLGNKRLASEELANDWDNKRLNPGNANYPLSAAGSDNLFMGQGAGNNNGQTTYSAYDNGNSMASGQIPGMSGVVGKGAKWREGDWLCTNCSNHNYASRAFCNRCKTAKESSVHPGAL

SEQ ID NO: 18923 - protein, 332 aa, Triticum aestivum
  peptide (1)..(332): Ceres Seq. ID no. 13502985
  misc_feature (17)..(46): Pfam Name: Pfam Description:  Zn-finger in Ran binding protein and others
  misc_feature (92)..(332): NCBI GI NO: 38345582 NR Description: OSJNBa0027H06.18
  misc_feature (14)..(141): NCBI GI NO: 15227939 NR Description: zinc finger protein -related
  misc_feature (217)..(324): NCBI GI NO: 15227939 NR Description: zinc finger protein -related
  misc_feature (158)..(248): NCBI GI NO: 15227939 NR Description: zinc finger protein -related
  misc_feature (1)..(90): NCBI GI NO: 15865325 NR Description: putative non-ribosomal nucleolar protein
  misc_feature (171)..(329): NCBI GI NO: 15239445 NR Description: expressed protein [Arabidopsis thaliana]
  misc_feature (60)..(200): NCBI GI NO: 5679336 NR Description: putative zinc finger protein [Oryza sativa]
  misc_feature (60)..(200): NCBI GI NO: 5803246 NR Description: ESTs AU077984
  misc_feature (60)..(201): NCBI GI NO: 19114486 NR Description: RNA-binding / Ran zinc finger proteinrotein
  misc_feature (17)..(43): NCBI GI NO: 19114486 NR Description: RNA-binding / Ran zinc finger proteinrotein
MAGAGSSSGGSGGGGGREGDWDCGGCGNRNYAFRSLCNRCKQPRLLVDPNTPRDSKWLPRAGDWICNGCSNNNYASRKNCKKCNLPKEEAAMPQLSMGGMMPAYADYMARVQEIANAGYKMNFGNPAMQQQLLANANWPYGMAGRYGMQSSAWPFAGNSTNQFQGVPKDWRSGDWLCSCGFHNYSSRAQCKECNAPVPSGMASTTMKSTGADSSSTLGNKRLASEELANDWDNKRLNPGNANYPLSAAGSDNLFMGQGAGNNNGQTTYSAYDNGNSMASGQIPGMSGVVGKGAKWREGDWLCTNCSNHNYASRAFCNRCKTAKESSVHPGAL

SEQ ID NO: 18924 - protein, 241 aa, Triticum aestivum
  peptide (1)..(241): Ceres Seq. ID no. 13502986
  misc_feature (1)..(241): NCBI GI NO: 38345582 NR Description: OSJNBa0027H06.18
  misc_feature (1)..(50): NCBI GI NO: 15227939 NR Description: zinc finger protein -related
  misc_feature (126)..(233): NCBI GI NO: 15227939 NR Description: zinc finger protein -related
  misc_feature (67)..(157): NCBI GI NO: 15227939 NR Description: zinc finger protein -related
  misc_feature (80)..(238): NCBI GI NO: 15239445 NR Description: expressed protein [Arabidopsis thaliana]
  misc_feature (1)..(109): NCBI GI NO: 5679336 NR Description: putative zinc finger protein [Oryza sativa]
  misc_feature (1)..(109): NCBI GI NO: 5803246 NR Description: ESTs AU077984
  misc_feature (1)..(110): NCBI GI NO: 19114486 NR Description: RNA-binding / Ran zinc finger proteinrotein
  misc_feature (1)..(29): NCBI GI NO: 5679336 NR Description: putative zinc finger protein [Oryza sativa]
  misc_feature (1)..(29): NCBI GI NO: 5803246 NR Description: ESTs AU077984
MPQLSMGGMMPAYADYMARVQEIANAGYKMNFGNPAMQQQLLANANWPYGMAGRYGMQSSAWPFAGNSTNQFQGVPKDWRSGDWLCSCGFHNYSSRAQCKECNAPVPSGMASTTMKSTGADSSSTLGNKRLASEELANDWDNKRLNPGNANYPLSAAGSDNLFMGQGAGNNNGQTTYSAYDNGNSMASGQIPGMSGVVGKGAKWREGDWLCTNCSNHNYASRAFCNRCKTAKESSVHPGAL

SEQ ID NO: 18925 - DNA, 1129 bp, Triticum aestivum
  misc_feature (1)..(1129): Ceres Seq. ID no. 13595979
ctacaccatcacacaatatccagaaccatctcactgccaacctccgccatggcgttccgacgccctctcgctctccacccgctcgtgatcgccttcgtgctggtctcctgtctcgccggcgccgccacggcgaagcagacgggccagctgaccgtgttctggggccggaacgccggcgagggcacgctgcgcgaggcctgcgacacggggctctactccaccgtcgtcatctccttctacagcgtcttcgggcacggccgctactggggcgacctctctggccaccctctcgccggcgtcggtgccgacatcaagcactgccagtccacgaacatcctcgtcctcctctccatcggcgggcccgggaacggctactccctcccgtcctccgcctccgccgcagccgtcgccgacaacctctggaacgcgcacctcggcgggcgccggaacggcgtgtaccgcccgttcggcgacgccgccgtcgacggcatcgacttctacatcgaccagggcgcccccgaccactacgacgagctggccagccgcctcgacgggtacaaccggttctaccgcggccggaagggtgtgcgcctgacggcgacgccgcggtgcgggttgcccgaccgccgcctgggggcggcgctccggacggggctgttcgagcgcatccacgtcaggttctacggcaatgacacatgctcgctggggaagggcgggacgtacggcgtggtagagcagtgggagaagtggacggcggcgttcccaaggacccaggtgtacctgggcctcgcgccggcggagagcggcgtgccggagggggcgcagggcaccgtcgccgtttacctcaagtacctctactacgacctgctgcccaaggtgcagaaggcgaacaactatggcggggtcatggtctgggacagattcgccgacaagaagacacgctggagcagcgtcgtcaacggatgggcctgatcgtttatatcgctagctggtttacagctacggatccgagtatatactacttctactgtgtatgcgtgtgtatgaataaaacggcatccatatgataatgatatatggatgtgaactcaagttgtttcttgttctagtcaatgagataaggaatatg

SEQ ID NO: 18926 - protein, 323 aa, Triticum aestivum
  peptide (1)..(323): Ceres Seq. ID no. 13595980
  misc_feature (48)..(310): Pfam Name: Pfam Description:  Glycosyl hydrolases family 18
  misc_feature (17)..(323): NCBI GI NO: 18693099 NR Description: putative xylanase inhibitor protein
  misc_feature (17)..(323): NCBI GI NO: 7451378 NR Description: chitinase (EC 3.2.1.14) III C10701 - rice
  misc_feature (17)..(316): NCBI GI NO: 7451381 NR Description: chitinase (EC 3.2.1.14) III C10150 - rice
  misc_feature (17)..(317): NCBI GI NO: 7451377 NR Description: chitinase (EC 3.2.1.14) III C00481 - rice
  misc_feature (20)..(323): NCBI GI NO: 4884516 NR Description: class III chitinase homologue (OsChib3H-b)
  misc_feature (20)..(323): NCBI GI NO: 7451380 NR Description: chitinase (EC 3.2.1.14) III C10923 - rice
  misc_feature (28)..(323): NCBI GI NO: 7451379 NR Description: chitinase (EC 3.2.1.14) III C10122 - rice
  misc_feature (20)..(323): NCBI GI NO: 4884518 NR Description: class III chitinase homologue (OsChib3H-c)
  misc_feature (31)..(319): NCBI GI NO: 38346492 NR Description: OSJNBa0020I02.6
  misc_feature (28)..(323): NCBI GI NO: 34913272 NR Description: putative xylanase inhibitor protein
LHHHTISRTISLPTSAMAFRRPLALHPLVIAFVLVSCLAGAATAKQTGQLTVFWGRNAGEGTLREACDTGLYSTVVISFYSVFGHGRYWGDLSGHPLAGVGADIKHCQSTNILVLLSIGGPGNGYSLPSSASAAAVADNLWNAHLGGRRNGVYRPFGDAAVDGIDFYIDQGAPDHYDELASRLDGYNRFYRGRKGVRLTATPRCGLPDRRLGAALRTGLFERIHVRFYGNDTCSLGKGGTYGVVEQWEKWTAAFPRTQVYLGLAPAESGVPEGAQGTVAVYLKYLYYDLLPKVQKANNYGGVMVWDRFADKKTRWSSVVNGWA

SEQ ID NO: 18927 - protein, 307 aa, Triticum aestivum
  peptide (1)..(307): Ceres Seq. ID no. 13595981
  misc_feature (32)..(294): Pfam Name: Pfam Description:  Glycosyl hydrolases family 18
  misc_feature (1)..(307): NCBI GI NO: 18693099 NR Description: putative xylanase inhibitor protein
  misc_feature (1)..(307): NCBI GI NO: 7451378 NR Description: chitinase (EC 3.2.1.14) III C10701 - rice
  misc_feature (1)..(300): NCBI GI NO: 7451381 NR Description: chitinase (EC 3.2.1.14) III C10150 - rice
  misc_feature (1)..(301): NCBI GI NO: 7451377 NR Description: chitinase (EC 3.2.1.14) III C00481 - rice
  misc_feature (4)..(307): NCBI GI NO: 4884516 NR Description: class III chitinase homologue (OsChib3H-b)
  misc_feature (4)..(307): NCBI GI NO: 7451380 NR Description: chitinase (EC 3.2.1.14) III C10923 - rice
  misc_feature (12)..(307): NCBI GI NO: 7451379 NR Description: chitinase (EC 3.2.1.14) III C10122 - rice
  misc_feature (4)..(307): NCBI GI NO: 4884518 NR Description: class III chitinase homologue (OsChib3H-c)
  misc_feature (15)..(303): NCBI GI NO: 38346492 NR Description: OSJNBa0020I02.6
  misc_feature (12)..(307): NCBI GI NO: 34913272 NR Description: putative xylanase inhibitor protein
MAFRRPLALHPLVIAFVLVSCLAGAATAKQTGQLTVFWGRNAGEGTLREACDTGLYSTVVISFYSVFGHGRYWGDLSGHPLAGVGADIKHCQSTNILVLLSIGGPGNGYSLPSSASAAAVADNLWNAHLGGRRNGVYRPFGDAAVDGIDFYIDQGAPDHYDELASRLDGYNRFYRGRKGVRLTATPRCGLPDRRLGAALRTGLFERIHVRFYGNDTCSLGKGGTYGVVEQWEKWTAAFPRTQVYLGLAPAESGVPEGAQGTVAVYLKYLYYDLLPKVQKANNYGGVMVWDRFADKKTRWSSVVNGWA

SEQ ID NO: 18928 - protein, 229 aa, Triticum aestivum
  peptide (1)..(229): Ceres Seq. ID no. 13595982
TPSHNIQNHLTANLRHGVPTPSRSPPARDRLRAGLLSRRRRHGEADGPADRVLGPERRRGHAARGLRHGALLHRRHLLLQRLRARPLLGRPLWPPSRRRRCRHQALPVHEHPRPPLHRRARERLLPPVLRLRRSRRRQPLERAPRRAPERRVPPVRRRRRRRHRLLHRPGRPRPLRRAGQPPRRVQPVLPRPEGCAPDGDAAVRVARPPPGGGAPDGAVRAHPRQVLRQ

SEQ ID NO: 18929 - DNA, 1484 bp, Triticum aestivum
  misc_feature (1)..(1484): Ceres Seq. ID no. 13589016
gttgcttcctctccctttccatttccttccttgtcctttcctccaatcgaattggttccccaaatcttagggttagggtttcgtctattccgtaccttcctcccatattagcgcgtctggtccctgagcttgctttgcgcgtgggatgatgggcactgccgtggacctaggacggaggcagggcgacagccgcttctacgacgctgccagggctcgacgagggcaccatcacggccttcccaagtcgagacatatgatggacgacagtgatgaagatttccgtgattccagcagtgatggtagcagtgattatgaacatgtaagggccaaacactttgctcaggaaggcttctcaagggatgttggtgaatctggagttactcatggccgcttgctctttcagtacctcgagtttgattctccgttttgccgtgaacctttcactgataagatttctagcctttcagctagatttccaggattgaggacccttaggagttgtgatttatcagcgcggagttggatgagcatcgcttggtacccaatttatcgtatccctactggaccaacattaaaagatttagatgcctgctttctcactttccatcagctttcaaattgcccgcaaggagataatctgtgggctcctgatagcacaccaaacataccactcccagtttttggtttggcttcctacaagtttagcaactcagtctggtcctcaactgatggtgattggaaactggctagctgcttaaggcaagctgctgccgactggctgagagacagccgtgccggccatccagattatcagttctttgtctcccgtggtgcatacaacaggtagtgacaccaaatctgtgctttccgcagagctcatgaaagaatgtccgaagagtgtcttgtgaacatgattaagttctgagtgactgactggttgactgcttccaaatctcatgcatgttaccacaagatttgaagcttggatgcatacatccaaccgatgctggaaaaagaggtcgcggcagtttccccttctcctctcttccaccgccccttttgagagtcgctcatccccggctggcccgatctgatgcctcgtccgtcggcgacgctggctggcgatggctgctggaaaaagaggtcgcggcagtttccccttctcctctcttccaccgcccccttttgagagtcactcatccccggccggcccgatctggtgcctcgtccgtcggcgatgctggctggcgatggctgaggagaggtccctggttcttccatatgtatattagagtagcagtagacttagttagacttggctttatgccgtggtgtggcctcatgccagtcgggatacctgctgctagaccttgtgagcagagtctggtggtggctgtgattcacacttatatttgagcttaaagtctgagtgtataccgaattaggcttttccttcgatcggtttatgtcagagttcacactac

SEQ ID NO: 18930 - protein, 233 aa, Triticum aestivum
  peptide (1)..(233): Ceres Seq. ID no. 13589017
  misc_feature (67)..(225): Pfam Name: DUF789 Pfam Description: Protein of unknown function
  misc_feature (67)..(233): NCBI GI NO: 34914654 NR Description: P0504D03.18
  misc_feature (2)..(35): NCBI GI NO: 34914654 NR Description: P0504D03.18
  misc_feature (27)..(228): NCBI GI NO: 18379188 NR Description: expressed protein [Arabidopsis thaliana]
  misc_feature (33)..(228): NCBI GI NO: 22329567 NR Description: expressed protein [Arabidopsis thaliana]
  misc_feature (33)..(230): NCBI GI NO: 34897254 NR Description: hypothetical protein
  misc_feature (74)..(233): NCBI GI NO: 22327664 NR Description: expressed protein [Arabidopsis thaliana]
  misc_feature (74)..(233): NCBI GI NO: 10177151 NR Description: gb|AAF31026
  misc_feature (35)..(227): NCBI GI NO: 15450996 NR Description: Unknown protein [Arabidopsis thaliana]
  misc_feature (35)..(232): NCBI GI NO: 34394268 NR Description: hypothetical protein
  misc_feature (28)..(233): NCBI GI NO: 18958013 NR Description: At1g03610/F21B7_13 [Arabidopsis thaliana]
MMGTAVDLGRRQGDSRFYDAARARRGHHHGLPKSRHMMDDSDEDFRDSSSDGSSDYEHVRAKHFAQEGFSRDVGESGVTHGRLLFQYLEFDSPFCREPFTDKISSLSARFPGLRTLRSCDLSARSWMSIAWYPIYRIPTGPTLKDLDACFLTFHQLSNCPQGDNLWAPDSTPNIPLPVFGLASYKFSNSVWSSTDGDWKLASCLRQAAADWLRDSRAGHPDYQFFVSRGAYNR

SEQ ID NO: 18931 - protein, 232 aa, Triticum aestivum
  peptide (1)..(232): Ceres Seq. ID no. 13589018
  misc_feature (66)..(224): Pfam Name: DUF789 Pfam Description: Protein of unknown function
  misc_feature (66)..(232): NCBI GI NO: 34914654 NR Description: P0504D03.18
  misc_feature (1)..(34): NCBI GI NO: 34914654 NR Description: P0504D03.18
  misc_feature (26)..(227): NCBI GI NO: 18379188 NR Description: expressed protein [Arabidopsis thaliana]
  misc_feature (32)..(227): NCBI GI NO: 22329567 NR Description: expressed protein [Arabidopsis thaliana]
  misc_feature (32)..(229): NCBI GI NO: 34897254 NR Description: hypothetical protein
  misc_feature (73)..(232): NCBI GI NO: 22327664 NR Description: expressed protein [Arabidopsis thaliana]
  misc_feature (73)..(232): NCBI GI NO: 10177151 NR Description: gb|AAF31026
  misc_feature (34)..(226): NCBI GI NO: 15450996 NR Description: Unknown protein [Arabidopsis thaliana]
  misc_feature (34)..(231): NCBI GI NO: 34394268 NR Description: hypothetical protein
  misc_feature (27)..(232): NCBI GI NO: 18958013 NR Description: At1g03610/F21B7_13 [Arabidopsis thaliana]
MGTAVDLGRRQGDSRFYDAARARRGHHHGLPKSRHMMDDSDEDFRDSSSDGSSDYEHVRAKHFAQEGFSRDVGESGVTHGRLLFQYLEFDSPFCREPFTDKISSLSARFPGLRTLRSCDLSARSWMSIAWYPIYRIPTGPTLKDLDACFLTFHQLSNCPQGDNLWAPDSTPNIPLPVFGLASYKFSNSVWSSTDGDWKLASCLRQAAADWLRDSRAGHPDYQFFVSRGAYNR

SEQ ID NO: 18932 - protein, 197 aa, Triticum aestivum
  peptide (1)..(197): Ceres Seq. ID no. 13589019
  misc_feature (31)..(189): Pfam Name: DUF789 Pfam Description: Protein of unknown function
  misc_feature (31)..(197): NCBI GI NO: 34914654 NR Description: P0504D03.18
  misc_feature (1)..(192): NCBI GI NO: 18379188 NR Description: expressed protein [Arabidopsis thaliana]
  misc_feature (1)..(192): NCBI GI NO: 22329567 NR Description: expressed protein [Arabidopsis thaliana]
  misc_feature (1)..(194): NCBI GI NO: 34897254 NR Description: hypothetical protein
  misc_feature (38)..(197): NCBI GI NO: 22327664 NR Description: expressed protein [Arabidopsis thaliana]
  misc_feature (38)..(197): NCBI GI NO: 10177151 NR Description: gb|AAF31026
  misc_feature (1)..(191): NCBI GI NO: 15450996 NR Description: Unknown protein [Arabidopsis thaliana]
  misc_feature (1)..(196): NCBI GI NO: 34394268 NR Description: hypothetical protein
  misc_feature (1)..(197): NCBI GI NO: 18958013 NR Description: At1g03610/F21B7_13 [Arabidopsis thaliana]
  misc_feature (1)..(197): NCBI GI NO: 9280648 NR Description: F21B7.22 [Arabidopsis thaliana]
MMDDSDEDFRDSSSDGSSDYEHVRAKHFAQEGFSRDVGESGVTHGRLLFQYLEFDSPFCREPFTDKISSLSARFPGLRTLRSCDLSARSWMSIAWYPIYRIPTGPTLKDLDACFLTFHQLSNCPQGDNLWAPDSTPNIPLPVFGLASYKFSNSVWSSTDGDWKLASCLRQAAADWLRDSRAGHPDYQFFVSRGAYNR

SEQ ID NO: 18933 - DNA, 1257 bp, Triticum aestivum
  misc_feature (1)..(1257): Ceres Seq. ID no. 13596048
acaacaaccagcgcagcgagcaccacagacaccaagaatctttcacacagtctcacgcacgcagagccagtcgcacattttcggcgatggaggtgacccccaaccacacgcaggccgtgagcgggtgggcggccatggagccctccggcgaggtggtgcccttcgccttcaagcgccgggagaacggcgtggacgacgtcaccatcaaggtgcactactgcggcatgtgccacaccgacctccacttcatcaacaacgactggggcatcaccatgtaccccctcgtgcccggccacgagatcaccggcgttgtcacccgcgtcggcgccaacgtctccggcttccgccccggcgaccgcgtcggcgtcggctgcatcgccgcctcctgcctcgactgcgaccactgccgccgctccgaggagaactactgcgacaaggtcgcgctcacctacaacggcatcttctgggacggcagcgtcacctacggcggctactccagcatgctcgtcgcgcacaagcgcttcctcgtgcgcatcccggacgccctcccgctggacgccgccgcgccgctgctgtgcgccgggatcaccgtgtacagccccatgaagcagcacgggatgcttcaggctggcaggaggctcggcgtggtcgggctgggcgggctcggccacgtcgccgtcaagttcggcaaggcgttcgggctcaaggtcaccgtcatcagcacgtcgccggccaaggagcgggaggcgagggagagcctcaaggccgacgacttcgtcctcagcaccgacgagaagcagatgcaggccatggctcggagcctggactacgtgatcgacacggtgtcggcgcagcactcgctggggcccatcctggagctgctcaaggtgaacgggaagctggtgctggtggcggcgccggacaagcccgtggagctgccgtccttcccgctcatcttcgggaagaggacggtgagcgggagcatgacaggcggcatgaaggagacgcaggagatgatggacctgtgcggggagcacggcatcaccgctgacatcgagctcgtctccaccgatgggatcaacgacgcgttggccaggctcgcacgcaacgacgtccgctaccgcttcgtcgtcgacgttgccgggagtggctccaggctctagctgtttgtttaaattattggtgatttggacgcatggttcaacgtagattctgggcttctgtcagaaagaaagcatgggtacctgtttcattttc

SEQ ID NO: 18934 - protein, 386 aa, Triticum aestivum
  peptide (1)..(386): Ceres Seq. ID no. 15221749
  misc_feature (29)..(386): NCBI GI NO: 38344562 NR Description: OSJNBa0065B15.8
  misc_feature (41)..(386): NCBI GI NO: 10720088 NR Description: Probable mannitol dehydrogenase
  misc_feature (35)..(382): NCBI GI NO: 2146727 NR Description: cinnamyl-alcohol dehydrogenase (EC 1
  misc_feature (35)..(382): NCBI GI NO: 15235022 NR Description: mannitol dehydrogenase, putative
  misc_feature (35)..(385): NCBI GI NO: 22475166 NR Description: putative sinapyl alcohol dehydrogenase
  misc_feature (35)..(382): NCBI GI NO: 1168728 NR Description: Probable mannitol dehydrogenase
  misc_feature (35)..(382): NCBI GI NO: 21592964 NR Description: cinnamyl-alcohol dehydrogenase CAD1
  misc_feature (41)..(382): NCBI GI NO: 3913193 NR Description: Probable mannitol dehydrogenase 1
  misc_feature (35)..(382): NCBI GI NO: 14279694 NR Description: sinapyl alcohol dehydrogenase
  misc_feature (29)..(382): NCBI GI NO: 10720093 NR Description: Probable mannitol dehydrogenase
NNQRSEHHRHQESFTQSHARRASRTFSAMEVTPNHTQAVSGWAAMEPSGEVVPFAFKRRENGVDDVTIKVHYCGMCHTDLHFINNDWGITMYPLVPGHEITGVVTRVGANVSGFRPGDRVGVGCIAASCLDCDHCRRSEENYCDKVALTYNGIFWDGSVTYGGYSSMLVAHKRFLVRIPDALPLDAAAPLLCAGITVYSPMKQHGMLQAGRRLGVVGLGGLGHVAVKFGKAFGLKVTVISTSPAKEREARESLKADDFVLSTDEKQMQAMARSLDYVIDTVSAQHSLGPILELLKVNGKLVLVAAPDKPVELPSFPLIFGKRTVSGSMTGGMKETQEMMDLCGEHGITADIELVSTDGINDALARLARNDVRYRFVVDVAGSGSRL

SEQ ID NO: 18935 - protein, 358 aa, Triticum aestivum
  peptide (1)..(358): Ceres Seq. ID no. 15221750
  misc_feature (1)..(358): NCBI GI NO: 38344562 NR Description: OSJNBa0065B15.8
  misc_feature (13)..(358): NCBI GI NO: 10720088 NR Description: Probable mannitol dehydrogenase
  misc_feature (7)..(354): NCBI GI NO: 2146727 NR Description: cinnamyl-alcohol dehydrogenase (EC 1
  misc_feature (7)..(354): NCBI GI NO: 15235022 NR Description: mannitol dehydrogenase, putative
  misc_feature (7)..(357): NCBI GI NO: 22475166 NR Description: putative sinapyl alcohol dehydrogenase
  misc_feature (7)..(354): NCBI GI NO: 1168728 NR Description: Probable mannitol dehydrogenase
  misc_feature (7)..(354): NCBI GI NO: 21592964 NR Description: cinnamyl-alcohol dehydrogenase CAD1
  misc_feature (13)..(354): NCBI GI NO: 3913193 NR Description: Probable mannitol dehydrogenase 1
  misc_feature (7)..(354): NCBI GI NO: 14279694 NR Description: sinapyl alcohol dehydrogenase
  misc_feature (1)..(354): NCBI GI NO: 10720093 NR Description: Probable mannitol dehydrogenase
MEVTPNHTQAVSGWAAMEPSGEVVPFAFKRRENGVDDVTIKVHYCGMCHTDLHFINNDWGITMYPLVPGHEITGVVTRVGANVSGFRPGDRVGVGCIAASCLDCDHCRRSEENYCDKVALTYNGIFWDGSVTYGGYSSMLVAHKRFLVRIPDALPLDAAAPLLCAGITVYSPMKQHGMLQAGRRLGVVGLGGLGHVAVKFGKAFGLKVTVISTSPAKEREARESLKADDFVLSTDEKQMQAMARSLDYVIDTVSAQHSLGPILELLKVNGKLVLVAAPDKPVELPSFPLIFGKRTVSGSMTGGMKETQEMMDLCGEHGITADIELVSTDGINDALARLARNDVRYRFVVDVAGSGSRL

SEQ ID NO: 18936 - protein, 349 aa, Triticum aestivum
  peptide (1)..(349): Ceres Seq. ID no. 15221751
QQPAQRAPQTPRIFHTVSRTQSQSHIFGDGGDPQPHAGRERVGGHGALRRGGALRLQAPGERRGRRHHQGALLRHVPHRPPLHQQRLGHHHVPPRARPRDHRRCHPRRRQRLRLPPRRPRRRRLHRRLLPRLRPLPPLRGELLRQGRAHLQRHLLGRQRHLRRLLQHARRAQALPRAHPGRPPAGRRRAAAVRRDHRVQPHEAARDASGWQEARRGRAGRARPRRRQVRQGVRAQGHRHQHVAGQGAGGEGEPQGRRLRPQHRREADAGHGSEPGLRDRHGVGAALAGAHPGAAQGEREAGAGGGAGQARGAAVLPAHLREEDGEREHDRRHEGDAGDDGPVRGARHHR

SEQ ID NO: 18937 - DNA, 595 bp, Triticum aestivum
  misc_feature (1)..(595): Ceres Seq. ID no. 13596190
aaaagacggagcggcggactctcctgcaatacatactccgccgccgccgccgccgccgccgcgatgcttctcttccacaagcaactgttctcgctccgtctcccagcttcacccgtgatcttctctctccgtcgggccctcttgtccacctcggcggccaccgacgccccgccggccccattcgccgtcgacgactacctcgtcaccacctgcggcctcacgccggagcaagccctcaaggccgccaagcacgtctcccactgcaagtccacctccaacgccgagtccgtcctcgcctacctcgccggccccaccctccgcttctccaaggccgacatcgcccacatcgtcgcccgcgacccgcggatcctcaactgcagcgtcgacgacaccctcaaggcccgcgtcgccatcttacgcggctatggcctctccgaagaccacgtccggaccttcctccgcatgacccccggcgtcttccgctccgtcagcatccaggagaagctcgggttctggttgcccttcctggggtcgccggagaagttcatccgcatcctcaagggcaactattacctgctcacgtcggacctcgagc

SEQ ID NO: 18938 - protein, 198 aa, Triticum aestivum
  peptide (1)..(198): Ceres Seq. ID no. 13596191
KRRSGGLSCNTYSAAAAAAAAMLLFHKQLFSLRLPASPVIFSLRRALLSTSAATDAPPAPFAVDDYLVTTCGLTPEQALKAAKHVSHCKSTSNAESVLAYLAGPTLRFSKADIAHIVARDPRILNCSVDDTLKARVAILRGYGLSEDHVRTFLRMTPGVFRSVSIQEKLGFWLPFLGSPEKFIRILKGNYYLLTSDLE

SEQ ID NO: 18939 - protein, 197 aa, Triticum aestivum
  peptide (1)..(197): Ceres Seq. ID no. 13596192
  misc_feature (16)..(192): NCBI GI NO: 30684163 NR Description: proline-rich protein -related
KTERRTLLQYILRRRRRRRRDASLPQATVLAPSPSFTRDLLSPSGPLVHLGGHRRPAGPIRRRRLPRHHLRPHAGASPQGRQARLPLQVHLQRRVRPRLPRRPHPPLLQGRHRPHRRPRPADPQLQRRRHPQGPRRHLTRLWPLRRPRPDLPPHDPRRLPLRQHPGEARVLVALPGVAGEVHPHPQGQLLPAHVGPR

SEQ ID NO: 18940 - protein, 177 aa, Triticum aestivum
  peptide (1)..(177): Ceres Seq. ID no. 13596193
MLLFHKQLFSLRLPASPVIFSLRRALLSTSAATDAPPAPFAVDDYLVTTCGLTPEQALKAAKHVSHCKSTSNAESVLAYLAGPTLRFSKADIAHIVARDPRILNCSVDDTLKARVAILRGYGLSEDHVRTFLRMTPGVFRSVSIQEKLGFWLPFLGSPEKFIRILKGNYYLLTSDLE

SEQ ID NO: 18941 - DNA, 1488 bp, Triticum aestivum
  misc_feature (1)..(1488): Ceres Seq. ID no. 13596194
gaccctaaaccattcctcttctccacttcccctatcccttctttgctcgtggaaaaagctcgacctgctaatggcggcggcggcggacttcacgcagagcaagcaggccatgtcgtacgcgctctgcaagcacctgaacctcgatccgaatagcatatccagtacacttatcaaggagaatgatattgcgagcctattctcacatatcgtgacctcaccgcaggatgaggtcaagaagtgggttgagttctccagcaattttgttctaagtgatggagaacagcatgcattacttggtaatttgaatcaacatttgtcccagatgtcggtactattagctggtttcaaaccatcagcggcggacattattgtgtttgcaaccgtgcatgttttcatgtgtcatcttagtgacagtgagttgcagaaatatccaaatatattgcggtggatggactacattcagaatgttgttgattttggtatgacactgcaaaagataaacttgacgaaatctatcttcaacccacctgcacctgcaccttctcacccaaagaaagctgataaaggagatggtgatccaaattccaagaaagctgtttcaggacagaaggttgcggataagtcagatgtagctgctgactccaaaaaggctgcaggggagaataaggttcctggggataaggcaaatcctacttctaccaaaaacaacaaaccttctggggataaaaagaaagtccaagagaagactgccggcaaaacagaggcagctgcagagaaagctccacagaaaagtgcagaaaaggattctgagtgcagtgttagtatcctgaatatacaggtcggagttattcgcaaagcatggaaacatccatcagctgacagtcttctggtggaggagatagatttgggagatggcaatgtgcgtcaagttgttagtggtcttgcgaagttcttcagcccagatgaacttgttaatcgccatgttgtcttgatcacgaatgtgaagcctgggaagctgcgcgatgtaatgtctgctggattggtcttgtgtgcttcaaataaagatcatacagtcgtggagcctttgattcctccggaaggtgccaagcttggagaacgcatttcttttgctgggtttgatgggaagccggaagatgttctaaacccaaagaagaaacaattggacaagataacacctcatctccgtaccgacgagaatggaattgcaacgttccgaggggtaccattcactacatcagccggtctgtgtagatcctcagttccgaatgccgatgttaagtgagcaactcgttaagcatgctgatttcaaacattgatgtgctaagacacatgcagatgtaccattttgtcgtaatgcacatattaaatgttaccatatgttaacagagttgtcagttcttgacttttaatatctgaaaacaaattttgttttgtctatgcgcaaaaaggaaaaaaatggccctgatg

SEQ ID NO: 18942 - protein, 433 aa, Triticum aestivum
  peptide (1)..(433): Ceres Seq. ID no. 13596195
  misc_feature (278)..(373): Pfam Name: Pfam Description:  Putative tRNA binding domain
  misc_feature (23)..(433): NCBI GI NO: 34907808 NR Description: similar to methionyl-tRNA synthetase
  misc_feature (203)..(433): NCBI GI NO: 18405465 NR Description: methionyl-tRNA synthetase -related
  misc_feature (203)..(433): NCBI GI NO: 25408718 NR Description: probable methionyl-tRNA synthetase
  misc_feature (58)..(432): NCBI GI NO: 4140277 NR Description: aminoacyl-tRNA synthetase cofactor
  misc_feature (203)..(433): NCBI GI NO: 15236350 NR Description: methionyl-tRNA synthetase - like protein
  misc_feature (200)..(433): NCBI GI NO: 12230649 NR Description: Probable methionyl-tRNA synthetase
  misc_feature (228)..(433): NCBI GI NO: 34860578 NR Description: endothelial monocyte activating polypeptide 2
  misc_feature (228)..(433): NCBI GI NO: 6679639 NR Description: small inducible cytokine subfamily E, member 1
  misc_feature (202)..(423): NCBI GI NO: 28302254 NR Description: Similar to small inducible cytokine subfamily E
  misc_feature (232)..(433): NCBI GI NO: 26352830 NR Description: unnamed protein product [Mus musculus]
TLNHSSSPLPLSLLCSWKKLDLLMAAAADFTQSKQAMSYALCKHLNLDPNSISSTLIKENDIASLFSHIVTSPQDEVKKWVEFSSNFVLSDGEQHALLGNLNQHLSQMSVLLAGFKPSAADIIVFATVHVFMCHLSDSELQKYPNILRWMDYIQNVVDFGMTLQKINLTKSIFNPPAPAPSHPKKADKGDGDPNSKKAVSGQKVADKSDVAADSKKAAGENKVPGDKANPTSTKNNKPSGDKKKVQEKTAGKTEAAAEKAPQKSAEKDSECSVSILNIQVGVIRKAWKHPSADSLLVEEIDLGDGNVRQVVSGLAKFFSPDELVNRHVVLITNVKPGKLRDVMSAGLVLCASNKDHTVVEPLIPPEGAKLGERISFAGFDGKPEDVLNPKKKQLDKITPHLRTDENGIATFRGVPFTTSAGLCRSSVPNADVK

SEQ ID NO: 18943 - protein, 410 aa, Triticum aestivum
  peptide (1)..(410): Ceres Seq. ID no. 13596196
  misc_feature (255)..(350): Pfam Name: Pfam Description:  Putative tRNA binding domain
  misc_feature (1)..(410): NCBI GI NO: 34907808 NR Description: similar to methionyl-tRNA synthetase
  misc_feature (180)..(410): NCBI GI NO: 18405465 NR Description: methionyl-tRNA synthetase -related
  misc_feature (180)..(410): NCBI GI NO: 25408718 NR Description: probable methionyl-tRNA synthetase
  misc_feature (35)..(409): NCBI GI NO: 4140277 NR Description: aminoacyl-tRNA synthetase cofactor
  misc_feature (180)..(410): NCBI GI NO: 15236350 NR Description: methionyl-tRNA synthetase - like protein
  misc_feature (177)..(410): NCBI GI NO: 12230649 NR Description: Probable methionyl-tRNA synthetase
  misc_feature (205)..(410): NCBI GI NO: 34860578 NR Description: endothelial monocyte activating polypeptide 2
  misc_feature (205)..(410): NCBI GI NO: 6679639 NR Description: small inducible cytokine subfamily E, member 1
  misc_feature (179)..(400): NCBI GI NO: 28302254 NR Description: Similar to small inducible cytokine subfamily E
  misc_feature (209)..(410): NCBI GI NO: 26352830 NR Description: unnamed protein product [Mus musculus]
MAAAADFTQSKQAMSYALCKHLNLDPNSISSTLIKENDIASLFSHIVTSPQDEVKKWVEFSSNFVLSDGEQHALLGNLNQHLSQMSVLLAGFKPSAADIIVFATVHVFMCHLSDSELQKYPNILRWMDYIQNVVDFGMTLQKINLTKSIFNPPAPAPSHPKKADKGDGDPNSKKAVSGQKVADKSDVAADSKKAAGENKVPGDKANPTSTKNNKPSGDKKKVQEKTAGKTEAAAEKAPQKSAEKDSECSVSILNIQVGVIRKAWKHPSADSLLVEEIDLGDGNVRQVVSGLAKFFSPDELVNRHVVLITNVKPGKLRDVMSAGLVLCASNKDHTVVEPLIPPEGAKLGERISFAGFDGKPEDVLNPKKKQLDKITPHLRTDENGIATFRGVPFTTSAGLCRSSVPNADVK

SEQ ID NO: 18944 - protein, 397 aa, Triticum aestivum
  peptide (1)..(397): Ceres Seq. ID no. 13596197
  misc_feature (242)..(337): Pfam Name: Pfam Description:  Putative tRNA binding domain
  misc_feature (1)..(397): NCBI GI NO: 34907808 NR Description: similar to methionyl-tRNA synthetase
  misc_feature (167)..(397): NCBI GI NO: 18405465 NR Description: methionyl-tRNA synthetase -related
  misc_feature (167)..(397): NCBI GI NO: 25408718 NR Description: probable methionyl-tRNA synthetase
  misc_feature (22)..(396): NCBI GI NO: 4140277 NR Description: aminoacyl-tRNA synthetase cofactor
  misc_feature (167)..(397): NCBI GI NO: 15236350 NR Description: methionyl-tRNA synthetase - like protein
  misc_feature (164)..(397): NCBI GI NO: 12230649 NR Description: Probable methionyl-tRNA synthetase
  misc_feature (192)..(397): NCBI GI NO: 34860578 NR Description: endothelial monocyte activating polypeptide 2
  misc_feature (192)..(397): NCBI GI NO: 6679639 NR Description: small inducible cytokine subfamily E, member 1
  misc_feature (166)..(387): NCBI GI NO: 28302254 NR Description: Similar to small inducible cytokine subfamily E
  misc_feature (196)..(397): NCBI GI NO: 26352830 NR Description: unnamed protein product [Mus musculus]
MSYALCKHLNLDPNSISSTLIKENDIASLFSHIVTSPQDEVKKWVEFSSNFVLSDGEQHALLGNLNQHLSQMSVLLAGFKPSAADIIVFATVHVFMCHLSDSELQKYPNILRWMDYIQNVVDFGMTLQKINLTKSIFNPPAPAPSHPKKADKGDGDPNSKKAVSGQKVADKSDVAADSKKAAGENKVPGDKANPTSTKNNKPSGDKKKVQEKTAGKTEAAAEKAPQKSAEKDSECSVSILNIQVGVIRKAWKHPSADSLLVEEIDLGDGNVRQVVSGLAKFFSPDELVNRHVVLITNVKPGKLRDVMSAGLVLCASNKDHTVVEPLIPPEGAKLGERISFAGFDGKPEDVLNPKKKQLDKITPHLRTDENGIATFRGVPFTTSAGLCRSSVPNADVK

SEQ ID NO: 18945 - DNA, 1367 bp, Triticum aestivum
  misc_feature (1)..(1367): Ceres Seq. ID no. 13596198
ccaacgcacaccaaacaaaaacaacaacaacaagatcaccggcgcatcccatcccagagcaaccacacacgcagacaagcaagaatggcgatcgccgtgagcgggcaatggactcgcctgcggacgctcggctgcggcgcgtcgggggccgtggtcaccctggcggccgacgccgcgtcgggggagctgttcgcggtcaagtccgtgcgcgcggcggacgcggcgcagctgagccgggagcaggggatcctctccgggctctcctcgccgcacgtcgtgggctgcatcggcggcggcggcgaccgcgacggctcctaccacctcttcctcgagttcgcccccggcggctcgctcgccgacgaggccgcgaggaatgggggccgcctggaggagcgcgccatccgggcgtacgcggcggacgtcctgcgcgggctcgcctacatccacggcaagtcgctcgtgcacggcgacgtcaagtcgaggaacgtagtgatcggcgccgacgggcgcgccatgatcgccgacttcgggtgcgcgagggccctcggttcggccgggccgatcggaggcacgccggcgttcatggccccggaggtggcacgaggcgaagagcaggggccggccgccgacgtgtgggctctcggctgcacggtcgtcgagatggccaccgggcgcgccccgtggggcgagatggacaacgtccttgccgccgtccaccggattgggtacacggacgccgtgccggaggtgccgacgtggctgtcagcggaggcgaagagtttcctcgccatgtgcttcgcgaggaacgcccgcgaccggtgcacggcggcgcagctcctggagcacccgttcgtggcattgcaggcaggagaggccaaggccaggtgggtgtctcccaagagcacgctcgacgcagcattctgggaatcggagaccgacgaggaagaggaggaggaggaggaggtttcggagagcccgtccgagaggatcaagtcattgtcgtgctccgtcttgccggactgggactccgacgaaggctggatcgacgtgctcggcgagcagtgcgaagcttgcgattcaccagcagcaaccaaggggccagctgatgtgtccagcagggcgccaagcaaagtgctcgggtccccggcggtgccagctgaagacgtagctgtcgtcggcaccctttcaagtgatgaacatgaagtggacgcagaggatgagcctttcggtgacgataccatcctggccgctgatccttcggtggaccgccagaaccaagtgtgttcgagctcagatagagatgtactttcatcatcacatgtaccctgtaataatcgagttcttgcaatagaaaagtttcgttttcc

SEQ ID NO: 18946 - protein, 455 aa, Triticum aestivum
  peptide (1)..(455): Ceres Seq. ID no. 13596199
  misc_feature (37)..(285): Pfam Name: Pfam Description:  Protein kinase domain
  misc_feature (29)..(436): NCBI GI NO: 34911466 NR Description: NPK1-related protein kinase-like protein
  misc_feature (29)..(394): NCBI GI NO: 34911472 NR Description: NPK1-related protein kinase-like protein
  misc_feature (36)..(389): NCBI GI NO: 34911474 NR Description: NPK1-related protein kinase-like protein
  misc_feature (36)..(362): NCBI GI NO: 34911476 NR Description: NPK1-related protein kinase-like protein
  misc_feature (30)..(378): NCBI GI NO: 37530786 NR Description: putative NPK1-related protein kinase
  misc_feature (35)..(439): NCBI GI NO: 37530788 NR Description: putative NPK1-related protein kinase
  misc_feature (158)..(345): NCBI GI NO: 19110337 NR Description: NPK1-related protein kinase-like protein
  misc_feature (36)..(334): NCBI GI NO: 15225692 NR Description: protein kinase family [Arabidopsis thaliana]
  misc_feature (37)..(334): NCBI GI NO: 15236903 NR Description: protein kinase family [Arabidopsis thaliana]
  misc_feature (37)..(334): NCBI GI NO: 19423926 NR Description: unknown protein [Arabidopsis thaliana]
PTHTKQKQQQQDHRRIPSQSNHTRRQARMAIAVSGQWTRLRTLGCGASGAVVTLAADAASGELFAVKSVRAADAAQLSREQGILSGLSSPHVVGCIGGGGDRDGSYHLFLEFAPGGSLADEAARNGGRLEERAIRAYAADVLRGLAYIHGKSLVHGDVKSRNVVIGADGRAMIADFGCARALGSAGPIGGTPAFMAPEVARGEEQGPAADVWALGCTVVEMATGRAPWGEMDNVLAAVHRIGYTDAVPEVPTWLSAEAKSFLAMCFARNARDRCTAAQLLEHPFVALQAGEAKARWVSPKSTLDAAFWESETDEEEEEEEEVSESPSERIKSLSCSVLPDWDSDEGWIDVLGEQCEACDSPAATKGPADVSSRAPSKVLGSPAVPAEDVAVVGTLSSDEHEVDAEDEPFGDDTILAADPSVDRQNQVCSSSDRDVLSSSHVPCNNRVLAIEKFRF

SEQ ID NO: 18947 - protein, 427 aa, Triticum aestivum
  peptide (1)..(427): Ceres Seq. ID no. 13596200
  misc_feature (9)..(257): Pfam Name: Pfam Description:  Protein kinase domain
  misc_feature (1)..(408): NCBI GI NO: 34911466 NR Description: NPK1-related protein kinase-like protein
  misc_feature (1)..(366): NCBI GI NO: 34911472 NR Description: NPK1-related protein kinase-like protein
  misc_feature (8)..(361): NCBI GI NO: 34911474 NR Description: NPK1-related protein kinase-like protein
  misc_feature (8)..(334): NCBI GI NO: 34911476 NR Description: NPK1-related protein kinase-like protein
  misc_feature (2)..(350): NCBI GI NO: 37530786 NR Description: putative NPK1-related protein kinase
  misc_feature (7)..(411): NCBI GI NO: 37530788 NR Description: putative NPK1-related protein kinase
  misc_feature (130)..(317): NCBI GI NO: 19110337 NR Description: NPK1-related protein kinase-like protein
  misc_feature (8)..(306): NCBI GI NO: 15225692 NR Description: protein kinase family [Arabidopsis thaliana]
  misc_feature (9)..(306): NCBI GI NO: 15236903 NR Description: protein kinase family [Arabidopsis thaliana]
  misc_feature (9)..(306): NCBI GI NO: 19423926 NR Description: unknown protein [Arabidopsis thaliana]
MAIAVSGQWTRLRTLGCGASGAVVTLAADAASGELFAVKSVRAADAAQLSREQGILSGLSSPHVVGCIGGGGDRDGSYHLFLEFAPGGSLADEAARNGGRLEERAIRAYAADVLRGLAYIHGKSLVHGDVKSRNVVIGADGRAMIADFGCARALGSAGPIGGTPAFMAPEVARGEEQGPAADVWALGCTVVEMATGRAPWGEMDNVLAAVHRIGYTDAVPEVPTWLSAEAKSFLAMCFARNARDRCTAAQLLEHPFVALQAGEAKARWVSPKSTLDAAFWESETDEEEEEEEEVSESPSERIKSLSCSVLPDWDSDEGWIDVLGEQCEACDSPAATKGPADVSSRAPSKVLGSPAVPAEDVAVVGTLSSDEHEVDAEDEPFGDDTILAADPSVDRQNQVCSSSDRDVLSSSHVPCNNRVLAIEKFRF

SEQ ID NO: 18948 - protein, 367 aa, Triticum aestivum
  peptide (1)..(367): Ceres Seq. ID no. 13596201
NAHQTKTTTTRSPAHPIPEQPHTQTSKNGDRRERAMDSPADARLRRVGGRGHPGGRRRVGGAVRGQVRARGGRGAAEPGAGDPLRALLAARRGLHRRRRRPRRLLPPLPRVRPRRLARRRGREEWGPPGGARHPGVRGGRPARARLHPRQVARARRRQVEERSDRRRRARHDRRLRVREGPRFGRADRRHAGVHGPGGGTRRRAGAGRRRVGSRLHGRRDGHRARPVGRDGQRPCRRPPDWVHGRRAGGADVAVSGGEEFPRHVLREERPRPVHGGAAPGAPVRGIAGRRGQGQVGVSQEHARRSILGIGDRRGRGGGGGGFGEPVREDQVIVVLRLAGLGLRRRLDRRARRAVRSLRFTSSNQGAS

SEQ ID NO: 18949 - DNA, 1492 bp, Triticum aestivum
  misc_feature (1)..(1492): Ceres Seq. ID no. 13596202
ctcctcaattcggaggaagcgagggctcgcgcccgatcgggttggtggctcgccgcgatggcgaccgacgccggcgccgccgacaggagctccgtcttccgcaagctccgcgccaaatccgacaataagatgtgcttcgactgcaacgccaagaaccccacctgggcctccgttacctacggcgtcttcctctgcatcgactgctccgccgtccaccgcagcctcggcgtccacgtctccttcgtcaggtcaacaaatttggattcatggaccccagaacagttgaaaatgatggtttatgggggaaacaaccgtgcacaagctttctttaagcagcatggttggactgatggtggaaagatcgaggcaaagtacacttcaagagctgctgacttatacagacagttgctcctcaaagaggtttctaaaagttcgacagaagatggcaataatagtgggccgccctccccagtcgcagcttctcagacttcaagccaagcagctgcatttcctgatttcaaactggtagaggtgccgaaagaagttgtgaatgagcctgagtctgaaattattcgttcacctaaagctcctacccattcattcaagaagccaatcggtggaaagaagcctggaagtaagactggtggacttggtgcgcgcaagcttacgacaaagccaagtgaaagcctctatgagcagaaacctgaagagccagctcctgccctgccatcggtggctgaaagcactacagctaggagcaaatctcatacttcccgatttgaatatgtggaaaatgtaccttctgctgggagcagctctgcggaaaaccaggcatttgggcatgttgcgcccccaaagtcttcaaactttttcggtgaatatgggatggacagtggatatcacaagaaatctacttctggtgcatccaaaatgcaggttgaggaaagtagtgaagcaagacagaagttctcaaatgcaaagtctatttcatcttctcagtttttcggtgatcaaaccaatttagaaaaagagggccaaatctccctccaaaaattctctgggtcctctgccatttcaagtgctgatctgtttggccaacaagcgaacaattctaatgcggatctgagtgcttcggatttgatcaacagaatctccttccaggccactcaggacttgacctctctcaagagcatggctgggcagactgggaagaagctgacatctatggcgtccaacatcatatctgatcttgatcggatcctctgagctgaatttacatatcacaggtcttcgatggtccgcctctcctgattgttactgcatgacaacagatttgtggtggtggctctgtatatgagtccataggaatcttaaaacttaaactcggtagagaaagaatgaggattttatcacaaatgctttctggctaaagtcgtaatagcatttggagtttcgtggggaaaaaaaaaaaaaaaaagcttatcgataccgt

SEQ ID NO: 18950 - protein, 421 aa, Triticum aestivum
  peptide (1)..(421): Ceres Seq. ID no. 15221798
  misc_feature (30)..(146): Pfam Name: Pfam Description:  Putative GTPase activating protein for Arf
  misc_feature (20)..(421): NCBI GI NO: 37537094 NR Description: unknown protein
  misc_feature (20)..(421): NCBI GI NO: 29126345 NR Description: putative zinc finger protein
  misc_feature (17)..(421): NCBI GI NO: 13430530 NR Description: unknown protein [Arabidopsis thaliana]
  misc_feature (17)..(421): NCBI GI NO: 7487780 NR Description: hypothetical protein T6K21
  misc_feature (17)..(421): NCBI GI NO: 18414983 NR Description: ARF GTPase-activating domain-containing protein
  misc_feature (20)..(421): NCBI GI NO: 15237500 NR Description: ARF GTPase-activating domain-containing protein
  misc_feature (28)..(413): NCBI GI NO: 18403775 NR Description: ARF GTPase-activating domain-containing protein
  misc_feature (22)..(149): NCBI GI NO: 37362182 NR Description: ADP-ribosylation factor GTPase activating protein 3
  misc_feature (301)..(419): NCBI GI NO: 37362182 NR Description: ADP-ribosylation factor GTPase activating protein 3
  misc_feature (20)..(282): NCBI GI NO: 12844436 NR Description: unnamed protein product [Mus musculus]
LLNSEEARARARSGWWLAAMATDAGAADRSSVFRKLRAKSDNKMCFDCNAKNPTWASVTYGVFLCIDCSAVHRSLGVHVSFVRSTNLDSWTPEQLKMMVYGGNNRAQAFFKQHGWTDGGKIEAKYTSRAADLYRQLLLKEVSKSSTEDGNNSGPPSPVAASQTSSQAAAFPDFKLVEVPKEVVNEPESEIIRSPKAPTHSFKKPIGGKKPGSKTGGLGARKLTTKPSESLYEQKPEEPAPALPSVAESTTARSKSHTSRFEYVENVPSAGSSSAENQAFGHVAPPKSSNFFGEYGMDSGYHKKSTSGASKMQVEESSEARQKFSNAKSISSSQFFGDQTNLEKEGQISLQKFSGSSAISSADLFGQQANNSNADLSASDLINRISFQATQDLTSLKSMAGQTGKKLTSMASNIISDLDRIL

SEQ ID NO: 18951 - protein, 402 aa, Triticum aestivum
  peptide (1)..(402): Ceres Seq. ID no. 15221799
  misc_feature (11)..(127): Pfam Name: Pfam Description:  Putative GTPase activating protein for Arf
  misc_feature (1)..(402): NCBI GI NO: 37537094 NR Description: unknown protein
  misc_feature (1)..(402): NCBI GI NO: 29126345 NR Description: putative zinc finger protein
  misc_feature (1)..(402): NCBI GI NO: 13430530 NR Description: unknown protein [Arabidopsis thaliana]
  misc_feature (1)..(402): NCBI GI NO: 7487780 NR Description: hypothetical protein T6K21
  misc_feature (1)..(402): NCBI GI NO: 18414983 NR Description: ARF GTPase-activating domain-containing protein
  misc_feature (1)..(402): NCBI GI NO: 15237500 NR Description: ARF GTPase-activating domain-containing protein
  misc_feature (9)..(394): NCBI GI NO: 18403775 NR Description: ARF GTPase-activating domain-containing protein
  misc_feature (3)..(130): NCBI GI NO: 37362182 NR Description: ADP-ribosylation factor GTPase activating protein 3
  misc_feature (282)..(400): NCBI GI NO: 37362182 NR Description: ADP-ribosylation factor GTPase activating protein 3
  misc_feature (1)..(263): NCBI GI NO: 12844436 NR Description: unnamed protein product [Mus musculus]
MATDAGAADRSSVFRKLRAKSDNKMCFDCNAKNPTWASVTYGVFLCIDCSAVHRSLGVHVSFVRSTNLDSWTPEQLKMMVYGGNNRAQAFFKQHGWTDGGKIEAKYTSRAADLYRQLLLKEVSKSSTEDGNNSGPPSPVAASQTSSQAAAFPDFKLVEVPKEVVNEPESEIIRSPKAPTHSFKKPIGGKKPGSKTGGLGARKLTTKPSESLYEQKPEEPAPALPSVAESTTARSKSHTSRFEYVENVPSAGSSSAENQAFGHVAPPKSSNFFGEYGMDSGYHKKSTSGASKMQVEESSEARQKFSNAKSISSSQFFGDQTNLEKEGQISLQKFSGSSAISSADLFGQQANNSNADLSASDLINRISFQATQDLTSLKSMAGQTGKKLTSMASNIISDLDRIL

SEQ ID NO: 18952 - protein, 378 aa, Triticum aestivum
  peptide (1)..(378): Ceres Seq. ID no. 15221800
  misc_feature (1)..(103): Pfam Name: Pfam Description:  Putative GTPase activating protein for Arf
  misc_feature (1)..(378): NCBI GI NO: 37537094 NR Description: unknown protein
  misc_feature (1)..(378): NCBI GI NO: 29126345 NR Description: putative zinc finger protein
  misc_feature (1)..(378): NCBI GI NO: 13430530 NR Description: unknown protein [Arabidopsis thaliana]
  misc_feature (1)..(378): NCBI GI NO: 7487780 NR Description: hypothetical protein T6K21
  misc_feature (1)..(378): NCBI GI NO: 18414983 NR Description: ARF GTPase-activating domain-containing protein
  misc_feature (1)..(378): NCBI GI NO: 15237500 NR Description: ARF GTPase-activating domain-containing protein
  misc_feature (1)..(370): NCBI GI NO: 18403775 NR Description: ARF GTPase-activating domain-containing protein
  misc_feature (1)..(106): NCBI GI NO: 37362182 NR Description: ADP-ribosylation factor GTPase activating protein 3
  misc_feature (258)..(376): NCBI GI NO: 37362182 NR Description: ADP-ribosylation factor GTPase activating protein 3
  misc_feature (1)..(239): NCBI GI NO: 12844436 NR Description: unnamed protein product [Mus musculus]
MCFDCNAKNPTWASVTYGVFLCIDCSAVHRSLGVHVSFVRSTNLDSWTPEQLKMMVYGGNNRAQAFFKQHGWTDGGKIEAKYTSRAADLYRQLLLKEVSKSSTEDGNNSGPPSPVAASQTSSQAAAFPDFKLVEVPKEVVNEPESEIIRSPKAPTHSFKKPIGGKKPGSKTGGLGARKLTTKPSESLYEQKPEEPAPALPSVAESTTARSKSHTSRFEYVENVPSAGSSSAENQAFGHVAPPKSSNFFGEYGMDSGYHKKSTSGASKMQVEESSEARQKFSNAKSISSSQFFGDQTNLEKEGQISLQKFSGSSAISSADLFGQQANNSNADLSASDLINRISFQATQDLTSLKSMAGQTGKKLTSMASNIISDLDRIL

SEQ ID NO: 18953 - DNA, 1341 bp, Triticum aestivum
  misc_feature (1)..(1341): Ceres Seq. ID no. 14313548
atttctgttaggatgcgtatctgagtttgttattcctttttctgtttctgttaagcgtggcaggaggcgaggcggaggaggaggagaagatagagacgcaacccacgcgcggctagctagggtttgttccatctcccccctctctcgctcgctccctctctctcccgaggagcggaggaaggcggagggccggaggaggaagagaggcgggggatgtcgtcgtcgaactcgccgtgcgcggcgtgcaagctgctgaggcgcaagtgcacgcaggggtgcgtgttcgcgccctacttcccgccggaccagccggccaagttcgccaacgtgcacaaggtgttcggcgccagcaacgtctccaagctgctcaacgagatccccgtggcgcagcgggaggacgccgtcaactcgctcgcctacgaggccgaggcgcgcctgcgcgaccccgtctacggctgcgtcgcctacatctccgtcctccagctcaagatcaagcaggtgcgcgaggagatcgccaacgcgcgcaaggagctcgccggctacatcggccaggcagcctacgcgcccgtcgtccccgtgcagcacccccacgcgcagtacgccgccgccggcatgggcctcgtccagccccacccgcacccgcaccagcagatggcgatgcagcagcagcagcacccgtaccaccagcagcagatcgccgaggcgcagcacctggcggccgtcgtcgaggtggcgcgcgccgggcagcagcagcagcagcagcagcatcaccaccagcaccagcagcacgagatgatgatgatgcgccagacctacgccaacgtccacggcggggccgccgccgggccaacggtggccgtcgagcctccccagcaggccgcggcctacgacggcaccgccccgttcctcatccagcagcaagcgtcgccttccgccctgacctaccgcatggaggagccgtccccgccgccgcagtcctcgggccactcccacgtcgacatgtcccacgcgtcgcagcagcagcgtcatcagcacacggacggcagcgacgaggggagcgggggcgccccgacggcctgatggccatgctcccgcctccttcgcctccctgtgtcgatatttcccccctagctttttttccacggtttctttgatgttcgtttgttgggcacgagtcttttcgtcttcttgatcatatgatatcgaactggcatcgccatggctccccggaaagcatatccatggctcccggaggcggacaagctggtgatcttgctcaagcatatccatggcacactcagaacgatgtcactgttgcattagtttgtgtttggattcatc

SEQ ID NO: 18954 - protein, 288 aa, Triticum aestivum
  peptide (1)..(288): Ceres Seq. ID no. 14313549
  misc_feature (7)..(107): Pfam Name: Pfam Description:  Protein of unknown function DUF260
  misc_feature (1)..(272): NCBI GI NO: 15240110 NR Description: lateral organ boundaries (LOB) domain family
  misc_feature (4)..(179): NCBI GI NO: 15227870 NR Description: lateral organ boundaries (LOB) domain family
  misc_feature (2)..(151): NCBI GI NO: 15218746 NR Description: lateral organ boundaries
  misc_feature (4)..(232): NCBI GI NO: 34907508 NR Description: B1099D03.24
  misc_feature (1)..(112): NCBI GI NO: 21618134 NR Description: unknown [Arabidopsis thaliana]
  misc_feature (2)..(147): NCBI GI NO: 15242624 NR Description: lateral organ boundaries (LOB) protein
  misc_feature (1)..(112): NCBI GI NO: 9294470 NR Description: gb|AAB60912
  misc_feature (1)..(112): NCBI GI NO: 18405472 NR Description: lateral organ boundaries
  misc_feature (1)..(112): NCBI GI NO: 29427827 NR Description: LOB domain protein 25
  misc_feature (4)..(122): NCBI GI NO: 34896184 NR Description: contains ESTs C98868
MSSSNSPCAACKLLRRKCTQGCVFAPYFPPDQPAKFANVHKVFGASNVSKLLNEIPVAQREDAVNSLAYEAEARLRDPVYGCVAYISVLQLKIKQVREEIANARKELAGYIGQAAYAPVVPVQHPHAQYAAAGMGLVQPHPHPHQQMAMQQQQHPYHQQQIAEAQHLAAVVEVARAGQQQQQQQHHHQHQQHEMMMMRQTYANVHGGAAAGPTVAVEPPQQAAAYDGTAPFLIQQQASPSALTYRMEEPSPPPQSSGHSHVDMSHASQQQRHQHTDGSDEGSGGAPTA

SEQ ID NO: 18955 - protein, 155 aa, Triticum aestivum
  peptide (1)..(155): Ceres Seq. ID no. 14313550
  misc_feature (6)..(155): Pfam Name: Pfam Description:  Atrophin-1 family
  misc_feature (1)..(139): NCBI GI NO: 15240110 NR Description: lateral organ boundaries (LOB) domain family
  misc_feature (1)..(46): NCBI GI NO: 15227870 NR Description: lateral organ boundaries (LOB) domain family
  misc_feature (1)..(18): NCBI GI NO: 15218746 NR Description: lateral organ boundaries
  misc_feature (1)..(99): NCBI GI NO: 34907508 NR Description: B1099D03.24
  misc_feature (1)..(14): NCBI GI NO: 15242624 NR Description: lateral organ boundaries (LOB) protein
  misc_feature (1)..(22): NCBI GI NO: 18405401 NR Description: lateral organ boundaries (LOB) domain family
  misc_feature (1)..(25): NCBI GI NO: 15230971 NR Description: lateral organ boundaries
  misc_feature (1)..(20): NCBI GI NO: 29428042 NR Description: LOB domain protein 17
MGLVQPHPHPHQQMAMQQQQHPYHQQQIAEAQHLAAVVEVARAGQQQQQQQHHHQHQQHEMMMMRQTYANVHGGAAAGPTVAVEPPQQAAAYDGTAPFLIQQQASPSALTYRMEEPSPPPQSSGHSHVDMSHASQQQRHQHTDGSDEGSGGAPTA

SEQ ID NO: 18956 - DNA, 1491 bp, Triticum aestivum
  misc_feature (1)..(1491): Ceres Seq. ID no. 13596203
aacatcctaatcgaaaaatcaagggttttcctcctctcctctcctctcatagccttcgccgcttcaccgctgctgccttccctccctcgcaagcctcctccgcgtcgccgccgcccgcccgcccgatccgccatggcttccgacccgaacaaagattccaaatcggaggggctgtctgaggcaaaaaagggggcttccccgacagctggtgcaggccttcccagtccttttgatttttccaacatgagcagcttgcttaatgatccatctataagggagatggctgagcaaatcgccagcgaccctgtattcaaccagatggctgagcagcttcagaaaagtgcgcagggtgcaggggaacagggtgttccaaatttggatcctcaagcatacatggaaaccatgacacaagttatgcagaatcctcagtttatgtcaatggcggagcgtcttgggaatactcttatgcaggatcctgcaatgtccagtatgcttgagaacttgactagtccagctcacaaagagcagcttgaagagcgaatggcccgtatcaaggatgatccgtctttgaagccaattcttgatgagatagagcgtggtggtccatctgcaatggtgaagtactggaatgaccctgagattcttcaaaagattggccaggctatgtcattgaacttcccagtagatgctgctacttccactgtactatctggacctcaagaaactgatgaagaaggcgaggatgatgatgagtccattgtccataacaccgccagtgtcggtgatgcagagggtctgaagaaagcattagatggtggagcaaacaaggatgaagaagatttggagggaagaagggccttgcattttgcatgtggatacggcgagttgaagtgtgcagaaatccttctggaggcaggcgctgcagttgacgcactggataagaacaagaacaccccgctgcactatgccgctggatacggtcggaaggaatgcgtggatcttctcttgaagcacggcgctgctgtcacgctccaaaatctggatgggaagacccccatcgaggtggccaagctcaacagccagggcgaggtggtgaagctgcttgagcaggacgtgttcctatgaagcaaaaccctcagacccgccgcccatcgatcctaaaactctccctttggttcgggactctcggcggtgtcatatcctggcatggtgttggttgctttccctcggtttacttagttggtagctctcgcatgtaacctgtgtggccttgcggtgctacttaacaagagtccatcttctccgttggtttgatcctgctgtgcaaccctgttcttggtccatctccatgcacgggggatatgggttcgctgtgggagatgtcaggggtgatgatgattgcgtatatacccctttcgtgaatatttcttggtgttgaaaatgatacgtgaggtgcaaattttgtttaatctgttgtttaggctttctgct

SEQ ID NO: 18957 - protein, 374 aa, Triticum aestivum
  peptide (1)..(374): Ceres Seq. ID no. 13596204
  misc_feature (315)..(347): Pfam Name: Pfam Description:  Ankyrin repeat
  misc_feature (46)..(374): NCBI GI NO: 13310811 NR Description: ankyrin-repeat protein HBP1 [Nicotiana tabacum]
  misc_feature (46)..(374): NCBI GI NO: 24637568 NR Description: ankyrin domain protein [Nicotiana tabacum]
  misc_feature (47)..(374): NCBI GI NO: 29826242 NR Description: TGB12K interacting protein 2 [Nicotiana tabacum]
  misc_feature (47)..(374): NCBI GI NO: 29826244 NR Description: TGB12K interacting protein 3 [Nicotiana tabacum]
  misc_feature (50)..(374): NCBI GI NO: 27573339 NR Description: unknown protein
  misc_feature (46)..(374): NCBI GI NO: 15237008 NR Description: ankyrin repeat-containing protein 2
  misc_feature (37)..(374): NCBI GI NO: 38175562 NR Description: putative ankyrin domain protein
  misc_feature (46)..(374): NCBI GI NO: 3478700 NR Description: AFT protein [Arabidopsis thaliana]
  misc_feature (46)..(374): NCBI GI NO: 4205079 NR Description: ankyrin repeat-containing protein 2
  misc_feature (77)..(374): NCBI GI NO: 30690372 NR Description: ankyrin repeat-containing protein 2
NILIEKSRVFLLSSPLIAFAASPLLPSLPRKPPPRRRRPPARSAMASDPNKDSKSEGLSEAKKGASPTAGAGLPSPFDFSNMSSLLNDPSIREMAEQIASDPVFNQMAEQLQKSAQGAGEQGVPNLDPQAYMETMTQVMQNPQFMSMAERLGNTLMQDPAMSSMLENLTSPAHKEQLEERMARIKDDPSLKPILDEIERGGPSAMVKYWNDPEILQKIGQAMSLNFPVDAATSTVLSGPQETDEEGEDDDESIVHNTASVGDAEGLKKALDGGANKDEEDLEGRRALHFACGYGELKCAEILLEAGAAVDALDKNKNTPLHYAAGYGRKECVDLLLKHGAAVTLQNLDGKTPIEVAKLNSQGEVVKLLEQDVFL

SEQ ID NO: 18958 - protein, 330 aa, Triticum aestivum
  peptide (1)..(330): Ceres Seq. ID no. 13596205
  misc_feature (271)..(303): Pfam Name: Pfam Description:  Ankyrin repeat
  misc_feature (2)..(330): NCBI GI NO: 13310811 NR Description: ankyrin-repeat protein HBP1 [Nicotiana tabacum]
  misc_feature (2)..(330): NCBI GI NO: 24637568 NR Description: ankyrin domain protein [Nicotiana tabacum]
  misc_feature (3)..(330): NCBI GI NO: 29826242 NR Description: TGB12K interacting protein 2 [Nicotiana tabacum]
  misc_feature (3)..(330): NCBI GI NO: 29826244 NR Description: TGB12K interacting protein 3 [Nicotiana tabacum]
  misc_feature (6)..(330): NCBI GI NO: 27573339 NR Description: unknown protein
  misc_feature (2)..(330): NCBI GI NO: 15237008 NR Description: ankyrin repeat-containing protein 2
  misc_feature (1)..(330): NCBI GI NO: 38175562 NR Description: putative ankyrin domain protein
  misc_feature (2)..(330): NCBI GI NO: 3478700 NR Description: AFT protein [Arabidopsis thaliana]
  misc_feature (2)..(330): NCBI GI NO: 4205079 NR Description: ankyrin repeat-containing protein 2
  misc_feature (33)..(330): NCBI GI NO: 30690372 NR Description: ankyrin repeat-containing protein 2
MASDPNKDSKSEGLSEAKKGASPTAGAGLPSPFDFSNMSSLLNDPSIREMAEQIASDPVFNQMAEQLQKSAQGAGEQGVPNLDPQAYMETMTQVMQNPQFMSMAERLGNTLMQDPAMSSMLENLTSPAHKEQLEERMARIKDDPSLKPILDEIERGGPSAMVKYWNDPEILQKIGQAMSLNFPVDAATSTVLSGPQETDEEGEDDDESIVHNTASVGDAEGLKKALDGGANKDEEDLEGRRALHFACGYGELKCAEILLEAGAAVDALDKNKNTPLHYAAGYGRKECVDLLLKHGAAVTLQNLDGKTPIEVAKLNSQGEVVKLLEQDVFL

SEQ ID NO: 18959 - protein, 293 aa, Triticum aestivum
  peptide (1)..(293): Ceres Seq. ID no. 13596206
  misc_feature (234)..(266): Pfam Name: Pfam Description:  Ankyrin repeat
  misc_feature (1)..(293): NCBI GI NO: 13310811 NR Description: ankyrin-repeat protein HBP1 [Nicotiana tabacum]
  misc_feature (1)..(293): NCBI GI NO: 24637568 NR Description: ankyrin domain protein [Nicotiana tabacum]
  misc_feature (1)..(293): NCBI GI NO: 29826242 NR Description: TGB12K interacting protein 2 [Nicotiana tabacum]
  misc_feature (1)..(293): NCBI GI NO: 29826244 NR Description: TGB12K interacting protein 3 [Nicotiana tabacum]
  misc_feature (1)..(293): NCBI GI NO: 27573339 NR Description: unknown protein
  misc_feature (1)..(293): NCBI GI NO: 15237008 NR Description: ankyrin repeat-containing protein 2
  misc_feature (1)..(293): NCBI GI NO: 38175562 NR Description: putative ankyrin domain protein
  misc_feature (1)..(293): NCBI GI NO: 3478700 NR Description: AFT protein [Arabidopsis thaliana]
  misc_feature (1)..(293): NCBI GI NO: 4205079 NR Description: ankyrin repeat-containing protein 2
  misc_feature (1)..(293): NCBI GI NO: 30690372 NR Description: ankyrin repeat-containing protein 2
MSSLLNDPSIREMAEQIASDPVFNQMAEQLQKSAQGAGEQGVPNLDPQAYMETMTQVMQNPQFMSMAERLGNTLMQDPAMSSMLENLTSPAHKEQLEERMARIKDDPSLKPILDEIERGGPSAMVKYWNDPEILQKIGQAMSLNFPVDAATSTVLSGPQETDEEGEDDDESIVHNTASVGDAEGLKKALDGGANKDEEDLEGRRALHFACGYGELKCAEILLEAGAAVDALDKNKNTPLHYAAGYGRKECVDLLLKHGAAVTLQNLDGKTPIEVAKLNSQGEVVKLLEQDVFL

SEQ ID NO: 18960 - DNA, 1539 bp, Triticum aestivum
  misc_feature (1)..(1539): Ceres Seq. ID no. 14303635
atctttctctctccccctctctcccacagcacatgcgcgtcgcccgccgacacccgcacccacagcagccagagcagcagcggcagcaatggagcatcggggcctgcttctcgtcctcgccgccgcgctgtgcctcgcgggcgccgccgacgccaggcacgccaagaagtcgtaccaggccgtcttcagcttcggggactcgctctccgacgccggcaacctcatcgtcgacggcatccccaaggccctcaccaccgcgcgcgcgccctacggcatgaccttcttcggccgccccaccggccgctgctccaacggccgcgtcgtcgtcgacttcctcgccgagcatttcgggctgccgctgccgccggcgtcgcaggcgcatggcaaggacttcaagaagggggccaacttcgccatcaccggcgccacggcgctggagtactccttcttcaaggcgcatggcatcgaccagcgcatttggaacaccggctccatcaacacccagatcggctggctccagaagatgaagccgtcgctttgcaagtcggagaaagagtgcaaggactacttcagcaagtccctgtttgtggtgggagagtttggggggaacgactacaacgctcctctcttctccggcgtcgccttctccgatgtgaagacctacgtgccgctggtcgccaaagccatcgccaacggcgtcgagaaattgatcgagcttggcgcgacagacctgttggtgcctggaattcttccgatcgggtgcttcccattgtacctgactctctacaacagcagcaagaagtcggactacaacgcgcgcaccgggtgcctccggagatacaaccgcctggccttccaccacaacagagagctcaagcagcagcttgaccagcttcagaagaagtacccaaagacgaaaatcatgtacggcgattacttcaaagctgcaatgcagtttgtcgtcagccccgggaaattcggtttcagcacggcagtgcaggcatgctgcggcgccggagggtcgggcgcctacaacttcaacctgaagaagaagtgcggcgaggcgggcgcgagcgtgtgctccaacccgtcggcgtacgtgagctgggacggcatccacatgaccgaggccgcctaccgcatggtcgccaacggctggctgaatggcccctatgcctctcccccgatcatgaagtgaaaatccagatggttagccctgtatgtacgtaacgttgctgctgctgctgctgatgatgatgatgatggaggggatcgacggatatgcagagcgcttcaggcgctggagatgttaagttatgatgatgggtaaaatcgctcagtctgttcgttgagagtttgtataaaccgtgccggtatagatatgtttttccagctgaaaagctctagtagtacacatgtacgtaccttgtatgacatgctacctgattcttattcatttaccaagacttgcataagaataaattattaaatattatggaagcaagaggatcagaattgtgcgtttgcgcttcctgaacc

SEQ ID NO: 18961 - protein, 398 aa, Triticum aestivum
  peptide (1)..(398): Ceres Seq. ID no. 14303636
  misc_feature (61)..(386): Pfam Name: Pfam Description:  GDSL-like Lipase/Acylhydrolase
  misc_feature (36)..(397): NCBI GI NO: 34903956 NR Description: OSJNBa0038J17.23
  misc_feature (38)..(398): NCBI GI NO: 34903958 NR Description: OSJNBa0038J17.24
  misc_feature (44)..(397): NCBI GI NO: 34903978 NR Description: unnamed protein product
  misc_feature (35)..(397): NCBI GI NO: 34903996 NR Description: unnamed protein product
  misc_feature (35)..(394): NCBI GI NO: 15242538 NR Description: GDSL-motif lipase/hydrolase protein
  misc_feature (35)..(394): NCBI GI NO: 21553708 NR Description: GDSL-motif lipase/hydrolase-like protein
  misc_feature (7)..(395): NCBI GI NO: 10764858 NR Description: F1K23.17 [Arabidopsis thaliana]
  misc_feature (57)..(395): NCBI GI NO: 10764858 NR Description: F1K23.17 [Arabidopsis thaliana]
  misc_feature (56)..(398): NCBI GI NO: 25336243 NR Description: pnrotein F1K23.16
  misc_feature (58)..(238): NCBI GI NO: 34912612 NR Description: P0046B10.23
SFSLPLSPTAHARRPPTPAPTAARAAAAAMEHRGLLLVLAAALCLAGAADARHAKKSYQAVFSFGDSLSDAGNLIVDGIPKALTTARAPYGMTFFGRPTGRCSNGRVVVDFLAEHFGLPLPPASQAHGKDFKKGANFAITGATALEYSFFKAHGIDQRIWNTGSINTQIGWLQKMKPSLCKSEKECKDYFSKSLFVVGEFGGNDYNAPLFSGVAFSDVKTYVPLVAKAIANGVEKLIELGATDLLVPGILPIGCFPLYLTLYNSSKKSDYNARTGCLRRYNRLAFHHNRELKQQLDQLQKKYPKTKIMYGDYFKAAMQFVVSPGKFGFSTAVQACCGAGGSGAYNFNLKKKCGEAGASVCSNPSAYVSWDGIHMTEAAYRMVANGWLNGPYASPPIMK

SEQ ID NO: 18962 - protein, 369 aa, Triticum aestivum
  peptide (1)..(369): Ceres Seq. ID no. 14303637
  misc_feature (32)..(357): Pfam Name: Pfam Description:  GDSL-like Lipase/Acylhydrolase
  misc_feature (7)..(368): NCBI GI NO: 34903956 NR Description: OSJNBa0038J17.23
  misc_feature (9)..(369): NCBI GI NO: 34903958 NR Description: OSJNBa0038J17.24
  misc_feature (15)..(368): NCBI GI NO: 34903978 NR Description: unnamed protein product
  misc_feature (6)..(368): NCBI GI NO: 34903996 NR Description: unnamed protein product
  misc_feature (6)..(365): NCBI GI NO: 15242538 NR Description: GDSL-motif lipase/hydrolase protein
  misc_feature (6)..(365): NCBI GI NO: 21553708 NR Description: GDSL-motif lipase/hydrolase-like protein
  misc_feature (1)..(366): NCBI GI NO: 10764858 NR Description: F1K23.17 [Arabidopsis thaliana]
  misc_feature (28)..(366): NCBI GI NO: 10764858 NR Description: F1K23.17 [Arabidopsis thaliana]
  misc_feature (27)..(369): NCBI GI NO: 25336243 NR Description: pnrotein F1K23.16
  misc_feature (29)..(209): NCBI GI NO: 34912612 NR Description: P0046B10.23
MEHRGLLLVLAAALCLAGAADARHAKKSYQAVFSFGDSLSDAGNLIVDGIPKALTTARAPYGMTFFGRPTGRCSNGRVVVDFLAEHFGLPLPPASQAHGKDFKKGANFAITGATALEYSFFKAHGIDQRIWNTGSINTQIGWLQKMKPSLCKSEKECKDYFSKSLFVVGEFGGNDYNAPLFSGVAFSDVKTYVPLVAKAIANGVEKLIELGATDLLVPGILPIGCFPLYLTLYNSSKKSDYNARTGCLRRYNRLAFHHNRELKQQLDQLQKKYPKTKIMYGDYFKAAMQFVVSPGKFGFSTAVQACCGAGGSGAYNFNLKKKCGEAGASVCSNPSAYVSWDGIHMTEAAYRMVANGWLNGPYASPPIMK

SEQ ID NO: 18963 - protein, 307 aa, Triticum aestivum
  peptide (1)..(307): Ceres Seq. ID no. 14303638
  misc_feature (1)..(295): Pfam Name: Pfam Description:  GDSL-like Lipase/Acylhydrolase
  misc_feature (1)..(306): NCBI GI NO: 34903956 NR Description: OSJNBa0038J17.23
  misc_feature (1)..(307): NCBI GI NO: 34903958 NR Description: OSJNBa0038J17.24
  misc_feature (1)..(306): NCBI GI NO: 34903978 NR Description: unnamed protein product
  misc_feature (1)..(306): NCBI GI NO: 34903996 NR Description: unnamed protein product
  misc_feature (1)..(303): NCBI GI NO: 15242538 NR Description: GDSL-motif lipase/hydrolase protein
  misc_feature (1)..(303): NCBI GI NO: 21553708 NR Description: GDSL-motif lipase/hydrolase-like protein
  misc_feature (1)..(304): NCBI GI NO: 10764858 NR Description: F1K23.17 [Arabidopsis thaliana]
  misc_feature (1)..(304): NCBI GI NO: 10764858 NR Description: F1K23.17 [Arabidopsis thaliana]
  misc_feature (1)..(307): NCBI GI NO: 25336243 NR Description: pnrotein F1K23.16
  misc_feature (1)..(147): NCBI GI NO: 34912612 NR Description: P0046B10.23
MTFFGRPTGRCSNGRVVVDFLAEHFGLPLPPASQAHGKDFKKGANFAITGATALEYSFFKAHGIDQRIWNTGSINTQIGWLQKMKPSLCKSEKECKDYFSKSLFVVGEFGGNDYNAPLFSGVAFSDVKTYVPLVAKAIANGVEKLIELGATDLLVPGILPIGCFPLYLTLYNSSKKSDYNARTGCLRRYNRLAFHHNRELKQQLDQLQKKYPKTKIMYGDYFKAAMQFVVSPGKFGFSTAVQACCGAGGSGAYNFNLKKKCGEAGASVCSNPSAYVSWDGIHMTEAAYRMVANGWLNGPYASPPIMK

SEQ ID NO: 18964 - DNA, 1267 bp, Triticum aestivum
  misc_feature (1)..(1267): Ceres Seq. ID no. 13596208
aaccatcgttcacccccaattccaccttcacctctctccaccgccggcgtccggcgaccgccgcttgccggcctaccggcgatggaccgcgcatccacttgatggatccgtcggcggcagggcctgcgccaccacgggccgccccgggcagaggggcggacccagcggagcggcgcaggcggtggtgcgggatcacagtccgcggggccctcgtgatgctcttccccatcgccgtgtcattcctcttctcctttatcttcggcatcgctggcctcctcctcggcgggctctcctccaacgcgtccgtctccatgccctccacctgccgcatcctctctaccggcctggacattcggtcatctaaggtttgcgagcttggactgttgaactataaagctaagcatgtattttacccctcgagtaatcgaagattccgctgccatgatgactattactgggcttcggtttttgaggttgaatacacagaatatttttctggtcaaacatcttatgcaatggcagaagctccaaaagaggctcttcctcacaattgccggcctgattttggtgctgtatggtcaacaacagcaaagttcaaggtcaatgaatcatacaagtgcaggtacacactggggagtaccaaagctgacatttgttcagacaagctattcaattgcactgctgagaatccttcaataattgaaatgctgaaaaggatttttgtactgttttcaaagttctgcaagtcaaaagatttcagttcgtggtggatgcttggatatgcggcagcaggggtcgtggcgggcgtgctgagttccatactcatcacaatagcagtaagaatcctgcgaggagtgttccttgctgccgccaggcgggctgtgagaaaccatagcatcagggtgtttgcttaccgtttcaagcgggcgtgccttcttgttgcgtatatatctttcgttggctggatcaccttgcagtacagcaaaatggttgggttgaaggagcttgtgctggacttcaaactcttggagaggttcttgtaaaatgtaaacgggtttcggcaatgtatgtcaaataagccgatccccttgtgtgatgtaacctagtgtaacttatcctgccttgcttcgatatgcagccgcccatgaacaggtggatgaatcatgggtagctagtagctacagtgggcatggagtaactcccatctgttgtaacctgcaatgcaacatgtatcacaatcatcgtaatgacagtttggggggcttgg

SEQ ID NO: 18965 - protein, 346 aa, Triticum aestivum
  peptide (1)..(346): Ceres Seq. ID no. 13596209
  misc_feature (34)..(346): NCBI GI NO: 38345775 NR Description: OSJNBa0083N12.13
  misc_feature (56)..(330): NCBI GI NO: 21553578 NR Description: unknown [Arabidopsis thaliana]
  misc_feature (56)..(330): NCBI GI NO: 18415248 NR Description: expressed protein [Arabidopsis thaliana]
  misc_feature (94)..(330): NCBI GI NO: 7459450 NR Description: hypothetical protein T18B16
PSFTPNSTFTSLHRRRPATAACRPTGDGPRIHLMDPSAAGPAPPRAAPGRGADPAERRRRWCGITVRGALVMLFPIAVSFLFSFIFGIAGLLLGGLSSNASVSMPSTCRILSTGLDIRSSKVCELGLLNYKAKHVFYPSSNRRFRCHDDYYWASVFEVEYTEYFSGQTSYAMAEAPKEALPHNCRPDFGAVWSTTAKFKVNESYKCRYTLGSTKADICSDKLFNCTAENPSIIEMLKRIFVLFSKFCKSKDFSSWWMLGYAAAGVVAGVLSSILITIAVRILRGVFLAAARRAVRNHSIRVFAYRFKRACLLVAYISFVGWITLQYSKMVGLKELVLDFKLLERFL

SEQ ID NO: 18966 - protein, 313 aa, Triticum aestivum
  peptide (1)..(313): Ceres Seq. ID no. 13596210
  misc_feature (1)..(313): NCBI GI NO: 38345775 NR Description: OSJNBa0083N12.13
  misc_feature (23)..(297): NCBI GI NO: 21553578 NR Description: unknown [Arabidopsis thaliana]
  misc_feature (23)..(297): NCBI GI NO: 18415248 NR Description: expressed protein [Arabidopsis thaliana]
  misc_feature (61)..(297): NCBI GI NO: 7459450 NR Description: hypothetical protein T18B16
MDPSAAGPAPPRAAPGRGADPAERRRRWCGITVRGALVMLFPIAVSFLFSFIFGIAGLLLGGLSSNASVSMPSTCRILSTGLDIRSSKVCELGLLNYKAKHVFYPSSNRRFRCHDDYYWASVFEVEYTEYFSGQTSYAMAEAPKEALPHNCRPDFGAVWSTTAKFKVNESYKCRYTLGSTKADICSDKLFNCTAENPSIIEMLKRIFVLFSKFCKSKDFSSWWMLGYAAAGVVAGVLSSILITIAVRILRGVFLAAARRAVRNHSIRVFAYRFKRACLLVAYISFVGWITLQYSKMVGLKELVLDFKLLERFL

SEQ ID NO: 18967 - protein, 275 aa, Triticum aestivum
  peptide (1)..(275): Ceres Seq. ID no. 13596211
  misc_feature (1)..(275): NCBI GI NO: 38345775 NR Description: OSJNBa0083N12.13
  misc_feature (1)..(259): NCBI GI NO: 21553578 NR Description: unknown [Arabidopsis thaliana]
  misc_feature (1)..(259): NCBI GI NO: 18415248 NR Description: expressed protein [Arabidopsis thaliana]
  misc_feature (23)..(259): NCBI GI NO: 7459450 NR Description: hypothetical protein T18B16
MLFPIAVSFLFSFIFGIAGLLLGGLSSNASVSMPSTCRILSTGLDIRSSKVCELGLLNYKAKHVFYPSSNRRFRCHDDYYWASVFEVEYTEYFSGQTSYAMAEAPKEALPHNCRPDFGAVWSTTAKFKVNESYKCRYTLGSTKADICSDKLFNCTAENPSIIEMLKRIFVLFSKFCKSKDFSSWWMLGYAAAGVVAGVLSSILITIAVRILRGVFLAAARRAVRNHSIRVFAYRFKRACLLVAYISFVGWITLQYSKMVGLKELVLDFKLLERFL

SEQ ID NO: 18968 - DNA, 1154 bp, Triticum aestivum
  misc_feature (1)..(1154): Ceres Seq. ID no. 15227004
atccacacagcgctccgctctcataccccatcacgacattcacagtcgatcaagtcacaacccatgatgcaccgtgctacgatcatcgcgctgatctgctgcctcgtggccggcggcagggcgcgcgcacagccgttcgactacccggcggcgaggctctccacgacctgggccaacacggacgccgccctgccgcaccacgtcgtctacaccgacggctccgtggcgcgggccgccctgctgcggctcaacccggcgggcctcggcccctcctacgccttcggcttcttctgcaccgccagtcaaccgcgcggcaacggccccgcggccccgtgcacggagttcctgctcggcgtcgccgtcgtctactgcaacagcggcgcgggcatgacgttcgtcacggccggcgtcccgcaggtcgtctggtcggccaaccgcggcagccccgtcagtgagggcgccaccacggagctcacgccggagggcgacctggttctcaggtcgggccccggcggagcggtcttgtggtccaccggcaccaagggccggtccgtcgccggggcgcgcatcggcagcgacggcaacctggtgctgttcgacgggcgcaacgccacggtgtggcagtcgttcgaccaccccacgaacgcgctcctcgtcgggcagtctctgaagcacggcgcgcggctcaccgccaacgcgtcgacggcggactggcgcgacggcaggctctacctcgccgtggacgacgatggactgaacgcctacgtcaacgccacgccgccgcagcgctactaccacctcagcctcagcgagaccgcatccggcgcctacgcgacgtacaccaacggcagcctcacggtgtccgcccggcccggtgcgccgccgctggccgccatccagctgcccaccgtgggcgccggcacggtgcagtacatgcggctggagcacgacggccacctccggatctacgagtggcgctcgggctgggcgccggtgtacgacgtgctcaagtctgctacgacctgatgaatcctgagcaccatacatacatacatacatacatcaaggcatatggctatgtcctagaaaaatatgacacgaataaagttctgcgacatgtatgtacaaattccattatataaaaagaatgacag

SEQ ID NO: 18969 - protein, 341 aa, Triticum aestivum
  peptide (1)..(341): Ceres Seq. ID no. 15227005
  misc_feature (137)..(242): Pfam Name: Pfam Description:  D-mannose binding lectin
  misc_feature (22)..(336): NCBI GI NO: 34905752 NR Description: protein kinase-like
  misc_feature (28)..(337): NCBI GI NO: 38344588 NR Description: OSJNBa0079M09.4
  misc_feature (26)..(337): NCBI GI NO: 32489781 NR Description: OSJNBb0018A10.12
  misc_feature (17)..(337): NCBI GI NO: 32489780 NR Description: OSJNBb0018A10.11
  misc_feature (36)..(337): NCBI GI NO: 32489779 NR Description: OSJNBb0018A10.10
  misc_feature (62)..(336): NCBI GI NO: 38344585 NR Description: OSJNBa0079M09.1
  misc_feature (109)..(337): NCBI GI NO: 34903744 NR Description: unnamed protein product
  misc_feature (71)..(335): NCBI GI NO: 34903742 NR Description: unnamed protein product
  misc_feature (134)..(269): NCBI GI NO: 34921531 NR Description: Epidermis-specific secreted glyco protein EP1precursor
  misc_feature (141)..(323): NCBI GI NO: 27463662 NR Description: secreted glycoprotein [Linum usitatissimum]
IHTALRSHTPSRHSQSIKSQPMMHRATIIALICCLVAGGRARAQPFDYPAARLSTTWANTDAALPHHVVYTDGSVARAALLRLNPAGLGPSYAFGFFCTASQPRGNGPAAPCTEFLLGVAVVYCNSGAGMTFVTAGVPQVVWSANRGSPVSEGATTELTPEGDLVLRSGPGGAVLWSTGTKGRSVAGARIGSDGNLVLFDGRNATVWQSFDHPTNALLVGQSLKHGARLTANASTADWRDGRLYLAVDDDGLNAYVNATPPQRYYHLSLSETASGAYATYTNGSLTVSARPGAPPLAAIQLPTVGAGTVQYMRLEHDGHLRIYEWRSGWAPVYDVLKSATT

SEQ ID NO: 18970 - protein, 320 aa, Triticum aestivum
  peptide (1)..(320): Ceres Seq. ID no. 15227006
  misc_feature (116)..(221): Pfam Name: Pfam Description:  D-mannose binding lectin
  misc_feature (1)..(315): NCBI GI NO: 34905752 NR Description: protein kinase-like
  misc_feature (7)..(316): NCBI GI NO: 38344588 NR Description: OSJNBa0079M09.4
  misc_feature (5)..(316): NCBI GI NO: 32489781 NR Description: OSJNBb0018A10.12
  misc_feature (1)..(316): NCBI GI NO: 32489780 NR Description: OSJNBb0018A10.11
  misc_feature (15)..(316): NCBI GI NO: 32489779 NR Description: OSJNBb0018A10.10
  misc_feature (41)..(315): NCBI GI NO: 38344585 NR Description: OSJNBa0079M09.1
  misc_feature (88)..(316): NCBI GI NO: 34903744 NR Description: unnamed protein product
  misc_feature (50)..(314): NCBI GI NO: 34903742 NR Description: unnamed protein product
  misc_feature (113)..(248): NCBI GI NO: 34921531 NR Description: Epidermis-specific secreted glyco protein EP1precursor
  misc_feature (120)..(302): NCBI GI NO: 27463662 NR Description: secreted glycoprotein [Linum usitatissimum]
MMHRATIIALICCLVAGGRARAQPFDYPAARLSTTWANTDAALPHHVVYTDGSVARAALLRLNPAGLGPSYAFGFFCTASQPRGNGPAAPCTEFLLGVAVVYCNSGAGMTFVTAGVPQVVWSANRGSPVSEGATTELTPEGDLVLRSGPGGAVLWSTGTKGRSVAGARIGSDGNLVLFDGRNATVWQSFDHPTNALLVGQSLKHGARLTANASTADWRDGRLYLAVDDDGLNAYVNATPPQRYYHLSLSETASGAYATYTNGSLTVSARPGAPPLAAIQLPTVGAGTVQYMRLEHDGHLRIYEWRSGWAPVYDVLKSATT

SEQ ID NO: 18971 - protein, 319 aa, Triticum aestivum
  peptide (1)..(319): Ceres Seq. ID no. 15227007
  misc_feature (115)..(220): Pfam Name: Pfam Description:  D-mannose binding lectin
  misc_feature (1)..(314): NCBI GI NO: 34905752 NR Description: protein kinase-like
  misc_feature (6)..(315): NCBI GI NO: 38344588 NR Description: OSJNBa0079M09.4
  misc_feature (4)..(315): NCBI GI NO: 32489781 NR Description: OSJNBb0018A10.12
  misc_feature (1)..(315): NCBI GI NO: 32489780 NR Description: OSJNBb0018A10.11
  misc_feature (14)..(315): NCBI GI NO: 32489779 NR Description: OSJNBb0018A10.10
  misc_feature (40)..(314): NCBI GI NO: 38344585 NR Description: OSJNBa0079M09.1
  misc_feature (87)..(315): NCBI GI NO: 34903744 NR Description: unnamed protein product
  misc_feature (49)..(313): NCBI GI NO: 34903742 NR Description: unnamed protein product
  misc_feature (112)..(247): NCBI GI NO: 34921531 NR Description: Epidermis-specific secreted glyco protein EP1precursor
  misc_feature (119)..(301): NCBI GI NO: 27463662 NR Description: secreted glycoprotein [Linum usitatissimum]
MHRATIIALICCLVAGGRARAQPFDYPAARLSTTWANTDAALPHHVVYTDGSVARAALLRLNPAGLGPSYAFGFFCTASQPRGNGPAAPCTEFLLGVAVVYCNSGAGMTFVTAGVPQVVWSANRGSPVSEGATTELTPEGDLVLRSGPGGAVLWSTGTKGRSVAGARIGSDGNLVLFDGRNATVWQSFDHPTNALLVGQSLKHGARLTANASTADWRDGRLYLAVDDDGLNAYVNATPPQRYYHLSLSETASGAYATYTNGSLTVSARPGAPPLAAIQLPTVGAGTVQYMRLEHDGHLRIYEWRSGWAPVYDVLKSATT

SEQ ID NO: 18972 - DNA, 1621 bp, Triticum aestivum
  misc_feature (1)..(1621): Ceres Seq. ID no. 13596216
gtaagattaaacaacgccggagggagcggagaggggaaacaaaacaaaagccttgccttgctcctcctccgggcgggcgattcggctccggcgccgcaaggtgcttcgcttcgcttctcgccttgctccgatccttggcctgcccgcctcctccggccgtcgccgtcgtccccagggttcgctgctcggctccaagcaagctaggtcaattgctatatcagccacacttttaagcgttgaaggtcaccactagcccattggcttgatgggcgtcgaggagcaacatgtgcagcaaccagacagtgggggaaagcctgatgccgtcaagccaccaactccggtacacggtcataaaccgagcaacccccgtatatcaacctgcagcgccgacaaggacgacggcctctctctttgccgggtgtgccactgcgtggagcctgatctgagaggcgagtctgctctgggtttcctaggcattgtaccgccttcgccagacccctcggtcgacaaggacccaagcaatgacaccaccaaaacttccaccaccaaggatgctcccaagtttctcgagttcataagccccgagggggagatcttcaagtgcgccaccgacatcgaatcaggccatttgcagcggcaagacgatgtcgtgaacctcggatgctcttgcaagaatgagctcgccctcgcgcactacgcgtgcgcgctcaagtggttcatcagccacgggtccaccgtgtgcgagatttgcggaaatgtcgctacaaacgtgaggcccgaggatttcaacatggtgctcgcctccttgaaggactacgaagctctgagggaaaggacgtctaccggggatctctcctacttgcactacagggcggacgcgttcgtcgatccggtcgcccttgccgcagtacggagacagcggctttgtgagatatcatcatggttcaaccctcacaatacacatttcgtgttttctcagaggcacaatgaagaagtgccagttagcccaagtaataattctgtagactatagtgttacggctgcaagggcagcacatgcgaggcggaagtttgggagtagtggagcttttgttgctatcgctctgggttttgttcttcttgcatggtttgttgctccacatgttggcaagagagcggctgcaatcattcttcatatgcttctgggaggcctctgctcactgactataataatctcactaagatttgttagtcttcccgaggatccagtttgggtcgatacgatgctgggcgatcctgttcgtgtcctggttcctcgtgtttggagtgtgggcctctcgaacccgcaccgcccgccgcgcgtcatgatgatatcgagtgtgccctcagtcagtcgtcgtgaggaattaggaccgcgtcgcaagagtagcgtccacgagagcgttaggtaccgcacccctgtctatattcgccgcgagctataccatggacgtactattttttctttagctggagtatgtgagatgtacaacatgtttgggcaagaaaacaaggggagttatgttactgagtgttgtggtttcagacatagctggagtggtactggtctggccagtgttgcaaaacaatacagtaatgtgtgt

SEQ ID NO: 18973 - protein, 452 aa, Triticum aestivum
  peptide (1)..(452): Ceres Seq. ID no. 15221804
  misc_feature (113)..(162): Pfam Name: RING finger Pfam Description: Zinc finger, C3HC4 type
  misc_feature (33)..(353): NCBI GI NO: 38567835 NR Description: OSJNBb0020J19.13
  misc_feature (1)..(323): NCBI GI NO: 18415916 NR Description: zinc finger
  misc_feature (1)..(323): NCBI GI NO: 16209722 NR Description: AT5g63780/MBK5_26 [Arabidopsis thaliana]
  misc_feature (40)..(323): NCBI GI NO: 30697894 NR Description: zinc finger
  misc_feature (40)..(295): NCBI GI NO: 10177059 NR Description: gb|AAD32776
  misc_feature (302)..(322): NCBI GI NO: 10177059 NR Description: gb|AAD32776
  misc_feature (127)..(169): NCBI GI NO: 29725746 NR Description: hypothetical protein [Arabidopsis thaliana]
MGVEEQHVQQPDSGGKPDAVKPPTPVHGHKPSNPRISTCSADKDDGLSLCRVCHCVEPDLRGESALGFLGIVPPSPDPSVDKDPSNDTTKTSTTKDAPKFLEFISPEGEIFKCATDIESGHLQRQDDVVNLGCSCKNELALAHYACALKWFISHGSTVCEICGNVATNVRPEDFNMVLASLKDYEALRERTSTGDLSYLHYRADAFVDPVALAAVRRQRLCEISSWFNPHNTHFVFSQRHNEEVPVSPSNNSVDYSVTAARAAHARRKFGSSGAFVAIALGFVLLAWFVAPHVGKRAAAIILHMLLGGLCSLTIIISLRFVSLPEDPVWVDTMLGDPVRVLVPRVWSVGLSNPHRPPRVMMISSVPSVSRREELGPRRKSSVHESVRYRTPVYIRRELYHGRTIFSLAGVCEMYNMFGQENKGSYVTECCGFRHSWSGTGLASVAKQYSNVC

SEQ ID NO: 18974 - protein, 277 aa, Triticum aestivum
  peptide (1)..(277): Ceres Seq. ID no. 15221805
  misc_feature (1)..(178): NCBI GI NO: 38567835 NR Description: OSJNBb0020J19.13
  misc_feature (1)..(148): NCBI GI NO: 18415916 NR Description: zinc finger
  misc_feature (1)..(148): NCBI GI NO: 16209722 NR Description: AT5g63780/MBK5_26 [Arabidopsis thaliana]
  misc_feature (1)..(148): NCBI GI NO: 30697894 NR Description: zinc finger
  misc_feature (1)..(120): NCBI GI NO: 10177059 NR Description: gb|AAD32776
  misc_feature (127)..(147): NCBI GI NO: 10177059 NR Description: gb|AAD32776
MVLASLKDYEALRERTSTGDLSYLHYRADAFVDPVALAAVRRQRLCEISSWFNPHNTHFVFSQRHNEEVPVSPSNNSVDYSVTAARAAHARRKFGSSGAFVAIALGFVLLAWFVAPHVGKRAAAIILHMLLGGLCSLTIIISLRFVSLPEDPVWVDTMLGDPVRVLVPRVWSVGLSNPHRPPRVMMISSVPSVSRREELGPRRKSSVHESVRYRTPVYIRRELYHGRTIFSLAGVCEMYNMFGQENKGSYVTECCGFRHSWSGTGLASVAKQYSNVC

SEQ ID NO: 18975 - DNA, 1486 bp, Triticum aestivum
  misc_feature (1)..(1486): Ceres Seq. ID no. 12614253
agaacatcctaatcgaaaaatagttgatgcgctccccgcagttgccatcctagctgaacgcggcggacagcacgcccaacggtgccgccaccgccgccgccgtcgccttcgaagcccccgccctcgtgatggaaccctcgttcgatgacgtccccgaggtcgtcggctggatgtcgtcgatggtcgaccgcggcggccgcgcgagccaggagagccaccgcctgttcctggcgcggcgcacggcgctcgagatgctgcgggaccgcggatacagcgtgccggagtccgagctcgcccgcacgctcccggagttccgcgcgtggtgggcaccggagcccgagatcgagcgcctcaccttttccaccttcctcgcctccgaccactccgacaaggtgaaaattctattctgcggaccagaacctgtcagaatcgcaactatccagaagatatatgaccagattgaaggagagaacttgtccagacttattttgatattgcagggaaagataatgcctagagctaaagagtctgttaaggagaaattcacatttaaagtagatatttttcaggtcaatgagttactggttaacattagtaagcatgccctgaagccaaagcatgaagtgttgactgcagaagaaaaggccaggctcctgaagaagtacaatgtgcaggattcacagctccctcgcatgctagagaccgatcctgttgctcgctactatggcctcggcaagggaaccgtgcttaaagttacatatgacagtgagcttactgggaaccatgtgacataccgatgtattttctgagggctgcatgtgtttccatggatgaaaggtgtagcaagctgtttgtacaatcgtgttagctctatgctgattcattggcctgaaggtatttggaacttcaggcgtgttacaccgagcatggtctcactggattcaagcagtatccgtttactagagctagcataggttttacatacaaatcagatgtcagaaacccgattaagatgaagaaccaagaaaggaaaaaagattggctgtcaaataatcttttttcagctaacaactgtggtttggtctgcttgtcttggttaaaatttcgtcatctgccgcctttcttttgtggatgttgctgctctcaccgctgctgttatccgtggggttgctgctgctgatggtatcgccgctgctgttgtccgtggggttactgctgctgatggtaatggtatcgctgctgctgctgctgttgtttgtggggttggtctcgctgttgcttagcaggtcttcgtcctggtggcagtgctctttgcatctgcttttcattatgtggggcttgagcttgctcatgtctgatagccgtactggtttcaggaagaactcatttgctccttcctccaggcatctgattcagaacaaacaaaacagcaattgtcagagttcattctaagatcctgctactatattctaagatcgtctacttc

SEQ ID NO: 18976 - protein, 226 aa, Triticum aestivum
  peptide (1)..(226): Ceres Seq. ID no. 12614254
  misc_feature (153)..(225): Pfam Name: Pfam Description:  RNA polymerase Rpb5, C-terminal domain
  misc_feature (25)..(226): NCBI GI NO: 15230206 NR Description: putative protein; protein id: At3g57080
  misc_feature (24)..(225): NCBI GI NO: 15227327 NR Description: putative DNA-directed RNA polymerase 23kD subunit
  misc_feature (28)..(224): NCBI GI NO: 8896071 NR Description: RPB5d [Brassica napus]
  misc_feature (25)..(226): NCBI GI NO: 21617912 NR Description: putative DNA-directed RNA polymerase 23kD subunit
  misc_feature (1)..(225): NCBI GI NO: 15232524 NR Description: RNA polymerase 24kDa subunit -like protein
  misc_feature (27)..(225): NCBI GI NO: 15228724 NR Description: RNA polymerase I, II and III 24
  misc_feature (28)..(225): NCBI GI NO: 17507947 NR Description: RNA polymerase Rpb5
  misc_feature (28)..(225): NCBI GI NO: 39595790 NR Description: Hypothetical protein CBG12745
  misc_feature (25)..(225): NCBI GI NO: 38344231 NR Description: OJ991113_30.8
  misc_feature (27)..(225): NCBI GI NO: 28497750 NR Description: polymerase (RNA) II (DNA directed) polypeptide E
MEPSFDDVPEVVGWMSSMVDRGGRASQESHRLFLARRTALEMLRDRGYSVPESELARTLPEFRAWWAPEPEIERLTFSTFLASDHSDKVKILFCGPEPVRIATIQKIYDQIEGENLSRLILILQGKIMPRAKESVKEKFTFKVDIFQVNELLVNISKHALKPKHEVLTAEEKARLLKKYNVQDSQLPRMLETDPVARYYGLGKGTVLKVTYDSELTGNHVTYRCIF

SEQ ID NO: 18977 - protein, 212 aa, Triticum aestivum
  peptide (1)..(212): Ceres Seq. ID no. 12614255
  misc_feature (139)..(211): Pfam Name: Pfam Description:  RNA polymerase Rpb5, C-terminal domain
  misc_feature (11)..(212): NCBI GI NO: 15230206 NR Description: putative protein; protein id: At3g57080
  misc_feature (10)..(211): NCBI GI NO: 15227327 NR Description: putative DNA-directed RNA polymerase 23kD subunit
  misc_feature (14)..(210): NCBI GI NO: 8896071 NR Description: RPB5d [Brassica napus]
  misc_feature (11)..(212): NCBI GI NO: 21617912 NR Description: putative DNA-directed RNA polymerase 23kD subunit
  misc_feature (1)..(211): NCBI GI NO: 15232524 NR Description: RNA polymerase 24kDa subunit -like protein
  misc_feature (13)..(211): NCBI GI NO: 15228724 NR Description: RNA polymerase I, II and III 24
  misc_feature (14)..(211): NCBI GI NO: 17507947 NR Description: RNA polymerase Rpb5
  misc_feature (14)..(211): NCBI GI NO: 39595790 NR Description: Hypothetical protein CBG12745
  misc_feature (11)..(211): NCBI GI NO: 38344231 NR Description: OJ991113_30.8
  misc_feature (13)..(211): NCBI GI NO: 28497750 NR Description: polymerase (RNA) II (DNA directed) polypeptide E
MSSMVDRGGRASQESHRLFLARRTALEMLRDRGYSVPESELARTLPEFRAWWAPEPEIERLTFSTFLASDHSDKVKILFCGPEPVRIATIQKIYDQIEGENLSRLILILQGKIMPRAKESVKEKFTFKVDIFQVNELLVNISKHALKPKHEVLTAEEKARLLKKYNVQDSQLPRMLETDPVARYYGLGKGTVLKVTYDSELTGNHVTYRCIF

SEQ ID NO: 18978 - protein, 209 aa, Triticum aestivum
  peptide (1)..(209): Ceres Seq. ID no. 12614256
  misc_feature (136)..(208): Pfam Name: Pfam Description:  RNA polymerase Rpb5, C-terminal domain
  misc_feature (8)..(209): NCBI GI NO: 15230206 NR Description: putative protein; protein id: At3g57080
  misc_feature (7)..(208): NCBI GI NO: 15227327 NR Description: putative DNA-directed RNA polymerase 23kD subunit
  misc_feature (11)..(207): NCBI GI NO: 8896071 NR Description: RPB5d [Brassica napus]
  misc_feature (8)..(209): NCBI GI NO: 21617912 NR Description: putative DNA-directed RNA polymerase 23kD subunit
  misc_feature (1)..(208): NCBI GI NO: 15232524 NR Description: RNA polymerase 24kDa subunit -like protein
  misc_feature (10)..(208): NCBI GI NO: 15228724 NR Description: RNA polymerase I, II and III 24
  misc_feature (11)..(208): NCBI GI NO: 17507947 NR Description: RNA polymerase Rpb5
  misc_feature (11)..(208): NCBI GI NO: 39595790 NR Description: Hypothetical protein CBG12745
  misc_feature (8)..(208): NCBI GI NO: 38344231 NR Description: OJ991113_30.8
  misc_feature (10)..(208): NCBI GI NO: 28497750 NR Description: polymerase (RNA) II (DNA directed) polypeptide E
MVDRGGRASQESHRLFLARRTALEMLRDRGYSVPESELARTLPEFRAWWAPEPEIERLTFSTFLASDHSDKVKILFCGPEPVRIATIQKIYDQIEGENLSRLILILQGKIMPRAKESVKEKFTFKVDIFQVNELLVNISKHALKPKHEVLTAEEKARLLKKYNVQDSQLPRMLETDPVARYYGLGKGTVLKVTYDSELTGNHVTYRCIF

SEQ ID NO: 18979 - DNA, 2151 bp, Triticum aestivum
  misc_feature (1)..(2151): Ceres Seq. ID no. 13596218
atgctcgaagcccaaatcctctcggtctctcacccactcgccagaggcagacacgacgagggcgacggcgatggcctcgccgaagctggccgccggcgacggcagctacgacttccacctccgctcgctctccgccgcgtcacgggactccgccgcggccgccgatcccgcctccgaccccaacctcctccagtctgtgcggatggtgttcgagatgtgcaaggtggccaagggggccaacgacgagatggtggcgcgggcgttccccgtgatgaacaagctcttccagcgctgcgccgccgcgcccacgctctccacggcctccaccggcgtgctgctgctgaccattctgcagttcttcctggactttggggaggcggtcttgcacgatgctgatggtagcttgaaaaccttcttccgctcttgcttaagtagggagttttcagaccctattgtcgcagaacgaacgctggaattcctgatagcgaacaagacgaagatcttgaactgcttccccaccttggttccacagttcttcccattgctgctgaagttgattgcatcaaatggtgataggttggataagaagttctcagaagtgatcccattgatgatgtcagcaggatcttttcttcctctcttcctgtcccttatggatctgccaatgttagtggtagcactggaaaaggtggaaagaagttctggaactctcatcggtagtagtttagctactatacagaagagtgctgctcctgagatgctccttgcactgatggatgaggcatatactggctcctcaatagaagatcaaagtggcaattcaggttctgatgacagtggtcgtctagaccttgcggacccaatgttccttgaccttctaaaagacgagaatgatggcattgctgcaaaacattggacatcccctacgatatcttcaacgttacaagctgcacttaacagcccacagtctgacagattaaaacagtcactgaaaatggcacctcgctttcttactgtatattttgcgacagcattgcgggacgtcaacaactcactcttgtgtgctctgattccagttgctatgtcaagatatgctgcgatgttccctgacaaggaattttctttcgaggtgaggaaaaagctgtcggatttcttattagctgcattccagcgctcccctgacatcattgcgctactaaagaagcctattactgatagacttggggaggcccatggtaatcctgcaaagatggaattggcattgcatttatgttgggccattggtgagcatggagcaggagggataaagcacaaagatgtagcacgtgaactatttgaaaatctggagttgctattatacgaaaacctggcaactagtcgtctgggattaagtcaagatccagggttcgattctatgggtgcaagctctagaaagtcatcccaagctaggctcctctgctttgtggtgactgccattgcgaagctagcaacttgccataacgagctgcttccaagagcacgtgtgtcattggctaaggtcgctcggtccaggacctcagacaggcgagtctggcagcgcgcctgtgactatttagggctcatgaatgaaccagccatttgtttgtctgtactgggaccatccactgcccaaggaaatggtcctgggattgtgaactggagcgaaggaggaaccaagatggtagctcacattccgttttaccttttagcagaacagaaaggtccaccatctcatgatttttcatatgcggacctcctccccgcagaatgagaacaccgtcatgagtagcatggatccatgcaatgattctcttgcaaacgccatgtgcacagagatcattggtgatcatggcctgctgaagatgattcaagtgccaacgccttcttttatccagttcatcttttcgatcgagaagtgctggccctttggtctgaggagttcctgtactgttgtagtttctgggatctggctggtttcaactgtgcagtttgtgggggtgtagatggtattcagaaacgctcaatgttgtatacatggaatgatttgtcagtgtatgtactgaaagggaagcagtgttgtaaattaagatatctgatggtgcacatctggaaatggaaagattgttctttgtg

SEQ ID NO: 18980 - protein, 595 aa, Triticum aestivum
  peptide (1)..(595): Ceres Seq. ID no. 15221809
  misc_feature (33)..(593): NCBI GI NO: 22331098 NR Description: expressed protein [Arabidopsis thaliana]
  misc_feature (33)..(593): NCBI GI NO: 20465414 NR Description: unknown protein [Arabidopsis thaliana]
  misc_feature (24)..(416): NCBI GI NO: 39545844 NR Description: OSJNBb0060E08.15
  misc_feature (314)..(595): NCBI GI NO: 39545844 NR Description: OSJNBb0060E08.15
  misc_feature (253)..(593): NCBI GI NO: 11994505 NR Description: gene_id:F4B12.7~unknown protein
  misc_feature (243)..(546): NCBI GI NO: 34785813 NR Description: Unknown (protein for IMAGE:6403029) [Mus musculus]
  misc_feature (21)..(228): NCBI GI NO: 34785813 NR Description: Unknown (protein for IMAGE:6403029) [Mus musculus]
  misc_feature (21)..(264): NCBI GI NO: 27370056 NR Description: RIKEN cDNA C330006K01 [Mus musculus]
  misc_feature (21)..(513): NCBI GI NO: 34871236 NR Description: similar to RIKEN cDNA C330006K01
  misc_feature (113)..(264): NCBI GI NO: 26349931 NR Description: unnamed protein product [Mus musculus]
CSKPKSSRSLTHSPEADTTRATAMASPKLAAGDGSYDFHLRSLSAASRDSAAAADPASDPNLLQSVRMVFEMCKVAKGANDEMVARAFPVMNKLFQRCAAAPTLSTASTGVLLLTILQFFLDFGEAVLHDADGSLKTFFRSCLSREFSDPIVAERTLEFLIANKTKILNCFPTLVPQFFPLLLKLIASNGDRLDKKFSEVIPLMMSAGSFLPLFLSLMDLPMLVVALEKVERSSGTLIGSSLATIQKSAAPEMLLALMDEAYTGSSIEDQSGNSGSDDSGRLDLADPMFLDLLKDENDGIAAKHWTSPTISSTLQAALNSPQSDRLKQSLKMAPRFLTVYFATALRDVNNSLLCALIPVAMSRYAAMFPDKEFSFEVRKKLSDFLLAAFQRSPDIIALLKKPITDRLGEAHGNPAKMELALHLCWAIGEHGAGGIKHKDVARELFENLELLLYENLATSRLGLSQDPGFDSMGASSRKSSQARLLCFVVTAIAKLATCHNELLPRARVSLAKVARSRTSDRRVWQRACDYLGLMNEPAICLSVLGPSTAQGNGPGIVNWSEGGTKMVAHIPFYLLAEQKGPPSHDFSYADLLPAE

SEQ ID NO: 18981 - protein, 572 aa, Triticum aestivum
  peptide (1)..(572): Ceres Seq. ID no. 15221810
  misc_feature (10)..(570): NCBI GI NO: 22331098 NR Description: expressed protein [Arabidopsis thaliana]
  misc_feature (10)..(570): NCBI GI NO: 20465414 NR Description: unknown protein [Arabidopsis thaliana]
  misc_feature (1)..(393): NCBI GI NO: 39545844 NR Description: OSJNBb0060E08.15
  misc_feature (291)..(572): NCBI GI NO: 39545844 NR Description: OSJNBb0060E08.15
  misc_feature (230)..(570): NCBI GI NO: 11994505 NR Description: gene_id:F4B12.7~unknown protein
  misc_feature (220)..(523): NCBI GI NO: 34785813 NR Description: Unknown (protein for IMAGE:6403029) [Mus musculus]
  misc_feature (1)..(205): NCBI GI NO: 34785813 NR Description: Unknown (protein for IMAGE:6403029) [Mus musculus]
  misc_feature (1)..(241): NCBI GI NO: 27370056 NR Description: RIKEN cDNA C330006K01 [Mus musculus]
  misc_feature (1)..(490): NCBI GI NO: 34871236 NR Description: similar to RIKEN cDNA C330006K01
  misc_feature (90)..(241): NCBI GI NO: 26349931 NR Description: unnamed protein product [Mus musculus]
MASPKLAAGDGSYDFHLRSLSAASRDSAAAADPASDPNLLQSVRMVFEMCKVAKGANDEMVARAFPVMNKLFQRCAAAPTLSTASTGVLLLTILQFFLDFGEAVLHDADGSLKTFFRSCLSREFSDPIVAERTLEFLIANKTKILNCFPTLVPQFFPLLLKLIASNGDRLDKKFSEVIPLMMSAGSFLPLFLSLMDLPMLVVALEKVERSSGTLIGSSLATIQKSAAPEMLLALMDEAYTGSSIEDQSGNSGSDDSGRLDLADPMFLDLLKDENDGIAAKHWTSPTISSTLQAALNSPQSDRLKQSLKMAPRFLTVYFATALRDVNNSLLCALIPVAMSRYAAMFPDKEFSFEVRKKLSDFLLAAFQRSPDIIALLKKPITDRLGEAHGNPAKMELALHLCWAIGEHGAGGIKHKDVARELFENLELLLYENLATSRLGLSQDPGFDSMGASSRKSSQARLLCFVVTAIAKLATCHNELLPRARVSLAKVARSRTSDRRVWQRACDYLGLMNEPAICLSVLGPSTAQGNGPGIVNWSEGGTKMVAHIPFYLLAEQKGPPSHDFSYADLLPAE

SEQ ID NO: 18982 - protein, 528 aa, Triticum aestivum
  peptide (1)..(528): Ceres Seq. ID no. 15221811
  misc_feature (1)..(526): NCBI GI NO: 22331098 NR Description: expressed protein [Arabidopsis thaliana]
  misc_feature (1)..(526): NCBI GI NO: 20465414 NR Description: unknown protein [Arabidopsis thaliana]
  misc_feature (1)..(349): NCBI GI NO: 39545844 NR Description: OSJNBb0060E08.15
  misc_feature (247)..(528): NCBI GI NO: 39545844 NR Description: OSJNBb0060E08.15
  misc_feature (186)..(526): NCBI GI NO: 11994505 NR Description: gene_id:F4B12.7~unknown protein
  misc_feature (176)..(479): NCBI GI NO: 34785813 NR Description: Unknown (protein for IMAGE:6403029) [Mus musculus]
  misc_feature (1)..(161): NCBI GI NO: 34785813 NR Description: Unknown (protein for IMAGE:6403029) [Mus musculus]
  misc_feature (1)..(197): NCBI GI NO: 27370056 NR Description: RIKEN cDNA C330006K01 [Mus musculus]
  misc_feature (1)..(446): NCBI GI NO: 34871236 NR Description: similar to RIKEN cDNA C330006K01
  misc_feature (46)..(197): NCBI GI NO: 26349931 NR Description: unnamed protein product [Mus musculus]
MVFEMCKVAKGANDEMVARAFPVMNKLFQRCAAAPTLSTASTGVLLLTILQFFLDFGEAVLHDADGSLKTFFRSCLSREFSDPIVAERTLEFLIANKTKILNCFPTLVPQFFPLLLKLIASNGDRLDKKFSEVIPLMMSAGSFLPLFLSLMDLPMLVVALEKVERSSGTLIGSSLATIQKSAAPEMLLALMDEAYTGSSIEDQSGNSGSDDSGRLDLADPMFLDLLKDENDGIAAKHWTSPTISSTLQAALNSPQSDRLKQSLKMAPRFLTVYFATALRDVNNSLLCALIPVAMSRYAAMFPDKEFSFEVRKKLSDFLLAAFQRSPDIIALLKKPITDRLGEAHGNPAKMELALHLCWAIGEHGAGGIKHKDVARELFENLELLLYENLATSRLGLSQDPGFDSMGASSRKSSQARLLCFVVTAIAKLATCHNELLPRARVSLAKVARSRTSDRRVWQRACDYLGLMNEPAICLSVLGPSTAQGNGPGIVNWSEGGTKMVAHIPFYLLAEQKGPPSHDFSYADLLPAE

SEQ ID NO: 18983 - DNA, 1720 bp, Triticum aestivum
  misc_feature (1)..(1720): Ceres Seq. ID no. 13596219
ctggtcggagaggagcagcagagatggccggagccggggaagacgacgcagctcctcctcccccttctccagatcgacagcagcccatggaagaggcggcggcggcggccaagcggagccggtcggagaaccaccatggcctcgccgacgggccgtccttccggatggaggaccttccggcggaggttcagccggttataatctcactgctcccactgaaagaggccgtgaggacgagcattgtttcaagaagttggacaacgctctggagattccactgcgacctatgttttgatgtggattctaacaccgatgacaattccgctcatcaggtcaatggcactggcaccaatgaccaatccactaatcggtataataccaaaataacacgggcaaagttcatggagactgtaaattccgttattcaacggcatagtgggataggaatcaataagttcagtatcagctgtgacctgcacaaagaggactctcatcatcttgacaagtggattcggtttgccgcttcatcaaaggcaaaaataatagattttcatcggaagatatctgattaccgagttgaagaagctccccactttcctcttgaggccttagatgctcaaggtagctcatttgtgcagtccttgtctctcgccagtgtttctataaagccacgctcaggaatatgccgctttacaatactcagaaggcttgttttgagctctgttcagatatttggagattttccaggcttgcttgcaaaatgttcaagacttgaggacttagagatcaaatggtgttctggtgtggatgacttaatcgtaccacacacactcgataaacttcaacatttgctgattgccggaatggacgtccagatggttgagtttcatgctactgatcttgctcactttgagtacaaaggccgagtaacccctatagtgcttcatggttgcttaaaactagagaaggcaacaattgcgtttgaggcctctaatgtactgccccatgcattcaatgtaattccaagcatttccccagtgaagatattaattgtgcgagcttttatatcaaaatatggacagtccctggagctgccattaagaccacagggcatgtttatgcatctgaggcatatgacttgtaaaattatcgtccttgctagagatgtaaatgactataatggagttcttcaactggcccattggttggacagtgcaccgcgactggagacattggacttgcatatgtcctatctgaggtccggtgctttcgtaagtgccgaggtggcgggagtggaagctccctgtatgcgtcgccatgatcatctcaagacggtcttcatgagtgggtttcagtgttacaagtctcagattgagctggcgtgctgtatcctgggaaatgcttctgttcttgagcagctgacagtagaagcaatatggggtgatgatgattacaggcggatctgtgaatgggcagaggtaacctcgaagcgctttggtaaggtgatcactgtcttagatgccccccttaacagtgagtaaaccaatccttttcgcatgtacacgctgtcaattaatctcgtgtagtctgcagtatgcagcattcagtgtagctgggagaatgcccctctagactgtactgactgttttggtgtctacaaatggaatctgtagggcttttgcccctcttaataaaaaacaagtaatctctggttcatcgt

SEQ ID NO: 18984 - protein, 512 aa, Triticum aestivum
  peptide (1)..(512): Ceres Seq. ID no. 13596220
  misc_feature (58)..(98): Pfam Name: Pfam Description:  F-box domain
  misc_feature (58)..(505): NCBI GI NO: 18481703 NR Description: hypothetical protein [Sorghum bicolor]
  misc_feature (54)..(476): NCBI GI NO: 34394100 NR Description: unknown protein
  misc_feature (37)..(476): NCBI GI NO: 34899940 NR Description: P0428D12.10
  misc_feature (80)..(434): NCBI GI NO: 34913938 NR Description: OSJNBa0066C06.21
  misc_feature (51)..(476): NCBI GI NO: 34394889 NR Description: unknown protein
  misc_feature (120)..(415): NCBI GI NO: 34902734 NR Description: hypothetical protein~similar to Oryza sativachromsoome 1
  misc_feature (55)..(475): NCBI GI NO: 38344931 NR Description: OSJNBa0018M05.22
  misc_feature (26)..(485): NCBI GI NO: 34899896 NR Description: OJ1714_H10.31
  misc_feature (133)..(486): NCBI GI NO: 38605785 NR Description: OSJNBa0044K18.28
  misc_feature (57)..(101): NCBI GI NO: 38605785 NR Description: OSJNBa0044K18.28
GRRGAAEMAGAGEDDAAPPPPSPDRQQPMEEAAAAAKRSRSENHHGLADGPSFRMEDLPAEVQPVIISLLPLKEAVRTSIVSRSWTTLWRFHCDLCFDVDSNTDDNSAHQVNGTGTNDQSTNRYNTKITRAKFMETVNSVIQRHSGIGINKFSISCDLHKEDSHHLDKWIRFAASSKAKIIDFHRKISDYRVEEAPHFPLEALDAQGSSFVQSLSLASVSIKPRSGICRFTILRRLVLSSVQIFGDFPGLLAKCSRLEDLEIKWCSGVDDLIVPHTLDKLQHLLIAGMDVQMVEFHATDLAHFEYKGRVTPIVLHGCLKLEKATIAFEASNVLPHAFNVIPSISPVKILIVRAFISKYGQSLELPLRPQGMFMHLRHMTCKIIVLARDVNDYNGVLQLAHWLDSAPRLETLDLHMSYLRSGAFVSAEVAGVEAPCMRRHDHLKTVFMSGFQCYKSQIELACCILGNASVLEQLTVEAIWGDDDYRRICEWAEVTSKRFGKVITVLDAPLNSE

SEQ ID NO: 18985 - protein, 505 aa, Triticum aestivum
  peptide (1)..(505): Ceres Seq. ID no. 13596221
  misc_feature (51)..(91): Pfam Name: Pfam Description:  F-box domain
  misc_feature (51)..(498): NCBI GI NO: 18481703 NR Description: hypothetical protein [Sorghum bicolor]
  misc_feature (47)..(469): NCBI GI NO: 34394100 NR Description: unknown protein
  misc_feature (30)..(469): NCBI GI NO: 34899940 NR Description: P0428D12.10
  misc_feature (73)..(427): NCBI GI NO: 34913938 NR Description: OSJNBa0066C06.21
  misc_feature (44)..(469): NCBI GI NO: 34394889 NR Description: unknown protein
  misc_feature (113)..(408): NCBI GI NO: 34902734 NR Description: hypothetical protein~similar to Oryza sativachromsoome 1
  misc_feature (48)..(468): NCBI GI NO: 38344931 NR Description: OSJNBa0018M05.22
  misc_feature (19)..(478): NCBI GI NO: 34899896 NR Description: OJ1714_H10.31
  misc_feature (126)..(479): NCBI GI NO: 38605785 NR Description: OSJNBa0044K18.28
  misc_feature (50)..(94): NCBI GI NO: 38605785 NR Description: OSJNBa0044K18.28
MAGAGEDDAAPPPPSPDRQQPMEEAAAAAKRSRSENHHGLADGPSFRMEDLPAEVQPVIISLLPLKEAVRTSIVSRSWTTLWRFHCDLCFDVDSNTDDNSAHQVNGTGTNDQSTNRYNTKITRAKFMETVNSVIQRHSGIGINKFSISCDLHKEDSHHLDKWIRFAASSKAKIIDFHRKISDYRVEEAPHFPLEALDAQGSSFVQSLSLASVSIKPRSGICRFTILRRLVLSSVQIFGDFPGLLAKCSRLEDLEIKWCSGVDDLIVPHTLDKLQHLLIAGMDVQMVEFHATDLAHFEYKGRVTPIVLHGCLKLEKATIAFEASNVLPHAFNVIPSISPVKILIVRAFISKYGQSLELPLRPQGMFMHLRHMTCKIIVLARDVNDYNGVLQLAHWLDSAPRLETLDLHMSYLRSGAFVSAEVAGVEAPCMRRHDHLKTVFMSGFQCYKSQIELACCILGNASVLEQLTVEAIWGDDDYRRICEWAEVTSKRFGKVITVLDAPLNSE

SEQ ID NO: 18986 - protein, 484 aa, Triticum aestivum
  peptide (1)..(484): Ceres Seq. ID no. 13596222
  misc_feature (30)..(70): Pfam Name: Pfam Description:  F-box domain
  misc_feature (30)..(477): NCBI GI NO: 18481703 NR Description: hypothetical protein [Sorghum bicolor]
  misc_feature (26)..(448): NCBI GI NO: 34394100 NR Description: unknown protein
  misc_feature (9)..(448): NCBI GI NO: 34899940 NR Description: P0428D12.10
  misc_feature (52)..(406): NCBI GI NO: 34913938 NR Description: OSJNBa0066C06.21
  misc_feature (23)..(448): NCBI GI NO: 34394889 NR Description: unknown protein
  misc_feature (92)..(387): NCBI GI NO: 34902734 NR Description: hypothetical protein~similar to Oryza sativachromsoome 1
  misc_feature (27)..(447): NCBI GI NO: 38344931 NR Description: OSJNBa0018M05.22
  misc_feature (1)..(457): NCBI GI NO: 34899896 NR Description: OJ1714_H10.31
  misc_feature (105)..(458): NCBI GI NO: 38605785 NR Description: OSJNBa0044K18.28
  misc_feature (29)..(73): NCBI GI NO: 38605785 NR Description: OSJNBa0044K18.28
MEEAAAAAKRSRSENHHGLADGPSFRMEDLPAEVQPVIISLLPLKEAVRTSIVSRSWTTLWRFHCDLCFDVDSNTDDNSAHQVNGTGTNDQSTNRYNTKITRAKFMETVNSVIQRHSGIGINKFSISCDLHKEDSHHLDKWIRFAASSKAKIIDFHRKISDYRVEEAPHFPLEALDAQGSSFVQSLSLASVSIKPRSGICRFTILRRLVLSSVQIFGDFPGLLAKCSRLEDLEIKWCSGVDDLIVPHTLDKLQHLLIAGMDVQMVEFHATDLAHFEYKGRVTPIVLHGCLKLEKATIAFEASNVLPHAFNVIPSISPVKILIVRAFISKYGQSLELPLRPQGMFMHLRHMTCKIIVLARDVNDYNGVLQLAHWLDSAPRLETLDLHMSYLRSGAFVSAEVAGVEAPCMRRHDHLKTVFMSGFQCYKSQIELACCILGNASVLEQLTVEAIWGDDDYRRICEWAEVTSKRFGKVITVLDAPLNSE

SEQ ID NO: 18987 - DNA, 1313 bp, Triticum aestivum
  misc_feature (1)..(1313): Ceres Seq. ID no. 13654549
gaaagttggcaggcacgatctctctccacccccttggactctcctctgctcctcctctccctccccacggcgccatggagcggctcatctccaggacggcggtctccccggcccagccccggatccacctgcccggcagatcccccttcctcaccacccgccgcgccgcctccgcctccgcgggtgctgggagcgccgcgccgtggacccggctgtgcgcgcagccgccgcgcctaggtgccgcggtcgccgctgcggcgcggcatgacggtgcttcggccccggcgcccgtggaggaggtggctgcggcggcggcagctgggcctccgtggaagctgctcgggagcctgctccccaaggcttctactgctgcccttgtcctgcttatgacacttactgcaagtgccttgcactctagcattccccatcctgcctatgcatcggcgcaaccagtaatcaaatctggtggactcctctcagcagagttattgagcagcggctgggctggtttcttcgcgggccgcttacataccttatccgggcctgaccatcttgtcgcattggcaccactatcaattgggagatcaagactggagagtggactagtcggtgccctttggggctgtggtcatgatgctggacaaataatttttggcctgctcttcttgctactcaaggatcgtttgcacattgaggttctccgtatatggggaacaagagttgtaggtctgacccttcttatgataggcgcgacgggcatccgggaagcttcagaggttcaagagtcggggctaattctggagggtgtagacatgaatggcagtgagcccttgcaacaggcccctgctgttgctcccaggaagaagaaagttggcttcacaacatttgccaccggagtcatccatggcctccagccagatgcgctgctgatggtcttgcccgctcttgctctgccgtcacgctttgccggcgcggcctacctcggtatgttcttggtcgggactgtattttcgatgggtagctacactgcttttgtaggttcttgtagtgaggctctaaaggataggatacctaagataacggagaagctgacctgggctgcttcccttgtagctgtatgcttggggttagctcttttagttgggcagttctttgggttcaccctatattgattcatgtcctaggttcttgttactacttggcaacattgttttgattgttatttgttatgtttacggcagttgagctcagactacgacacggttggtattcttagactgcaacttatactatgttactacatgtttttgggg

SEQ ID NO: 18988 - protein, 389 aa, Triticum aestivum
  peptide (1)..(389): Ceres Seq. ID no. 13654550
  misc_feature (25)..(389): NCBI GI NO: 21397272 NR Description: Hypothetical protein
  misc_feature (24)..(389): NCBI GI NO: 34897966 NR Description: hypothetical protein~similar to Arabidopsisthaliana chromosome 2
  misc_feature (119)..(389): NCBI GI NO: 18398217 NR Description: expressed protein [Arabidopsis thaliana]
  misc_feature (119)..(389): NCBI GI NO: 21592431 NR Description: unknown [Arabidopsis thaliana]
  misc_feature (119)..(389): NCBI GI NO: 15724154 NR Description: At2g16800/T24I21.21 [Arabidopsis thaliana]
  misc_feature (30)..(389): NCBI GI NO: 18418571 NR Description: expressed protein [Arabidopsis thaliana]
  misc_feature (117)..(389): NCBI GI NO: 7486794 NR Description: hypothetical protein M4E13
  misc_feature (162)..(345): NCBI GI NO: 33866162 NR Description: cyanobacterial conserved hypothetical protein
  misc_feature (162)..(359): NCBI GI NO: 33240819 NR Description: Hydrogenase accessory protein or high-affinitynickel-transport protein homolog
  misc_feature (169)..(345): NCBI GI NO: 33861852 NR Description: marine cyanobacterial conserved hypothetical
KLAGTISLHPLGLSSAPPLPPHGAMERLISRTAVSPAQPRIHLPGRSPFLTTRRAASASAGAGSAAPWTRLCAQPPRLGAAVAAAARHDGASAPAPVEEVAAAAAAGPPWKLLGSLLPKASTAALVLLMTLTASALHSSIPHPAYASAQPVIKSGGLLSAELLSSGWAGFFAGRLHTLSGPDHLVALAPLSIGRSRLESGLVGALWGCGHDAGQIIFGLLFLLLKDRLHIEVLRIWGTRVVGLTLLMIGATGIREASEVQESGLILEGVDMNGSEPLQQAPAVAPRKKKVGFTTFATGVIHGLQPDALLMVLPALALPSRFAGAAYLGMFLVGTVFSMGSYTAFVGSCSEALKDRIPKITEKLTWAASLVAVCLGLALLVGQFFGFTLY

SEQ ID NO: 18989 - protein, 365 aa, Triticum aestivum
  peptide (1)..(365): Ceres Seq. ID no. 13654551
  misc_feature (1)..(365): NCBI GI NO: 21397272 NR Description: Hypothetical protein
  misc_feature (1)..(365): NCBI GI NO: 34897966 NR Description: hypothetical protein~similar to Arabidopsisthaliana chromosome 2
  misc_feature (95)..(365): NCBI GI NO: 18398217 NR Description: expressed protein [Arabidopsis thaliana]
  misc_feature (95)..(365): NCBI GI NO: 21592431 NR Description: unknown [Arabidopsis thaliana]
  misc_feature (95)..(365): NCBI GI NO: 15724154 NR Description: At2g16800/T24I21.21 [Arabidopsis thaliana]
  misc_feature (6)..(365): NCBI GI NO: 18418571 NR Description: expressed protein [Arabidopsis thaliana]
  misc_feature (93)..(365): NCBI GI NO: 7486794 NR Description: hypothetical protein M4E13
  misc_feature (138)..(321): NCBI GI NO: 33866162 NR Description: cyanobacterial conserved hypothetical protein
  misc_feature (138)..(335): NCBI GI NO: 33240819 NR Description: Hydrogenase accessory protein or high-affinitynickel-transport protein homolog
  misc_feature (145)..(321): NCBI GI NO: 33861852 NR Description: marine cyanobacterial conserved hypothetical
MERLISRTAVSPAQPRIHLPGRSPFLTTRRAASASAGAGSAAPWTRLCAQPPRLGAAVAAAARHDGASAPAPVEEVAAAAAAGPPWKLLGSLLPKASTAALVLLMTLTASALHSSIPHPAYASAQPVIKSGGLLSAELLSSGWAGFFAGRLHTLSGPDHLVALAPLSIGRSRLESGLVGALWGCGHDAGQIIFGLLFLLLKDRLHIEVLRIWGTRVVGLTLLMIGATGIREASEVQESGLILEGVDMNGSEPLQQAPAVAPRKKKVGFTTFATGVIHGLQPDALLMVLPALALPSRFAGAAYLGMFLVGTVFSMGSYTAFVGSCSEALKDRIPKITEKLTWAASLVAVCLGLALLVGQFFGFTLY

SEQ ID NO: 18990 - protein, 261 aa, Triticum aestivum
  peptide (1)..(261): Ceres Seq. ID no. 13654552
  misc_feature (1)..(261): NCBI GI NO: 21397272 NR Description: Hypothetical protein
  misc_feature (1)..(261): NCBI GI NO: 34897966 NR Description: hypothetical protein~similar to Arabidopsisthaliana chromosome 2
  misc_feature (1)..(261): NCBI GI NO: 18398217 NR Description: expressed protein [Arabidopsis thaliana]
  misc_feature (1)..(261): NCBI GI NO: 21592431 NR Description: unknown [Arabidopsis thaliana]
  misc_feature (1)..(261): NCBI GI NO: 15724154 NR Description: At2g16800/T24I21.21 [Arabidopsis thaliana]
  misc_feature (1)..(261): NCBI GI NO: 18418571 NR Description: expressed protein [Arabidopsis thaliana]
  misc_feature (1)..(261): NCBI GI NO: 7486794 NR Description: hypothetical protein M4E13
  misc_feature (34)..(217): NCBI GI NO: 33866162 NR Description: cyanobacterial conserved hypothetical protein
  misc_feature (34)..(231): NCBI GI NO: 33240819 NR Description: Hydrogenase accessory protein or high-affinitynickel-transport protein homolog
  misc_feature (41)..(217): NCBI GI NO: 33861852 NR Description: marine cyanobacterial conserved hypothetical
MTLTASALHSSIPHPAYASAQPVIKSGGLLSAELLSSGWAGFFAGRLHTLSGPDHLVALAPLSIGRSRLESGLVGALWGCGHDAGQIIFGLLFLLLKDRLHIEVLRIWGTRVVGLTLLMIGATGIREASEVQESGLILEGVDMNGSEPLQQAPAVAPRKKKVGFTTFATGVIHGLQPDALLMVLPALALPSRFAGAAYLGMFLVGTVFSMGSYTAFVGSCSEALKDRIPKITEKLTWAASLVAVCLGLALLVGQFFGFTLY

SEQ ID NO: 18991 - DNA, 1904 bp, Triticum aestivum
  misc_feature (1)..(1904): Ceres Seq. ID no. 13654409
acgcataaccgccgtgccgtgtttctggggatcgacatcgcacgcacgcacctggcacctccctccccgaatccatccatcccaccgctcttttagcagctgcccccgttgcttgcgtccaactcaaccccactcctccgcctcccccctctcccatctgctgccgctgctctgctctgctctgctcgcccctacccgcgatcgccgcggccagcccgccatggacgaggagtacgacgtgatcgtgctgggcacggggctcaaggagtgcatcctcagcggcctcctctccgtcgacggcctcaaggttttgcacatggatagaaatgactactatggaggagattccacctccctcaacttgaaccagctctggaagaagttcaggggggaagaaaaaccaccggcgcatttaggtgcgagcagagactacaatgtagacatggttccaaagtttatgatggcgaacggaactttggttcgtactctcattcacactgatgtaacgaagtatctgtctttcaaagctgttgatggaagctttgtcttcagcaaagggaagattcacaaggttcctgccactgacatggaggctctaaaatcccctttaatgggcatatttgagaaacgtagagcaaggaacttcttcatttatgtccaagattacaatgatgctgatccaagaacacatcaaggattggaccttacaaggatgacaactagagaattgatcgcgaaacacggattgagtgatgatactatagatttcattggccatgcgcttgctcttcacagggacgatcgctacctaagcgagccagcaattgatactgttaaaagaatgaaactctattctgagtctcttgcacggttccaaggaggctcaccttatatttacccattgtatgggttgggtgagctgccacaggcttttgcacgtctaagtgctgtttatggtggcacttatatgttaaataagccagagtgcaaggttgaatttgatatggaggggaaagtgtgtggtgttacatcagaaggtgaaactgccaagtgcaagaaggttgtctgtgatccttcttacttggccaacaaggtaaggaagattggaaaagttgcacgagcaattgctattatgagccacccaattccaaatgcaaatgattcccactcgattcagattattttaccacaaaagcaacttgggcgcaagtcagacatgtatgtcttctgttgctcgtacacccacaatgtcgcaccaaaagggaagttcattgcatttgtgtctgcagaagcagagactgataacccacagtccgaactaaagcctggaatcgatctacttggtccagtagatgaattgttttttgatatgtatgacagatatgaacccgtcaatgaaccttctcttgataattgctttgtctcatcgagttatgatgccactactcactttgagacaactgtcacagatgttcttaatatgtacacactgattactggaaagactgttgatcttagcgttgatctcagcgctgccagcgctgcagaagagtactagatctcatcaaaccaagcattttcttcaagactatactaaatggaggaacaccaccggaatcctactgcaggatggtcatgtgtgacatgagctgcatactgcgtagggggttcaggtgcgtagggggttcaggtccacgcctgccagcagcactatgcgaaattattatatgtggaatggtgctgatttccttcgttaacttccatattgatccactgggttgtaaacgttattctatcgtaacgatggctttagcatgttcatgttcgtcttgttgatgtattctacagttatacatattggtgtcttggatgtattttccttccgagtaaggtcaatgtggttt

SEQ ID NO: 18992 - protein, 518 aa, Triticum aestivum
  peptide (1)..(518): Ceres Seq. ID no. 15219649
  misc_feature (74)..(511): Pfam Name: Pfam Description:  GDP dissociation inhibitor
  misc_feature (74)..(518): NCBI GI NO: 7489478 NR Description: GDP dissociation inhibitor protein - rice
  misc_feature (74)..(518): NCBI GI NO: 7489479 NR Description: GDP dissociation inhibitor protein - rice
  misc_feature (74)..(517): NCBI GI NO: 7489133 NR Description: GDP dissociation inhibitor - common tobacco
  misc_feature (74)..(517): NCBI GI NO: 3175990 NR Description: GDP dissociation inhibitor [Cicer arietinum]
  misc_feature (74)..(517): NCBI GI NO: 15224814 NR Description: GDP dissociation inhibitor [Arabidopsis thaliana]
  misc_feature (74)..(517): NCBI GI NO: 1550740 NR Description: GDP-associated inhibitor [Arabidopsis thaliana]
  misc_feature (74)..(517): NCBI GI NO: 17473582 NR Description: GDP dissociation inhibitor [Arabidopsis thaliana]
  misc_feature (74)..(517): NCBI GI NO: 15232210 NR Description: Rab GDP dissociation inhibitor
  misc_feature (74)..(517): NCBI GI NO: 21592535 NR Description: GDP dissociation inhibitor [Arabidopsis thaliana]
  misc_feature (74)..(517): NCBI GI NO: 33146460 NR Description: putative GDP dissociation inhibitor
RITAVPCFWGSTSHARTWHLPPRIHPSHRSFSSCPRCLRPTQPHSSASPLSHLLPLLCSALLAPTRDRRGQPAMDEEYDVIVLGTGLKECILSGLLSVDGLKVLHMDRNDYYGGDSTSLNLNQLWKKFRGEEKPPAHLGASRDYNVDMVPKFMMANGTLVRTLIHTDVTKYLSFKAVDGSFVFSKGKIHKVPATDMEALKSPLMGIFEKRRARNFFIYVQDYNDADPRTHQGLDLTRMTTRELIAKHGLSDDTIDFIGHALALHRDDRYLSEPAIDTVKRMKLYSESLARFQGGSPYIYPLYGLGELPQAFARLSAVYGGTYMLNKPECKVEFDMEGKVCGVTSEGETAKCKKVVCDPSYLANKVRKIGKVARAIAIMSHPIPNANDSHSIQIILPQKQLGRKSDMYVFCCSYTHNVAPKGKFIAFVSAEAETDNPQSELKPGIDLLGPVDELFFDMYDRYEPVNEPSLDNCFVSSSYDATTHFETTVTDVLNMYTLITGKTVDLSVDLSAASAAEEY

SEQ ID NO: 18993 - protein, 445 aa, Triticum aestivum
  peptide (1)..(445): Ceres Seq. ID no. 15219650
  misc_feature (1)..(438): Pfam Name: Pfam Description:  GDP dissociation inhibitor
  misc_feature (1)..(445): NCBI GI NO: 7489478 NR Description: GDP dissociation inhibitor protein - rice
  misc_feature (1)..(445): NCBI GI NO: 7489479 NR Description: GDP dissociation inhibitor protein - rice
  misc_feature (1)..(444): NCBI GI NO: 7489133 NR Description: GDP dissociation inhibitor - common tobacco
  misc_feature (1)..(444): NCBI GI NO: 3175990 NR Description: GDP dissociation inhibitor [Cicer arietinum]
  misc_feature (1)..(444): NCBI GI NO: 15224814 NR Description: GDP dissociation inhibitor [Arabidopsis thaliana]
  misc_feature (1)..(444): NCBI GI NO: 1550740 NR Description: GDP-associated inhibitor [Arabidopsis thaliana]
  misc_feature (1)..(444): NCBI GI NO: 17473582 NR Description: GDP dissociation inhibitor [Arabidopsis thaliana]
  misc_feature (1)..(444): NCBI GI NO: 15232210 NR Description: Rab GDP dissociation inhibitor
  misc_feature (1)..(444): NCBI GI NO: 21592535 NR Description: GDP dissociation inhibitor [Arabidopsis thaliana]
  misc_feature (1)..(444): NCBI GI NO: 33146460 NR Description: putative GDP dissociation inhibitor
MDEEYDVIVLGTGLKECILSGLLSVDGLKVLHMDRNDYYGGDSTSLNLNQLWKKFRGEEKPPAHLGASRDYNVDMVPKFMMANGTLVRTLIHTDVTKYLSFKAVDGSFVFSKGKIHKVPATDMEALKSPLMGIFEKRRARNFFIYVQDYNDADPRTHQGLDLTRMTTRELIAKHGLSDDTIDFIGHALALHRDDRYLSEPAIDTVKRMKLYSESLARFQGGSPYIYPLYGLGELPQAFARLSAVYGGTYMLNKPECKVEFDMEGKVCGVTSEGETAKCKKVVCDPSYLANKVRKIGKVARAIAIMSHPIPNANDSHSIQIILPQKQLGRKSDMYVFCCSYTHNVAPKGKFIAFVSAEAETDNPQSELKPGIDLLGPVDELFFDMYDRYEPVNEPSLDNCFVSSSYDATTHFETTVTDVLNMYTLITGKTVDLSVDLSAASAAEEY

SEQ ID NO: 18994 - protein, 413 aa, Triticum aestivum
  peptide (1)..(413): Ceres Seq. ID no. 15219651
  misc_feature (1)..(406): Pfam Name: Pfam Description:  GDP dissociation inhibitor
  misc_feature (1)..(413): NCBI GI NO: 7489478 NR Description: GDP dissociation inhibitor protein - rice
  misc_feature (1)..(413): NCBI GI NO: 7489479 NR Description: GDP dissociation inhibitor protein - rice
  misc_feature (1)..(412): NCBI GI NO: 7489133 NR Description: GDP dissociation inhibitor - common tobacco
  misc_feature (1)..(412): NCBI GI NO: 3175990 NR Description: GDP dissociation inhibitor [Cicer arietinum]
  misc_feature (1)..(412): NCBI GI NO: 15224814 NR Description: GDP dissociation inhibitor [Arabidopsis thaliana]
  misc_feature (1)..(412): NCBI GI NO: 1550740 NR Description: GDP-associated inhibitor [Arabidopsis thaliana]
  misc_feature (1)..(412): NCBI GI NO: 17473582 NR Description: GDP dissociation inhibitor [Arabidopsis thaliana]
  misc_feature (1)..(412): NCBI GI NO: 15232210 NR Description: Rab GDP dissociation inhibitor
  misc_feature (1)..(412): NCBI GI NO: 21592535 NR Description: GDP dissociation inhibitor [Arabidopsis thaliana]
  misc_feature (1)..(412): NCBI GI NO: 33146460 NR Description: putative GDP dissociation inhibitor
MDRNDYYGGDSTSLNLNQLWKKFRGEEKPPAHLGASRDYNVDMVPKFMMANGTLVRTLIHTDVTKYLSFKAVDGSFVFSKGKIHKVPATDMEALKSPLMGIFEKRRARNFFIYVQDYNDADPRTHQGLDLTRMTTRELIAKHGLSDDTIDFIGHALALHRDDRYLSEPAIDTVKRMKLYSESLARFQGGSPYIYPLYGLGELPQAFARLSAVYGGTYMLNKPECKVEFDMEGKVCGVTSEGETAKCKKVVCDPSYLANKVRKIGKVARAIAIMSHPIPNANDSHSIQIILPQKQLGRKSDMYVFCCSYTHNVAPKGKFIAFVSAEAETDNPQSELKPGIDLLGPVDELFFDMYDRYEPVNEPSLDNCFVSSSYDATTHFETTVTDVLNMYTLITGKTVDLSVDLSAASAAEEY

SEQ ID NO: 18995 - DNA, 1133 bp, Triticum aestivum
  misc_feature (1)..(1133): Ceres Seq. ID no. 14316043
cagatcaaacacctagggtttggttcgtgagagagaagagagggtgcgatgaagcttgcggggctcaagtcggtggacggagctcacgaggactcgatctgggcggccgcgtgggtgcccgctgctgaccaccgccccacggcgctgctcctcaccggctccatcgacgagaccgtccgcgcctggcaacccgacgacctcgccgccgcgtcccccccggcgggagggcacgcgctcggagtgatatccctcgcggcgcatcctgccggggtcatagccgccgcggtctccatcgacagccacgtccgcgtcttcgacgtcgactccggcgcatccgtcgccacgctcgatgccgcgccctccgaggtctggggcgtccagttccaccccaagggtgttgctctggctgcagctggtggtggcagtggatcagtaaaactctgggacacggagaagtggcaacctattgccagccttcctgttccgcgtccagagggagcccgcgctgataaaacaggcagcggcaagtttgttctttcagtggcctggagtccagatggcaagctcttagcatgtggatccatggatggcacgattgcggtgtatgatgcggtccgcatgaagttcctccaccacctggaggggcaccacatgccagtgaggtccatggtgttctcgccggtggacccccacgtgctcttgaccggatgtgacgactcccacatccacatctacgatgccaaggagaagggcctgatcggggccatgtcgggtcatgcgagctgggtgctgagcatcgacgtgagcccggatggcatggcggtggcgacaggctccagcgaccgcaccgtccggctctgggacatcaatgcgagggcgtcagttcagaccatgagcaaccactcagaccaggtctgggccgttgcattccggccgccgggaggggaaggagtccgtgctggccggctcgccagcgcttcggatgacaagagcatctccctgtacgattactcctagttttacagatttggcgagctgtgatacagccctctgttattgccgtctgttgtaccatgacctgtaccactgtacgatgctgactaaagccgacacttgcaagttgagcgggtttt

SEQ ID NO: 18996 - protein, 322 aa, Triticum aestivum
  peptide (1)..(322): Ceres Seq. ID no. 14316044
  misc_feature (277)..(320): Pfam Name: Pfam Description:  WD domain, G-beta repeat
  misc_feature (1)..(322): NCBI GI NO: 15233721 NR Description: transducin / WD-40 repeat protein family
  misc_feature (12)..(320): NCBI GI NO: 38541742 NR Description: Unknown (protein for MGC:77675) [Danio rerio]
  misc_feature (12)..(320): NCBI GI NO: 37590940 NR Description: Unknown (protein for MGC:75826)
  misc_feature (12)..(320): NCBI GI NO: 13376840 NR Description: recombination protein REC14 [Homo sapiens]
  misc_feature (12)..(320): NCBI GI NO: 13277350 NR Description: meiotic recombination protein REC14 [Mus musculus]
  misc_feature (12)..(320): NCBI GI NO: 12849020 NR Description: unnamed protein product [Mus musculus]
  misc_feature (12)..(320): NCBI GI NO: 33150742 NR Description: G protein beta subunit-like protein [Homo sapiens]
  misc_feature (12)..(288): NCBI GI NO: 26345856 NR Description: unnamed protein product [Mus musculus]
  misc_feature (29)..(319): NCBI GI NO: 21356075 NR Description: CG3909-PA [Drosophila melanogaster]
  misc_feature (34)..(320): NCBI GI NO: 13173173 NR Description: unknown protein i8 [Aedes aegypti]
MKLAGLKSVDGAHEDSIWAAAWVPAADHRPTALLLTGSIDETVRAWQPDDLAAASPPAGGHALGVISLAAHPAGVIAAAVSIDSHVRVFDVDSGASVATLDAAPSEVWGVQFHPKGVALAAAGGGSGSVKLWDTEKWQPIASLPVPRPEGARADKTGSGKFVLSVAWSPDGKLLACGSMDGTIAVYDAVRMKFLHHLEGHHMPVRSMVFSPVDPHVLLTGCDDSHIHIYDAKEKGLIGAMSGHASWVLSIDVSPDGMAVATGSSDRTVRLWDINARASVQTMSNHSDQVWAVAFRPPGGEGVRAGRLASASDDKSISLYDYS

SEQ ID NO: 18997 - DNA, 1449 bp, Triticum aestivum
  misc_feature (1)..(1449): Ceres Seq. ID no. 13654490
  misc_feature (759)..(759): n is a, c, t, g, unknown, or other
  misc_feature (760)..(760): n is a, c, t, g, unknown, or other
  misc_feature (758)..(758): n is a, c, t, g, unknown, or other
taaaaatccaaatcgccgcctcccaccaccaatccgtccctcacatggctgcgctccactcggcggcggggccgcgtagtccgtctgcgtagcgatcggaacgtagtgtttcggtggtgcgcgccgggttgccttatcggagttcgtgggtgttgactatcagggcgagcggatggacgccgacggtcgcctccggcgcgcgctcgccgccttcgggggcggagacgtgtgggacctcgtcgatgccgcgctcgccgcggccgcgccagccgacctccgcgcgcgtcgtgacgggatcgtggagcggctctacgccggggcccgctgccgcaattgcgatgcccccgagagtccaccgcagccgccgcgtcagccggccgaggccgcttctccggcctggcaggaggaggaggaggaggaggaggaggtggccgacgtggatggcctcggcctggaggaggagaccgacgagggcggcggcttggagagcaagatcctggcgatcaaggatttcttggaggaccccgaccagtcggaggaggagctcgtgagcctgctgcagaacctggcagacatggacatcacctacaaggctctccaggagacggacatcggccgacatgtgaatggcctgcgcaagcacccttcgggtgacgtccggcagttagtgaagctgctcgtcaggaaatggaaggagatagtggacggctgggtgcggctccacaactttggtggtgacggtggaaattcgatcctannngatggtgactctcgtgagaggactcaaggcaaaaggctaccaaaatgcccgggtttcagacttcaagtatacgcccagcccaccacagaggcacagtggtttgagttcagagcggtctaggaataacaatgggttcgagtcgacactggagaggcatagagcaagcccagctcctacgtatcatacgaagcagaacaatggcaataactattcaactacttcgtcatctgctccagctagggcgatgagggagcagaaggataatcatttggacgagaagctcgattcagccagaaagaggcttcaagaaaattaccaggaagcacaaaatgcgaaaaaacagaggacaatgcaagtgctggatatccacgacatacccaagccgaaaaataaaaacaccttcatccgcaagcctggtggaggtggcctccctggccgacatcggtgacctggtgaacatgcaaattcttagccgcggcaaggttcaaaatgaaaaataaattgagcacgaaaggtttatgtttgttctttttttagttacactctggtccgctgaaatattgtccagcacaaccaagtcaagatataatactagtactactgataaaaggaccaaggttatatatttgagaatttgtgctgtagcttgttttttttaagaggtctcttgaatgtacctggaagtattc

SEQ ID NO: 18998 - protein, 235 aa, Triticum aestivum
  peptide (1)..(235): Ceres Seq. ID no. 15219660
  misc_feature (51)..(200): NCBI GI NO: 16648730 NR Description: AT5g09850/MYH9_6 [Arabidopsis thaliana]
  misc_feature (51)..(200): NCBI GI NO: 18416107 NR Description: expressed protein [Arabidopsis thaliana]
  misc_feature (51)..(189): NCBI GI NO: 9758963 NR Description: gb|AAF19567
  misc_feature (15)..(181): NCBI GI NO: 34904746 NR Description: contains ESTsAU092606
  misc_feature (94)..(181): NCBI GI NO: 9759255 NR Description: contains similarity to unknownprotein~gb|AAF19567
  misc_feature (98)..(165): NCBI GI NO: 38567964 NR Description: OSJNBa0093F12.5
  misc_feature (135)..(181): NCBI GI NO: 22326614 NR Description: expressed protein [Arabidopsis thaliana]
  misc_feature (82)..(178): NCBI GI NO: 37531732 NR Description: putative transcription elongation factor
  misc_feature (97)..(181): NCBI GI NO: 15228385 NR Description: hypothetical protein [Arabidopsis thaliana]
  misc_feature (119)..(178): NCBI GI NO: 37531730 NR Description: putative transcription elongation factor
  misc_feature (196)..(196): Xaa is any aa, unknown or other
MDADGRLRRALAAFGGGDVWDLVDAALAAAAPADLRARRDGIVERLYAGARCRNCDAPESPPQPPRQPAEAASPAWQEEEEEEEEVADVDGLGLEEETDEGGGLESKILAIKDFLEDPDQSEEELVSLLQNLADMDITYKALQETDIGRHVNGLRKHPSGDVRQLVKLLVRKWKEIVDGWVRLHNFGGDGGNSILXDGDSRERTQGKRLPKCPGFRLQVYAQPTTEAQWFEFRAV

SEQ ID NO: 18999 - protein, 148 aa, Triticum aestivum
  peptide (1)..(148): Ceres Seq. ID no. 15219661
  misc_feature (17)..(147): NCBI GI NO: 16648730 NR Description: AT5g09850/MYH9_6 [Arabidopsis thaliana]
  misc_feature (17)..(147): NCBI GI NO: 18416107 NR Description: expressed protein [Arabidopsis thaliana]
  misc_feature (17)..(147): NCBI GI NO: 9758963 NR Description: gb|AAF19567
  misc_feature (25)..(132): NCBI GI NO: 34904746 NR Description: contains ESTsAU092606
  misc_feature (9)..(139): NCBI GI NO: 9759255 NR Description: contains similarity to unknownprotein~gb|AAF19567
  misc_feature (9)..(139): NCBI GI NO: 22326614 NR Description: expressed protein [Arabidopsis thaliana]
  misc_feature (5)..(131): NCBI GI NO: 37531732 NR Description: putative transcription elongation factor
  misc_feature (91)..(138): NCBI GI NO: 15228385 NR Description: hypothetical protein [Arabidopsis thaliana]
  misc_feature (54)..(137): NCBI GI NO: 37531730 NR Description: putative transcription elongation factor
MVTLVRGLKAKGYQNARVSDFKYTPSPPQRHSGLSSERSRNNNGFESTLERHRASPAPTYHTKQNNGNNYSTTSSSAPARAMREQKDNHLDEKLDSARKRLQENYQEAQNAKKQRTMQVLDIHDIPKPKNKNTFIRKPGGGGLPGRHR

SEQ ID NO: 19000 - DNA, 1367 bp, Triticum aestivum
  misc_feature (1)..(1367): Ceres Seq. ID no. 13598340
cctaatcgaaaaattcaccaaacaatccttgaaatcgacccaagccgctctccctgtcaggtgagccgcgccgccagtctccggcgaccccgagccccaacaatcccatctccggccacaggagctccagggttcctctctccatctggtcctccgctacgccccgaatcgatggagattagggccccgccgacgagcctcaggctcgcgacgccgccttcaaccgccagcttccgcccggtcgccctccggacctccttcctcagcggcagcgtttctcttcgagctgtgcaagtacgtcaatcaaatgtcaacagatttaagtgcaacgccatacggagtaacctcttcgatagactaactagggttgtcaggtcctatgcaaatgcaattctgagttcatttgaagaccctgagaagatcctagatcaagcggtcttggagatgaatgatgatttaataaagatgcggcaagccactgcacaggtcttggcatctcaaaagaggcttgagaacaagtacaaagctgccgaacaagctgatgctgattggtatcggagggctcaacttgctcttcaaaagggtgaagaggatcttgctcgtgaagcccttaaacggcgtaaatcatatgctgaaaatgcaagctcgttaaaggcccagcttgatcagcagaagagtgtcgtcgaaaatcttgtttcaaataccaggcttcttgagagcaagatagcagaggccaagcagaaaaaggataccctaaaagcctgtgctcaatcagcaaagaccgcaacaaaagtgagtgaaatgctggggaatgtgaatacaagtggtgccttgtcagcgtttgagaagatggaggagaaagttatgactatggaatcccaagctgaggcacttggtcaattaggagctgatgatctagaaggaaagtttgcaatgcttgagactacatcggttgacgatgatcttgcacaaatgagaaaagaactgtccgggagatctttgaagggcgaactccctccgggcagagccgcagccagcaaatcaggtagccccttccgagacacagagattgagaaggagctaaatgagctgcggaagaaggccaaagagtattagattttatttacaggccatgtccgtgtcccggggcttgatgaaacctcctacccgaagaaccccagaagttatataggcttgcagatttcagcaatgtgcatctgaaacctccggtgtacttttttttgggggtaaaggtatatgggtgcgtgaagagttctcttgcaattttcctgtgtatgtcattgtactttgtacagttaatcttgtcaccataatgcaaatcattacacccccttttgagcttagct

SEQ ID NO: 19001 - protein, 371 aa, Triticum aestivum
  peptide (1)..(371): Ceres Seq. ID no. 13598341
  misc_feature (115)..(331): Pfam Name: Pfam Description:  PspA/IM30 family
  misc_feature (58)..(371): NCBI GI NO: 34907594 NR Description: putative chloroplast membrane-associated 30 kDprotein
  misc_feature (64)..(370): NCBI GI NO: 729842 NR Description: Membrane-associated 30 kDa protein
  misc_feature (51)..(371): NCBI GI NO: 18408237 NR Description: expressed protein [Arabidopsis thaliana]
  misc_feature (117)..(366): NCBI GI NO: 33866411 NR Description: similar to chloroplast membrane-associated 30 kDprotein
  misc_feature (116)..(367): NCBI GI NO: 23126177 NR Description: hypothetical protein [Nostoc punctiforme]
  misc_feature (116)..(367): NCBI GI NO: 23040390 NR Description: hypothetical protein
  misc_feature (116)..(367): NCBI GI NO: 17229834 NR Description: similar to chloroplast membrane-associated 30 kDprotein
  misc_feature (117)..(366): NCBI GI NO: 33863628 NR Description: similar to chloroplast membrane-associated 30 kDprotein
  misc_feature (116)..(366): NCBI GI NO: 22297827 NR Description: ORF_ID:tlr0283~lipid transfer protein M30 homolog
  misc_feature (116)..(329): NCBI GI NO: 23126176 NR Description: hypothetical protein [Nostoc punctiforme]
PNRKIHQTILEIDPSRSPCQVSRAASLRRPRAPTIPSPATGAPGFLSPSGPPLRPESMEIRAPPTSLRLATPPSTASFRPVALRTSFLSGSVSLRAVQVRQSNVNRFKCNAIRSNLFDRLTRVVRSYANAILSSFEDPEKILDQAVLEMNDDLIKMRQATAQVLASQKRLENKYKAAEQADADWYRRAQLALQKGEEDLAREALKRRKSYAENASSLKAQLDQQKSVVENLVSNTRLLESKIAEAKQKKDTLKACAQSAKTATKVSEMLGNVNTSGALSAFEKMEEKVMTMESQAEALGQLGADDLEGKFAMLETTSVDDDLAQMRKELSGRSLKGELPPGRAAASKSGSPFRDTEIEKELNELRKKAKEY

SEQ ID NO: 19002 - protein, 314 aa, Triticum aestivum
  peptide (1)..(314): Ceres Seq. ID no. 13598342
  misc_feature (58)..(274): Pfam Name: Pfam Description:  PspA/IM30 family
  misc_feature (1)..(314): NCBI GI NO: 34907594 NR Description: putative chloroplast membrane-associated 30 kDprotein
  misc_feature (7)..(313): NCBI GI NO: 729842 NR Description: Membrane-associated 30 kDa protein
  misc_feature (1)..(314): NCBI GI NO: 18408237 NR Description: expressed protein [Arabidopsis thaliana]
  misc_feature (60)..(309): NCBI GI NO: 33866411 NR Description: similar to chloroplast membrane-associated 30 kDprotein
  misc_feature (59)..(310): NCBI GI NO: 23126177 NR Description: hypothetical protein [Nostoc punctiforme]
  misc_feature (59)..(310): NCBI GI NO: 23040390 NR Description: hypothetical protein
  misc_feature (59)..(310): NCBI GI NO: 17229834 NR Description: similar to chloroplast membrane-associated 30 kDprotein
  misc_feature (60)..(309): NCBI GI NO: 33863628 NR Description: similar to chloroplast membrane-associated 30 kDprotein
  misc_feature (59)..(309): NCBI GI NO: 22297827 NR Description: ORF_ID:tlr0283~lipid transfer protein M30 homolog
  misc_feature (59)..(272): NCBI GI NO: 23126176 NR Description: hypothetical protein [Nostoc punctiforme]
MEIRAPPTSLRLATPPSTASFRPVALRTSFLSGSVSLRAVQVRQSNVNRFKCNAIRSNLFDRLTRVVRSYANAILSSFEDPEKILDQAVLEMNDDLIKMRQATAQVLASQKRLENKYKAAEQADADWYRRAQLALQKGEEDLAREALKRRKSYAENASSLKAQLDQQKSVVENLVSNTRLLESKIAEAKQKKDTLKACAQSAKTATKVSEMLGNVNTSGALSAFEKMEEKVMTMESQAEALGQLGADDLEGKFAMLETTSVDDDLAQMRKELSGRSLKGELPPGRAAASKSGSPFRDTEIEKELNELRKKAKEY

SEQ ID NO: 19003 - protein, 223 aa, Triticum aestivum
  peptide (1)..(223): Ceres Seq. ID no. 13598343
  misc_feature (1)..(183): Pfam Name: Pfam Description:  PspA/IM30 family
  misc_feature (1)..(223): NCBI GI NO: 34907594 NR Description: putative chloroplast membrane-associated 30 kDprotein
  misc_feature (1)..(222): NCBI GI NO: 729842 NR Description: Membrane-associated 30 kDa protein
  misc_feature (1)..(223): NCBI GI NO: 18408237 NR Description: expressed protein [Arabidopsis thaliana]
  misc_feature (1)..(218): NCBI GI NO: 33866411 NR Description: similar to chloroplast membrane-associated 30 kDprotein
  misc_feature (1)..(219): NCBI GI NO: 23126177 NR Description: hypothetical protein [Nostoc punctiforme]
  misc_feature (1)..(219): NCBI GI NO: 23040390 NR Description: hypothetical protein
  misc_feature (1)..(219): NCBI GI NO: 17229834 NR Description: similar to chloroplast membrane-associated 30 kDprotein
  misc_feature (1)..(218): NCBI GI NO: 33863628 NR Description: similar to chloroplast membrane-associated 30 kDprotein
  misc_feature (1)..(218): NCBI GI NO: 22297827 NR Description: ORF_ID:tlr0283~lipid transfer protein M30 homolog
  misc_feature (1)..(181): NCBI GI NO: 23126176 NR Description: hypothetical protein [Nostoc punctiforme]
MNDDLIKMRQATAQVLASQKRLENKYKAAEQADADWYRRAQLALQKGEEDLAREALKRRKSYAENASSLKAQLDQQKSVVENLVSNTRLLESKIAEAKQKKDTLKACAQSAKTATKVSEMLGNVNTSGALSAFEKMEEKVMTMESQAEALGQLGADDLEGKFAMLETTSVDDDLAQMRKELSGRSLKGELPPGRAAASKSGSPFRDTEIEKELNELRKKAKEY

SEQ ID NO: 19004 - DNA, 1660 bp, Triticum aestivum
  misc_feature (1)..(1660): Ceres Seq. ID no. 14302321
gttccatttcatttctgtttcggaggaaaggtccagaagcgccgccgccgccgcagcagcgacacgctccctacggcatggcgccggcgtacctggcgaccatacccgcgctccggcgcgcggcgcggcgggccccggcggcgctgttctcgtcggggatcgtcgccggcgacaagcccgttctggtgcgcgatttcgtgaggtcggcgctctacgaccccaaccacggctacttctccaagcggtcggggcccgtcggcgtgctcgactccgccatccgcttccacaagctcgacgggaggaatgcgtacatgaagcatcttgataagctgtataagatgcatgatatctcttggtttactccagtggagctttttaagccatggtatgcctatgcaatagctgcgtcaatccttcgcacggctaatctttcagtcccattgaagatatatgaaatcggaggtggatccgggacatgtgcaaagtgcgtacttgattacatgatgttaaatgccccgccaaaagtctacaataatatgaaatacatctcagtagagattagctcctcccttgctgaaaagcagttggaaactgtcggtgaagtgcagagccatttgtcaaagttcacagtggagcatcgtgatgcaactgacgtagctggatggggcagcaaggatcctcaaccatgctgggtgctaatgcttgaggtacttgacaatctacctcatgaccttgtctattcaccagatcaggtctctccatggatggaggtgtggattgaaaaagtaaatggcagttcacaagtctgtgaggtctacaaaccattgcaagacccattagtttcctgctgcagtgagattgttggcatgaatgaagagaatccatctttgagagaaaaactatcattcgctgcaaaaggactcatctcaaaagtattcccgaagcctcggagagcttggttaccaaccggatgcttgaaactactggatactttgcatcaagctttgccaagtatgtcccttattgcttcagacttcagttatcttcctgatgttagcatacctggcgatagagctccattggtttcttcaaagaaggatgggaaaactttggatcatcccaactatcttgatgcacggggcgatgcagatatcttcttcccaaccgatttcttgctgttggagcagatcgaccaccactgctctggtttctcgaaagaccagatgaatcgtggtgcatttaaacctgtgaagagtaggagaacaatcatacttgattcggctgcctttatggaggagtttgggttgccactgaagacgaggaccaaagatggatacaatccacttcttgatgatttcaggaacacaaagttctatctcagtgtgcctacccacaacaagtagtagtccagcatgcctgcgtcgcttcttctgtttgccatgaggcgctgcattagacgccagtgaatacctaatatgcaactcagtaatcaatttgtcagagcaggttatttatgttttttttcctgtagaagaccgaaattcttaggttggtcaaatttgaggccacagttcaacttcaggcatgctgccgccttttctatgtttgattgatggcacggaagtgaataataccatttgaggccacagttcaattcact

SEQ ID NO: 19005 - protein, 466 aa, Triticum aestivum
  peptide (1)..(466): Ceres Seq. ID no. 14302322
  misc_feature (54)..(118): Pfam Name: Pfam Description:  Uncharacterized ACR, COG1565
  misc_feature (99)..(466): NCBI GI NO: 34906872 NR Description: P0470A12.14
  misc_feature (26)..(118): NCBI GI NO: 34906872 NR Description: P0470A12.14
  misc_feature (47)..(465): NCBI GI NO: 18390452 NR Description: expressed protein [Arabidopsis thaliana]
  misc_feature (225)..(465): NCBI GI NO: 25406821 NR Description: protein F13M7.11 [imported] - Arabidopsis thaliana
  misc_feature (47)..(221): NCBI GI NO: 25406821 NR Description: protein F13M7.11 [imported] - Arabidopsis thaliana
  misc_feature (60)..(402): NCBI GI NO: 40744669 NR Description: hypothetical protein AN1512.2
  misc_feature (60)..(281): NCBI GI NO: 32422641 NR Description: hypothetical protein [Neurospora crassa]
SISFLFRRKGPEAPPPPQQRHAPYGMAPAYLATIPALRRAARRAPAALFSSGIVAGDKPVLVRDFVRSALYDPNHGYFSKRSGPVGVLDSAIRFHKLDGRNAYMKHLDKLYKMHDISWFTPVELFKPWYAYAIAASILRTANLSVPLKIYEIGGGSGTCAKCVLDYMMLNAPPKVYNNMKYISVEISSSLAEKQLETVGEVQSHLSKFTVEHRDATDVAGWGSKDPQPCWVLMLEVLDNLPHDLVYSPDQVSPWMEVWIEKVNGSSQVCEVYKPLQDPLVSCCSEIVGMNEENPSLREKLSFAAKGLISKVFPKPRRAWLPTGCLKLLDTLHQALPSMSLIASDFSYLPDVSIPGDRAPLVSSKKDGKTLDHPNYLDARGDADIFFPTDFLLLEQIDHHCSGFSKDQMNRGAFKPVKSRRTIILDSAAFMEEFGLPLKTRTKDGYNPLLDDFRNTKFYLSVPTHNK

SEQ ID NO: 19006 - protein, 441 aa, Triticum aestivum
  peptide (1)..(441): Ceres Seq. ID no. 14302323
  misc_feature (29)..(93): Pfam Name: Pfam Description:  Uncharacterized ACR, COG1565
  misc_feature (74)..(441): NCBI GI NO: 34906872 NR Description: P0470A12.14
  misc_feature (1)..(93): NCBI GI NO: 34906872 NR Description: P0470A12.14
  misc_feature (22)..(440): NCBI GI NO: 18390452 NR Description: expressed protein [Arabidopsis thaliana]
  misc_feature (200)..(440): NCBI GI NO: 25406821 NR Description: protein F13M7.11 [imported] - Arabidopsis thaliana
  misc_feature (22)..(196): NCBI GI NO: 25406821 NR Description: protein F13M7.11 [imported] - Arabidopsis thaliana
  misc_feature (35)..(377): NCBI GI NO: 40744669 NR Description: hypothetical protein AN1512.2
  misc_feature (35)..(256): NCBI GI NO: 32422641 NR Description: hypothetical protein [Neurospora crassa]
MAPAYLATIPALRRAARRAPAALFSSGIVAGDKPVLVRDFVRSALYDPNHGYFSKRSGPVGVLDSAIRFHKLDGRNAYMKHLDKLYKMHDISWFTPVELFKPWYAYAIAASILRTANLSVPLKIYEIGGGSGTCAKCVLDYMMLNAPPKVYNNMKYISVEISSSLAEKQLETVGEVQSHLSKFTVEHRDATDVAGWGSKDPQPCWVLMLEVLDNLPHDLVYSPDQVSPWMEVWIEKVNGSSQVCEVYKPLQDPLVSCCSEIVGMNEENPSLREKLSFAAKGLISKVFPKPRRAWLPTGCLKLLDTLHQALPSMSLIASDFSYLPDVSIPGDRAPLVSSKKDGKTLDHPNYLDARGDADIFFPTDFLLLEQIDHHCSGFSKDQMNRGAFKPVKSRRTIILDSAAFMEEFGLPLKTRTKDGYNPLLDDFRNTKFYLSVPTHNK

SEQ ID NO: 19007 - protein, 363 aa, Triticum aestivum
  peptide (1)..(363): Ceres Seq. ID no. 14302324
  misc_feature (1)..(294): Pfam Name: Pfam Description:  Uncharacterized ACR, COG1565
  misc_feature (1)..(363): NCBI GI NO: 34906872 NR Description: P0470A12.14
  misc_feature (1)..(15): NCBI GI NO: 34906872 NR Description: P0470A12.14
  misc_feature (1)..(362): NCBI GI NO: 18390452 NR Description: expressed protein [Arabidopsis thaliana]
  misc_feature (122)..(362): NCBI GI NO: 25406821 NR Description: protein F13M7.11 [imported] - Arabidopsis thaliana
  misc_feature (1)..(118): NCBI GI NO: 25406821 NR Description: protein F13M7.11 [imported] - Arabidopsis thaliana
  misc_feature (1)..(299): NCBI GI NO: 40744669 NR Description: hypothetical protein AN1512.2
  misc_feature (1)..(178): NCBI GI NO: 32422641 NR Description: hypothetical protein [Neurospora crassa]
MKHLDKLYKMHDISWFTPVELFKPWYAYAIAASILRTANLSVPLKIYEIGGGSGTCAKCVLDYMMLNAPPKVYNNMKYISVEISSSLAEKQLETVGEVQSHLSKFTVEHRDATDVAGWGSKDPQPCWVLMLEVLDNLPHDLVYSPDQVSPWMEVWIEKVNGSSQVCEVYKPLQDPLVSCCSEIVGMNEENPSLREKLSFAAKGLISKVFPKPRRAWLPTGCLKLLDTLHQALPSMSLIASDFSYLPDVSIPGDRAPLVSSKKDGKTLDHPNYLDARGDADIFFPTDFLLLEQIDHHCSGFSKDQMNRGAFKPVKSRRTIILDSAAFMEEFGLPLKTRTKDGYNPLLDDFRNTKFYLSVPTHNK

SEQ ID NO: 19008 - DNA, 1634 bp, Triticum aestivum
  misc_feature (1)..(1634): Ceres Seq. ID no. 13654273
atgtttcgtgaatacagtgaccaaactgaaccctagagccaagtttagttactgtagatgtaattttctccgatgctccagatacgcctgagcaggatcggctcgtcggactccggggccgcggcctctggcgcggcggctggggcgtccggtggcgccccggcgaagtccgccgccgcggcggctggcggtgccccggagtcggtgactgtcgcttgccccgaccacctggtcatcgcagacctcgccgtggcgaagagcctcggcgccgtcacaaactccgccatcgctgcgacgcgcgccatcggccgccgctcccgccggcccctcggcgagcgcgtccacatctgctcccgctgcgagttccccatcgccattaatggccgcctcatttcttgcgaacatgcattctgtttagcctgtgcaagaagtgattccagctgctatctttgtgatgagcgcattcagaagattcagactgtgaaaatgatggaagggatttttatctgcgctgcacctatgtgcctcaagtctttccttaagaaagcggaatttatgactcatgtacctgaagctcatgcaaatctcctccaaactaacacggagaaggaagaacgtaatgaaccagatgctcctaacatctcccgtgcttctggaggagatgctcaaaggcaatctcaaatgcctgagatatctaccgcacgtgctcctccaaggcggggtgtttcacccacttcaagttctcacatgcaagagcgtgaagaccgatctcggtatcaccagtccagggagagggagcacaccccactaaggccccctatgctaagcaaaccaccatcattccatggtcgccactatccaccaggtgatactcggtccgaaaacaacacacctcaaggatttgaccgttcttacagctgggcccatgatggtacacctggtgcaactccacttcgccaagaacctgaccatggtactcaagacaagcagcaagtgatgcctaattcacctttcatgttctctccaatgcatcctcatcagcaaaacttcatgatgcatatgaatatgaatcagcctttaatccccagctcatcattcagctaccctgtccaacaagatgggaatccgcagtacttcagtgctcctttccagatgcaactgcaagatgccggatcagatcaaggttcagcgtcggtgcctgaggggcttcagcgcccatggggcatggggttgatgggcaatccatctcagggaggtggcggcatggccttcatgccaactggtttcgggatgatgccagacagctcgatgaatccaggcatgcaaggtagggattttcaaggccaagctgatcgtggcgacggaaggggcatccaagaacagttacctatggtgatgcaaatgcagatgtcgctccccccacctccccctacacaacccccgtccgctggacagcagtctttcaacagaacttgatgagttttttgcgtgccaattttatggctgctgccaaaatcgtgctgtactgcgttgggaaattgcaattttgccaccttggcatgtaactgatgagcactcgatggcagcctatgttgtgctaaaaacgatgcaatttaatctgagttgtcatatgc

SEQ ID NO: 19009 - protein, 467 aa, Triticum aestivum
  peptide (1)..(467): Ceres Seq. ID no. 13654274
  misc_feature (1)..(424): NCBI GI NO: 37535662 NR Description: hypothetical protein
  misc_feature (29)..(265): NCBI GI NO: 15240902 NR Description: expressed protein [Arabidopsis thaliana]
  misc_feature (29)..(265): NCBI GI NO: 21536615 NR Description: unknown [Arabidopsis thaliana]
  misc_feature (309)..(467): NCBI GI NO: 37535662 NR Description: hypothetical protein
  misc_feature (86)..(358): NCBI GI NO: 13376204 NR Description: E-cadherin binding protein E7 [Homo sapiens]
  misc_feature (86)..(358): NCBI GI NO: 34785057 NR Description: E-cadherin binding protein E7 [Homo sapiens]
  misc_feature (86)..(358): NCBI GI NO: 9622093 NR Description: E-cadherin binding protein E7 [Mus musculus]
  misc_feature (86)..(358): NCBI GI NO: 19527264 NR Description: E-cadherin binding protein E7 [Mus musculus]
  misc_feature (86)..(358): NCBI GI NO: 34864203 NR Description: similar to Casitas B-lineage lymphoma-like 1
  misc_feature (90)..(457): NCBI GI NO: 22749189 NR Description: hypothetical protein FLJ25735 [Homo sapiens]
MLQIRLSRIGSSDSGAAASGAAAGASGGAPAKSAAAAAGGAPESVTVACPDHLVIADLAVAKSLGAVTNSAIAATRAIGRRSRRPLGERVHICSRCEFPIAINGRLISCEHAFCLACARSDSSCYLCDERIQKIQTVKMMEGIFICAAPMCLKSFLKKAEFMTHVPEAHANLLQTNTEKEERNEPDAPNISRASGGDAQRQSQMPEISTARAPPRRGVSPTSSSHMQEREDRSRYHQSREREHTPLRPPMLSKPPSFHGRHYPPGDTRSENNTPQGFDRSYSWAHDGTPGATPLRQEPDHGTQDKQQVMPNSPFMFSPMHPHQQNFMMHMNMNQPLIPSSSFSYPVQQDGNPQYFSAPFQMQLQDAGSDQGSASVPEGLQRPWGMGLMGNPSQGGGGMAFMPTGFGMMPDSSMNPGMQGRDFQGQADRGDGRGIQEQLPMVMQMQMSLPPPPPTQPPSAGQQSFNRT

SEQ ID NO: 19010 - protein, 329 aa, Triticum aestivum
  peptide (1)..(329): Ceres Seq. ID no. 13654275
  misc_feature (1)..(286): NCBI GI NO: 37535662 NR Description: hypothetical protein
  misc_feature (1)..(127): NCBI GI NO: 15240902 NR Description: expressed protein [Arabidopsis thaliana]
  misc_feature (1)..(127): NCBI GI NO: 21536615 NR Description: unknown [Arabidopsis thaliana]
  misc_feature (171)..(329): NCBI GI NO: 37535662 NR Description: hypothetical protein
  misc_feature (1)..(220): NCBI GI NO: 13376204 NR Description: E-cadherin binding protein E7 [Homo sapiens]
  misc_feature (1)..(220): NCBI GI NO: 34785057 NR Description: E-cadherin binding protein E7 [Homo sapiens]
  misc_feature (1)..(220): NCBI GI NO: 9622093 NR Description: E-cadherin binding protein E7 [Mus musculus]
  misc_feature (1)..(220): NCBI GI NO: 19527264 NR Description: E-cadherin binding protein E7 [Mus musculus]
  misc_feature (1)..(220): NCBI GI NO: 34864203 NR Description: similar to Casitas B-lineage lymphoma-like 1
  misc_feature (1)..(319): NCBI GI NO: 22749189 NR Description: hypothetical protein FLJ25735 [Homo sapiens]
MMEGIFICAAPMCLKSFLKKAEFMTHVPEAHANLLQTNTEKEERNEPDAPNISRASGGDAQRQSQMPEISTARAPPRRGVSPTSSSHMQEREDRSRYHQSREREHTPLRPPMLSKPPSFHGRHYPPGDTRSENNTPQGFDRSYSWAHDGTPGATPLRQEPDHGTQDKQQVMPNSPFMFSPMHPHQQNFMMHMNMNQPLIPSSSFSYPVQQDGNPQYFSAPFQMQLQDAGSDQGSASVPEGLQRPWGMGLMGNPSQGGGGMAFMPTGFGMMPDSSMNPGMQGRDFQGQADRGDGRGIQEQLPMVMQMQMSLPPPPPTQPPSAGQQSFNRT

SEQ ID NO: 19011 - protein, 328 aa, Triticum aestivum
  peptide (1)..(328): Ceres Seq. ID no. 13654276
  misc_feature (1)..(285): NCBI GI NO: 37535662 NR Description: hypothetical protein
  misc_feature (1)..(126): NCBI GI NO: 15240902 NR Description: expressed protein [Arabidopsis thaliana]
  misc_feature (1)..(126): NCBI GI NO: 21536615 NR Description: unknown [Arabidopsis thaliana]
  misc_feature (170)..(328): NCBI GI NO: 37535662 NR Description: hypothetical protein
  misc_feature (1)..(219): NCBI GI NO: 13376204 NR Description: E-cadherin binding protein E7 [Homo sapiens]
  misc_feature (1)..(219): NCBI GI NO: 34785057 NR Description: E-cadherin binding protein E7 [Homo sapiens]
  misc_feature (1)..(219): NCBI GI NO: 9622093 NR Description: E-cadherin binding protein E7 [Mus musculus]
  misc_feature (1)..(219): NCBI GI NO: 19527264 NR Description: E-cadherin binding protein E7 [Mus musculus]
  misc_feature (1)..(219): NCBI GI NO: 34864203 NR Description: similar to Casitas B-lineage lymphoma-like 1
  misc_feature (1)..(318): NCBI GI NO: 22749189 NR Description: hypothetical protein FLJ25735 [Homo sapiens]
MEGIFICAAPMCLKSFLKKAEFMTHVPEAHANLLQTNTEKEERNEPDAPNISRASGGDAQRQSQMPEISTARAPPRRGVSPTSSSHMQEREDRSRYHQSREREHTPLRPPMLSKPPSFHGRHYPPGDTRSENNTPQGFDRSYSWAHDGTPGATPLRQEPDHGTQDKQQVMPNSPFMFSPMHPHQQNFMMHMNMNQPLIPSSSFSYPVQQDGNPQYFSAPFQMQLQDAGSDQGSASVPEGLQRPWGMGLMGNPSQGGGGMAFMPTGFGMMPDSSMNPGMQGRDFQGQADRGDGRGIQEQLPMVMQMQMSLPPPPPTQPPSAGQQSFNRT

SEQ ID NO: 19012 - DNA, 834 bp, Triticum aestivum
  misc_feature (1)..(834): Ceres Seq. ID no. 12584190
acaccacaccattgccactctcgtcctcctccagtccggcctccgctgtattggactgcaccggcgccggtgccggccgggctgcagaccggtcgactccttcgccttgcccggcctcctcgcagacacggctttggagattcaaagaatttacgttactagacaattcatgcatatatgaagtcctacttgtaggtgagcctagcagtgctattcttatgtgcagtatggcacggacaactgcagatcaggcaatggcgacacgtaagttggtcgtaaaggtcgtcggtgctcacggcctggcacacagcaagaggggtttacccagtgcatttgttgtgctttcgtttgattctcagcagttccgcacgagtgtcaaggagaataatgagaacccggtatggaacgacaccttctgcttcaacgtgttggatcgacccaagattcatgagctagttcttcaagtttgtgtgtatgacaccaatacgtctgttcaaggcgaaatgtctttgattggaaaagtcaaagtaaatggggcctcattccggccctgtgacaaaggaccatcaaattatccgctgaggcttgggaatgttaaacatacatggcgcatacgtgacagaagaggatcttcagagatagttcagaggtagtttaactaggatatgatatctattcggtcgtaaccaagtctatctcttgcttttctttctcctcaagttgtatcccgattctctcttatcttctcaaccaactcatgtatgcgcctcagggttattgcacccctgctatataacacgtagcacgtcgcccaagatagggtaagacgtttcc

SEQ ID NO: 19013 - protein, 216 aa, Triticum aestivum
  peptide (1)..(216): Ceres Seq. ID no. 12584191
  misc_feature (90)..(174): Pfam Name: Pfam Description:  C2 domain
  misc_feature (85)..(193): NCBI GI NO: 32488702 NR Description: OSJNBa0088H09.3
  misc_feature (85)..(193): NCBI GI NO: 15234247 NR Description: putative protein; protein id: At4g11620.1
  misc_feature (85)..(216): NCBI GI NO: 22831331 NR Description: contains ESTsAU165964
  misc_feature (85)..(193): NCBI GI NO: 28973638 NR Description: unknown protein [Arabidopsis thaliana]
  misc_feature (85)..(198): NCBI GI NO: 22328187 NR Description: putative phosphoribosylanthranilate transferase
  misc_feature (79)..(180): NCBI GI NO: 15219665 NR Description: putative phosphoribosylanthranilate transferase
  misc_feature (88)..(209): NCBI GI NO: 12324804 NR Description: putative phosphoribosylanthranilate transferase
  misc_feature (88)..(209): NCBI GI NO: 15221349 NR Description: hypothetical protein; protein id: At1g74720.1
  misc_feature (88)..(209): NCBI GI NO: 25406370 NR Description: hypothetical protein F25A4.30
TTPLPLSSSSSPASAVLDCTGAGAGRAADRSTPSPCPASSQTRLWRFKEFTLLDNSCIYEVLLVGEPSSAILMCSMARTTADQAMATRKLVVKVVGAHGLAHSKRGLPSAFVVLSFDSQQFRTSVKENNENPVWNDTFCFNVLDRPKIHELVLQVCVYDTNTSVQGEMSLIGKVKVNGASFRPCDKGPSNYPLRLGNVKHTWRIRDRRGSSEIVQR

SEQ ID NO: 19014 - protein, 144 aa, Triticum aestivum
  peptide (1)..(144): Ceres Seq. ID no. 12584192
  misc_feature (18)..(102): Pfam Name: Pfam Description:  C2 domain
  misc_feature (13)..(121): NCBI GI NO: 32488702 NR Description: OSJNBa0088H09.3
  misc_feature (13)..(121): NCBI GI NO: 15234247 NR Description: putative protein; protein id: At4g11620.1
  misc_feature (13)..(144): NCBI GI NO: 22831331 NR Description: contains ESTsAU165964
  misc_feature (13)..(121): NCBI GI NO: 28973638 NR Description: unknown protein [Arabidopsis thaliana]
  misc_feature (13)..(126): NCBI GI NO: 22328187 NR Description: putative phosphoribosylanthranilate transferase
  misc_feature (7)..(108): NCBI GI NO: 15219665 NR Description: putative phosphoribosylanthranilate transferase
  misc_feature (16)..(137): NCBI GI NO: 12324804 NR Description: putative phosphoribosylanthranilate transferase
  misc_feature (16)..(137): NCBI GI NO: 15221349 NR Description: hypothetical protein; protein id: At1g74720.1
  misc_feature (16)..(137): NCBI GI NO: 25406370 NR Description: hypothetical protein F25A4.30
MCSMARTTADQAMATRKLVVKVVGAHGLAHSKRGLPSAFVVLSFDSQQFRTSVKENNENPVWNDTFCFNVLDRPKIHELVLQVCVYDTNTSVQGEMSLIGKVKVNGASFRPCDKGPSNYPLRLGNVKHTWRIRDRRGSSEIVQR

SEQ ID NO: 19015 - protein, 141 aa, Triticum aestivum
  peptide (1)..(141): Ceres Seq. ID no. 12584193
  misc_feature (15)..(99): Pfam Name: Pfam Description:  C2 domain
  misc_feature (10)..(118): NCBI GI NO: 32488702 NR Description: OSJNBa0088H09.3
  misc_feature (10)..(118): NCBI GI NO: 15234247 NR Description: putative protein; protein id: At4g11620.1
  misc_feature (10)..(141): NCBI GI NO: 22831331 NR Description: contains ESTsAU165964
  misc_feature (10)..(118): NCBI GI NO: 28973638 NR Description: unknown protein [Arabidopsis thaliana]
  misc_feature (10)..(123): NCBI GI NO: 22328187 NR Description: putative phosphoribosylanthranilate transferase
  misc_feature (4)..(105): NCBI GI NO: 15219665 NR Description: putative phosphoribosylanthranilate transferase
  misc_feature (13)..(134): NCBI GI NO: 12324804 NR Description: putative phosphoribosylanthranilate transferase
  misc_feature (13)..(134): NCBI GI NO: 15221349 NR Description: hypothetical protein; protein id: At1g74720.1
  misc_feature (13)..(134): NCBI GI NO: 25406370 NR Description: hypothetical protein F25A4.30
MARTTADQAMATRKLVVKVVGAHGLAHSKRGLPSAFVVLSFDSQQFRTSVKENNENPVWNDTFCFNVLDRPKIHELVLQVCVYDTNTSVQGEMSLIGKVKVNGASFRPCDKGPSNYPLRLGNVKHTWRIRDRRGSSEIVQR

SEQ ID NO: 19016 - DNA, 532 bp, Triticum aestivum
  misc_feature (1)..(532): Ceres Seq. ID no. 13596434
agcaagcagctgatccgagttaaccattagccaaaagtaatcttgcttttccatttcccgagagagctcagttcgtgtctgcactccagtccagtgtttgtttgagcagcagccatggcctccaaccaggacaaggcaagctaccgcgccggcgaggccaaggcccacaccgaggagaaggccggacaggtgaccggcgcggccaaggacgaggcgtgcgacgccaaggaccgggcgtcgggcgcggcggggcaagcgacggggaaggggcagggcgccgtggaggccacgaagcagaaggccggcgaggcggggcagaagacgtccgagacggcgcaggccggcaaggaccgggccgccgagggcaaggaccggaccggcagctacctcggccacgcgaccgaggggaccaagcagaaggcctccgaggcgacggggtacacgcaggacagggcttccgacgcggcgcagtacaccaaggactccgccgtcgccggcaaggacaagaccggcagcgtcctcagccaggccc

SEQ ID NO: 19017 - protein, 139 aa, Triticum aestivum
  peptide (1)..(139): Ceres Seq. ID no. 13596435
  misc_feature (79)..(138): Pfam Name: Pfam Description:  Late embryogenesis abundant protein
  misc_feature (1)..(138): NCBI GI NO: 7489493 NR Description: LEA protein - rice
  misc_feature (1)..(138): NCBI GI NO: 4105441 NR Description: group 3 LEA protein [Oryza sativa]
  misc_feature (1)..(138): NCBI GI NO: 7489569 NR Description: protein LEA type 1 - rice
  misc_feature (1)..(138): NCBI GI NO: 4929080 NR Description: ABA-inducible protein WRAB1 [Triticum aestivum]
  misc_feature (1)..(138): NCBI GI NO: 25989709 NR Description: LEA2 protein [Triticum aestivum]
  misc_feature (1)..(138): NCBI GI NO: 25989707 NR Description: LEA3 protein [Triticum aestivum]
  misc_feature (1)..(138): NCBI GI NO: 126081 NR Description: ABA-inducible protein PHV A1
  misc_feature (34)..(138): NCBI GI NO: 33342178 NR Description: ABA inducible protein [Triticum aestivum]
  misc_feature (1)..(125): NCBI GI NO: 7387829 NR Description: Late embryogenesis abundant protein, group 3 (LEA)
  misc_feature (1)..(138): NCBI GI NO: 25989705 NR Description: LEA1 protein [Triticum aestivum]
MASNQDKASYRAGEAKAHTEEKAGQVTGAAKDEACDAKDRASGAAGQATGKGQGAVEATKQKAGEAGQKTSETAQAGKDRAAEGKDRTGSYLGHATEGTKQKASEATGYTQDRASDAAQYTKDSAVAGKDKTGSVLSQA

SEQ ID NO: 19018 - DNA, 1421 bp, Triticum aestivum
  misc_feature (1)..(1421): Ceres Seq. ID no. 13596394
attcccaggcacatcccatttccaatcccccacccttcctctctctctcccccgcccctagccgtcgccggagagagagagggacgcggccgcgggagaagaaggagggaagatgatgatgacacgggcctccatgggggccatggagggcgcggcgctggacgaggtggtgcggcgattggtcgagggcggccgcggcgggcggcaggtgcagctgtccgaggcggagatccggcagctctgcgtcgacgccaagcgggttttcctgtcccagccgaacctcctccgcatccaggcccccgtcaagatctgcggtgatatccatggtcagtttgttgatcttctgaggttgtttgatttgggtggttatcctccaacctcaacctatgtattcctcggagactacgtagatagaggcaaacagagcttggaaactatatgcttactgctggcctacaaaataaggtaccctgacaaggttttcctgttaaggggtaaccatgaagatgcaaaaatcaacagagtttatggtttctatgatgaatgcaagaggaggttcaatgttcgactgtggaagatattctctgattgcttcaactgcctgcctattgcagcactcattgacgacaagatactgtgcatgcatggtggcctttcacctgaactgactaacctggaccaaataaaggatattgagaggccggctgagattcctgattatggtctcctgtgtgatttgctttggtctgatcctagccctgacggagaagggtggggggagagtgacagaggtgtttcatgtacgtttggtgcagatatgcttatagagttcttggagaaaaatgatcttgatcttatctgccgagcccatcaggtggtagaagatggttatgagttcttcgcacagcggagattagtcaccatcttctcagctccaaattactgcggggaattcgataatgtaggtgctctgttgagcatagatgaaaatctaatgtgctcatttcaaatcttgaagccaaatgaaacaggcacatcgcgggtaaaaagacaaattccaaataagccagcaaccgggggaagtgcctgatctgatcaacatccattccttcaatattagcatcgtcggctcgaagggggtgatctgatctattgtttggatccaccatggcatggcaatattcatccaccagccaattgtcttgcttaaccaccctttgccgagcatttgtaaatgtccattggctctgcactcgttttctctgtacagaattaggccggatttaacagcaccacctattctggttgttcttcctggttgcgcggcatctgtttttgtaagttacttttgtggtacatttttgcctgtggatgttgatagcttctgtttgtgagcatctattatttgccttatgtttgtc

SEQ ID NO: 19019 - protein, 325 aa, Triticum aestivum
  peptide (1)..(325): Ceres Seq. ID no. 13596395
  misc_feature (62)..(257): Pfam Name: Pfam Description:  Calcineurin-like phosphoesterase
  misc_feature (8)..(324): NCBI GI NO: 34895162 NR Description: putative serine/threonine protein phosphatase
  misc_feature (2)..(323): NCBI GI NO: 29290586 NR Description: serine threonine protein phosphatase
  misc_feature (2)..(316): NCBI GI NO: 15230010 NR Description: serine/threonine protein phosphatase (PP1)
  misc_feature (2)..(316): NCBI GI NO: 30690812 NR Description: serine/threonine protein phosphatase type one(PP1)
  misc_feature (11)..(322): NCBI GI NO: 1346765 NR Description: SERINE/THREONINE PROTEIN PHOSPHATASE PP1
  misc_feature (2)..(318): NCBI GI NO: 30690815 NR Description: serine/threonine protein phosphatase type one(PP1)
  misc_feature (2)..(316): NCBI GI NO: 3153205 NR Description: serine/threonine protein phosphatase type one
  misc_feature (11)..(318): NCBI GI NO: 21593410 NR Description: TOPP8 serine/threonine protein phosphatase type one
  misc_feature (3)..(305): NCBI GI NO: 5917726 NR Description: serine/threonine protein phosphatase 1; PP1
  misc_feature (10)..(305): NCBI GI NO: 15227080 NR Description: phosphoprotein phosphatase-type 1 catalytic subunit
MMMTRASMGAMEGAALDEVVRRLVEGGRGGRQVQLSEAEIRQLCVDAKRVFLSQPNLLRIQAPVKICGDIHGQFVDLLRLFDLGGYPPTSTYVFLGDYVDRGKQSLETICLLLAYKIRYPDKVFLLRGNHEDAKINRVYGFYDECKRRFNVRLWKIFSDCFNCLPIAALIDDKILCMHGGLSPELTNLDQIKDIERPAEIPDYGLLCDLLWSDPSPDGEGWGESDRGVSCTFGADMLIEFLEKNDLDLICRAHQVVEDGYEFFAQRRLVTIFSAPNYCGEFDNVGALLSIDENLMCSFQILKPNETGTSRVKRQIPNKPATGGSA

SEQ ID NO: 19020 - protein, 324 aa, Triticum aestivum
  peptide (1)..(324): Ceres Seq. ID no. 13596396
  misc_feature (61)..(256): Pfam Name: Pfam Description:  Calcineurin-like phosphoesterase
  misc_feature (7)..(323): NCBI GI NO: 34895162 NR Description: putative serine/threonine protein phosphatase
  misc_feature (1)..(322): NCBI GI NO: 29290586 NR Description: serine threonine protein phosphatase
  misc_feature (1)..(315): NCBI GI NO: 15230010 NR Description: serine/threonine protein phosphatase (PP1)
  misc_feature (1)..(315): NCBI GI NO: 30690812 NR Description: serine/threonine protein phosphatase type one(PP1)
  misc_feature (10)..(321): NCBI GI NO: 1346765 NR Description: SERINE/THREONINE PROTEIN PHOSPHATASE PP1
  misc_feature (1)..(317): NCBI GI NO: 30690815 NR Description: serine/threonine protein phosphatase type one(PP1)
  misc_feature (1)..(315): NCBI GI NO: 3153205 NR Description: serine/threonine protein phosphatase type one
  misc_feature (10)..(317): NCBI GI NO: 21593410 NR Description: TOPP8 serine/threonine protein phosphatase type one
  misc_feature (2)..(304): NCBI GI NO: 5917726 NR Description: serine/threonine protein phosphatase 1; PP1
  misc_feature (9)..(304): NCBI GI NO: 15227080 NR Description: phosphoprotein phosphatase-type 1 catalytic subunit
MMTRASMGAMEGAALDEVVRRLVEGGRGGRQVQLSEAEIRQLCVDAKRVFLSQPNLLRIQAPVKICGDIHGQFVDLLRLFDLGGYPPTSTYVFLGDYVDRGKQSLETICLLLAYKIRYPDKVFLLRGNHEDAKINRVYGFYDECKRRFNVRLWKIFSDCFNCLPIAALIDDKILCMHGGLSPELTNLDQIKDIERPAEIPDYGLLCDLLWSDPSPDGEGWGESDRGVSCTFGADMLIEFLEKNDLDLICRAHQVVEDGYEFFAQRRLVTIFSAPNYCGEFDNVGALLSIDENLMCSFQILKPNETGTSRVKRQIPNKPATGGSA

SEQ ID NO: 19021 - protein, 323 aa, Triticum aestivum
  peptide (1)..(323): Ceres Seq. ID no. 13596397
  misc_feature (60)..(255): Pfam Name: Pfam Description:  Calcineurin-like phosphoesterase
  misc_feature (6)..(322): NCBI GI NO: 34895162 NR Description: putative serine/threonine protein phosphatase
  misc_feature (1)..(321): NCBI GI NO: 29290586 NR Description: serine threonine protein phosphatase
  misc_feature (1)..(314): NCBI GI NO: 15230010 NR Description: serine/threonine protein phosphatase (PP1)
  misc_feature (1)..(314): NCBI GI NO: 30690812 NR Description: serine/threonine protein phosphatase type one(PP1)
  misc_feature (9)..(320): NCBI GI NO: 1346765 NR Description: SERINE/THREONINE PROTEIN PHOSPHATASE PP1
  misc_feature (1)..(316): NCBI GI NO: 30690815 NR Description: serine/threonine protein phosphatase type one(PP1)
  misc_feature (1)..(314): NCBI GI NO: 3153205 NR Description: serine/threonine protein phosphatase type one
  misc_feature (9)..(316): NCBI GI NO: 21593410 NR Description: TOPP8 serine/threonine protein phosphatase type one
  misc_feature (1)..(303): NCBI GI NO: 5917726 NR Description: serine/threonine protein phosphatase 1; PP1
  misc_feature (8)..(303): NCBI GI NO: 15227080 NR Description: phosphoprotein phosphatase-type 1 catalytic subunit
MTRASMGAMEGAALDEVVRRLVEGGRGGRQVQLSEAEIRQLCVDAKRVFLSQPNLLRIQAPVKICGDIHGQFVDLLRLFDLGGYPPTSTYVFLGDYVDRGKQSLETICLLLAYKIRYPDKVFLLRGNHEDAKINRVYGFYDECKRRFNVRLWKIFSDCFNCLPIAALIDDKILCMHGGLSPELTNLDQIKDIERPAEIPDYGLLCDLLWSDPSPDGEGWGESDRGVSCTFGADMLIEFLEKNDLDLICRAHQVVEDGYEFFAQRRLVTIFSAPNYCGEFDNVGALLSIDENLMCSFQILKPNETGTSRVKRQIPNKPATGGSA

SEQ ID NO: 19022 - DNA, 1728 bp, Triticum aestivum
  misc_feature (1)..(1728): Ceres Seq. ID no. 12614670
atcaagtacacagttcactatcatctagcctttcttcccccatctctctcgagaaacaaagcaatggttcttggactgctggtgagttccccagccacggtgctatggagcctcctgggcctggcgcttctctggcaggtcaagcggctggttgactacacgtggtggcggccacggcggctccagcgggcgctgcgtgcgcagggcctccgcgggacgccgtaccgcttccccgtcggcgacctcggcgactacgggcggcagggcaaagaggcgtcgtccagggcgctgccgctgcggtgccatgacatacgcgcccacgtcgcgccgtacctctgcaacaccgtccgggagcacggcaagacgtgcgtctcctggttcggccccgtccccaaggtgaccatcgccgaccccggcgtcacccgggaggtgatgtccaacaagttcggccacttcgagaagctccagttcccgacgctgaccaggctcctcgctggcggcgtcgcggtctatgagggtgagaagtgggtcaagcacaggaggatccttaacccggcgttccatatcgagaagctcaagttcatgatgccagcattctctgcatgctgtgaagagcttgtgagcagatggactcagtcccttggttctgacggttggtgtgaggtggatgtctgcccagagtttcaaaccctcaccggagatgtcatctcacgaaccgcgttcggcagcagctacctcgaaggtagacggattttcgagctgcaatctgtgcaagccgaccgcattgtggctgaagttaagaagatcttcattcctggttatatgtccttgcctaccaagaagaacagactgatgcgtcagactaataacgagattgaacccattctacgaggtctaattgaaaaaagaatgcaatccatgcaacaaggagaaagcaccaaggatgatttactcggcttaatgcttgagtcaaacatgaggggaacagatgacaagggtcaacccatcctaggaatgacaattgaagaagtgatagaggaatgcaaattgttctattttgcagggtccgagacaacatctgtattgctcacctggacaatgatcgtactggccatgcaccccgagtggcaagaccgtgcaagggaggaggtccttggcctatttgagaagaagaagcccgagtatgacggctttagcaaactcaaaaccgtgaccatgattctttacgaggttctccgtctttatccgccggccgttgcattcatgcgaaaaacatacaaggagatagagattgaaagcatcacctaccctgccggtgtgatcatcgagcttcctgtgctgcttatccaccatgacccagacatatggggaagcgatgtgcatgagttcaagccagaaaggtttgctgatgggatcgccaaggcatccaaggatcctggtgccttcctcccatttggttggggtccacggatctgcatcggtcagaattttgctctgcttgaggccaagatggctttgtgcatgatccttcaacatttcgaattcgaccttggcccgacgtattctcatatgctgcataaccagaaaatgttgcgccccatgcatggtgcacaaattaagctcagggcaatatgacggtcagtattatagcagtgtgcatgatgtcattttattacatagtgtttagtggttggccatgtaataagctttcatacctacaaatgtttg

SEQ ID NO: 19023 - protein, 544 aa, Triticum aestivum
  peptide (1)..(544): Ceres Seq. ID no. 12614671
  misc_feature (22)..(544): NCBI GI NO: 34912894 NR Description: putative cytochrome P450
  misc_feature (22)..(544): NCBI GI NO: 19909879 NR Description: cytochrome P450 [Oryza sativa]
  misc_feature (22)..(544): NCBI GI NO: 34912896 NR Description: putative cytochrome P450
  misc_feature (29)..(544): NCBI GI NO: 21805634 NR Description: cytochrome P450 monooxygenase CYP72A26
  misc_feature (108)..(544): NCBI GI NO: 21842136 NR Description: cytochrome P450 monooxygenase CYP72A27
  misc_feature (39)..(544): NCBI GI NO: 14719280 NR Description: cytochrome P450 [Zea mays]
  misc_feature (323)..(543): NCBI GI NO: 37589372 NR Description: Unknown (protein for MGC:68990) [Xenopus laevis]
  misc_feature (116)..(243): NCBI GI NO: 37589372 NR Description: Unknown (protein for MGC:68990) [Xenopus laevis]
  misc_feature (119)..(513): NCBI GI NO: 3372841 NR Description: cytochrome P450 [Homarus americanus]
  misc_feature (117)..(533): NCBI GI NO: 4151927 NR Description: cytochrome P450 [Sus scrofa]
IKYTVHYHLAFLPPSLSRNKAMVLGLLVSSPATVLWSLLGLALLWQVKRLVDYTWWRPRRLQRALRAQGLRGTPYRFPVGDLGDYGRQGKEASSRALPLRCHDIRAHVAPYLCNTVREHGKTCVSWFGPVPKVTIADPGVTREVMSNKFGHFEKLQFPTLTRLLAGGVAVYEGEKWVKHRRILNPAFHIEKLKFMMPAFSACCEELVSRWTQSLGSDGWCEVDVCPEFQTLTGDVISRTAFGSSYLEGRRIFELQSVQADRIVAEVKKIFIPGYMSLPTKKNRLMRQTNNEIEPILRGLIEKRMQSMQQGESTKDDLLGLMLESNMRGTDDKGQPILGMTIEEVIEECKLFYFAGSETTSVLLTWTMIVLAMHPEWQDRAREEVLGLFEKKKPEYDGFSKLKTVTMILYEVLRLYPPAVAFMRKTYKEIEIESITYPAGVIIELPVLLIHHDPDIWGSDVHEFKPERFADGIAKASKDPGAFLPFGWGPRICIGQNFALLEAKMALCMILQHFEFDLGPTYSHMLHNQKMLRPMHGAQIKLRAI

SEQ ID NO: 19024 - protein, 523 aa, Triticum aestivum
  peptide (1)..(523): Ceres Seq. ID no. 12614672
  misc_feature (1)..(523): NCBI GI NO: 34912894 NR Description: putative cytochrome P450
  misc_feature (1)..(523): NCBI GI NO: 19909879 NR Description: cytochrome P450 [Oryza sativa]
  misc_feature (1)..(523): NCBI GI NO: 34912896 NR Description: putative cytochrome P450
  misc_feature (8)..(523): NCBI GI NO: 21805634 NR Description: cytochrome P450 monooxygenase CYP72A26
  misc_feature (87)..(523): NCBI GI NO: 21842136 NR Description: cytochrome P450 monooxygenase CYP72A27
  misc_feature (18)..(523): NCBI GI NO: 14719280 NR Description: cytochrome P450 [Zea mays]
  misc_feature (302)..(522): NCBI GI NO: 37589372 NR Description: Unknown (protein for MGC:68990) [Xenopus laevis]
  misc_feature (95)..(222): NCBI GI NO: 37589372 NR Description: Unknown (protein for MGC:68990) [Xenopus laevis]
  misc_feature (98)..(492): NCBI GI NO: 3372841 NR Description: cytochrome P450 [Homarus americanus]
  misc_feature (96)..(512): NCBI GI NO: 4151927 NR Description: cytochrome P450 [Sus scrofa]
MVLGLLVSSPATVLWSLLGLALLWQVKRLVDYTWWRPRRLQRALRAQGLRGTPYRFPVGDLGDYGRQGKEASSRALPLRCHDIRAHVAPYLCNTVREHGKTCVSWFGPVPKVTIADPGVTREVMSNKFGHFEKLQFPTLTRLLAGGVAVYEGEKWVKHRRILNPAFHIEKLKFMMPAFSACCEELVSRWTQSLGSDGWCEVDVCPEFQTLTGDVISRTAFGSSYLEGRRIFELQSVQADRIVAEVKKIFIPGYMSLPTKKNRLMRQTNNEIEPILRGLIEKRMQSMQQGESTKDDLLGLMLESNMRGTDDKGQPILGMTIEEVIEECKLFYFAGSETTSVLLTWTMIVLAMHPEWQDRAREEVLGLFEKKKPEYDGFSKLKTVTMILYEVLRLYPPAVAFMRKTYKEIEIESITYPAGVIIELPVLLIHHDPDIWGSDVHEFKPERFADGIAKASKDPGAFLPFGWGPRICIGQNFALLEAKMALCMILQHFEFDLGPTYSHMLHNQKMLRPMHGAQIKLRAI

SEQ ID NO: 19025 - protein, 400 aa, Triticum aestivum
  peptide (1)..(400): Ceres Seq. ID no. 12614673
  misc_feature (1)..(400): NCBI GI NO: 34912894 NR Description: putative cytochrome P450
  misc_feature (1)..(400): NCBI GI NO: 19909879 NR Description: cytochrome P450 [Oryza sativa]
  misc_feature (1)..(400): NCBI GI NO: 34912896 NR Description: putative cytochrome P450
  misc_feature (1)..(400): NCBI GI NO: 21805634 NR Description: cytochrome P450 monooxygenase CYP72A26
  misc_feature (1)..(400): NCBI GI NO: 21842136 NR Description: cytochrome P450 monooxygenase CYP72A27
  misc_feature (1)..(400): NCBI GI NO: 14719280 NR Description: cytochrome P450 [Zea mays]
  misc_feature (179)..(399): NCBI GI NO: 37589372 NR Description: Unknown (protein for MGC:68990) [Xenopus laevis]
  misc_feature (1)..(99): NCBI GI NO: 37589372 NR Description: Unknown (protein for MGC:68990) [Xenopus laevis]
  misc_feature (1)..(369): NCBI GI NO: 3372841 NR Description: cytochrome P450 [Homarus americanus]
  misc_feature (1)..(389): NCBI GI NO: 4151927 NR Description: cytochrome P450 [Sus scrofa]
MSNKFGHFEKLQFPTLTRLLAGGVAVYEGEKWVKHRRILNPAFHIEKLKFMMPAFSACCEELVSRWTQSLGSDGWCEVDVCPEFQTLTGDVISRTAFGSSYLEGRRIFELQSVQADRIVAEVKKIFIPGYMSLPTKKNRLMRQTNNEIEPILRGLIEKRMQSMQQGESTKDDLLGLMLESNMRGTDDKGQPILGMTIEEVIEECKLFYFAGSETTSVLLTWTMIVLAMHPEWQDRAREEVLGLFEKKKPEYDGFSKLKTVTMILYEVLRLYPPAVAFMRKTYKEIEIESITYPAGVIIELPVLLIHHDPDIWGSDVHEFKPERFADGIAKASKDPGAFLPFGWGPRICIGQNFALLEAKMALCMILQHFEFDLGPTYSHMLHNQKMLRPMHGAQIKLRAI

SEQ ID NO: 19026 - DNA, 1354 bp, Triticum aestivum
  misc_feature (1)..(1354): Ceres Seq. ID no. 13654574
agaatcatcattcctttcatttcatttcattgtgcaccaccaacccaacccagagactcctcagagtaatcgagccggccatcttgcttcgttccatggcgtctctgcttctcaagggcgtgcacaagcgtctgggcctgcccactatctccatctcctgctcctccgccgacgccaccaacatcatcgcctccaccggcaccggcgccgtcgttggcagcagcggccgggccatcgaccgccactcgccgcggctccgcgacccacaccgctcctccacctccaagccgcccagaccaagcaccagcaccaaagactcggtgtcctcagaggaccccaagcagcagcagcagcagcacggcagcaagaagaagaagaagagcaccacggctggtgctgctgcagatgggagaaggtcttcggagaagaggctggtcagcccggccacctcctccaggttcctcctcaactcctcccgcctgcagtccgacgacctcgacgtcctcgcgctgcccccgcctccgccgccgtccttcatcgacgcgttgcccgtcggcgaagggaagccgaagccgccgtccttcatcgacgcgttcccggccgacgcctccctgccggttccctctgccaaggacgcgccgccgtcgactgtgcaccaagcagagtcctcgtcgtcagggacgtcctcctctgcttcgtcgtcgtcggagatcacggccgtccaagacccggagcagcacaaggcggcggcgctggtgcggtcgtcctcgacggcggcggcgaggacgacgcaggtggtggtgctgcgcgtgtcgctgcactgcaaggggtgcgcgggcaaggtgaagaagcacatcgccaagatggagggggtgacgtcgttcgacatcgacatcccgagcaagaaggtgacggtggtcggcgacgtgacgccgctgggggtgctcaccagcgtctccaaggtgaagcccgcgcagttctggccgtcgcagccgtgccccccgcatgcctccgcttccttctgaacgcgccaacctgtgatctccgctctctctgaatcacaagaagatacggggtcgtagctggtcgagtggtcttccatggtggaccactcgcgcgctgcgcgcaggcgatcgaagtgcgtagtagaacgtcgagaaagatgggcagatgccacgcacgtagtacctccatatttctttccttttttttcttgaaagaaacggtattgaagctcctccatatctcaatgcctgtattctgaattgagatatactcatcctacagtttctgtagtacaaaatggagtaataatcagggccgtacaaaatggagtaatactcatcctacagtt

SEQ ID NO: 19027 - protein, 351 aa, Triticum aestivum
  peptide (1)..(351): Ceres Seq. ID no. 13654575
ESSFLSFHFIVHHQPNPETPQSNRAGHLASFHGVSASQGRAQASGPAHYLHLLLLRRRHQHHRLHRHRRRRWQQRPGHRPPLAAAPRPTPLLHLQAAQTKHQHQRLGVLRGPQAAAAAARQQEEEEEHHGWCCCRWEKVFGEEAGQPGHLLQVPPQLLPPAVRRPRRPRAAPASAAVLHRRVARRRREAEAAVLHRRVPGRRLPAGSLCQGRAAVDCAPSRVLVVRDVLLCFVVVGDHGRPRPGAAQGGGAGAVVLDGGGEDDAGGGAARVAALQGVRGQGEEAHRQDGGGDVVRHRHPEQEGDGGRRRDAAGGAHQRLQGEARAVLAVAAVPPACLRFLLNAPTCDLRSL

SEQ ID NO: 19028 - protein, 340 aa, Triticum aestivum
  peptide (1)..(340): Ceres Seq. ID no. 13654576
  misc_feature (190)..(328): NCBI GI NO: 18413973 NR Description: heavy metal binding protein - related
  misc_feature (53)..(173): NCBI GI NO: 18413973 NR Description: heavy metal binding protein - related
  misc_feature (190)..(328): NCBI GI NO: 11358213 NR Description: hypothetical protein T22P11
  misc_feature (64)..(173): NCBI GI NO: 11358213 NR Description: hypothetical protein T22P11
  misc_feature (215)..(336): NCBI GI NO: 23092567 NR Description: hypothetical protein [Arabidopsis thaliana]
  misc_feature (53)..(131): NCBI GI NO: 23092567 NR Description: hypothetical protein [Arabidopsis thaliana]
  misc_feature (215)..(333): NCBI GI NO: 30687119 NR Description: expressed protein [Arabidopsis thaliana]
  misc_feature (53)..(131): NCBI GI NO: 30687119 NR Description: expressed protein [Arabidopsis thaliana]
  misc_feature (192)..(340): NCBI GI NO: 34906086 NR Description: P0459B04.21
  misc_feature (217)..(331): NCBI GI NO: 29124116 NR Description: unknown protein
NHHSFHFISLCTTNPTQRLLRVIEPAILLRSMASLLLKGVHKRLGLPTISISCSSADATNIIASTGTGAVVGSSGRAIDRHSPRLRDPHRSSTSKPPRPSTSTKDSVSSEDPKQQQQQHGSKKKKKSTTAGAAADGRRSSEKRLVSPATSSRFLLNSSRLQSDDLDVLALPPPPPPSFIDALPVGEGKPKPPSFIDAFPADASLPVPSAKDAPPSTVHQAESSSSGTSSSASSSSEITAVQDPEQHKAAALVRSSSTAAARTTQVVVLRVSLHCKGCAGKVKKHIAKMEGVTSFDIDIPSKKVTVVGDVTPLGVLTSVSKVKPAQFWPSQPCPPHASASF

SEQ ID NO: 19029 - protein, 309 aa, Triticum aestivum
  peptide (1)..(309): Ceres Seq. ID no. 13654577
  misc_feature (159)..(297): NCBI GI NO: 18413973 NR Description: heavy metal binding protein - related
  misc_feature (22)..(142): NCBI GI NO: 18413973 NR Description: heavy metal binding protein - related
  misc_feature (159)..(297): NCBI GI NO: 11358213 NR Description: hypothetical protein T22P11
  misc_feature (33)..(142): NCBI GI NO: 11358213 NR Description: hypothetical protein T22P11
  misc_feature (184)..(305): NCBI GI NO: 23092567 NR Description: hypothetical protein [Arabidopsis thaliana]
  misc_feature (22)..(100): NCBI GI NO: 23092567 NR Description: hypothetical protein [Arabidopsis thaliana]
  misc_feature (184)..(302): NCBI GI NO: 30687119 NR Description: expressed protein [Arabidopsis thaliana]
  misc_feature (22)..(100): NCBI GI NO: 30687119 NR Description: expressed protein [Arabidopsis thaliana]
  misc_feature (161)..(309): NCBI GI NO: 34906086 NR Description: P0459B04.21
  misc_feature (186)..(300): NCBI GI NO: 29124116 NR Description: unknown protein
MASLLLKGVHKRLGLPTISISCSSADATNIIASTGTGAVVGSSGRAIDRHSPRLRDPHRSSTSKPPRPSTSTKDSVSSEDPKQQQQQHGSKKKKKSTTAGAAADGRRSSEKRLVSPATSSRFLLNSSRLQSDDLDVLALPPPPPPSFIDALPVGEGKPKPPSFIDAFPADASLPVPSAKDAPPSTVHQAESSSSGTSSSASSSSEITAVQDPEQHKAAALVRSSSTAAARTTQVVVLRVSLHCKGCAGKVKKHIAKMEGVTSFDIDIPSKKVTVVGDVTPLGVLTSVSKVKPAQFWPSQPCPPHASASF

SEQ ID NO: 19030 - DNA, 1999 bp, Triticum aestivum
  misc_feature (1)..(1999): Ceres Seq. ID no. 13596100
acctagaacatcctaatcgaaaacacaagtttgttccgggaggccaccgtcgcggtctagttggtcgcgcaccctatatataccgagccgcccgccgaggccaactcacgcttccggctccggcgcctcggtccaactcacaccaaaggcgatcgacacgcgagtacgtctcgagatccatggagtctgcgccggcggcggccttcatggagcgggagcgcctcacggcggaggtgacattctccggggacgcgcaggcggcggcctcgtccgagggcgccgagcggctgcccaccagcatcatcatcaagatccggcgccgcctcccggacttcgcccgctccgtcaacctcaagtacgtcaggctcgggctccgccacggcggcagcctcacgtcctacctgcccatgctgtgcgtgccggtgctcgccgcggccgcctactccttcgtccgcctcgacgtcatctacctctccatcgacctgctcagctgcgtcgcctggctcggcaccgccatgctgctgctcaccgtctactacttcaagcggcctcgcccggtctacctcgtcgagttcgcgtgctacaagccggaggaccagaacaagatcaccaaggaggccttcctcgacatgaccgagagcaccggctgcttcaatgacgagacgctcgcgttccagaccaagatcaccacccgctccgcgctcggcgacgagacgtacctgccccccggcgtccaggcgcgcccgccgaggctcaacatggccgaggcgcggctggaggccgaggcggtcatgttcggctgcctggacgctctgttcgagtccaccgggatcgacccgcgccgcgacgtgcgcatcctcatcgtcaactgcagcctcttcaacccgacgccgtcgctggcgtccatgatcatccaccattacaagatgcgggaggacgtcaagtcgttcaacctgggcggcatggggtgcagcgccggcctcatcgccatcgacctcgccaaggacatgctccaggccaaccccaacgcgtacgcggtcgtcctcagcaccgagaacatcaccctcaactggtacttcgggaacgaccgctccatgctgctctccaactgcatcttccgcatgggcggcgcggcggctctgctctcgaaccggcgcgcggacgccgggcgcgccaagtaccgcctcctgcacacggtccggacgcacaagggcgccacggacgagtgcttcaagtgcgtgtaccagcgcgaggacgacgtgggcaaggtgggcgtgtcgctggcgcgggagctcatgacggtggccggcgacgcgctcaagaccaacatcaccacgctggggccgctggtgctgcccctgagcgagcagctcaagttcctcaagtcgctgatgatgcgccgggtgttccgcgccaagggcgtgcggccctacatccccaacttccggcgagccttcgagcacttctgcgtgcacgccggcgggcgggcggtgctggaggaggtgcagcgcagcctgagcctggaggacaaggacatggagccgagcaggtgcgcgctgcaccggttcggcaacaccagcagcagctcgctgtggtacgagctggcctacgccgaggccaagggccgggtgaagcgcggcaaccgcgtgtggcagatcggcttcgggtccgggttcaagtgcaacagcgcggtgtggcgcgcgctccgcgacgtgccggccgtgtcgcccccggggccggaggagaaggcctgcaacccgtgggcggactgcgtcgccaagtacccgcccaaggcctacgtctgacgatacattactacgccgccgccgcatgactccacacgaagattacatgattcttttctcctatactttttctgcatttcgtttcccgtaggtggctgtacctcaggttccatgggcgagcagtgccgttgttttcagcttttgtacttcaagtgtgaattataaacgacaaatatatacgacgaggtttcatt

SEQ ID NO: 19031 - protein, 600 aa, Triticum aestivum
  peptide (1)..(600): Ceres Seq. ID no. 13596101
  misc_feature (423)..(569): Pfam Name: Pfam Description:  Chalcone and stilbene synthases
  misc_feature (69)..(597): NCBI GI NO: 3551960 NR Description: senescence-associated protein 15
  misc_feature (87)..(582): NCBI GI NO: 37531254 NR Description: putative senescence-associated protein 15
  misc_feature (69)..(597): NCBI GI NO: 4091810 NR Description: fatty acid elongase 3-ketoacyl-CoA synthase 1
  misc_feature (69)..(597): NCBI GI NO: 22329274 NR Description: fatty acid elongase 3-ketoacyl-CoA synthase 1
  misc_feature (99)..(595): NCBI GI NO: 29417540 NR Description: beta-ketoacyl-CoA-synthase [Marchantia polymorpha]
  misc_feature (106)..(595): NCBI GI NO: 15219676 NR Description: beta-ketoacyl-CoA synthase, putative
  misc_feature (110)..(595): NCBI GI NO: 9714501 NR Description: putative fatty acid elongase [Zea mays]
  misc_feature (106)..(595): NCBI GI NO: 18377979 NR Description: putative beta-ketoacyl-CoA synthase
  misc_feature (108)..(595): NCBI GI NO: 14334714 NR Description: putative beta-ketoacyl-CoA synthase
  misc_feature (108)..(595): NCBI GI NO: 15239981 NR Description: beta-ketoacyl-CoA synthase, putative
LEHPNRKHKFVPGGHRRGLVGRAPYIYRAARRGQLTLPAPAPRSNSHQRRSTREYVSRSMESAPAAAFMERERLTAEVTFSGDAQAAASSEGAERLPTSIIIKIRRRLPDFARSVNLKYVRLGLRHGGSLTSYLPMLCVPVLAAAAYSFVRLDVIYLSIDLLSCVAWLGTAMLLLTVYYFKRPRPVYLVEFACYKPEDQNKITKEAFLDMTESTGCFNDETLAFQTKITTRSALGDETYLPPGVQARPPRLNMAEARLEAEAVMFGCLDALFESTGIDPRRDVRILIVNCSLFNPTPSLASMIIHHYKMREDVKSFNLGGMGCSAGLIAIDLAKDMLQANPNAYAVVLSTENITLNWYFGNDRSMLLSNCIFRMGGAAALLSNRRADAGRAKYRLLHTVRTHKGATDECFKCVYQREDDVGKVGVSLARELMTVAGDALKTNITTLGPLVLPLSEQLKFLKSLMMRRVFRAKGVRPYIPNFRRAFEHFCVHAGGRAVLEEVQRSLSLEDKDMEPSRCALHRFGNTSSSSLWYELAYAEAKGRVKRGNRVWQIGFGSGFKCNSAVWRALRDVPAVSPPGPEEKACNPWADCVAKYPPKAYV

SEQ ID NO: 19032 - protein, 541 aa, Triticum aestivum
  peptide (1)..(541): Ceres Seq. ID no. 13596102
  misc_feature (364)..(510): Pfam Name: Pfam Description:  Chalcone and stilbene synthases
  misc_feature (10)..(538): NCBI GI NO: 3551960 NR Description: senescence-associated protein 15
  misc_feature (28)..(523): NCBI GI NO: 37531254 NR Description: putative senescence-associated protein 15
  misc_feature (10)..(538): NCBI GI NO: 4091810 NR Description: fatty acid elongase 3-ketoacyl-CoA synthase 1
  misc_feature (10)..(538): NCBI GI NO: 22329274 NR Description: fatty acid elongase 3-ketoacyl-CoA synthase 1
  misc_feature (40)..(536): NCBI GI NO: 29417540 NR Description: beta-ketoacyl-CoA-synthase [Marchantia polymorpha]
  misc_feature (47)..(536): NCBI GI NO: 15219676 NR Description: beta-ketoacyl-CoA synthase, putative
  misc_feature (51)..(536): NCBI GI NO: 9714501 NR Description: putative fatty acid elongase [Zea mays]
  misc_feature (47)..(536): NCBI GI NO: 18377979 NR Description: putative beta-ketoacyl-CoA synthase
  misc_feature (49)..(536): NCBI GI NO: 14334714 NR Description: putative beta-ketoacyl-CoA synthase
  misc_feature (49)..(536): NCBI GI NO: 15239981 NR Description: beta-ketoacyl-CoA synthase, putative
MESAPAAAFMERERLTAEVTFSGDAQAAASSEGAERLPTSIIIKIRRRLPDFARSVNLKYVRLGLRHGGSLTSYLPMLCVPVLAAAAYSFVRLDVIYLSIDLLSCVAWLGTAMLLLTVYYFKRPRPVYLVEFACYKPEDQNKITKEAFLDMTESTGCFNDETLAFQTKITTRSALGDETYLPPGVQARPPRLNMAEARLEAEAVMFGCLDALFESTGIDPRRDVRILIVNCSLFNPTPSLASMIIHHYKMREDVKSFNLGGMGCSAGLIAIDLAKDMLQANPNAYAVVLSTENITLNWYFGNDRSMLLSNCIFRMGGAAALLSNRRADAGRAKYRLLHTVRTHKGATDECFKCVYQREDDVGKVGVSLARELMTVAGDALKTNITTLGPLVLPLSEQLKFLKSLMMRRVFRAKGVRPYIPNFRRAFEHFCVHAGGRAVLEEVQRSLSLEDKDMEPSRCALHRFGNTSSSSLWYELAYAEAKGRVKRGNRVWQIGFGSGFKCNSAVWRALRDVPAVSPPGPEEKACNPWADCVAKYPPKAYV

SEQ ID NO: 19033 - protein, 532 aa, Triticum aestivum
  peptide (1)..(532): Ceres Seq. ID no. 13596103
  misc_feature (355)..(501): Pfam Name: Pfam Description:  Chalcone and stilbene synthases
  misc_feature (1)..(529): NCBI GI NO: 3551960 NR Description: senescence-associated protein 15
  misc_feature (19)..(514): NCBI GI NO: 37531254 NR Description: putative senescence-associated protein 15
  misc_feature (1)..(529): NCBI GI NO: 4091810 NR Description: fatty acid elongase 3-ketoacyl-CoA synthase 1
  misc_feature (1)..(529): NCBI GI NO: 22329274 NR Description: fatty acid elongase 3-ketoacyl-CoA synthase 1
  misc_feature (31)..(527): NCBI GI NO: 29417540 NR Description: beta-ketoacyl-CoA-synthase [Marchantia polymorpha]
  misc_feature (38)..(527): NCBI GI NO: 15219676 NR Description: beta-ketoacyl-CoA synthase, putative
  misc_feature (42)..(527): NCBI GI NO: 9714501 NR Description: putative fatty acid elongase [Zea mays]
  misc_feature (38)..(527): NCBI GI NO: 18377979 NR Description: putative beta-ketoacyl-CoA synthase
  misc_feature (40)..(527): NCBI GI NO: 14334714 NR Description: putative beta-ketoacyl-CoA synthase
  misc_feature (40)..(527): NCBI GI NO: 15239981 NR Description: beta-ketoacyl-CoA synthase, putative
MERERLTAEVTFSGDAQAAASSEGAERLPTSIIIKIRRRLPDFARSVNLKYVRLGLRHGGSLTSYLPMLCVPVLAAAAYSFVRLDVIYLSIDLLSCVAWLGTAMLLLTVYYFKRPRPVYLVEFACYKPEDQNKITKEAFLDMTESTGCFNDETLAFQTKITTRSALGDETYLPPGVQARPPRLNMAEARLEAEAVMFGCLDALFESTGIDPRRDVRILIVNCSLFNPTPSLASMIIHHYKMREDVKSFNLGGMGCSAGLIAIDLAKDMLQANPNAYAVVLSTENITLNWYFGNDRSMLLSNCIFRMGGAAALLSNRRADAGRAKYRLLHTVRTHKGATDECFKCVYQREDDVGKVGVSLARELMTVAGDALKTNITTLGPLVLPLSEQLKFLKSLMMRRVFRAKGVRPYIPNFRRAFEHFCVHAGGRAVLEEVQRSLSLEDKDMEPSRCALHRFGNTSSSSLWYELAYAEAKGRVKRGNRVWQIGFGSGFKCNSAVWRALRDVPAVSPPGPEEKACNPWADCVAKYPPKAYV

SEQ ID NO: 19034 - DNA, 928 bp, Triticum aestivum
  misc_feature (1)..(928): Ceres Seq. ID no. 13591302
acacacacacgcctcacactctctcatcagatcagccacagagtcacacaagcactagcttcagctagccagcctcagccactccgggcattttcttgcatccacgacggcaatggccaccgctgatgtccagaacccgacggccgcgctgacggaggaggcgcccacggtggagacgccggtggccgccgaggaggccccgaagacggaggaggtccccgcgccggcggaggccgaggtcgaggcgtctgcccccgtcgaggttgaggcgaccaaggaggaggcgccgggcgccgctgagacggaggaggccaaggagaccgagccagcagctgcggccgagccggaggccgaggcgcccaaagagccagaggcgccagccgtggtcgagacagagaccaaggaggccgtggcagaggccgagccggcggtggtcgaggaggtgaaggaggaggccgcgcctgctgccgagccagaagcaccggccgtcgccgaggaagcaccggctgcagcggaggaggcccccgcggccgtggcagaggagccggccgccgcggtggccagcgtcagcgtgtgaggcgcgcacagagacagaggaggggctggctgggtcagcgtccacggcggcggccgtgtgctcctacgtggcacggccagtcagccagtggagtggagttctactttttactaggtgtggagtgggagtgctatgcgcggggtcgcgtgacgcgggctaaataaaagtgttgtcggggccagtcgacgcccagtgtcggtcagcggcagcgagcgagcgagcgacgcagtgcggtgccactctcgccggcccccgtggctggctgcgtctgcttagctgcagctttgtagtggtgtgtgtcacagtgtcagttccacctatgatcgatcggtatcctatccggtttgtgtc

SEQ ID NO: 19035 - protein, 154 aa, Triticum aestivum
  peptide (1)..(154): Ceres Seq. ID no. 13591303
  misc_feature (1)..(148): Pfam Name: BASP1 protein Pfam Description: Brain acid soluble protein 1
  misc_feature (1)..(152): NCBI GI NO: 40287520 NR Description: induced stolon tip protein [Capsicum annuum]
  misc_feature (1)..(147): NCBI GI NO: 117761 NR Description: Cytochrome c1 precursor
  misc_feature (1)..(153): NCBI GI NO: 17537803 NR Description: Putative protein, nematode specific
  misc_feature (4)..(151): NCBI GI NO: 23109537 NR Description: hypothetical protein
  misc_feature (1)..(148): NCBI GI NO: 117761 NR Description: Cytochrome c1 precursor
  misc_feature (1)..(154): NCBI GI NO: 71400 NR Description: dermal gland protein APEG precursor
  misc_feature (1)..(154): NCBI GI NO: 731172 NR Description: SKIN SECRETORY PROTEIN XP2 PRECURSOR
  misc_feature (10)..(150): NCBI GI NO: 22999045 NR Description: hypothetical protein [Magnetococcus sp. MC-1]
  misc_feature (12)..(150): NCBI GI NO: 22999045 NR Description: hypothetical protein [Magnetococcus sp. MC-1]
  misc_feature (15)..(145): NCBI GI NO: 23001116 NR Description: hypothetical protein [Magnetococcus sp. MC-1]
MATADVQNPTAALTEEAPTVETPVAAEEAPKTEEVPAPAEAEVEASAPVEVEATKEEAPGAAETEEAKETEPAAAAEPEAEAPKEPEAPAVVETETKEAVAEAEPAVVEEVKEEAAPAAEPEAPAVAEEAPAAAEEAPAAVAEEPAAAVASVSV

SEQ ID NO: 19036 - DNA, 1407 bp, Triticum aestivum
  misc_feature (1)..(1407): Ceres Seq. ID no. 12613979
attgactcttttgcccctgcctctgaaactcaacgatttgggagttctccaccctcgccgccgccgccgcctgcatcccgggggagagcgagggtctgggtatggacgtggggtcctgcaacctcggcggcaacgccgacgcggtggagttctgcccgcaccgccccttccgccacatcctggcggccgccacgtacacgctgcaggagcaggcgggggaggagcagcagcagcaggaccgcgcgggcaccgtgtcgctcttctccgtcgacgctggcgctgaggacgagccccgacgtctccggctgctccacacggtggagaccgccggcgtcttcgacatgaagtggagccccacggcgccgctgctcgcgcaggccgacgcccacggccgcctcgtgctccggcgcctcgagcatgaagacggctcggacgaaggtgttgttctcacagacgtggttgctggaaacatttcttcatcaatgtgcttgtatgtcgactggaaccaaaatgccgattccctggccgttgcattatcagatggttcactgtctgtggttcccatgagagaggaccgcctggaggtatcagaacaatggactgctcatcagtatgaagtttggacatgttatttcgatcgtgcaagaccacacttgttgtacagtggatcggacgactgctcttacggttgctgggatttgcgggaaagcctatcgaatgctgtgtttcggaataagaagactcatactatgggtgtgtgttgcattgctcagaacccattggaggggaatatgctactcactggaagctatgatgaatttctcagagttcgggacatgagatcaatgatgaaacctgtgaacgagaagtccctgaatttaggaggtggtgtatggaggttgaaatatcatcctaatattgcagatgtagtattggctgcatgcatgcacaacggttttgccattgttaaagcaggggctggagatgctaccataatggaaacatattgcaagcatgagtccttagcatatggtgcagattggcagactagtgaagcagcggaacataacacaaattcttcagttattgctacttgttcattttatgaccgccttctccgtgtgtggcaaccagagaacctagtcaaccacccaacctctaaggcgtaaaacatcattatgcccagttgaagcatcaatatggcatggaccaacctattccctgaatgaaccaaattgatttcattcaggtagctctttgaatttatgttaatttatttcaaatggtgagcttatagtagtatgatgtctaatttatagctaggcattcacagtaatcagtatttgttgtaagcttccacaaaactttgaagttatctgttcatgttatttgagcacaaactgtttt

SEQ ID NO: 19037 - protein, 355 aa, Triticum aestivum
  peptide (1)..(355): Ceres Seq. ID no. 12613980
  misc_feature (1)..(349): NCBI GI NO: 32489522 NR Description: OSJNBa0043L24.13
  misc_feature (1)..(344): NCBI GI NO: 15242588 NR Description: unknown protein; protein id: At5g63010.1
  misc_feature (1)..(273): NCBI GI NO: 26450621 NR Description: unknown protein [Arabidopsis thaliana]
  misc_feature (12)..(314): NCBI GI NO: 34853114 NR Description: similar to RIKEN cDNA 2810443J12
  misc_feature (322)..(345): NCBI GI NO: 34853114 NR Description: similar to RIKEN cDNA 2810443J12
  misc_feature (11)..(341): NCBI GI NO: 18858115 NR Description: CG3184-PA [Drosophila melanogaster]
  misc_feature (12)..(315): NCBI GI NO: 31206245 NR Description: ENSANGP00000016926 [Anopheles gambiae]
  misc_feature (12)..(314): NCBI GI NO: 21313066 NR Description: RIKEN cDNA 2810443J12 [Mus musculus]
  misc_feature (35)..(314): NCBI GI NO: 24308452 NR Description: hypothetical protein BC017335 [Homo sapiens]
  misc_feature (84)..(343): NCBI GI NO: 19075894 NR Description: hypothetical protein [Schizosaccharomyces pombe]
MDVGSCNLGGNADAVEFCPHRPFRHILAAATYTLQEQAGEEQQQQDRAGTVSLFSVDAGAEDEPRRLRLLHTVETAGVFDMKWSPTAPLLAQADAHGRLVLRRLEHEDGSDEGVVLTDVVAGNISSSMCLYVDWNQNADSLAVALSDGSLSVVPMREDRLEVSEQWTAHQYEVWTCYFDRARPHLLYSGSDDCSYGCWDLRESLSNAVFRNKKTHTMGVCCIAQNPLEGNMLLTGSYDEFLRVRDMRSMMKPVNEKSLNLGGGVWRLKYHPNIADVVLAACMHNGFAIVKAGAGDATIMETYCKHESLAYGADWQTSEAAEHNTNSSVIATCSFYDRLLRVWQPENLVNHPTSKA

SEQ ID NO: 19038 - protein, 275 aa, Triticum aestivum
  peptide (1)..(275): Ceres Seq. ID no. 12613981
  misc_feature (1)..(269): NCBI GI NO: 32489522 NR Description: OSJNBa0043L24.13
  misc_feature (1)..(264): NCBI GI NO: 15242588 NR Description: unknown protein; protein id: At5g63010.1
  misc_feature (1)..(193): NCBI GI NO: 26450621 NR Description: unknown protein [Arabidopsis thaliana]
  misc_feature (1)..(234): NCBI GI NO: 34853114 NR Description: similar to RIKEN cDNA 2810443J12
  misc_feature (242)..(265): NCBI GI NO: 34853114 NR Description: similar to RIKEN cDNA 2810443J12
  misc_feature (1)..(261): NCBI GI NO: 18858115 NR Description: CG3184-PA [Drosophila melanogaster]
  misc_feature (1)..(235): NCBI GI NO: 31206245 NR Description: ENSANGP00000016926 [Anopheles gambiae]
  misc_feature (1)..(234): NCBI GI NO: 21313066 NR Description: RIKEN cDNA 2810443J12 [Mus musculus]
  misc_feature (1)..(234): NCBI GI NO: 24308452 NR Description: hypothetical protein BC017335 [Homo sapiens]
  misc_feature (4)..(263): NCBI GI NO: 19075894 NR Description: hypothetical protein [Schizosaccharomyces pombe]
MKWSPTAPLLAQADAHGRLVLRRLEHEDGSDEGVVLTDVVAGNISSSMCLYVDWNQNADSLAVALSDGSLSVVPMREDRLEVSEQWTAHQYEVWTCYFDRARPHLLYSGSDDCSYGCWDLRESLSNAVFRNKKTHTMGVCCIAQNPLEGNMLLTGSYDEFLRVRDMRSMMKPVNEKSLNLGGGVWRLKYHPNIADVVLAACMHNGFAIVKAGAGDATIMETYCKHESLAYGADWQTSEAAEHNTNSSVIATCSFYDRLLRVWQPENLVNHPTSKA

SEQ ID NO: 19039 - protein, 228 aa, Triticum aestivum
  peptide (1)..(228): Ceres Seq. ID no. 12613982
  misc_feature (1)..(222): NCBI GI NO: 32489522 NR Description: OSJNBa0043L24.13
  misc_feature (1)..(217): NCBI GI NO: 15242588 NR Description: unknown protein; protein id: At5g63010.1
  misc_feature (1)..(146): NCBI GI NO: 26450621 NR Description: unknown protein [Arabidopsis thaliana]
  misc_feature (1)..(187): NCBI GI NO: 34853114 NR Description: similar to RIKEN cDNA 2810443J12
  misc_feature (195)..(218): NCBI GI NO: 34853114 NR Description: similar to RIKEN cDNA 2810443J12
  misc_feature (1)..(214): NCBI GI NO: 18858115 NR Description: CG3184-PA [Drosophila melanogaster]
  misc_feature (1)..(188): NCBI GI NO: 31206245 NR Description: ENSANGP00000016926 [Anopheles gambiae]
  misc_feature (1)..(187): NCBI GI NO: 21313066 NR Description: RIKEN cDNA 2810443J12 [Mus musculus]
  misc_feature (1)..(187): NCBI GI NO: 24308452 NR Description: hypothetical protein BC017335 [Homo sapiens]
  misc_feature (1)..(216): NCBI GI NO: 19075894 NR Description: hypothetical protein [Schizosaccharomyces pombe]
MCLYVDWNQNADSLAVALSDGSLSVVPMREDRLEVSEQWTAHQYEVWTCYFDRARPHLLYSGSDDCSYGCWDLRESLSNAVFRNKKTHTMGVCCIAQNPLEGNMLLTGSYDEFLRVRDMRSMMKPVNEKSLNLGGGVWRLKYHPNIADVVLAACMHNGFAIVKAGAGDATIMETYCKHESLAYGADWQTSEAAEHNTNSSVIATCSFYDRLLRVWQPENLVNHPTSKA

SEQ ID NO: 19040 - DNA, 1043 bp, Triticum aestivum
  misc_feature (1)..(1043): Ceres Seq. ID no. 13654578
atctctctccccttcccgtccccgcttgctcctcctgctcctgccgatcgctcatggattccaagccccaagccccgccgtcggagggcgcggcgtacccgcgcatgtccccggaggacctcgcgccgccgccgccgccggtcgtggcgcccgcgggctccaacccctacgtgctgtcctcgccctcctccggaccgcccgccaagagcaccaaggagaatctgagggagatgttcggctcggtggggaagaggttcagcgaggccgcgcgcaagaccgagggcatcgccggcgacgtctggcagcacttgaaaactgggcctagcattacggatgctgcaatggggaggatcgctcaggtatccaaggtcatatcggaagggggatacgacaagatattccagcagacgtttgagtgcttgcctgacgagaagctcaagaaggcgtacgcgtgctacctctcgacctctcatggtccgataatgggcgtcttatacgtctccaccgccaagcttgcattctgtagtgacagccccgtggcatatgtcactgaggataatcagaccgcgtcagccatttacaagatagttgtacctgtacctcacctgagatcagtcactcctaccgcaagtcaacagaaccctgcggagaggtacatccaggtcgtttctgtcgataaccatgacttctggttcatgggcttcgtgaactatgacagcgctgtgaagtgtctccaggatgctgctcgtggtggcgcctagacatcacttccccgtcgcatgtatccgttgtgatggcccatgttgatgtctatagaccattcttgtgtattttggttcaaatttctggcttaaataagcagtgcattcatgtatcagtattcagtagtgtggatacttttctggcccaagtgtgttgtaaatatcagaggaatcttaagctttgtttgctgccctcattcttgcactgcaaattatgtgtattatgagccaaagatgctcctgccagtgccttgataacttgaggttagtgcatgcttcaac

SEQ ID NO: 19041 - protein, 252 aa, Triticum aestivum
  peptide (1)..(252): Ceres Seq. ID no. 13654579
  misc_feature (1)..(252): NCBI GI NO: 34906818 NR Description: contains EST C91668
  misc_feature (24)..(247): NCBI GI NO: 34902414 NR Description: Putative FH protein interacting protein FIP1
  misc_feature (10)..(249): NCBI GI NO: 15217869 NR Description: GRAM domain-containing protein
  misc_feature (114)..(252): NCBI GI NO: 33146631 NR Description: putative FH protein interacting protein FIP1
  misc_feature (51)..(252): NCBI GI NO: 18399985 NR Description: GRAM domain-containing protein
  misc_feature (51)..(252): NCBI GI NO: 21592789 NR Description: unknown [Arabidopsis thaliana]
  misc_feature (51)..(252): NCBI GI NO: 26452129 NR Description: unknown protein [Arabidopsis thaliana]
  misc_feature (28)..(247): NCBI GI NO: 29788871 NR Description: putative ABA-responsive protein
  misc_feature (55)..(240): NCBI GI NO: 15240044 NR Description: GRAM domain-containing protein
  misc_feature (54)..(247): NCBI GI NO: 15234255 NR Description: ABA-repsonsiveprotein -related
LSPLPVPACSSCSCRSLMDSKPQAPPSEGAAYPRMSPEDLAPPPPPVVAPAGSNPYVLSSPSSGPPAKSTKENLREMFGSVGKRFSEAARKTEGIAGDVWQHLKTGPSITDAAMGRIAQVSKVISEGGYDKIFQQTFECLPDEKLKKAYACYLSTSHGPIMGVLYVSTAKLAFCSDSPVAYVTEDNQTASAIYKIVVPVPHLRSVTPTASQQNPAERYIQVVSVDNHDFWFMGFVNYDSAVKCLQDAARGGA

SEQ ID NO: 19042 - protein, 235 aa, Triticum aestivum
  peptide (1)..(235): Ceres Seq. ID no. 13654580
  misc_feature (1)..(235): NCBI GI NO: 34906818 NR Description: contains EST C91668
  misc_feature (7)..(230): NCBI GI NO: 34902414 NR Description: Putative FH protein interacting protein FIP1
  misc_feature (1)..(232): NCBI GI NO: 15217869 NR Description: GRAM domain-containing protein
  misc_feature (97)..(235): NCBI GI NO: 33146631 NR Description: putative FH protein interacting protein FIP1
  misc_feature (34)..(235): NCBI GI NO: 18399985 NR Description: GRAM domain-containing protein
  misc_feature (34)..(235): NCBI GI NO: 21592789 NR Description: unknown [Arabidopsis thaliana]
  misc_feature (34)..(235): NCBI GI NO: 26452129 NR Description: unknown protein [Arabidopsis thaliana]
  misc_feature (11)..(230): NCBI GI NO: 29788871 NR Description: putative ABA-responsive protein
  misc_feature (38)..(223): NCBI GI NO: 15240044 NR Description: GRAM domain-containing protein
  misc_feature (37)..(230): NCBI GI NO: 15234255 NR Description: ABA-repsonsiveprotein -related
MDSKPQAPPSEGAAYPRMSPEDLAPPPPPVVAPAGSNPYVLSSPSSGPPAKSTKENLREMFGSVGKRFSEAARKTEGIAGDVWQHLKTGPSITDAAMGRIAQVSKVISEGGYDKIFQQTFECLPDEKLKKAYACYLSTSHGPIMGVLYVSTAKLAFCSDSPVAYVTEDNQTASAIYKIVVPVPHLRSVTPTASQQNPAERYIQVVSVDNHDFWFMGFVNYDSAVKCLQDAARGGA

SEQ ID NO: 19043 - protein, 218 aa, Triticum aestivum
  peptide (1)..(218): Ceres Seq. ID no. 13654581
  misc_feature (1)..(218): NCBI GI NO: 34906818 NR Description: contains EST C91668
  misc_feature (1)..(213): NCBI GI NO: 34902414 NR Description: Putative FH protein interacting protein FIP1
  misc_feature (1)..(215): NCBI GI NO: 15217869 NR Description: GRAM domain-containing protein
  misc_feature (80)..(218): NCBI GI NO: 33146631 NR Description: putative FH protein interacting protein FIP1
  misc_feature (17)..(218): NCBI GI NO: 18399985 NR Description: GRAM domain-containing protein
  misc_feature (17)..(218): NCBI GI NO: 21592789 NR Description: unknown [Arabidopsis thaliana]
  misc_feature (17)..(218): NCBI GI NO: 26452129 NR Description: unknown protein [Arabidopsis thaliana]
  misc_feature (1)..(213): NCBI GI NO: 29788871 NR Description: putative ABA-responsive protein
  misc_feature (21)..(206): NCBI GI NO: 15240044 NR Description: GRAM domain-containing protein
  misc_feature (20)..(213): NCBI GI NO: 15234255 NR Description: ABA-repsonsiveprotein -related
MSPEDLAPPPPPVVAPAGSNPYVLSSPSSGPPAKSTKENLREMFGSVGKRFSEAARKTEGIAGDVWQHLKTGPSITDAAMGRIAQVSKVISEGGYDKIFQQTFECLPDEKLKKAYACYLSTSHGPIMGVLYVSTAKLAFCSDSPVAYVTEDNQTASAIYKIVVPVPHLRSVTPTASQQNPAERYIQVVSVDNHDFWFMGFVNYDSAVKCLQDAARGGA

SEQ ID NO: 19044 - DNA, 1360 bp, Triticum aestivum
  misc_feature (1)..(1360): Ceres Seq. ID no. 12614739
aaccgccgtccgccggccgattcgactcctcccgcgaagcgccgtccatcttcgccgcccgtgccatgtcgcgccccgccggcaatccctcgtacgccgccgagctcggcgctgccaagaaggccgtcgccctcgccgcccgcctatgccagacggtgcagcaggaaattgtgcaatcagacatccaatccaaggcggataagactcctgtgaccgtagctgattatggatctcaagtactggtaagtgttgtgttaaatatggaagtaacttctggttccttttctatggtggccgaggaggactcagaagacttgagaaaggatggcgctgaagaaattctggagcgcattactgatcttgtaaacaaaactctcgctgaggatggttcatacaaccttttattatctaaggaagctatcctctctgcaattgataccgggaagtccgagggaggtccatctggccgacattgggttctagatccaattgatgggactaaaggattcgtgagaggaggccaatatgccattgcactggcactgcttgatgaaggcagggttgtcttgggtgcgttgggatgtccaaatcttccttttacatcagtaagtaacctcagtggtagctcaacaggagatcaaactggggccctcttttcagcggcaatcggttgtggtgctgaagtacagtcgttagatggctctccaccacaaaagattagtttttgtaccatcgacaatccagccaatgcctcgttctttgaatcctatgaaggagcgcactcgatgcgtgattttactggctgtgtagtggagaaacttggtgtccaagctcctccagtcagaatagatagccaagcaaaatatggtgctctggcccgtggggatggtgccatttactggcgttttccgcacgagggttacagggaaacgatatgggatcatgcagccggctcaattgtcgtcacagaagctggaggtgtagttaaagatgcctcaggaaacgatctcgatttctcgaaaggcagatttcttgatcgtgacacaggcatcattgctacaaataaacagttgatgccatcagtcctgaagtgtgtccaggaggcaatcaaggagaaaaaacaggcctcttccccattgtagaaggttcttgaaccttccctgttgtggaagttggattggtccaaaataatgatcgctatgctactccttattcatttgttcacactgtttatgtgtaactggccttttattggaaataaatacaacccttgttatacaatatctgtacatatccaaggagtggctgataggcagccatgacctgaaagaaactgaataaagatagaaatttcctgcgg

SEQ ID NO: 19045 - protein, 379 aa, Triticum aestivum
  peptide (1)..(379): Ceres Seq. ID no. 12614740
  misc_feature (22)..(379): NCBI GI NO: 3913517 NR Description: 3'
  misc_feature (26)..(379): NCBI GI NO: 14268820 NR Description: diphosphonucleotide phosphatase 1 [Zea mays]
  misc_feature (30)..(377): NCBI GI NO: 15237567 NR Description: 3
  misc_feature (30)..(372): NCBI GI NO: 15237589 NR Description: 3(2),5-bisphosphate nucleotidase (emb|CAB05889
  misc_feature (31)..(372): NCBI GI NO: 34395640 NR Description: Probable SAL4 phosphatase
  misc_feature (30)..(374): NCBI GI NO: 18424775 NR Description: 3
  misc_feature (30)..(374): NCBI GI NO: 21618152 NR Description: 3(2),5-bisphosphate nucleotidase
  misc_feature (31)..(372): NCBI GI NO: 15242383 NR Description: 3'
  misc_feature (30)..(374): NCBI GI NO: 8777312 NR Description: 3'(2'),5'-bisphosphate nucleotidase
  misc_feature (31)..(372): NCBI GI NO: 32405550 NR Description: hypothetical protein [Neurospora crassa]
PPSAGRFDSSREAPSIFAARAMSRPAGNPSYAAELGAAKKAVALAARLCQTVQQEIVQSDIQSKADKTPVTVADYGSQVLVSVVLNMEVTSGSFSMVAEEDSEDLRKDGAEEILERITDLVNKTLAEDGSYNLLLSKEAILSAIDTGKSEGGPSGRHWVLDPIDGTKGFVRGGQYAIALALLDEGRVVLGALGCPNLPFTSVSNLSGSSTGDQTGALFSAAIGCGAEVQSLDGSPPQKISFCTIDNPANASFFESYEGAHSMRDFTGCVVEKLGVQAPPVRIDSQAKYGALARGDGAIYWRFPHEGYRETIWDHAAGSIVVTEAGGVVKDASGNDLDFSKGRFLDRDTGIIATNKQLMPSVLKCVQEAIKEKKQASSPL

SEQ ID NO: 19046 - protein, 358 aa, Triticum aestivum
  peptide (1)..(358): Ceres Seq. ID no. 12614741
  misc_feature (1)..(358): NCBI GI NO: 3913517 NR Description: 3'
  misc_feature (5)..(358): NCBI GI NO: 14268820 NR Description: diphosphonucleotide phosphatase 1 [Zea mays]
  misc_feature (9)..(356): NCBI GI NO: 15237567 NR Description: 3
  misc_feature (9)..(351): NCBI GI NO: 15237589 NR Description: 3(2),5-bisphosphate nucleotidase (emb|CAB05889
  misc_feature (10)..(351): NCBI GI NO: 34395640 NR Description: Probable SAL4 phosphatase
  misc_feature (9)..(353): NCBI GI NO: 18424775 NR Description: 3
  misc_feature (9)..(353): NCBI GI NO: 21618152 NR Description: 3(2),5-bisphosphate nucleotidase
  misc_feature (10)..(351): NCBI GI NO: 15242383 NR Description: 3'
  misc_feature (9)..(353): NCBI GI NO: 8777312 NR Description: 3'(2'),5'-bisphosphate nucleotidase
  misc_feature (10)..(351): NCBI GI NO: 32405550 NR Description: hypothetical protein [Neurospora crassa]
MSRPAGNPSYAAELGAAKKAVALAARLCQTVQQEIVQSDIQSKADKTPVTVADYGSQVLVSVVLNMEVTSGSFSMVAEEDSEDLRKDGAEEILERITDLVNKTLAEDGSYNLLLSKEAILSAIDTGKSEGGPSGRHWVLDPIDGTKGFVRGGQYAIALALLDEGRVVLGALGCPNLPFTSVSNLSGSSTGDQTGALFSAAIGCGAEVQSLDGSPPQKISFCTIDNPANASFFESYEGAHSMRDFTGCVVEKLGVQAPPVRIDSQAKYGALARGDGAIYWRFPHEGYRETIWDHAAGSIVVTEAGGVVKDASGNDLDFSKGRFLDRDTGIIATNKQLMPSVLKCVQEAIKEKKQASSPL

SEQ ID NO: 19047 - protein, 293 aa, Triticum aestivum
  peptide (1)..(293): Ceres Seq. ID no. 12614742
  misc_feature (1)..(293): NCBI GI NO: 3913517 NR Description: 3'
  misc_feature (1)..(293): NCBI GI NO: 14268820 NR Description: diphosphonucleotide phosphatase 1 [Zea mays]
  misc_feature (1)..(291): NCBI GI NO: 15237567 NR Description: 3
  misc_feature (1)..(286): NCBI GI NO: 15237589 NR Description: 3(2),5-bisphosphate nucleotidase (emb|CAB05889
  misc_feature (1)..(286): NCBI GI NO: 34395640 NR Description: Probable SAL4 phosphatase
  misc_feature (1)..(288): NCBI GI NO: 18424775 NR Description: 3
  misc_feature (1)..(288): NCBI GI NO: 21618152 NR Description: 3(2),5-bisphosphate nucleotidase
  misc_feature (1)..(286): NCBI GI NO: 15242383 NR Description: 3'
  misc_feature (1)..(288): NCBI GI NO: 8777312 NR Description: 3'(2'),5'-bisphosphate nucleotidase
  misc_feature (1)..(286): NCBI GI NO: 32405550 NR Description: hypothetical protein [Neurospora crassa]
MEVTSGSFSMVAEEDSEDLRKDGAEEILERITDLVNKTLAEDGSYNLLLSKEAILSAIDTGKSEGGPSGRHWVLDPIDGTKGFVRGGQYAIALALLDEGRVVLGALGCPNLPFTSVSNLSGSSTGDQTGALFSAAIGCGAEVQSLDGSPPQKISFCTIDNPANASFFESYEGAHSMRDFTGCVVEKLGVQAPPVRIDSQAKYGALARGDGAIYWRFPHEGYRETIWDHAAGSIVVTEAGGVVKDASGNDLDFSKGRFLDRDTGIIATNKQLMPSVLKCVQEAIKEKKQASSPL

SEQ ID NO: 19048 - DNA, 1235 bp, Triticum aestivum
  misc_feature (1)..(1235): Ceres Seq. ID no. 13596108
tcctcttcctctcaggcgcccacctcctcccctgcctgcggctcaagcttccgttcccctccaggcctcgcgcgcagaggcagggcggcggcgttcagttgtcttctcggcggcgggcgggcaggcatgggcgccagcgggggcggggaagacaagcccttcaatttcctccagatcctctgcgagggcgtcatagccggaggagctgccggggtcgtggttgaaacggctctgtaccccatcgacaccatcaagaccaggcttcaggctgctcgagctggaagtcaaatccaatggaaaggcctgtattccggactaggtggaaatcttgtcggtgttctcccggcttctgctctgtttgtgggaatatatgagccaactaaacggaagctactggacatgtttcctgaaaatttgagtgctgttgctcatcttactgcaggtgctgttggagggttgggtgcttctctcattcgtgttcccacagaggtggtcaaacaaaggatgcaaactggtcaattcaggactgcgcctgatgctgttcgtctcatagttgccaaggaaggatttagaggtctttttgctggttatggttcatttttacttcgagatcttccgtttgatgccattcaattctgcatatatgagcaacttcgaattggttacaagcttatggcaaagagggagctgaaggatccagagaatgcactaattggtgcttttgccggtgcgattactggcgctataacgacccccctcgatgttctgaagacaaggttgatgattcaggggcaaacgaagcaatactccggaatcgtaagctgtgctaagacgatcttgagagaggaaggcccaggggcattcttgaagggcatcgagccgcgagttctgtggatcggcatcggtgggtccatcttcttcggcgtgctggagaagaccaagtcggtgctcgctgagcggagcagccgcaaggctgcgctggcggagaaggacgagtgaaccaaccgaccaaaccaactgtgcatcctatgctgactcactctacaccattacccgttccttaaacctgaagttttgctccaagtttatgtggtgggctttgcatttctcgttccagaactataaggcatacaatcagtttcaagagtctgttttgacgtcggcgatggttatgatcctttatgagtccctgtaaacattactctcctttaataaagtttagcagattgttcttc

SEQ ID NO: 19049 - protein, 332 aa, Triticum aestivum
  peptide (1)..(332): Ceres Seq. ID no. 15221774
  misc_feature (48)..(327): NCBI GI NO: 34394981 NR Description: mitochondrial aspartate-glutamate carrier protein-like
  misc_feature (50)..(320): NCBI GI NO: 18420458 NR Description: mitochondrial carrier protein family
  misc_feature (50)..(323): NCBI GI NO: 18399114 NR Description: mitochondrial carrier protein family
  misc_feature (50)..(293): NCBI GI NO: 7486053 NR Description: hypothetical protein F23K16
  misc_feature (64)..(316): NCBI GI NO: 3171731 NR Description: AgPET8 [Eremothecium gossypii]
  misc_feature (64)..(319): NCBI GI NO: 27754081 NR Description: RIKEN cDNA 4930433D19 [Mus musculus]
  misc_feature (64)..(319): NCBI GI NO: 6324325 NR Description: Member of family of mitochondrial carrier proteins
  misc_feature (52)..(322): NCBI GI NO: 24650120 NR Description: CG4743-PA [Drosophila melanogaster]
  misc_feature (62)..(308): NCBI GI NO: 19115553 NR Description: agpet8 protein. [Schizosaccharomyces pombe]
  misc_feature (64)..(284): NCBI GI NO: 34857703 NR Description: similar to RIKEN cDNA 4930433D19
SSSSQAPTSSPACGSSFRSPPGLARRGRAAAFSCLLGGGRAGMGASGGGEDKPFNFLQILCEGVIAGGAAGVVVETALYPIDTIKTRLQAARAGSQIQWKGLYSGLGGNLVGVLPASALFVGIYEPTKRKLLDMFPENLSAVAHLTAGAVGGLGASLIRVPTEVVKQRMQTGQFRTAPDAVRLIVAKEGFRGLFAGYGSFLLRDLPFDAIQFCIYEQLRIGYKLMAKRELKDPENALIGAFAGAITGAITTPLDVLKTRLMIQGQTKQYSGIVSCAKTILREEGPGAFLKGIEPRVLWIGIGGSIFFGVLEKTKSVLAERSSRKAALAEKDE

SEQ ID NO: 19050 - protein, 290 aa, Triticum aestivum
  peptide (1)..(290): Ceres Seq. ID no. 15221775
  misc_feature (6)..(285): NCBI GI NO: 34394981 NR Description: mitochondrial aspartate-glutamate carrier protein-like
  misc_feature (8)..(278): NCBI GI NO: 18420458 NR Description: mitochondrial carrier protein family
  misc_feature (8)..(281): NCBI GI NO: 18399114 NR Description: mitochondrial carrier protein family
  misc_feature (8)..(251): NCBI GI NO: 7486053 NR Description: hypothetical protein F23K16
  misc_feature (22)..(274): NCBI GI NO: 3171731 NR Description: AgPET8 [Eremothecium gossypii]
  misc_feature (22)..(277): NCBI GI NO: 27754081 NR Description: RIKEN cDNA 4930433D19 [Mus musculus]
  misc_feature (22)..(277): NCBI GI NO: 6324325 NR Description: Member of family of mitochondrial carrier proteins
  misc_feature (10)..(280): NCBI GI NO: 24650120 NR Description: CG4743-PA [Drosophila melanogaster]
  misc_feature (20)..(266): NCBI GI NO: 19115553 NR Description: agpet8 protein. [Schizosaccharomyces pombe]
  misc_feature (22)..(242): NCBI GI NO: 34857703 NR Description: similar to RIKEN cDNA 4930433D19
MGASGGGEDKPFNFLQILCEGVIAGGAAGVVVETALYPIDTIKTRLQAARAGSQIQWKGLYSGLGGNLVGVLPASALFVGIYEPTKRKLLDMFPENLSAVAHLTAGAVGGLGASLIRVPTEVVKQRMQTGQFRTAPDAVRLIVAKEGFRGLFAGYGSFLLRDLPFDAIQFCIYEQLRIGYKLMAKRELKDPENALIGAFAGAITGAITTPLDVLKTRLMIQGQTKQYSGIVSCAKTILREEGPGAFLKGIEPRVLWIGIGGSIFFGVLEKTKSVLAERSSRKAALAEKDE

SEQ ID NO: 19051 - protein, 199 aa, Triticum aestivum
  peptide (1)..(199): Ceres Seq. ID no. 15221776
  misc_feature (1)..(194): NCBI GI NO: 34394981 NR Description: mitochondrial aspartate-glutamate carrier protein-like
  misc_feature (1)..(187): NCBI GI NO: 18420458 NR Description: mitochondrial carrier protein family
  misc_feature (1)..(190): NCBI GI NO: 18399114 NR Description: mitochondrial carrier protein family
  misc_feature (1)..(160): NCBI GI NO: 7486053 NR Description: hypothetical protein F23K16
  misc_feature (1)..(183): NCBI GI NO: 3171731 NR Description: AgPET8 [Eremothecium gossypii]
  misc_feature (1)..(186): NCBI GI NO: 27754081 NR Description: RIKEN cDNA 4930433D19 [Mus musculus]
  misc_feature (1)..(186): NCBI GI NO: 6324325 NR Description: Member of family of mitochondrial carrier proteins
  misc_feature (1)..(189): NCBI GI NO: 24650120 NR Description: CG4743-PA [Drosophila melanogaster]
  misc_feature (1)..(175): NCBI GI NO: 19115553 NR Description: agpet8 protein. [Schizosaccharomyces pombe]
  misc_feature (1)..(151): NCBI GI NO: 34857703 NR Description: similar to RIKEN cDNA 4930433D19
MFPENLSAVAHLTAGAVGGLGASLIRVPTEVVKQRMQTGQFRTAPDAVRLIVAKEGFRGLFAGYGSFLLRDLPFDAIQFCIYEQLRIGYKLMAKRELKDPENALIGAFAGAITGAITTPLDVLKTRLMIQGQTKQYSGIVSCAKTILREEGPGAFLKGIEPRVLWIGIGGSIFFGVLEKTKSVLAERSSRKAALAEKDE

SEQ ID NO: 19052 - DNA, 1684 bp, Triticum aestivum
  misc_feature (1)..(1684): Ceres Seq. ID no. 14303557
caccctcccccgctcctcctcctcgggctccgccgcccccgcctccgcctccccgaatcccagccctagcggccggcgagcgcggcgatgggcgccgtcgcctccacggtggcggcgcgcttcgccttcttcccgccctccccgccgtcgtacggcgtcgagcccccgccctcgccggccgcggccgccgcggacggcgcggtggtggagctcagcggggtgccccggcggggcggcgtggaggcgcggcggctgccgaccaagcgcggctcggaggtggtggccatgtacgtgcgccagcccggggcgcgcctcacgctgctctactcccacggcaacgcggccgacctgggccagatgtacgagctcttcgtcgagctcagctcgcacctcaacgtcaacctcatgggttatgattattctggatatgggcaatcatctgggaagccaagtgagcagaacacttatgcagacatagaggccgcttataggtgtctcatagaaacttatggggcctccgaggaaaacatcattctgtatggtcaatcagttggcagtggccctactttagatttggcatctcgtttgcctcatttgagagcagtggttctacatagcccaatttcgtctggcttgagagtaatgtatcctgtgaaacatacatactggtttgacatatataagaacattgacaaagttgcattggtcaaatgccccgtgttagtaatccatggtacggctgatgatgttgttgactgttctcatgggagagcactgtgggaactatccaaagtgaagtatgagcctttgtgggtcaaaggtgggaaccattgtaatttggaactctatcccgaatacattaagcacctaaagaagttcatcacagccatagagaagtccccaccactgaaagatgattctccagaaagttcaggcccttcagatcttgaaacaggatctgaaagtatggagagttcaagaaaaagcacggatgtgagggacaaatcaaggtcaagcactgatcacaggcggagtacagatcgacgggagaaaccaaggagcagcatagataggaaggataaaggcagaaagagtgtagatcatcctgacaaaccacgggctagtgtggatcaatctgataagccacggaaaagcattgaccgctttggagggatgatgaggtcggttaaattgtgcaatattgactgcttcaaagtaacttccacttccgggagctgaaaatagtggaaggttagttttgatagtatctgtatttatttcatctgtataatctattcaattgggtgtttttagttttgctgtggaaggtgtattgatttgggtgagggttatgcacactgaattgtttcgtgagaagaaatgatcattcattcccgaccccctgagttttcaaagccattcatttggcacatcaacaatgctactcccacggagtatgaagcaacaccattgttacactgtacataagttgttgtatcattacactgtcttagtttttctttttcatagaaacatttgatagataactaaactgggaatttgtgtcttccctctggaaagaagttctcttcaaaaatggatttctgtcacttgattgctttgtcatggagcttgaacttgaaatgaatcactggatcattcaatgtaatcatcatctttgttc

SEQ ID NO: 19053 - protein, 383 aa, Triticum aestivum
  peptide (1)..(383): Ceres Seq. ID no. 14303558
  misc_feature (107)..(175): Pfam Name: Pfam Description:  alpha/beta hydrolase fold
  misc_feature (1)..(360): NCBI GI NO: 15230760 NR Description: hypothetical protein [Arabidopsis thaliana]
  misc_feature (1)..(358): NCBI GI NO: 15241394 NR Description: expressed protein [Arabidopsis thaliana]
  misc_feature (1)..(359): NCBI GI NO: 15232168 NR Description: expressed protein [Arabidopsis thaliana]
  misc_feature (1)..(358): NCBI GI NO: 15233975 NR Description: expressed protein [Arabidopsis thaliana]
  misc_feature (1)..(337): NCBI GI NO: 10177798 NR Description: emb|CAB87778
  misc_feature (24)..(335): NCBI GI NO: 34911338 NR Description: P0519D04.38
  misc_feature (1)..(338): NCBI GI NO: 9802758 NR Description: Hypothetical protein [Arabidopsis thaliana]
  misc_feature (1)..(338): NCBI GI NO: 25352159 NR Description: F21F23.4 protein - Arabidopsis thaliana
  misc_feature (1)..(268): NCBI GI NO: 22330474 NR Description: expressed protein [Arabidopsis thaliana]
  misc_feature (8)..(338): NCBI GI NO: 15222895 NR Description: hypothetical protein [Arabidopsis thaliana]
MGAVASTVAARFAFFPPSPPSYGVEPPPSPAAAAADGAVVELSGVPRRGGVEARRLPTKRGSEVVAMYVRQPGARLTLLYSHGNAADLGQMYELFVELSSHLNVNLMGYDYSGYGQSSGKPSEQNTYADIEAAYRCLIETYGASEENIILYGQSVGSGPTLDLASRLPHLRAVVLHSPISSGLRVMYPVKHTYWFDIYKNIDKVALVKCPVLVIHGTADDVVDCSHGRALWELSKVKYEPLWVKGGNHCNLELYPEYIKHLKKFITAIEKSPPLKDDSPESSGPSDLETGSESMESSRKSTDVRDKSRSSTDHRRSTDRREKPRSSIDRKDKGRKSVDHPDKPRASVDQSDKPRKSIDRFGGMMRSVKLCNIDCFKVTSTSGS

SEQ ID NO: 19054 - protein, 317 aa, Triticum aestivum
  peptide (1)..(317): Ceres Seq. ID no. 14303559
  misc_feature (41)..(109): Pfam Name: Pfam Description:  alpha/beta hydrolase fold
  misc_feature (1)..(294): NCBI GI NO: 15230760 NR Description: hypothetical protein [Arabidopsis thaliana]
  misc_feature (1)..(292): NCBI GI NO: 15241394 NR Description: expressed protein [Arabidopsis thaliana]
  misc_feature (1)..(293): NCBI GI NO: 15232168 NR Description: expressed protein [Arabidopsis thaliana]
  misc_feature (1)..(292): NCBI GI NO: 15233975 NR Description: expressed protein [Arabidopsis thaliana]
  misc_feature (1)..(271): NCBI GI NO: 10177798 NR Description: emb|CAB87778
  misc_feature (1)..(269): NCBI GI NO: 34911338 NR Description: P0519D04.38
  misc_feature (1)..(272): NCBI GI NO: 9802758 NR Description: Hypothetical protein [Arabidopsis thaliana]
  misc_feature (1)..(272): NCBI GI NO: 25352159 NR Description: F21F23.4 protein - Arabidopsis thaliana
  misc_feature (1)..(202): NCBI GI NO: 22330474 NR Description: expressed protein [Arabidopsis thaliana]
  misc_feature (1)..(272): NCBI GI NO: 15222895 NR Description: hypothetical protein [Arabidopsis thaliana]
MYVRQPGARLTLLYSHGNAADLGQMYELFVELSSHLNVNLMGYDYSGYGQSSGKPSEQNTYADIEAAYRCLIETYGASEENIILYGQSVGSGPTLDLASRLPHLRAVVLHSPISSGLRVMYPVKHTYWFDIYKNIDKVALVKCPVLVIHGTADDVVDCSHGRALWELSKVKYEPLWVKGGNHCNLELYPEYIKHLKKFITAIEKSPPLKDDSPESSGPSDLETGSESMESSRKSTDVRDKSRSSTDHRRSTDRREKPRSSIDRKDKGRKSVDHPDKPRASVDQSDKPRKSIDRFGGMMRSVKLCNIDCFKVTSTSGS

SEQ ID NO: 19055 - protein, 293 aa, Triticum aestivum
  peptide (1)..(293): Ceres Seq. ID no. 14303560
  misc_feature (17)..(85): Pfam Name: Pfam Description:  alpha/beta hydrolase fold
  misc_feature (1)..(270): NCBI GI NO: 15230760 NR Description: hypothetical protein [Arabidopsis thaliana]
  misc_feature (1)..(268): NCBI GI NO: 15241394 NR Description: expressed protein [Arabidopsis thaliana]
  misc_feature (1)..(269): NCBI GI NO: 15232168 NR Description: expressed protein [Arabidopsis thaliana]
  misc_feature (1)..(268): NCBI GI NO: 15233975 NR Description: expressed protein [Arabidopsis thaliana]
  misc_feature (1)..(247): NCBI GI NO: 10177798 NR Description: emb|CAB87778
  misc_feature (1)..(245): NCBI GI NO: 34911338 NR Description: P0519D04.38
  misc_feature (1)..(248): NCBI GI NO: 9802758 NR Description: Hypothetical protein [Arabidopsis thaliana]
  misc_feature (1)..(248): NCBI GI NO: 25352159 NR Description: F21F23.4 protein - Arabidopsis thaliana
  misc_feature (1)..(178): NCBI GI NO: 22330474 NR Description: expressed protein [Arabidopsis thaliana]
  misc_feature (1)..(248): NCBI GI NO: 15222895 NR Description: hypothetical protein [Arabidopsis thaliana]
MYELFVELSSHLNVNLMGYDYSGYGQSSGKPSEQNTYADIEAAYRCLIETYGASEENIILYGQSVGSGPTLDLASRLPHLRAVVLHSPISSGLRVMYPVKHTYWFDIYKNIDKVALVKCPVLVIHGTADDVVDCSHGRALWELSKVKYEPLWVKGGNHCNLELYPEYIKHLKKFITAIEKSPPLKDDSPESSGPSDLETGSESMESSRKSTDVRDKSRSSTDHRRSTDRREKPRSSIDRKDKGRKSVDHPDKPRASVDQSDKPRKSIDRFGGMMRSVKLCNIDCFKVTSTSGS

SEQ ID NO: 19056 - DNA, 1811 bp, Triticum aestivum
  misc_feature (1)..(1811): Ceres Seq. ID no. 13654583
atttctgccaaagtggaaccggggaggcagcgagactgggactggtgcgtagtggaggagctgatttctccaagcgggcagtggcaatggcgtgctacgccgctctcctgcaccagccgcccgcctcgccgtccccgtgcacctcaggccgcgccggctcctgccgtgtccgtccgcccccactcctccagcgccgagcccttcccctgtctgtgcgcgctcggatctccccccgctgctcctacgccgcagccggagaaagcgccggagcgggcgccggggaacagcccgcggcggcgctccggagagtgctggggacgccgggcgcccaccaggcgcccgcttgctacgacgcgctcagcgcccgcctcgtcgagcgcgcggggttcagggcctgcttcacgagcggcttctcaatatctgctgcaaggcttggattaccagatgttggtctcatctcctatggtgaaatgatagatcaagggcgtttaatcactgaagcagtatcgatacctgtcattggtgatgctgataatggttatggaaactgtatgaatgtcaagaggacagtgaaaggatttattaatgctggttttgctggaattattcttgaagatcaggtgtcaccaaaagcatgtggacatacacaaggaaggaaagttgtctcaagagaggaagcgattatgcacataaaagccgctgtagatgccaggaaggagagtggctctgacattgttattgtggcaaggacagattctcgtcaagctttgtctcttgatgaagcgttgtggagagcacgagcttttgctgatgctggagcagatgttctatttattgatgcccttgcctcaagggaagagatgatggcgttttgtgcagtttcacctggagttccaaaaatggccaacatgttagaaggtggtggtaaaactcctatattgagccctcttgaacttgaagaaattggttacaaaatcatagcctacccattatctctaattggggtatcaatgcgtgcaatggaggatgctcttgttgctataaaaggtggccgcatacctcctccaagtagcttgccatcatttgaggagatcaaggatacgctagggtttaaccgttattatgaagaggaaaagcgatacgttgcatcaccagctcaatcatccttttggagtgttataggtaattatgattatacaagtgaagctagcagttcaggagacaccaagtccaggactgagaaatcacaagaacctattattgacatactgccacagctctatgatcctggttccgctggaggcagaggtccttcaggtgggatgtggtcccgcacacttcgattgaagattacaggaagagatggggtccagaaaattgatgccaggatacctgctggattcttagaagggatgacaaaagttattccaggcctggctggaactaatatcatggaaaggcttcggaacgcgcctatggattcggacaacccccagaacgggcagatactgcttgattttgaggacggcaggggagataggatccaggttttcatcgcgtgagcgtgttgttcgttgttgtcgtcccggcatccgatactcagacgagcgtcatgttccgtttgagtagtataagcaaatggctgttacttggtagtagttggtaggcccttgctgcctacatccagttatgtaaactccgcatcatactgcatgcatccagaactagtcttcctgtaaccttcctcgtctcatggatgcggaagttaaattcgaataaaacaagttatggaaaaggtattcctctatgcg

SEQ ID NO: 19057 - protein, 519 aa, Triticum aestivum
  peptide (1)..(519): Ceres Seq. ID no. 13654584
  misc_feature (95)..(335): Pfam Name: Pfam Description:  Isocitrate lyase family
  misc_feature (29)..(518): NCBI GI NO: 32490267 NR Description: OSJNBb0116K07.9
  misc_feature (86)..(433): NCBI GI NO: 38347227 NR Description: OSJNBa0044M19.9
  misc_feature (446)..(518): NCBI GI NO: 38347227 NR Description: OSJNBa0044M19.9
  misc_feature (66)..(518): NCBI GI NO: 30689278 NR Description: carboxyphosphonoenolpyruvate mutase -related
  misc_feature (66)..(464): NCBI GI NO: 30689282 NR Description: carboxyphosphonoenolpyruvate mutase -related
  misc_feature (66)..(422): NCBI GI NO: 25408843 NR Description: probable carboxyphosphonoenolpyruvate mutase
  misc_feature (409)..(464): NCBI GI NO: 25408843 NR Description: probable carboxyphosphonoenolpyruvate mutase
  misc_feature (100)..(380): NCBI GI NO: 23043034 NR Description: hypothetical protein
  misc_feature (113)..(374): NCBI GI NO: 40747280 NR Description: hypothetical protein AN9369.2
  misc_feature (112)..(382): NCBI GI NO: 40739091 NR Description: hypothetical protein AN6882.2
FCQSGTGEAARLGLVRSGGADFSKRAVAMACYAALLHQPPASPSPCTSGRAGSCRVRPPPLLQRRALPLSVRARISPRCSYAAAGESAGAGAGEQPAAALRRVLGTPGAHQAPACYDALSARLVERAGFRACFTSGFSISAARLGLPDVGLISYGEMIDQGRLITEAVSIPVIGDADNGYGNCMNVKRTVKGFINAGFAGIILEDQVSPKACGHTQGRKVVSREEAIMHIKAAVDARKESGSDIVIVARTDSRQALSLDEALWRARAFADAGADVLFIDALASREEMMAFCAVSPGVPKMANMLEGGGKTPILSPLELEEIGYKIIAYPLSLIGVSMRAMEDALVAIKGGRIPPPSSLPSFEEIKDTLGFNRYYEEEKRYVASPAQSSFWSVIGNYDYTSEASSSGDTKSRTEKSQEPIIDILPQLYDPGSAGGRGPSGGMWSRTLRLKITGRDGVQKIDARIPAGFLEGMTKVIPGLAGTNIMERLRNAPMDSDNPQNGQILLDFEDGRGDRIQVFIA

SEQ ID NO: 19058 - protein, 491 aa, Triticum aestivum
  peptide (1)..(491): Ceres Seq. ID no. 13654585
  misc_feature (67)..(307): Pfam Name: Pfam Description:  Isocitrate lyase family
  misc_feature (1)..(490): NCBI GI NO: 32490267 NR Description: OSJNBb0116K07.9
  misc_feature (58)..(405): NCBI GI NO: 38347227 NR Description: OSJNBa0044M19.9
  misc_feature (418)..(490): NCBI GI NO: 38347227 NR Description: OSJNBa0044M19.9
  misc_feature (38)..(490): NCBI GI NO: 30689278 NR Description: carboxyphosphonoenolpyruvate mutase -related
  misc_feature (38)..(436): NCBI GI NO: 30689282 NR Description: carboxyphosphonoenolpyruvate mutase -related
  misc_feature (38)..(394): NCBI GI NO: 25408843 NR Description: probable carboxyphosphonoenolpyruvate mutase
  misc_feature (381)..(436): NCBI GI NO: 25408843 NR Description: probable carboxyphosphonoenolpyruvate mutase
  misc_feature (72)..(352): NCBI GI NO: 23043034 NR Description: hypothetical protein
  misc_feature (85)..(346): NCBI GI NO: 40747280 NR Description: hypothetical protein AN9369.2
  misc_feature (84)..(354): NCBI GI NO: 40739091 NR Description: hypothetical protein AN6882.2
MACYAALLHQPPASPSPCTSGRAGSCRVRPPPLLQRRALPLSVRARISPRCSYAAAGESAGAGAGEQPAAALRRVLGTPGAHQAPACYDALSARLVERAGFRACFTSGFSISAARLGLPDVGLISYGEMIDQGRLITEAVSIPVIGDADNGYGNCMNVKRTVKGFINAGFAGIILEDQVSPKACGHTQGRKVVSREEAIMHIKAAVDARKESGSDIVIVARTDSRQALSLDEALWRARAFADAGADVLFIDALASREEMMAFCAVSPGVPKMANMLEGGGKTPILSPLELEEIGYKIIAYPLSLIGVSMRAMEDALVAIKGGRIPPPSSLPSFEEIKDTLGFNRYYEEEKRYVASPAQSSFWSVIGNYDYTSEASSSGDTKSRTEKSQEPIIDILPQLYDPGSAGGRGPSGGMWSRTLRLKITGRDGVQKIDARIPAGFLEGMTKVIPGLAGTNIMERLRNAPMDSDNPQNGQILLDFEDGRGDRIQVFIA

SEQ ID NO: 19059 - protein, 363 aa, Triticum aestivum
  peptide (1)..(363): Ceres Seq. ID no. 13654586
  misc_feature (1)..(179): Pfam Name: Pfam Description:  Isocitrate lyase family
  misc_feature (1)..(362): NCBI GI NO: 32490267 NR Description: OSJNBb0116K07.9
  misc_feature (1)..(277): NCBI GI NO: 38347227 NR Description: OSJNBa0044M19.9
  misc_feature (290)..(362): NCBI GI NO: 38347227 NR Description: OSJNBa0044M19.9
  misc_feature (1)..(362): NCBI GI NO: 30689278 NR Description: carboxyphosphonoenolpyruvate mutase -related
  misc_feature (1)..(308): NCBI GI NO: 30689282 NR Description: carboxyphosphonoenolpyruvate mutase -related
  misc_feature (1)..(266): NCBI GI NO: 25408843 NR Description: probable carboxyphosphonoenolpyruvate mutase
  misc_feature (253)..(308): NCBI GI NO: 25408843 NR Description: probable carboxyphosphonoenolpyruvate mutase
  misc_feature (1)..(224): NCBI GI NO: 23043034 NR Description: hypothetical protein
  misc_feature (1)..(218): NCBI GI NO: 40747280 NR Description: hypothetical protein AN9369.2
  misc_feature (1)..(226): NCBI GI NO: 40739091 NR Description: hypothetical protein AN6882.2
MIDQGRLITEAVSIPVIGDADNGYGNCMNVKRTVKGFINAGFAGIILEDQVSPKACGHTQGRKVVSREEAIMHIKAAVDARKESGSDIVIVARTDSRQALSLDEALWRARAFADAGADVLFIDALASREEMMAFCAVSPGVPKMANMLEGGGKTPILSPLELEEIGYKIIAYPLSLIGVSMRAMEDALVAIKGGRIPPPSSLPSFEEIKDTLGFNRYYEEEKRYVASPAQSSFWSVIGNYDYTSEASSSGDTKSRTEKSQEPIIDILPQLYDPGSAGGRGPSGGMWSRTLRLKITGRDGVQKIDARIPAGFLEGMTKVIPGLAGTNIMERLRNAPMDSDNPQNGQILLDFEDGRGDRIQVFIA

SEQ ID NO: 19060 - DNA, 1624 bp, Triticum aestivum
  misc_feature (1)..(1624): Ceres Seq. ID no. 14303592
cataagcgcccagccatcggtcagctcacaccaccctagctctccggcgaacgaccgataagtacccgtcgggatgggcgaggcaagctccgacgccgccgccaaggctgcggccgtgcgggctgtcgcagtctcccgggtcgcgccctcggtgctgggggaggtgcagcgcgttgaactttccttcttcgattcgccgtgggtcgtgctgccgccgatccagcgggtgttcctgtacgagcttggggatgccgacggcttcccgacggtggtggagcggctcaagcgcgctctcgcggacaccctggcgcactacctgcccctggcggggatgctcgagtacgcggtggagaccggggacgccttcgtggactgcactcacgccggggtcgccttcctggaggccgagggcgatatggacgtgcagcgtctagccggcgacgaggcgcacgacatcctggcattcctgagcctggtgccggagctggatgcccgggtgctcccggcgcccgtgctgtcagtgcaggccactcgtctaagcggcggcctggcggtgggcctgtccgtgcaccacgtagtcgcggacggacgcgccgtttggcgattcatggaggcctggtcttccgcttcccgcgagggctccccggtcaccaaggtcctcggcccgccgcactacggccgggaggtcatccagcaccccaacggcgacgagctcgcccgcgacatgctaaagaccgtcgcgcccaatctccctgtggtgagggggcagtacgatttcagccagcggttcctgcgggcgcgccggacattctacctcggcgccgacgacatccagtcgctcaggcggcggatcgacgacctcgcctcggacgagtctgctaccggtggcgacgcgcccaagccgaaaccggtgtcgacgttcgtggcgctggcggcactgagctggacggcgttcgttcgatccaaggggctcggcgcaggggacgacacgtacctcatgttcctcgccgacctgcgctcccgcctcgacccgccagtcagcgaggcttacctgggcaactgcgtgcgcgcgtgcctggcgagctgcgccgacgcggcggacctcctcggccagtccggcatcctccgcgcggcgcgggccgtgcaggcggcggtggccgagatggaggcggcgccgctgtccgggacggacaaggggtggatgcagatgctgatgcggctgccgtttcagcggatgaccaacgtggcggcgagccctcggttccgggcctacgaggcggccgacttcgggttcgggaagcccgcgcgcgtggagctggtgtccatgaaccacgacggcgagatggtgctagtcggcggccggcgcgacggcgaggtgcaagcctccgtgtccatcgacccggcgcacatggacgcattcaaggcctgcatcctcggctagacaaactcaaaaaattagctagtagccacgtccgtacgccgtcgaacttgcatagatccaataaatacaacaagtagcatgagtcatgcaccaattctgtttccattcctgtaatgatcgatcgtttatcgtcgtttcgactatttgggttctagttcaccggatgaattgtcacaagaaagg

SEQ ID NO: 19061 - protein, 455 aa, Triticum aestivum
  peptide (1)..(455): Ceres Seq. ID no. 14303593
  misc_feature (13)..(229): Pfam Name: Pfam Description:  Transferase family
  misc_feature (35)..(451): NCBI GI NO: 40253598 NR Description: putative Anthocyanin 5-aromatic acyltransferase
  misc_feature (43)..(454): NCBI GI NO: 21741235 NR Description: OSJNBb0034I13.21
  misc_feature (10)..(229): NCBI GI NO: 34894314 NR Description: unnamed protein product
  misc_feature (242)..(454): NCBI GI NO: 34894314 NR Description: unnamed protein product
  misc_feature (43)..(451): NCBI GI NO: 32488674 NR Description: OSJNBb0003B01.2
  misc_feature (14)..(450): NCBI GI NO: 37534152 NR Description: putative anthocyanin 5-aromatic acyltransferase
  misc_feature (105)..(220): NCBI GI NO: 34894314 NR Description: unnamed protein product
  misc_feature (13)..(447): NCBI GI NO: 15450469 NR Description: AT5g39050/MXF12_60 [Arabidopsis thaliana]
  misc_feature (15)..(448): NCBI GI NO: 15230048 NR Description: transferase family [Arabidopsis thaliana]
  misc_feature (25)..(449): NCBI GI NO: 38503267 NR Description: Anthocyanin 5-aromatic acyltransferase (5AT)
MGEASSDAAAKAAAVRAVAVSRVAPSVLGEVQRVELSFFDSPWVVLPPIQRVFLYELGDADGFPTVVERLKRALADTLAHYLPLAGMLEYAVETGDAFVDCTHAGVAFLEAEGDMDVQRLAGDEAHDILAFLSLVPELDARVLPAPVLSVQATRLSGGLAVGLSVHHVVADGRAVWRFMEAWSSASREGSPVTKVLGPPHYGREVIQHPNGDELARDMLKTVAPNLPVVRGQYDFSQRFLRARRTFYLGADDIQSLRRRIDDLASDESATGGDAPKPKPVSTFVALAALSWTAFVRSKGLGAGDDTYLMFLADLRSRLDPPVSEAYLGNCVRACLASCADAADLLGQSGILRAARAVQAAVAEMEAAPLSGTDKGWMQMLMRLPFQRMTNVAASPRFRAYEAADFGFGKPARVELVSMNHDGEMVLVGGRRDGEVQASVSIDPAHMDAFKACILG

SEQ ID NO: 19062 - protein, 369 aa, Triticum aestivum
  peptide (1)..(369): Ceres Seq. ID no. 14303594
  misc_feature (1)..(143): Pfam Name: Pfam Description:  Transferase family
  misc_feature (1)..(365): NCBI GI NO: 40253598 NR Description: putative Anthocyanin 5-aromatic acyltransferase
  misc_feature (1)..(368): NCBI GI NO: 21741235 NR Description: OSJNBb0034I13.21
  misc_feature (1)..(143): NCBI GI NO: 34894314 NR Description: unnamed protein product
  misc_feature (156)..(368): NCBI GI NO: 34894314 NR Description: unnamed protein product
  misc_feature (1)..(365): NCBI GI NO: 32488674 NR Description: OSJNBb0003B01.2
  misc_feature (1)..(364): NCBI GI NO: 37534152 NR Description: putative anthocyanin 5-aromatic acyltransferase
  misc_feature (19)..(134): NCBI GI NO: 34894314 NR Description: unnamed protein product
  misc_feature (1)..(361): NCBI GI NO: 15450469 NR Description: AT5g39050/MXF12_60 [Arabidopsis thaliana]
  misc_feature (1)..(362): NCBI GI NO: 15230048 NR Description: transferase family [Arabidopsis thaliana]
  misc_feature (1)..(363): NCBI GI NO: 38503267 NR Description: Anthocyanin 5-aromatic acyltransferase (5AT)
MLEYAVETGDAFVDCTHAGVAFLEAEGDMDVQRLAGDEAHDILAFLSLVPELDARVLPAPVLSVQATRLSGGLAVGLSVHHVVADGRAVWRFMEAWSSASREGSPVTKVLGPPHYGREVIQHPNGDELARDMLKTVAPNLPVVRGQYDFSQRFLRARRTFYLGADDIQSLRRRIDDLASDESATGGDAPKPKPVSTFVALAALSWTAFVRSKGLGAGDDTYLMFLADLRSRLDPPVSEAYLGNCVRACLASCADAADLLGQSGILRAARAVQAAVAEMEAAPLSGTDKGWMQMLMRLPFQRMTNVAASPRFRAYEAADFGFGKPARVELVSMNHDGEMVLVGGRRDGEVQASVSIDPAHMDAFKACILG

SEQ ID NO: 19063 - protein, 341 aa, Triticum aestivum
  peptide (1)..(341): Ceres Seq. ID no. 14303595
  misc_feature (1)..(115): Pfam Name: Pfam Description:  Transferase family
  misc_feature (1)..(337): NCBI GI NO: 40253598 NR Description: putative Anthocyanin 5-aromatic acyltransferase
  misc_feature (1)..(340): NCBI GI NO: 21741235 NR Description: OSJNBb0034I13.21
  misc_feature (1)..(115): NCBI GI NO: 34894314 NR Description: unnamed protein product
  misc_feature (128)..(340): NCBI GI NO: 34894314 NR Description: unnamed protein product
  misc_feature (1)..(337): NCBI GI NO: 32488674 NR Description: OSJNBb0003B01.2
  misc_feature (1)..(336): NCBI GI NO: 37534152 NR Description: putative anthocyanin 5-aromatic acyltransferase
  misc_feature (1)..(106): NCBI GI NO: 34894314 NR Description: unnamed protein product
  misc_feature (1)..(333): NCBI GI NO: 15450469 NR Description: AT5g39050/MXF12_60 [Arabidopsis thaliana]
  misc_feature (1)..(334): NCBI GI NO: 15230048 NR Description: transferase family [Arabidopsis thaliana]
  misc_feature (1)..(335): NCBI GI NO: 38503267 NR Description: Anthocyanin 5-aromatic acyltransferase (5AT)
MDVQRLAGDEAHDILAFLSLVPELDARVLPAPVLSVQATRLSGGLAVGLSVHHVVADGRAVWRFMEAWSSASREGSPVTKVLGPPHYGREVIQHPNGDELARDMLKTVAPNLPVVRGQYDFSQRFLRARRTFYLGADDIQSLRRRIDDLASDESATGGDAPKPKPVSTFVALAALSWTAFVRSKGLGAGDDTYLMFLADLRSRLDPPVSEAYLGNCVRACLASCADAADLLGQSGILRAARAVQAAVAEMEAAPLSGTDKGWMQMLMRLPFQRMTNVAASPRFRAYEAADFGFGKPARVELVSMNHDGEMVLVGGRRDGEVQASVSIDPAHMDAFKACILG

SEQ ID NO: 19064 - DNA, 1287 bp, Triticum aestivum
  misc_feature (1)..(1287): Ceres Seq. ID no. 14302267
accgcggcccaacaatctcaccaaccggagcctagcaaactttcaacacgttggcccgctactcttctcctgtcctgtccaccagccgaaactcagagctccgagctccgcctctgactccacctccggccacggcgggcaccatggcgccaacggtggagatcaggaatctcaccttcacctacccgggaatcgacggcaagccgccgcccggagcaccgcccctcatcgaggacgtctgcttctccctcgaagccggtcagcgctgccttctcgtcggctccaacggcgcaggtaagacaacgatactgaagatactgggcgggaagcacatggtggatccgagcatggttggggtcctgggaaggtcggccttccacgacacggcgcttacctcctccggagacctctgctaccttggcggcgagtggaggcgcgatgttgcctttgccggctaccaggtgaatatacagatggacatttcggcagagaaaatgctatttggtgtcactggcgttgatcctcagagaagagatgagcttatcaagattttggatgttgaccttacctggcggatgcacaaggcatcagatggtcagaggagaagagtccagatttgcatgggacttctcaagccattcaaggttcttcttcttgatgagataacagttgatcttgatgtgttggcaagagcaaatctgttgacatatctaaagaaggaatgtgcggaacaaggtgcaacaattatctatgccacacatatcttcgatggcctggatgactggccaactcacattgtctatgttgctcatgggaagttgcaactagcgctgccattagaaaaggtgaaagaaatgagccagttatcgctcatgagaacagtagagcgctggctgaggaaagagagggacgaagacaggaggaagagaaaggagcggaaggagaaaggcctcccggcattcgacaaggtcattgaggggagcagagtagtgaacaacgggtgggcagcaggaaggctcacttcgacgatagccggggaagataacttttctttcagttcaaacagcgttcttcggtagtaatcccacactgcactttggttcttgagatgatgaataacagtcctatagcaccacactcgagggattttggcggtaacagcaacattcttgcacaaaaggaacagagaatttgacaaaccatgcacccctgctgcatgtatacgacaatgtactctgaatctatgatactgggcgtcgattattattgtttgattttttttctgcg

SEQ ID NO: 19065 - protein, 311 aa, Triticum aestivum
  peptide (1)..(311): Ceres Seq. ID no. 14302268
  misc_feature (41)..(224): Pfam Name: Pfam Description:  ABC transporter
  misc_feature (4)..(311): NCBI GI NO: 15241744 NR Description: ABC transporter family protein
  misc_feature (27)..(264): NCBI GI NO: 15240093 NR Description: ABC transporter family protein
  misc_feature (27)..(263): NCBI GI NO: 21592901 NR Description: NBD-like protein [Arabidopsis thaliana]
  misc_feature (27)..(263): NCBI GI NO: 18379174 NR Description: ABC transporter family protein
  misc_feature (27)..(263): NCBI GI NO: 25406749 NR Description: hypothetical protein
  misc_feature (36)..(282): NCBI GI NO: 19115648 NR Description: probable ATP-dependent transporter
  misc_feature (29)..(270): NCBI GI NO: 32405648 NR Description: hypothetical protein [Neurospora crassa]
  misc_feature (5)..(241): NCBI GI NO: 14318491 NR Description: CCR4 associated factor; Caf16p
  misc_feature (91)..(287): NCBI GI NO: 40738662 NR Description: hypothetical protein AN6512.2
  misc_feature (7)..(226): NCBI GI NO: 23483625 NR Description: NBD-like protein [Plasmodium yoelii yoelii]
MAPTVEIRNLTFTYPGIDGKPPPGAPPLIEDVCFSLEAGQRCLLVGSNGAGKTTILKILGGKHMVDPSMVGVLGRSAFHDTALTSSGDLCYLGGEWRRDVAFAGYQVNIQMDISAEKMLFGVTGVDPQRRDELIKILDVDLTWRMHKASDGQRRRVQICMGLLKPFKVLLLDEITVDLDVLARANLLTYLKKECAEQGATIIYATHIFDGLDDWPTHIVYVAHGKLQLALPLEKVKEMSQLSLMRTVERWLRKERDEDRRKRKERKEKGLPAFDKVIEGSRVVNNGWAAGRLTSTIAGEDNFSFSSNSVLR

SEQ ID NO: 19066 - protein, 248 aa, Triticum aestivum
  peptide (1)..(248): Ceres Seq. ID no. 14302269
  misc_feature (1)..(161): Pfam Name: Pfam Description:  ABC transporter
  misc_feature (1)..(248): NCBI GI NO: 15241744 NR Description: ABC transporter family protein
  misc_feature (1)..(201): NCBI GI NO: 15240093 NR Description: ABC transporter family protein
  misc_feature (1)..(200): NCBI GI NO: 21592901 NR Description: NBD-like protein [Arabidopsis thaliana]
  misc_feature (1)..(200): NCBI GI NO: 18379174 NR Description: ABC transporter family protein
  misc_feature (1)..(200): NCBI GI NO: 25406749 NR Description: hypothetical protein
  misc_feature (1)..(219): NCBI GI NO: 19115648 NR Description: probable ATP-dependent transporter
  misc_feature (1)..(207): NCBI GI NO: 32405648 NR Description: hypothetical protein [Neurospora crassa]
  misc_feature (1)..(178): NCBI GI NO: 14318491 NR Description: CCR4 associated factor; Caf16p
  misc_feature (28)..(224): NCBI GI NO: 40738662 NR Description: hypothetical protein AN6512.2
  misc_feature (1)..(163): NCBI GI NO: 23483625 NR Description: NBD-like protein [Plasmodium yoelii yoelii]
MVDPSMVGVLGRSAFHDTALTSSGDLCYLGGEWRRDVAFAGYQVNIQMDISAEKMLFGVTGVDPQRRDELIKILDVDLTWRMHKASDGQRRRVQICMGLLKPFKVLLLDEITVDLDVLARANLLTYLKKECAEQGATIIYATHIFDGLDDWPTHIVYVAHGKLQLALPLEKVKEMSQLSLMRTVERWLRKERDEDRRKRKERKEKGLPAFDKVIEGSRVVNNGWAAGRLTSTIAGEDNFSFSSNSVLR

SEQ ID NO: 19067 - protein, 243 aa, Triticum aestivum
  peptide (1)..(243): Ceres Seq. ID no. 14302270
  misc_feature (1)..(156): Pfam Name: Pfam Description:  ABC transporter
  misc_feature (1)..(243): NCBI GI NO: 15241744 NR Description: ABC transporter family protein
  misc_feature (1)..(196): NCBI GI NO: 15240093 NR Description: ABC transporter family protein
  misc_feature (1)..(195): NCBI GI NO: 21592901 NR Description: NBD-like protein [Arabidopsis thaliana]
  misc_feature (1)..(195): NCBI GI NO: 18379174 NR Description: ABC transporter family protein
  misc_feature (1)..(195): NCBI GI NO: 25406749 NR Description: hypothetical protein
  misc_feature (1)..(214): NCBI GI NO: 19115648 NR Description: probable ATP-dependent transporter
  misc_feature (1)..(202): NCBI GI NO: 32405648 NR Description: hypothetical protein [Neurospora crassa]
  misc_feature (1)..(173): NCBI GI NO: 14318491 NR Description: CCR4 associated factor; Caf16p
  misc_feature (23)..(219): NCBI GI NO: 40738662 NR Description: hypothetical protein AN6512.2
  misc_feature (1)..(158): NCBI GI NO: 23483625 NR Description: NBD-like protein [Plasmodium yoelii yoelii]
MVGVLGRSAFHDTALTSSGDLCYLGGEWRRDVAFAGYQVNIQMDISAEKMLFGVTGVDPQRRDELIKILDVDLTWRMHKASDGQRRRVQICMGLLKPFKVLLLDEITVDLDVLARANLLTYLKKECAEQGATIIYATHIFDGLDDWPTHIVYVAHGKLQLALPLEKVKEMSQLSLMRTVERWLRKERDEDRRKRKERKEKGLPAFDKVIEGSRVVNNGWAAGRLTSTIAGEDNFSFSSNSVLR

SEQ ID NO: 19068 - DNA, 1888 bp, Triticum aestivum
  misc_feature (1)..(1888): Ceres Seq. ID no. 13596398
actctcctctgcacatctctcctccccccctcccccacgacgcggcaaaaacagggaggagagagggcgagagagggagcccgagcccgaatccctgcgatccccccctcccggtcggaggatccggcgatcagccatgaacgagaaggcctccgtctccaaggagctcaacgccaggcacaagaagatattggaaggccttctgcggttgccggagaacagagaatgtgcagactgcaagtcaaagggtcctcgatgggcaagtgtcaatcttgggatcttcgtatgcatgcagtgttctggaattcatagaagccttggggtacacatatcaaaggtaaggtctgctactctggatacatggttgccagagcaagttgcatttattcaatcaatgggaaatgaaaaggcaaatggctattgggaagcagagctgccccctaattatgacagggttgggatagagaacttcatccgtgcaaaatacgaggacaagaggtggataccgaggaatggaacatcaaaactgccctctagtgctcgagatgagaagagctctgaatctcaggccagtcatgctaacaggggtgggcacgctcaaaaaccttcatttgagcaacatcgtgtttcaccagctgctacgaaaagaactgttccagtggcttctaggatgcacacgcaggcatcacctcagccaaaagcagaactaccagttcccaaggttgcttcgcctcctcagccagcaaaatctcctgctaaagttgatgtgacacccccaaaagttcatcagccatcggttgcaccccctcctaaagttgactatgccattgacctctttaacatgttatcgatggacggaacaactgagaaagaaccagtgtcatcttccaatgatgataatgcttgggatggcttccagtctgcagaaccagcacctaactccgagaaaaaggatactgctaagccagtagaaagtaaggcccagtctacatcgggaatcgaagacttatttaaagactcgccagctgtggcagcgtcttcagctccagttgcttccaaatcaaacccacagacagatatcatgagtctgtttgagaagtcgaatatggtatcaccatttgctatccatcagcagcagcttgcttttatgacccagcaacaagctttactgatggctgctcttaaatctggaaatgcaccccaaatggttcctgggaatgcaccccaaatggttcccgggaatgctagtgtgctaaatgctaatggttctaatgcccctaatggaagcttgccttcccatagctggccaaatctaggttatcagaaccctgcatctattccagcagcagcaccacaaaatggtgtcgccaaggctgggaacaacaatcaggacttcttttctggtaacttcggttttggttcgccgggcaagccagcaaatggggccacaaccgcaggtgctaacaagagcgcatccacccctacctcttctaccctgccctctcaatcaggcaaagagtacgatttttcctcattaacgcaaggaatgttctcgaagcgatgagtggcttgcaatacttggaaatggatgaggcctccattgggcgcagatttagggagaagttggggggaagcttgtacactgttttaccgaggcagctttgccaattgtggatacatagttacatcaccttgtgggccaacaagtgcggatatggcagaaaactgctcatgttgtttcctacagctgaatagtcgcattgttacagtgatgccaaagaacttcaaacagaggattccccttttctcttgttcagggtgtagttgcaataccatatgtcgattactttgtattgtacgccaataattttattccgttgtgttccat

SEQ ID NO: 19069 - protein, 520 aa, Triticum aestivum
  peptide (1)..(520): Ceres Seq. ID no. 15221860
  misc_feature (46)..(520): NCBI GI NO: 34898734 NR Description: contains ESTs C28562
  misc_feature (46)..(519): NCBI GI NO: 18423615 NR Description: ARF GAP-like zinc finger-containing protein
  misc_feature (46)..(519): NCBI GI NO: 21618169 NR Description: ARF GAP-like zinc finger-containing protein ZIGA3
  misc_feature (52)..(519): NCBI GI NO: 10441352 NR Description: ARF GAP-like zinc finger-containing protein ZIGA3
  misc_feature (46)..(177): NCBI GI NO: 9294154 NR Description: emb|CAB07858
  misc_feature (46)..(162): NCBI GI NO: 15229090 NR Description: ARF GTPase-activating domain-containing protein
  misc_feature (53)..(269): NCBI GI NO: 28077013 NR Description: stromal membrane-associated protein [Mus musculus]
  misc_feature (53)..(498): NCBI GI NO: 23273590 NR Description: Similar to stromal membrane-associated protein
  misc_feature (53)..(474): NCBI GI NO: 24651922 NR Description: CG8243-PA [Drosophila melanogaster]
  misc_feature (53)..(498): NCBI GI NO: 16303736 NR Description: stromal membrane-associated protein SMAP1A
LSSAHLSSPPPPRRGKNREERGREREPEPESLRSPPPGRRIRRSAMNEKASVSKELNARHKKILEGLLRLPENRECADCKSKGPRWASVNLGIFVCMQCSGIHRSLGVHISKVRSATLDTWLPEQVAFIQSMGNEKANGYWEAELPPNYDRVGIENFIRAKYEDKRWIPRNGTSKLPSSARDEKSSESQASHANRGGHAQKPSFEQHRVSPAATKRTVPVASRMHTQASPQPKAELPVPKVASPPQPAKSPAKVDVTPPKVHQPSVAPPPKVDYAIDLFNMLSMDGTTEKEPVSSSNDDNAWDGFQSAEPAPNSEKKDTAKPVESKAQSTSGIEDLFKDSPAVAASSAPVASKSNPQTDIMSLFEKSNMVSPFAIHQQQLAFMTQQQALLMAALKSGNAPQMVPGNAPQMVPGNASVLNANGSNAPNGSLPSHSWPNLGYQNPASIPAAAPQNGVAKAGNNNQDFFSGNFGFGSPGKPANGATTAGANKSASTPTSSTLPSQSGKEYDFSSLTQGMFSKR

SEQ ID NO: 19070 - protein, 475 aa, Triticum aestivum
  peptide (1)..(475): Ceres Seq. ID no. 15221861
  misc_feature (1)..(475): NCBI GI NO: 34898734 NR Description: contains ESTs C28562
  misc_feature (1)..(474): NCBI GI NO: 18423615 NR Description: ARF GAP-like zinc finger-containing protein
  misc_feature (1)..(474): NCBI GI NO: 21618169 NR Description: ARF GAP-like zinc finger-containing protein ZIGA3
  misc_feature (7)..(474): NCBI GI NO: 10441352 NR Description: ARF GAP-like zinc finger-containing protein ZIGA3
  misc_feature (1)..(132): NCBI GI NO: 9294154 NR Description: emb|CAB07858
  misc_feature (1)..(117): NCBI GI NO: 15229090 NR Description: ARF GTPase-activating domain-containing protein
  misc_feature (8)..(224): NCBI GI NO: 28077013 NR Description: stromal membrane-associated protein [Mus musculus]
  misc_feature (8)..(453): NCBI GI NO: 23273590 NR Description: Similar to stromal membrane-associated protein
  misc_feature (8)..(429): NCBI GI NO: 24651922 NR Description: CG8243-PA [Drosophila melanogaster]
  misc_feature (8)..(453): NCBI GI NO: 16303736 NR Description: stromal membrane-associated protein SMAP1A
MNEKASVSKELNARHKKILEGLLRLPENRECADCKSKGPRWASVNLGIFVCMQCSGIHRSLGVHISKVRSATLDTWLPEQVAFIQSMGNEKANGYWEAELPPNYDRVGIENFIRAKYEDKRWIPRNGTSKLPSSARDEKSSESQASHANRGGHAQKPSFEQHRVSPAATKRTVPVASRMHTQASPQPKAELPVPKVASPPQPAKSPAKVDVTPPKVHQPSVAPPPKVDYAIDLFNMLSMDGTTEKEPVSSSNDDNAWDGFQSAEPAPNSEKKDTAKPVESKAQSTSGIEDLFKDSPAVAASSAPVASKSNPQTDIMSLFEKSNMVSPFAIHQQQLAFMTQQQALLMAALKSGNAPQMVPGNAPQMVPGNASVLNANGSNAPNGSLPSHSWPNLGYQNPASIPAAAPQNGVAKAGNNNQDFFSGNFGFGSPGKPANGATTAGANKSASTPTSSTLPSQSGKEYDFSSLTQGMFSKR

SEQ ID NO: 19071 - protein, 424 aa, Triticum aestivum
  peptide (1)..(424): Ceres Seq. ID no. 15221862
  misc_feature (1)..(424): NCBI GI NO: 34898734 NR Description: contains ESTs C28562
  misc_feature (1)..(423): NCBI GI NO: 18423615 NR Description: ARF GAP-like zinc finger-containing protein
  misc_feature (1)..(423): NCBI GI NO: 21618169 NR Description: ARF GAP-like zinc finger-containing protein ZIGA3
  misc_feature (1)..(423): NCBI GI NO: 10441352 NR Description: ARF GAP-like zinc finger-containing protein ZIGA3
  misc_feature (1)..(81): NCBI GI NO: 9294154 NR Description: emb|CAB07858
  misc_feature (1)..(66): NCBI GI NO: 15229090 NR Description: ARF GTPase-activating domain-containing protein
  misc_feature (1)..(173): NCBI GI NO: 28077013 NR Description: stromal membrane-associated protein [Mus musculus]
  misc_feature (1)..(402): NCBI GI NO: 23273590 NR Description: Similar to stromal membrane-associated protein
  misc_feature (1)..(378): NCBI GI NO: 24651922 NR Description: CG8243-PA [Drosophila melanogaster]
  misc_feature (1)..(402): NCBI GI NO: 16303736 NR Description: stromal membrane-associated protein SMAP1A
MQCSGIHRSLGVHISKVRSATLDTWLPEQVAFIQSMGNEKANGYWEAELPPNYDRVGIENFIRAKYEDKRWIPRNGTSKLPSSARDEKSSESQASHANRGGHAQKPSFEQHRVSPAATKRTVPVASRMHTQASPQPKAELPVPKVASPPQPAKSPAKVDVTPPKVHQPSVAPPPKVDYAIDLFNMLSMDGTTEKEPVSSSNDDNAWDGFQSAEPAPNSEKKDTAKPVESKAQSTSGIEDLFKDSPAVAASSAPVASKSNPQTDIMSLFEKSNMVSPFAIHQQQLAFMTQQQALLMAALKSGNAPQMVPGNAPQMVPGNASVLNANGSNAPNGSLPSHSWPNLGYQNPASIPAAAPQNGVAKAGNNNQDFFSGNFGFGSPGKPANGATTAGANKSASTPTSSTLPSQSGKEYDFSSLTQGMFSKR

SEQ ID NO: 19072 - DNA, 1092 bp, Triticum aestivum
  misc_feature (1)..(1092): Ceres Seq. ID no. 13654590
ggacgaccccgacgcgccaccacctgctcctcccggcggctgcctgctcgactcgattccccaaccgcagcagggtcaacgacagaacctatcgcgcgatgggcttgggactgagattgccgttcttcctactcctcttgctgctggtcagcctgggagccgcacaaggccggagcacagtttttcttgatatccaggaggaggctcgaggctctggtcaaatcatcaaggatcaactaactttgagcaaaattcccgtgcgtgttgagaggggcagcccactatgcccagcttgtgagaagtttacagaggaagctcttagctatcttagtcagaaacaatcacaagataagatgatggaggtccttcatgaagcttgttctcagacattctcgttggaaaagaagtgtgttgagtttgtggactcctatgcaactctcttatttgccaagatcgctgagatcaagccagaagagttctgcaaacgaaatggcctctgcagggacaatgctcttctgtctggtgtgagaagtgagagcacatgcgtgttttgccaccacctcatggatgaagttttgtccaaactgaaggatcctgatgctgagtttgagataattcaaattctcctcaaggagtgcaagaagatcgaaggtcatgaacagcagtgcaaacgactggtcctgcaatacatccctctcatcctggtgaacggagagaagttcctcgagaagaacgatatatgtaccattgtccaagcgtgcgatgctggcaaaaagacaatggtcgggccattctccgaggagggtttgttgcgtgatgcatgaaggtagaaagaccacaccaggctgcgtaaacccagacgaaacattatgcactagttcttccttgttgtacataggtgtccaaaaattcgtctggcttttgccttgtactgctgctcctgcattctgtggatgctttgtattataaagggagcggcatgacaaacagtttattatgtcaacttgaagccgtgttgtacttattacttcgtcagtgtttaatttgtaatgacatttgaacaactgtagatactaaatcgagtttcagtcg

SEQ ID NO: 19073 - protein, 273 aa, Triticum aestivum
  peptide (1)..(273): Ceres Seq. ID no. 13654591
  misc_feature (219)..(253): Pfam Name: Pfam Description:  Saposin-like type B, region 2
  misc_feature (94)..(256): NCBI GI NO: 34896130 NR Description: P0701D05.19
  misc_feature (82)..(263): NCBI GI NO: 15231028 NR Description: expressed protein [Arabidopsis thaliana]
  misc_feature (98)..(253): NCBI GI NO: 6942199 NR Description: putative protein [Vitis riparia]
  misc_feature (94)..(253): NCBI GI NO: 15241065 NR Description: expressed protein [Arabidopsis thaliana]
TTPTRHHLLLPAAACSTRFPNRSRVNDRTYRAMGLGLRLPFFLLLLLLVSLGAAQGRSTVFLDIQEEARGSGQIIKDQLTLSKIPVRVERGSPLCPACEKFTEEALSYLSQKQSQDKMMEVLHEACSQTFSLEKKCVEFVDSYATLLFAKIAEIKPEEFCKRNGLCRDNALLSGVRSESTCVFCHHLMDEVLSKLKDPDAEFEIIQILLKECKKIEGHEQQCKRLVLQYIPLILVNGEKFLEKNDICTIVQACDAGKKTMVGPFSEEGLLRDA

SEQ ID NO: 19074 - protein, 241 aa, Triticum aestivum
  peptide (1)..(241): Ceres Seq. ID no. 13654592
  misc_feature (187)..(221): Pfam Name: Pfam Description:  Saposin-like type B, region 2
  misc_feature (62)..(224): NCBI GI NO: 34896130 NR Description: P0701D05.19
  misc_feature (50)..(231): NCBI GI NO: 15231028 NR Description: expressed protein [Arabidopsis thaliana]
  misc_feature (66)..(221): NCBI GI NO: 6942199 NR Description: putative protein [Vitis riparia]
  misc_feature (62)..(221): NCBI GI NO: 15241065 NR Description: expressed protein [Arabidopsis thaliana]
MGLGLRLPFFLLLLLLVSLGAAQGRSTVFLDIQEEARGSGQIIKDQLTLSKIPVRVERGSPLCPACEKFTEEALSYLSQKQSQDKMMEVLHEACSQTFSLEKKCVEFVDSYATLLFAKIAEIKPEEFCKRNGLCRDNALLSGVRSESTCVFCHHLMDEVLSKLKDPDAEFEIIQILLKECKKIEGHEQQCKRLVLQYIPLILVNGEKFLEKNDICTIVQACDAGKKTMVGPFSEEGLLRDA

SEQ ID NO: 19075 - protein, 156 aa, Triticum aestivum
  peptide (1)..(156): Ceres Seq. ID no. 13654593
  misc_feature (102)..(136): Pfam Name: Pfam Description:  Saposin-like type B, region 2
  misc_feature (1)..(139): NCBI GI NO: 34896130 NR Description: P0701D05.19
  misc_feature (1)..(146): NCBI GI NO: 15231028 NR Description: expressed protein [Arabidopsis thaliana]
  misc_feature (1)..(136): NCBI GI NO: 6942199 NR Description: putative protein [Vitis riparia]
  misc_feature (1)..(136): NCBI GI NO: 15241065 NR Description: expressed protein [Arabidopsis thaliana]
MMEVLHEACSQTFSLEKKCVEFVDSYATLLFAKIAEIKPEEFCKRNGLCRDNALLSGVRSESTCVFCHHLMDEVLSKLKDPDAEFEIIQILLKECKKIEGHEQQCKRLVLQYIPLILVNGEKFLEKNDICTIVQACDAGKKTMVGPFSEEGLLRDA

SEQ ID NO: 19076 - DNA, 1198 bp, Triticum aestivum
  misc_feature (1)..(1198): Ceres Seq. ID no. 13596109
aaagaaaaagtccacgccacctcactgcagggcacgccgtcgcgcggagccagccagggcggtcgccgccggccgcgaccatggccgacggcaagcgcagcgtcgcggagaccttctccagactccgggagcgcggcaagacggcattcatcccattcatcaccgccggtgaccctgatttggcgaccacatcaaaggcgcttaggatcctagactcctgcggctcaaacgtgatcgagctcggcgtgccctactcggatccgttagctgatggtccagtcattcaggctgcagcatcccgtgcgcttaagaaaggcactaagctcggttctgtcttggcgatgctcacggaggttataccagagctctcttgtccaatagttctcttcacatactacaacccgattctaaaaaatggggtgcgaaacttcatggctaagattaagcaagctggtgtacatggtcttgtcgtacctgatcttcctttggaggagacaacattgttgaggagcgaggccactatgcataacatagagctggtgctacttacaacaccaaccacaccaacagagaggatgaaggaaatcacaaaagcttcagaaggattcgtttatcttgtgagtgctgtcggagttacaggtgcacgctcaaatgtaaacttacgcgttgagcatcttcttaaggagatcaagcaggttacagacaaacctgtggctgttggctttggcatatcaactccagagcatgcgaagcagattgcgggctggggagcggatggtgtgattattggcagtgcgattgttagacagttgggcgaagccgcttctccggaagaaggactgagaagaatagaagagtacgccaagagcatcaaggcggctattccatgagatgggcagttccatcatgaacaagccaattagtagatcgtaagcatgtcgtttatcatctggtagtctgcttgatggacctggaatctgtagttcgtctggcatatttgattccagtgctcaaaacaattatatctttgtgtgttagaatcacaacatgaattaacaaggtaatctggaaatggtacgaagctcgatttctgttgtgaggaaacattgtgagatgtagtgttcttatgtggaaatatggaatgttagaatttggaaggacttgtcctgagaggagcaacaggataagtccatggtgc

SEQ ID NO: 19077 - protein, 295 aa, Triticum aestivum
  peptide (1)..(295): Ceres Seq. ID no. 15221777
  misc_feature (38)..(295): Pfam Name: Pfam Description:  Tryptophan synthase alpha chain
  misc_feature (30)..(295): NCBI GI NO: 34897224 NR Description: putative indole-3-glycerol phosphate lyase
  misc_feature (28)..(295): NCBI GI NO: 11993328 NR Description: putative tryptophan synthase alpha [Zea mays]
  misc_feature (24)..(295): NCBI GI NO: 34393530 NR Description: putative tryptophan synthase alpha chain
  misc_feature (20)..(294): NCBI GI NO: 21593559 NR Description: tryptophan synthase alpha chain
  misc_feature (20)..(294): NCBI GI NO: 18410104 NR Description: tryptophan synthase, alpha subunit (TSA1)
  misc_feature (34)..(294): NCBI GI NO: 15235430 NR Description: tryptophan synthase, alpha subunit
  misc_feature (1)..(295): NCBI GI NO: 34897212 NR Description: putative indole-3-glycerol phosphate lyase
  misc_feature (1)..(295): NCBI GI NO: 11993325 NR Description: indole-3-glycerol phosphate lyase [Zea mays]
  misc_feature (5)..(295): NCBI GI NO: 34897218 NR Description: putative indole-3-glycerol phosphate lyase
  misc_feature (1)..(295): NCBI GI NO: 34897216 NR Description: putative indole-3-glycerol phosphate lyase
RKSPRHLTAGHAVARSQPGRSPPAATMADGKRSVAETFSRLRERGKTAFIPFITAGDPDLATTSKALRILDSCGSNVIELGVPYSDPLADGPVIQAAASRALKKGTKLGSVLAMLTEVIPELSCPIVLFTYYNPILKNGVRNFMAKIKQAGVHGLVVPDLPLEETTLLRSEATMHNIELVLLTTPTTPTERMKEITKASEGFVYLVSAVGVTGARSNVNLRVEHLLKEIKQVTDKPVAVGFGISTPEHAKQIAGWGADGVIIGSAIVRQLGEAASPEEGLRRIEEYAKSIKAAIP

SEQ ID NO: 19078 - protein, 269 aa, Triticum aestivum
  peptide (1)..(269): Ceres Seq. ID no. 15221778
  misc_feature (12)..(269): Pfam Name: Pfam Description:  Tryptophan synthase alpha chain
  misc_feature (4)..(269): NCBI GI NO: 34897224 NR Description: putative indole-3-glycerol phosphate lyase
  misc_feature (2)..(269): NCBI GI NO: 11993328 NR Description: putative tryptophan synthase alpha [Zea mays]
  misc_feature (1)..(269): NCBI GI NO: 34393530 NR Description: putative tryptophan synthase alpha chain
  misc_feature (1)..(268): NCBI GI NO: 21593559 NR Description: tryptophan synthase alpha chain
  misc_feature (1)..(268): NCBI GI NO: 18410104 NR Description: tryptophan synthase, alpha subunit (TSA1)
  misc_feature (8)..(268): NCBI GI NO: 15235430 NR Description: tryptophan synthase, alpha subunit
  misc_feature (1)..(269): NCBI GI NO: 34897212 NR Description: putative indole-3-glycerol phosphate lyase
  misc_feature (1)..(269): NCBI GI NO: 11993325 NR Description: indole-3-glycerol phosphate lyase [Zea mays]
  misc_feature (1)..(269): NCBI GI NO: 34897218 NR Description: putative indole-3-glycerol phosphate lyase
  misc_feature (1)..(269): NCBI GI NO: 34897216 NR Description: putative indole-3-glycerol phosphate lyase
MADGKRSVAETFSRLRERGKTAFIPFITAGDPDLATTSKALRILDSCGSNVIELGVPYSDPLADGPVIQAAASRALKKGTKLGSVLAMLTEVIPELSCPIVLFTYYNPILKNGVRNFMAKIKQAGVHGLVVPDLPLEETTLLRSEATMHNIELVLLTTPTTPTERMKEITKASEGFVYLVSAVGVTGARSNVNLRVEHLLKEIKQVTDKPVAVGFGISTPEHAKQIAGWGADGVIIGSAIVRQLGEAASPEEGLRRIEEYAKSIKAAIP

SEQ ID NO: 19079 - protein, 182 aa, Triticum aestivum
  peptide (1)..(182): Ceres Seq. ID no. 15221779
  misc_feature (1)..(182): Pfam Name: Pfam Description:  Tryptophan synthase alpha chain
  misc_feature (1)..(182): NCBI GI NO: 34897224 NR Description: putative indole-3-glycerol phosphate lyase
  misc_feature (1)..(182): NCBI GI NO: 11993328 NR Description: putative tryptophan synthase alpha [Zea mays]
  misc_feature (1)..(182): NCBI GI NO: 34393530 NR Description: putative tryptophan synthase alpha chain
  misc_feature (1)..(181): NCBI GI NO: 21593559 NR Description: tryptophan synthase alpha chain
  misc_feature (1)..(181): NCBI GI NO: 18410104 NR Description: tryptophan synthase, alpha subunit (TSA1)
  misc_feature (1)..(181): NCBI GI NO: 15235430 NR Description: tryptophan synthase, alpha subunit
  misc_feature (1)..(182): NCBI GI NO: 34897212 NR Description: putative indole-3-glycerol phosphate lyase
  misc_feature (1)..(182): NCBI GI NO: 11993325 NR Description: indole-3-glycerol phosphate lyase [Zea mays]
  misc_feature (1)..(182): NCBI GI NO: 34897218 NR Description: putative indole-3-glycerol phosphate lyase
  misc_feature (1)..(182): NCBI GI NO: 34897216 NR Description: putative indole-3-glycerol phosphate lyase
MLTEVIPELSCPIVLFTYYNPILKNGVRNFMAKIKQAGVHGLVVPDLPLEETTLLRSEATMHNIELVLLTTPTTPTERMKEITKASEGFVYLVSAVGVTGARSNVNLRVEHLLKEIKQVTDKPVAVGFGISTPEHAKQIAGWGADGVIIGSAIVRQLGEAASPEEGLRRIEEYAKSIKAAIP

SEQ ID NO: 19080 - DNA, 1353 bp, Triticum aestivum
  misc_feature (1)..(1353): Ceres Seq. ID no. 13596492
attcgaaaaccttcctcgcgaaaccccagccccgctcctccgctccaccccccacctcccctggtccctcgcgagagcaggtccgggtcgcgtctccggcggcggagaagcaagacaagggcggcggagatgtcggtcagcaacatagggatgatggacggcgcctacttcgtggggcggaacgagatcctcgcctggatcaacactaccctgcagctcggcctcgccaaggtcgaggaggcggcgtcgggcgcggtggcgtcccagctcatggacgcggcgcaccccggggcggtgcccatgcacaaggtcaacttcgacgccaagaacgagtacgacatgatccagaactacaaggtcctgcaggatgtgttcaacaagctgaagatcaccaagcacattgaggttaataagctcatcaaaggaaggcccctagacaacctggagttcatgcagtggatgaaaagatactgtgattctgttaatggtggattcatgaccagctacaatgcttccgagagaagagaaagcagcaagggtgggaaagacaccaacagaaggacatcagggacttcccaggcgcctgccaagtctgcatccgccacccacaaagctcagcctccgtcgcacgcagctaagcgggccaacgggcatgcttcaaatgctccacagcggtgcgcaaagccgcctccagcttatgatgcacagatgaccgagctgaaactccttgttgatagcgccgagaaagagagagatttctatttctctaagctgcgggacgttgagatcttgtgccagagccccgaggttgagcatttaccgattgcgaaggctatccagaagatactctatgcttcggaggacgacccctcgacggtggcggaagcccaggcagagatggtggcgcagcagaaccagatgcagcagcagccaatgctgagccccatcctggaggcgtccgaggccccaagcatcacccccaaggattcttccgaggagagcttgaggcaggaagcagcggcagcacacaagaggaagagcatctcggacctggaggagttcgagatggggtcgagctccaggatgaggctctcagacgtctcggacgtgcagctgtgcggctcaccgttgatgagcttcacctgaaagaaaggagggaccgaattgcaggggctgagttgatgtcattgccggttatgacttgtgggtttatcttgtgttgtttcgtttgttgtttggtgtcataatgtgtgtgctcttgtggagctggagttgaacctgcctttgactgtgatcgatctgccacagcatttgtggccttctgcaacatgttattattgaatagcctctttt

SEQ ID NO: 19081 - protein, 381 aa, Triticum aestivum
  peptide (1)..(381): Ceres Seq. ID no. 13596493
  misc_feature (59)..(159): Pfam Name: CH Pfam Description: Calponin homology
  misc_feature (44)..(381): NCBI GI NO: 37535740 NR Description: putative microtubule-associated protein
  misc_feature (47)..(379): NCBI GI NO: 15240262 NR Description: expressed protein [Arabidopsis thaliana]
  misc_feature (41)..(307): NCBI GI NO: 38344911 NR Description: OSJNBb0079B02.14
  misc_feature (47)..(297): NCBI GI NO: 32815913 NR Description: At3g47690 [Arabidopsis thaliana]
  misc_feature (47)..(342): NCBI GI NO: 15241860 NR Description: microtubule-associated protein EB1-related protein
  misc_feature (47)..(304): NCBI GI NO: 29124955 NR Description: microtubule-associated protein EB1
  misc_feature (47)..(217): NCBI GI NO: 26450360 NR Description: putative microtubule-associated protein EB1
  misc_feature (59)..(232): NCBI GI NO: 17976864 NR Description: microtubule-associated protein EB1
  misc_feature (236)..(369): NCBI GI NO: 17976864 NR Description: microtubule-associated protein EB1
  misc_feature (58)..(306): NCBI GI NO: 12751131 NR Description: EBF3-S [Homo sapiens]
IRKPSSRNPSPAPPLHPPPPLVPRESRSGSRLRRRRSKTRAAEMSVSNIGMMDGAYFVGRNEILAWINTTLQLGLAKVEEAASGAVASQLMDAAHPGAVPMHKVNFDAKNEYDMIQNYKVLQDVFNKLKITKHIEVNKLIKGRPLDNLEFMQWMKRYCDSVNGGFMTSYNASERRESSKGGKDTNRRTSGTSQAPAKSASATHKAQPPSHAAKRANGHASNAPQRCAKPPPAYDAQMTELKLLVDSAEKERDFYFSKLRDVEILCQSPEVEHLPIAKAIQKILYASEDDPSTVAEAQAEMVAQQNQMQQQPMLSPILEASEAPSITPKDSSEESLRQEAAAAHKRKSISDLEEFEMGSSSRMRLSDVSDVQLCGSPLMSFT

SEQ ID NO: 19082 - protein, 338 aa, Triticum aestivum
  peptide (1)..(338): Ceres Seq. ID no. 13596494
  misc_feature (16)..(116): Pfam Name: CH Pfam Description: Calponin homology
  misc_feature (1)..(338): NCBI GI NO: 37535740 NR Description: putative microtubule-associated protein
  misc_feature (4)..(336): NCBI GI NO: 15240262 NR Description: expressed protein [Arabidopsis thaliana]
  misc_feature (1)..(264): NCBI GI NO: 38344911 NR Description: OSJNBb0079B02.14
  misc_feature (4)..(254): NCBI GI NO: 32815913 NR Description: At3g47690 [Arabidopsis thaliana]
  misc_feature (4)..(299): NCBI GI NO: 15241860 NR Description: microtubule-associated protein EB1-related protein
  misc_feature (4)..(261): NCBI GI NO: 29124955 NR Description: microtubule-associated protein EB1
  misc_feature (4)..(174): NCBI GI NO: 26450360 NR Description: putative microtubule-associated protein EB1
  misc_feature (16)..(189): NCBI GI NO: 17976864 NR Description: microtubule-associated protein EB1
  misc_feature (193)..(326): NCBI GI NO: 17976864 NR Description: microtubule-associated protein EB1
  misc_feature (15)..(263): NCBI GI NO: 12751131 NR Description: EBF3-S [Homo sapiens]
MSVSNIGMMDGAYFVGRNEILAWINTTLQLGLAKVEEAASGAVASQLMDAAHPGAVPMHKVNFDAKNEYDMIQNYKVLQDVFNKLKITKHIEVNKLIKGRPLDNLEFMQWMKRYCDSVNGGFMTSYNASERRESSKGGKDTNRRTSGTSQAPAKSASATHKAQPPSHAAKRANGHASNAPQRCAKPPPAYDAQMTELKLLVDSAEKERDFYFSKLRDVEILCQSPEVEHLPIAKAIQKILYASEDDPSTVAEAQAEMVAQQNQMQQQPMLSPILEASEAPSITPKDSSEESLRQEAAAAHKRKSISDLEEFEMGSSSRMRLSDVSDVQLCGSPLMSFT

SEQ ID NO: 19083 - protein, 331 aa, Triticum aestivum
  peptide (1)..(331): Ceres Seq. ID no. 13596495
  misc_feature (9)..(109): Pfam Name: CH Pfam Description: Calponin homology
  misc_feature (1)..(331): NCBI GI NO: 37535740 NR Description: putative microtubule-associated protein
  misc_feature (1)..(329): NCBI GI NO: 15240262 NR Description: expressed protein [Arabidopsis thaliana]
  misc_feature (1)..(257): NCBI GI NO: 38344911 NR Description: OSJNBb0079B02.14
  misc_feature (1)..(247): NCBI GI NO: 32815913 NR Description: At3g47690 [Arabidopsis thaliana]
  misc_feature (1)..(292): NCBI GI NO: 15241860 NR Description: microtubule-associated protein EB1-related protein
  misc_feature (1)..(254): NCBI GI NO: 29124955 NR Description: microtubule-associated protein EB1
  misc_feature (1)..(167): NCBI GI NO: 26450360 NR Description: putative microtubule-associated protein EB1
  misc_feature (9)..(182): NCBI GI NO: 17976864 NR Description: microtubule-associated protein EB1
  misc_feature (186)..(319): NCBI GI NO: 17976864 NR Description: microtubule-associated protein EB1
  misc_feature (8)..(256): NCBI GI NO: 12751131 NR Description: EBF3-S [Homo sapiens]
MMDGAYFVGRNEILAWINTTLQLGLAKVEEAASGAVASQLMDAAHPGAVPMHKVNFDAKNEYDMIQNYKVLQDVFNKLKITKHIEVNKLIKGRPLDNLEFMQWMKRYCDSVNGGFMTSYNASERRESSKGGKDTNRRTSGTSQAPAKSASATHKAQPPSHAAKRANGHASNAPQRCAKPPPAYDAQMTELKLLVDSAEKERDFYFSKLRDVEILCQSPEVEHLPIAKAIQKILYASEDDPSTVAEAQAEMVAQQNQMQQQPMLSPILEASEAPSITPKDSSEESLRQEAAAAHKRKSISDLEEFEMGSSSRMRLSDVSDVQLCGSPLMSFT

SEQ ID NO: 19084 - DNA, 1751 bp, Triticum aestivum
  misc_feature (1)..(1751): Ceres Seq. ID no. 15224709
atcaccttgactgagatcgggacgaggcaatggcgtctccgagattcaagcccgtggaggagtgcagctccgaggggaggtcggggcagacggtggccgcagacttcgacggcacgctgctccgctcctccaacgccttcccctactacctcctggtggcgctggaggccggcagcgtcctccgcgccgtggcgctgctcctgtcggtgcccttcgtgtacgtgacctacatcttcttctccgagtcgctggccatcagcaccctggtgtacatctccgtggccgggctcaaggtgcggagcatcgagatggcggcgcggtcggtgctgcccaagttctacgcgcaggacgtgcacccggagagctggcgggtgttccggtccttcggcaagcggtacatcatcacggccagccccagggtcatggtggagcccttcgccagggagttcctcggcgccgaccgggtggtgggcacggagctggaggtgggcaagtccggcaaggccacggggttcatggtgaagcccggggtgctcgtcggggagcacaagaagcaggccgtggtgaaggagctgggcgacgcggtgcccgacgtcggcatgggcaacagggccaccgatttcaacttcatgtccatatgcaaggaagcctaccttgtcacgtcgaggaagtacagcccggtgcccaagaaccagctgctgacgcccctcatcctccacgacggccgcctcgtgcagcgcccgacgccgctggtggcgctcgtcaccttcctctggatgccgttcggcttcgccctcgccctcctccgcgtgtacatcaacctgcccctcccggagcgcatcgtcttctacatctaccacatgatgggcatccggctcatcgtgaaggggaccccgccgccgccgcccaagaaggggagcccgggcgtgctcttcgtgtgcaaccaccgcaccgtgctggaccccatcgaggtcgccgtcgcgctcggccgcaaggtgagctgcgtgacctacagcatctccaagttctcggagctcatctcgccgatcaaggcggtggcgctgacgcgggagcgcgacaaggacgccgagaacatccggcggctgctggaggagggcgacctggtgatctgccccgagggcaccacctgccgggagccctacctgctgcgcttcagcgcgctcttcgccgagctcacggaccgcatcgtgccggtggcgatcaacaccagggagcacatgttccacggctccaccgtgcgcgggttcaagctcatggacccctacttcttcttcatgaacccgcggccggtctacgaggtcaccttcctcaacatgctgcccaaggagctcacctgcggcgggggcaagtcgcccatcgaggtcgccaactacatccagaagacgctcagcgaccagctcggcttcgagtgcaccaccatcacccgcaaggagaagtacggcatactggccggcaccgacgggcgcgtcccgtccaagaacaaggacaaggagaagaactagcggatctctcgggctggactgcctcgcgtcgcgccggctacagtggttgatcgtggttgttgttgtttacagtttactatgattaattgtttgttatttgtcagatcactcaccgtttccaggaaactaaaaggaccgtgtcgtcgtgtattagcttgaggtcacaattgtcttgtaccaataattgtttcttcgccaaaaggatgagtaattatatggacgatttcc

SEQ ID NO: 19085 - protein, 497 aa, Triticum aestivum
  peptide (1)..(497): Ceres Seq. ID no. 15224710
  misc_feature (22)..(161): Pfam Name: Pfam Description:  haloacid dehalogenase-like hydrolase
  misc_feature (5)..(494): NCBI GI NO: 15224445 NR Description: phospholipid/glycerol acyltransferase family
  misc_feature (1)..(494): NCBI GI NO: 15223437 NR Description: expressed protein [Arabidopsis thaliana]
  misc_feature (1)..(494): NCBI GI NO: 17064780 NR Description: Unknown protein [Arabidopsis thaliana]
  misc_feature (1)..(496): NCBI GI NO: 38000002 NR Description: unknown protein
  misc_feature (43)..(496): NCBI GI NO: 29788867 NR Description: hypothetical protein
  misc_feature (6)..(487): NCBI GI NO: 37534314 NR Description: hypothetical protein
  misc_feature (16)..(487): NCBI GI NO: 15229747 NR Description: expressed protein [Arabidopsis thaliana]
  misc_feature (14)..(487): NCBI GI NO: 15239924 NR Description: phospholipid/glycerol acyltransferase family
  misc_feature (12)..(487): NCBI GI NO: 18390661 NR Description: phospholipid/glycerol acyltransferase family
  misc_feature (12)..(487): NCBI GI NO: 21618047 NR Description: unknown [Arabidopsis thaliana]
MASPRFKPVEECSSEGRSGQTVAADFDGTLLRSSNAFPYYLLVALEAGSVLRAVALLLSVPFVYVTYIFFSESLAISTLVYISVAGLKVRSIEMAARSVLPKFYAQDVHPESWRVFRSFGKRYIITASPRVMVEPFAREFLGADRVVGTELEVGKSGKATGFMVKPGVLVGEHKKQAVVKELGDAVPDVGMGNRATDFNFMSICKEAYLVTSRKYSPVPKNQLLTPLILHDGRLVQRPTPLVALVTFLWMPFGFALALLRVYINLPLPERIVFYIYHMMGIRLIVKGTPPPPPKKGSPGVLFVCNHRTVLDPIEVAVALGRKVSCVTYSISKFSELISPIKAVALTRERDKDAENIRRLLEEGDLVICPEGTTCREPYLLRFSALFAELTDRIVPVAINTREHMFHGSTVRGFKLMDPYFFFMNPRPVYEVTFLNMLPKELTCGGGKSPIEVANYIQKTLSDQLGFECTTITRKEKYGILAGTDGRVPSKNKDKEKN

SEQ ID NO: 19086 - protein, 404 aa, Triticum aestivum
  peptide (1)..(404): Ceres Seq. ID no. 15224711
  misc_feature (1)..(68): Pfam Name: Pfam Description:  haloacid dehalogenase-like hydrolase
  misc_feature (1)..(401): NCBI GI NO: 15224445 NR Description: phospholipid/glycerol acyltransferase family
  misc_feature (1)..(401): NCBI GI NO: 15223437 NR Description: expressed protein [Arabidopsis thaliana]
  misc_feature (1)..(401): NCBI GI NO: 17064780 NR Description: Unknown protein [Arabidopsis thaliana]
  misc_feature (1)..(403): NCBI GI NO: 38000002 NR Description: unknown protein
  misc_feature (1)..(403): NCBI GI NO: 29788867 NR Description: hypothetical protein
  misc_feature (1)..(394): NCBI GI NO: 37534314 NR Description: hypothetical protein
  misc_feature (1)..(394): NCBI GI NO: 15229747 NR Description: expressed protein [Arabidopsis thaliana]
  misc_feature (1)..(394): NCBI GI NO: 15239924 NR Description: phospholipid/glycerol acyltransferase family
  misc_feature (1)..(394): NCBI GI NO: 18390661 NR Description: phospholipid/glycerol acyltransferase family
  misc_feature (1)..(394): NCBI GI NO: 21618047 NR Description: unknown [Arabidopsis thaliana]
MAARSVLPKFYAQDVHPESWRVFRSFGKRYIITASPRVMVEPFAREFLGADRVVGTELEVGKSGKATGFMVKPGVLVGEHKKQAVVKELGDAVPDVGMGNRATDFNFMSICKEAYLVTSRKYSPVPKNQLLTPLILHDGRLVQRPTPLVALVTFLWMPFGFALALLRVYINLPLPERIVFYIYHMMGIRLIVKGTPPPPPKKGSPGVLFVCNHRTVLDPIEVAVALGRKVSCVTYSISKFSELISPIKAVALTRERDKDAENIRRLLEEGDLVICPEGTTCREPYLLRFSALFAELTDRIVPVAINTREHMFHGSTVRGFKLMDPYFFFMNPRPVYEVTFLNMLPKELTCGGGKSPIEVANYIQKTLSDQLGFECTTITRKEKYGILAGTDGRVPSKNKDKEKN

SEQ ID NO: 19087 - protein, 366 aa, Triticum aestivum
  peptide (1)..(366): Ceres Seq. ID no. 15224712
  misc_feature (1)..(363): NCBI GI NO: 15224445 NR Description: phospholipid/glycerol acyltransferase family
  misc_feature (1)..(363): NCBI GI NO: 15223437 NR Description: expressed protein [Arabidopsis thaliana]
  misc_feature (1)..(363): NCBI GI NO: 17064780 NR Description: Unknown protein [Arabidopsis thaliana]
  misc_feature (1)..(365): NCBI GI NO: 38000002 NR Description: unknown protein
  misc_feature (1)..(365): NCBI GI NO: 29788867 NR Description: hypothetical protein
  misc_feature (1)..(356): NCBI GI NO: 37534314 NR Description: hypothetical protein
  misc_feature (1)..(356): NCBI GI NO: 15229747 NR Description: expressed protein [Arabidopsis thaliana]
  misc_feature (1)..(356): NCBI GI NO: 15239924 NR Description: phospholipid/glycerol acyltransferase family
  misc_feature (1)..(356): NCBI GI NO: 18390661 NR Description: phospholipid/glycerol acyltransferase family
  misc_feature (1)..(356): NCBI GI NO: 21618047 NR Description: unknown [Arabidopsis thaliana]
MVEPFAREFLGADRVVGTELEVGKSGKATGFMVKPGVLVGEHKKQAVVKELGDAVPDVGMGNRATDFNFMSICKEAYLVTSRKYSPVPKNQLLTPLILHDGRLVQRPTPLVALVTFLWMPFGFALALLRVYINLPLPERIVFYIYHMMGIRLIVKGTPPPPPKKGSPGVLFVCNHRTVLDPIEVAVALGRKVSCVTYSISKFSELISPIKAVALTRERDKDAENIRRLLEEGDLVICPEGTTCREPYLLRFSALFAELTDRIVPVAINTREHMFHGSTVRGFKLMDPYFFFMNPRPVYEVTFLNMLPKELTCGGGKSPIEVANYIQKTLSDQLGFECTTITRKEKYGILAGTDGRVPSKNKDKEKN

SEQ ID NO: 19088 - DNA, 1767 bp, Triticum aestivum
  misc_feature (1)..(1767): Ceres Seq. ID no. 13662391
tttttagccgatcagtatcctccacaagaaaaaaaatactataagcgcaatagaaaaatagtgatccctcaataagaaaatcaagaaaagatttccttttcttcttgggctcccttccaccaccaacctcttctccggccggccgagttgtcccgctccggctgcgtcttctccggcgagaggtgtagctaggttgcctgctcttcctttgagcggtctcctcccggcagggctgaggagatctctcgggacctcgggactggggcgtgtatgatggggatttcgcttatgccgatgaagacgcccacgcggcttctgtggagcaccagcttcttccgccacaagctcgccgccatgatcgcctcctcgtcctgcttcttataagagcccctccgccgcgcagcagctgtatatatacgtctttttcatttgattccgccccccgttcgatcgacaaccaaccaaggcaacttcttgaagctttctctgcgatggagcccggccggctcatcttcaacacgtcgggctccggcaacggacagatgctcttcatggactgcggcgccggcggcatcgccggcgcggccggcatgttccatcgaggggtgagaccggtcctcggcggcatggaagaagggcgcggcgtgaagcggcccttcttcacctcgccggatgacatgctcgaggaggagtactacgacgagcagctcccggagaagaagcggcgcctcaccccggagcaggtccacctgctggagaggagcttcgaggaggagaataagctggagccggagaggaagacggagctggcccgcaagctcgggctgcagccacgccaggtggccgtctggttccagaaccgccgcgcccggtggaagacaaagacgctggagcgcgacttcgaccgcctcaaggcgtccttcgacgccctccgggccgaccacgacgccctcctccaggacaaccaccggctccggtcacaggtggtaacgttgaccgagaagatgcaagataaggaggcgccggaaggcagcttcggtgcagccgtcgacgccttggagccggagcaggcggcggcggaggcgaaggcttccttggccaacgccgaggaacatgccgcggcagcggaggcgttcgaggtggtgcagcagcagctgcatgtgaaggacgaggagaggctgagcccggggagcggcgggagcgcggtgctggacgcgagggacgcgctgctcgggagcggatgcggtctcgccggcgtggtggacagcagcgtggactcgtactgcttcccggggggcgccggcggcgacgagtaccacgagtgcgtgatgggccccgtggcgggcggcatccagtcggaggaggacgacggcgcgggcagcgacgagggctgcagctactaccccgacgacgccgccgtcttcttcgccgccgcgcaagggcacggccaccatcacacggacgacgacgatcagcaggacgacggccagatcagctactggatgtggaactaggctcgcgcacgcatcaagaagcgtgcgtgcgtgcgccgtggaatcgatcaatttcggagtatatcagtaaaagaaatcgtggcgttttgttttctctccttgtatgcttcccgctgtaatcttgggtcactacgatcgaccaagttgtatgcatatgcattgtactacgagttagggtaatacatcggtggtaaaatctgtcgtgatgtacgggaaataagtgaacggagtcagagcctcattcttatggcac

SEQ ID NO: 19089 - protein, 340 aa, Triticum aestivum
  peptide (1)..(340): Ceres Seq. ID no. 13662392
  misc_feature (76)..(130): Pfam Name: Pfam Description:  Homeobox domain
  misc_feature (1)..(340): NCBI GI NO: 5006855 NR Description: homeodomain leucine zipper protein [Oryza sativa]
  misc_feature (1)..(340): NCBI GI NO: 37573050 NR Description: homeodomain leucine zipper protein
  misc_feature (1)..(176): NCBI GI NO: 15232122 NR Description: homeobox-leucine zipper protein HAT5
  misc_feature (1)..(197): NCBI GI NO: 18034441 NR Description: homeodomain leucine zipper protein CPHB-5
  misc_feature (71)..(195): NCBI GI NO: 15148920 NR Description: homeodomain leucine zipper protein HDZ3
  misc_feature (72)..(171): NCBI GI NO: 166754 NR Description: homeobox protein
  misc_feature (56)..(201): NCBI GI NO: 7446244 NR Description: homeotic protein - carrot
  misc_feature (49)..(189): NCBI GI NO: 15148918 NR Description: homeodomain leucine zipper protein HDZ2
  misc_feature (54)..(181): NCBI GI NO: 6018089 NR Description: homeodomain-leucine zipper protein 57
  misc_feature (75)..(309): NCBI GI NO: 15148916 NR Description: homeodomain leucine zipper protein HDZ1
MEPGRLIFNTSGSGNGQMLFMDCGAGGIAGAAGMFHRGVRPVLGGMEEGRGVKRPFFTSPDDMLEEEYYDEQLPEKKRRLTPEQVHLLERSFEEENKLEPERKTELARKLGLQPRQVAVWFQNRRARWKTKTLERDFDRLKASFDALRADHDALLQDNHRLRSQVVTLTEKMQDKEAPEGSFGAAVDALEPEQAAAEAKASLANAEEHAAAAEAFEVVQQQLHVKDEERLSPGSGGSAVLDARDALLGSGCGLAGVVDSSVDSYCFPGGAGGDEYHECVMGPVAGGIQSEEDDGAGSDEGCSYYPDDAAVFFAAAQGHGHHHTDDDDQQDDGQISYWMWN

SEQ ID NO: 19090 - protein, 323 aa, Triticum aestivum
  peptide (1)..(323): Ceres Seq. ID no. 13662393
  misc_feature (59)..(113): Pfam Name: Pfam Description:  Homeobox domain
  misc_feature (1)..(323): NCBI GI NO: 5006855 NR Description: homeodomain leucine zipper protein [Oryza sativa]
  misc_feature (1)..(323): NCBI GI NO: 37573050 NR Description: homeodomain leucine zipper protein
  misc_feature (1)..(159): NCBI GI NO: 15232122 NR Description: homeobox-leucine zipper protein HAT5
  misc_feature (1)..(180): NCBI GI NO: 18034441 NR Description: homeodomain leucine zipper protein CPHB-5
  misc_feature (54)..(178): NCBI GI NO: 15148920 NR Description: homeodomain leucine zipper protein HDZ3
  misc_feature (55)..(154): NCBI GI NO: 166754 NR Description: homeobox protein
  misc_feature (39)..(184): NCBI GI NO: 7446244 NR Description: homeotic protein - carrot
  misc_feature (32)..(172): NCBI GI NO: 15148918 NR Description: homeodomain leucine zipper protein HDZ2
  misc_feature (37)..(164): NCBI GI NO: 6018089 NR Description: homeodomain-leucine zipper protein 57
  misc_feature (58)..(292): NCBI GI NO: 15148916 NR Description: homeodomain leucine zipper protein HDZ1
MLFMDCGAGGIAGAAGMFHRGVRPVLGGMEEGRGVKRPFFTSPDDMLEEEYYDEQLPEKKRRLTPEQVHLLERSFEEENKLEPERKTELARKLGLQPRQVAVWFQNRRARWKTKTLERDFDRLKASFDALRADHDALLQDNHRLRSQVVTLTEKMQDKEAPEGSFGAAVDALEPEQAAAEAKASLANAEEHAAAAEAFEVVQQQLHVKDEERLSPGSGGSAVLDARDALLGSGCGLAGVVDSSVDSYCFPGGAGGDEYHECVMGPVAGGIQSEEDDGAGSDEGCSYYPDDAAVFFAAAQGHGHHHTDDDDQQDDGQISYWMWN

SEQ ID NO: 19091 - protein, 320 aa, Triticum aestivum
  peptide (1)..(320): Ceres Seq. ID no. 13662394
  misc_feature (56)..(110): Pfam Name: Pfam Description:  Homeobox domain
  misc_feature (1)..(320): NCBI GI NO: 5006855 NR Description: homeodomain leucine zipper protein [Oryza sativa]
  misc_feature (1)..(320): NCBI GI NO: 37573050 NR Description: homeodomain leucine zipper protein
  misc_feature (1)..(156): NCBI GI NO: 15232122 NR Description: homeobox-leucine zipper protein HAT5
  misc_feature (1)..(177): NCBI GI NO: 18034441 NR Description: homeodomain leucine zipper protein CPHB-5
  misc_feature (51)..(175): NCBI GI NO: 15148920 NR Description: homeodomain leucine zipper protein HDZ3
  misc_feature (52)..(151): NCBI GI NO: 166754 NR Description: homeobox protein
  misc_feature (36)..(181): NCBI GI NO: 7446244 NR Description: homeotic protein - carrot
  misc_feature (29)..(169): NCBI GI NO: 15148918 NR Description: homeodomain leucine zipper protein HDZ2
  misc_feature (34)..(161): NCBI GI NO: 6018089 NR Description: homeodomain-leucine zipper protein 57
  misc_feature (55)..(289): NCBI GI NO: 15148916 NR Description: homeodomain leucine zipper protein HDZ1
MDCGAGGIAGAAGMFHRGVRPVLGGMEEGRGVKRPFFTSPDDMLEEEYYDEQLPEKKRRLTPEQVHLLERSFEEENKLEPERKTELARKLGLQPRQVAVWFQNRRARWKTKTLERDFDRLKASFDALRADHDALLQDNHRLRSQVVTLTEKMQDKEAPEGSFGAAVDALEPEQAAAEAKASLANAEEHAAAAEAFEVVQQQLHVKDEERLSPGSGGSAVLDARDALLGSGCGLAGVVDSSVDSYCFPGGAGGDEYHECVMGPVAGGIQSEEDDGAGSDEGCSYYPDDAAVFFAAAQGHGHHHTDDDDQQDDGQISYWMWN

SEQ ID NO: 19092 - DNA, 1404 bp, Triticum aestivum
  misc_feature (1)..(1404): Ceres Seq. ID no. 12614942
atcatcagtctccactctccacccatctcagcaaaaaagaagctagcacagctccacacaccatggcagccatggccaccaccgcctccagcctcctcaagacctccttctccggcgtccgcctcccggcggcggcccgcaccccgtcctgcgtcgccaccccgcgcgccggcgccatctgcaactccatctcctcctccaccccaccctacgacctcaacgccttcaagttcagccccatcaaggagtccatcgtctcccgcgagatgacccgccgctacatgaccgacatgatcacctacgccgacaccgacgtcgtcatcgtcggcgccggatccgcggggctgtcctgcgcgtacgagctctccaaggacccctccatcagcatcgccatcatcgagcagtccgtgtcccccggcggcggcgcgtggctcggcggccagctcttctccgccatggtcgtgcgcaagccggcgcacctcttcctcgacgagctcaacatcgagtacgacgagcaggaggactacgtcgtcatcaagcacgccgcgctcttcacctccaccgtcatgagccgcctcctcgcgcgccccaacgtcaagctcttcaacgccgtcgccgtggaggacctcatcgtcaaggaggaccgcgtcgccggcgtcgtcaccaactgggcgctcgtctccatgaaccacgacacacagtcctgcatggaccccaacgtcatggaggccaaggtcgtggtgagctcctgcggccacgacgggcccttcggcgccaccggggtcaagcggctccaggacatcggcatgatccaggcggtgcccgggatgaaggcgctcgacatgaacacggccgaggatgccatcgtgcgcctcacccgcgaggttgtccccggcatgattgtcaccggcatggaggtcgccgagatcgacggcgccccgagaatgggcccgaccttcggcgccatgatgatctccggccagaaggcggcgcacctggcgctcaaggccctcggccggccgaacggcatcgacgggacgctcaagaacgtgaccccggcgctgcacccggagatgatcctggcggcgaccaacaacggcgacatcgtggacgcctaagcaaagcaatgagccacggacaccaaggcgtacgtacgctggtgtttgggggcgcaagatcaataagatggttcggtgaaacggaggatgcttagggacgagggcttgtctttgtgatttgtcagactcgtgtttaattccgatgtttgtctttagttttcttgtgttagcgtattttgttcatgccacctgcccgccatgtgctctgccctgcctctgcctcgcggcagttccatggatgatgaatccttctggaacaagaggagggaataaaaaggttgagtcc

SEQ ID NO: 19093 - protein, 371 aa, Triticum aestivum
  peptide (1)..(371): Ceres Seq. ID no. 12614943
  misc_feature (76)..(319): Pfam Name: Pfam Description:  Thi4 family
  misc_feature (24)..(371): NCBI GI NO: 27261025 NR Description: putative thiamine biosynthetic enzyme
  misc_feature (24)..(371): NCBI GI NO: 2501190 NR Description: Thiazole biosynthetic enzyme 1-2
  misc_feature (24)..(371): NCBI GI NO: 2501189 NR Description: Thiazole biosynthetic enzyme 1-1
  misc_feature (14)..(371): NCBI GI NO: 6094476 NR Description: Thiazole biosynthetic enzyme
  misc_feature (23)..(371): NCBI GI NO: 6552395 NR Description: thiamin biosynthetic enzyme [Glycine max]
  misc_feature (23)..(371): NCBI GI NO: 6552391 NR Description: thiamin biosynthetic enzyme [Glycine max]
  misc_feature (21)..(371): NCBI GI NO: 6552397 NR Description: thiamin biosynthetic enzyme [Glycine max]
  misc_feature (21)..(371): NCBI GI NO: 6552393 NR Description: thiamin biosynthetic enzyme [Glycine max]
  misc_feature (15)..(371): NCBI GI NO: 2501187 NR Description: Thiazole biosynthetic enzyme
  misc_feature (20)..(371): NCBI GI NO: 15239735 NR Description: thiazole biosynthetic enzyme precursor
HQSPLSTHLSKKEASTAPHTMAAMATTASSLLKTSFSGVRLPAAARTPSCVATPRAGAICNSISSSTPPYDLNAFKFSPIKESIVSREMTRRYMTDMITYADTDVVIVGAGSAGLSCAYELSKDPSISIAIIEQSVSPGGGAWLGGQLFSAMVVRKPAHLFLDELNIEYDEQEDYVVIKHAALFTSTVMSRLLARPNVKLFNAVAVEDLIVKEDRVAGVVTNWALVSMNHDTQSCMDPNVMEAKVVVSSCGHDGPFGATGVKRLQDIGMIQAVPGMKALDMNTAEDAIVRLTREVVPGMIVTGMEVAEIDGAPRMGPTFGAMMISGQKAAHLALKALGRPNGIDGTLKNVTPALHPEMILAATNNGDIVDA

SEQ ID NO: 19094 - protein, 351 aa, Triticum aestivum
  peptide (1)..(351): Ceres Seq. ID no. 12614944
  misc_feature (56)..(299): Pfam Name: Pfam Description:  Thi4 family
  misc_feature (4)..(351): NCBI GI NO: 27261025 NR Description: putative thiamine biosynthetic enzyme
  misc_feature (4)..(351): NCBI GI NO: 2501190 NR Description: Thiazole biosynthetic enzyme 1-2
  misc_feature (4)..(351): NCBI GI NO: 2501189 NR Description: Thiazole biosynthetic enzyme 1-1
  misc_feature (1)..(351): NCBI GI NO: 6094476 NR Description: Thiazole biosynthetic enzyme
  misc_feature (3)..(351): NCBI GI NO: 6552395 NR Description: thiamin biosynthetic enzyme [Glycine max]
  misc_feature (3)..(351): NCBI GI NO: 6552391 NR Description: thiamin biosynthetic enzyme [Glycine max]
  misc_feature (1)..(351): NCBI GI NO: 6552397 NR Description: thiamin biosynthetic enzyme [Glycine max]
  misc_feature (1)..(351): NCBI GI NO: 6552393 NR Description: thiamin biosynthetic enzyme [Glycine max]
  misc_feature (1)..(351): NCBI GI NO: 2501187 NR Description: Thiazole biosynthetic enzyme
  misc_feature (1)..(351): NCBI GI NO: 15239735 NR Description: thiazole biosynthetic enzyme precursor
MAAMATTASSLLKTSFSGVRLPAAARTPSCVATPRAGAICNSISSSTPPYDLNAFKFSPIKESIVSREMTRRYMTDMITYADTDVVIVGAGSAGLSCAYELSKDPSISIAIIEQSVSPGGGAWLGGQLFSAMVVRKPAHLFLDELNIEYDEQEDYVVIKHAALFTSTVMSRLLARPNVKLFNAVAVEDLIVKEDRVAGVVTNWALVSMNHDTQSCMDPNVMEAKVVVSSCGHDGPFGATGVKRLQDIGMIQAVPGMKALDMNTAEDAIVRLTREVVPGMIVTGMEVAEIDGAPRMGPTFGAMMISGQKAAHLALKALGRPNGIDGTLKNVTPALHPEMILAATNNGDIVDA

SEQ ID NO: 19095 - protein, 348 aa, Triticum aestivum
  peptide (1)..(348): Ceres Seq. ID no. 12614945
  misc_feature (53)..(296): Pfam Name: Pfam Description:  Thi4 family
  misc_feature (1)..(348): NCBI GI NO: 27261025 NR Description: putative thiamine biosynthetic enzyme
  misc_feature (1)..(348): NCBI GI NO: 2501190 NR Description: Thiazole biosynthetic enzyme 1-2
  misc_feature (1)..(348): NCBI GI NO: 2501189 NR Description: Thiazole biosynthetic enzyme 1-1
  misc_feature (1)..(348): NCBI GI NO: 6094476 NR Description: Thiazole biosynthetic enzyme
  misc_feature (1)..(348): NCBI GI NO: 6552395 NR Description: thiamin biosynthetic enzyme [Glycine max]
  misc_feature (1)..(348): NCBI GI NO: 6552391 NR Description: thiamin biosynthetic enzyme [Glycine max]
  misc_feature (1)..(348): NCBI GI NO: 6552397 NR Description: thiamin biosynthetic enzyme [Glycine max]
  misc_feature (1)..(348): NCBI GI NO: 6552393 NR Description: thiamin biosynthetic enzyme [Glycine max]
  misc_feature (1)..(348): NCBI GI NO: 2501187 NR Description: Thiazole biosynthetic enzyme
  misc_feature (1)..(348): NCBI GI NO: 15239735 NR Description: thiazole biosynthetic enzyme precursor
MATTASSLLKTSFSGVRLPAAARTPSCVATPRAGAICNSISSSTPPYDLNAFKFSPIKESIVSREMTRRYMTDMITYADTDVVIVGAGSAGLSCAYELSKDPSISIAIIEQSVSPGGGAWLGGQLFSAMVVRKPAHLFLDELNIEYDEQEDYVVIKHAALFTSTVMSRLLARPNVKLFNAVAVEDLIVKEDRVAGVVTNWALVSMNHDTQSCMDPNVMEAKVVVSSCGHDGPFGATGVKRLQDIGMIQAVPGMKALDMNTAEDAIVRLTREVVPGMIVTGMEVAEIDGAPRMGPTFGAMMISGQKAAHLALKALGRPNGIDGTLKNVTPALHPEMILAATNNGDIVDA

SEQ ID NO: 19096 - DNA, 1389 bp, Triticum aestivum
  misc_feature (1)..(1389): Ceres Seq. ID no. 13596496
atcccacacgccccacccctattccgccgcctcccttctctcttctcctcactccctctcgccgcagagaagatggcgtccgacggcagcggcgttgtcacggtgtacggcagcggcaacaacggcgccggtacgcagctggagcccaagtcgtccccgttctctgtcaaggtgggcctggcccagatgctccgcggcggcgtcatcatggacgtcgtcaacgccgagcaggcgcgcatcgccgaggaggccggcgcctgcgccgtcatggcgctcgagcgcgtccccgccgacatccgcgcccagggcggcgtcgcccgcatgtccgacccgggcctcatccgcgaaatcaagcgcgccgtcaccatccctgtcatggccaaggcccgcatcgggcacttcgtcgaggcccagatcctcgagtccatcggcgtcgactacgtggacgagagcgaggtcctcacgctcgccgacgacgcccaccacatcaacaagcacaacttccgcgtccccttcgtctgcggctgccgcaacctgggcgaggccctccgccgcatccgcgagggcgccgccatgatccgcaccaagggcgaggccggcaccggcaatgtcatcgaggccgtccgccacgtccgctccgtcatgggcgacgtgcgtgccctccgcagcatggacgacgacgaggtattcacctatgccaagagcatcgccgcaccgtacgacctcgtcatgcagaccaagcagctcggccgcctgcccgtcgtccagttcgccgccggcggggtcgccacgccggccgatgcggccctcatgatgcagctcggctgcgacggtgtcttcgtcggctccggtgtcttcaagagcggcgaccccgcgcgccgcgcgcgcgccatcgtgcaggccgtcacccactacagcgaccctaatgtgctcgccgaggtgagctgcgacctcggtgaggccatggtgggcatcaacctctccgatcccaaggtcgagcgctttgcggcgcgctccgagtgatctttgttggccaccgtcaataccagctcccaaaataatactccatggatcaatgataaggacaaaaaagaagtacttagaaacgattcctagttattatcatgtgatttcttcatgatgatcattctagctccgataacaattcaagcggtagcaagcatgcacctccagtcagtcagtcggtcagtcgctcgctttatatatgtacacacatgttgtcgtcttccatttcatttctgttgttgttaacacaagttaagtatccatccatccttttcctccgtgttctcttgctactatgcattttgctgtttcagattcgttgttgtttctctgatcgattttgctactgttgttgccaattgc

SEQ ID NO: 19097 - protein, 340 aa, Triticum aestivum
  peptide (1)..(340): Ceres Seq. ID no. 15221893
  misc_feature (53)..(259): Pfam Name: Pfam Description:  SOR/SNZ family
  misc_feature (25)..(340): NCBI GI NO: 34394152 NR Description: putative ethylene-inducible protein
  misc_feature (25)..(340): NCBI GI NO: 10719739 NR Description: putative pyridoxine biosynthetic enzyme
  misc_feature (28)..(340): NCBI GI NO: 15240972 NR Description: pyridoxine biosynthesis protein - like
  misc_feature (25)..(340): NCBI GI NO: 37530308 NR Description: putative pyridoxine/pyridoxal 5-phosphatebiosynthesis protein
  misc_feature (29)..(340): NCBI GI NO: 2501578 NR Description: ETHYLENE-INDUCIBLE PROTEIN HEVER
  misc_feature (28)..(340): NCBI GI NO: 21617922 NR Description: pyridoxine biosynthesis protein-like
  misc_feature (25)..(340): NCBI GI NO: 13310484 NR Description: Sor-like protein [Ginkgo biloba]
  misc_feature (29)..(340): NCBI GI NO: 15224470 NR Description: SOR1 from the fungus Cercospora nicotianae -related
  misc_feature (50)..(338): NCBI GI NO: 22970419 NR Description: hypothetical protein [Chloroflexus aurantiacus]
  misc_feature (48)..(338): NCBI GI NO: 19115894 NR Description: putative stress-induced protein
IPHAPPLFRRLPSLFSSLPLAAEKMASDGSGVVTVYGSGNNGAGTQLEPKSSPFSVKVGLAQMLRGGVIMDVVNAEQARIAEEAGACAVMALERVPADIRAQGGVARMSDPGLIREIKRAVTIPVMAKARIGHFVEAQILESIGVDYVDESEVLTLADDAHHINKHNFRVPFVCGCRNLGEALRRIREGAAMIRTKGEAGTGNVIEAVRHVRSVMGDVRALRSMDDDEVFTYAKSIAAPYDLVMQTKQLGRLPVVQFAAGGVATPADAALMMQLGCDGVFVGSGVFKSGDPARRARAIVQAVTHYSDPNVLAEVSCDLGEAMVGINLSDPKVERFAARSE

SEQ ID NO: 19098 - protein, 316 aa, Triticum aestivum
  peptide (1)..(316): Ceres Seq. ID no. 15221894
  misc_feature (29)..(235): Pfam Name: Pfam Description:  SOR/SNZ family
  misc_feature (1)..(316): NCBI GI NO: 34394152 NR Description: putative ethylene-inducible protein
  misc_feature (1)..(316): NCBI GI NO: 10719739 NR Description: putative pyridoxine biosynthetic enzyme
  misc_feature (4)..(316): NCBI GI NO: 15240972 NR Description: pyridoxine biosynthesis protein - like
  misc_feature (1)..(316): NCBI GI NO: 37530308 NR Description: putative pyridoxine/pyridoxal 5-phosphatebiosynthesis protein
  misc_feature (5)..(316): NCBI GI NO: 2501578 NR Description: ETHYLENE-INDUCIBLE PROTEIN HEVER
  misc_feature (4)..(316): NCBI GI NO: 21617922 NR Description: pyridoxine biosynthesis protein-like
  misc_feature (1)..(316): NCBI GI NO: 13310484 NR Description: Sor-like protein [Ginkgo biloba]
  misc_feature (5)..(316): NCBI GI NO: 15224470 NR Description: SOR1 from the fungus Cercospora nicotianae -related
  misc_feature (26)..(314): NCBI GI NO: 22970419 NR Description: hypothetical protein [Chloroflexus aurantiacus]
  misc_feature (24)..(314): NCBI GI NO: 19115894 NR Description: putative stress-induced protein
MASDGSGVVTVYGSGNNGAGTQLEPKSSPFSVKVGLAQMLRGGVIMDVVNAEQARIAEEAGACAVMALERVPADIRAQGGVARMSDPGLIREIKRAVTIPVMAKARIGHFVEAQILESIGVDYVDESEVLTLADDAHHINKHNFRVPFVCGCRNLGEALRRIREGAAMIRTKGEAGTGNVIEAVRHVRSVMGDVRALRSMDDDEVFTYAKSIAAPYDLVMQTKQLGRLPVVQFAAGGVATPADAALMMQLGCDGVFVGSGVFKSGDPARRARAIVQAVTHYSDPNVLAEVSCDLGEAMVGINLSDPKVERFAARSE

SEQ ID NO: 19099 - protein, 307 aa, Triticum aestivum
  peptide (1)..(307): Ceres Seq. ID no. 15221895
  misc_feature (22)..(278): Pfam Name: Pfam Description:  HlyD family secretion protein
PTRPTPIPPPPFSLLLTPSRRREDGVRRQRRCHGVRQRQQRRRYAAGAQVVPVLCQGGPGPDAPRRRHHGRRQRRAGAHRRGGRRLRRHGARARPRRHPRPGRRRPHVRPGPHPRNQARRHHPCHGQGPHRALRRGPDPRVHRRRLRGRERGPHARRRRPPHQQAQLPRPLRLRLPQPGRGPPPHPRGRRHDPHQGRGRHRQCHRGRPPRPLRHGRRACPPQHGRRRGIHLCQEHRRTVRPRHADQAARPPARRPVRRRRGRHAGRCGPHDAARLRRCLRRLRCLQERRPRAPRARHRAGRHPLQRP

SEQ ID NO: 19100 - DNA, 988 bp, Triticum aestivum
  misc_feature (1)..(988): Ceres Seq. ID no. 12584561
aattcccagcacaaccgggagaaacacggaagcggacgccggggcacgctcgccggggaggccaccatggacatggacagcgtggagtgcctctccctcccggacgcctccatggacgtagacgacgtcgacagccaccagcaccagcaccaccaccacagcatcccgatccatcccgtgcacctcgccgctaacgggggcgtcggaggacgcgcgttcgcgaagatgaacgccgggggcgcggccggggccgggggagtgggtgctaccgcgggcgccaccggcgggccaccggcgaccagcgtacacgaattgctcgagtgtcctgtctgcaccaactccatgttcccgcccatccaccaggtcaacttgctattgacaaaatggatgaaagagctagaaaaaatattctatgggaacattgtgaaatatgatactgcaataagcccagaagcaagccaggatgatcttgtaaatgtcatctggaggaatgtgtacgctgacgaaggttcagagcccatggacgcagctgctacccctgctgtccaggcattggcaagatatactcggagggaggcaacttgcctatcattgacagataaagaagctgtgttctctggcaacttcaagtttacggccgttttgccaaccgtcctcagcccagtgaagcgacggcgatgagcgttggcattggtagatcagtattccatatgaaggctgactggtatacatggacaaggaagactggaagtcctatcatcattacaaataataggaaatttccagtatttatttatgcacgaatctcagcatttcgggccattttggtggctaaacctgcctctagctagaaatctcctttatgtttatcctctatgagcattgcattgatggctgcccttcggaatggagcacacggtggaaacgttttcctggttgaatgcgtgtactagtattttaccattttcattgctgatttggacttgag

SEQ ID NO: 19101 - protein, 226 aa, Triticum aestivum
  peptide (1)..(226): Ceres Seq. ID no. 12584562
  misc_feature (122)..(199): Pfam Name: Pfam Description:  Ubiquinol-cytochrome C chaperone
  misc_feature (122)..(223): NCBI GI NO: 33146996 NR Description: unknown protein
  misc_feature (122)..(212): NCBI GI NO: 30696021 NR Description: expressed protein [Arabidopsis thaliana]
  misc_feature (122)..(199): NCBI GI NO: 8843859 NR Description: contains similarity to unknownprotein~dbj|BAA91854
  misc_feature (5)..(121): NCBI GI NO: 34904390 NR Description: unnamed protein product
  misc_feature (23)..(121): NCBI GI NO: 11291753 NR Description: SINAH1 protein [imported] - upland cotton
  misc_feature (60)..(121): NCBI GI NO: 15234306 NR Description: putative zinc finger protein; protein id:At4g27880
NSQHNREKHGSGRRGTLAGEATMDMDSVECLSLPDASMDVDDVDSHQHQHHHHSIPIHPVHLAANGGVGGRAFAKMNAGGAAGAGGVGATAGATGGPPATSVHELLECPVCTNSMFPPIHQVNLLLTKWMKELEKIFYGNIVKYDTAISPEASQDDLVNVIWRNVYADEGSEPMDAAATPAVQALARYTRREATCLSLTDKEAVFSGNFKFTAVLPTVLSPVKRRR

SEQ ID NO: 19102 - protein, 204 aa, Triticum aestivum
  peptide (1)..(204): Ceres Seq. ID no. 12584563
  misc_feature (100)..(177): Pfam Name: Pfam Description:  Ubiquinol-cytochrome C chaperone
  misc_feature (100)..(201): NCBI GI NO: 33146996 NR Description: unknown protein
  misc_feature (100)..(190): NCBI GI NO: 30696021 NR Description: expressed protein [Arabidopsis thaliana]
  misc_feature (100)..(177): NCBI GI NO: 8843859 NR Description: contains similarity to unknownprotein~dbj|BAA91854
  misc_feature (1)..(99): NCBI GI NO: 34904390 NR Description: unnamed protein product
  misc_feature (1)..(99): NCBI GI NO: 11291753 NR Description: SINAH1 protein [imported] - upland cotton
  misc_feature (38)..(99): NCBI GI NO: 15234306 NR Description: putative zinc finger protein; protein id:At4g27880
MDMDSVECLSLPDASMDVDDVDSHQHQHHHHSIPIHPVHLAANGGVGGRAFAKMNAGGAAGAGGVGATAGATGGPPATSVHELLECPVCTNSMFPPIHQVNLLLTKWMKELEKIFYGNIVKYDTAISPEASQDDLVNVIWRNVYADEGSEPMDAAATPAVQALARYTRREATCLSLTDKEAVFSGNFKFTAVLPTVLSPVKRRR

SEQ ID NO: 19103 - protein, 202 aa, Triticum aestivum
  peptide (1)..(202): Ceres Seq. ID no. 12584564
  misc_feature (98)..(175): Pfam Name: Pfam Description:  Ubiquinol-cytochrome C chaperone
  misc_feature (98)..(199): NCBI GI NO: 33146996 NR Description: unknown protein
  misc_feature (98)..(188): NCBI GI NO: 30696021 NR Description: expressed protein [Arabidopsis thaliana]
  misc_feature (98)..(175): NCBI GI NO: 8843859 NR Description: contains similarity to unknownprotein~dbj|BAA91854
  misc_feature (1)..(97): NCBI GI NO: 34904390 NR Description: unnamed protein product
  misc_feature (1)..(97): NCBI GI NO: 11291753 NR Description: SINAH1 protein [imported] - upland cotton
  misc_feature (36)..(97): NCBI GI NO: 15234306 NR Description: putative zinc finger protein; protein id:At4g27880
MDSVECLSLPDASMDVDDVDSHQHQHHHHSIPIHPVHLAANGGVGGRAFAKMNAGGAAGAGGVGATAGATGGPPATSVHELLECPVCTNSMFPPIHQVNLLLTKWMKELEKIFYGNIVKYDTAISPEASQDDLVNVIWRNVYADEGSEPMDAAATPAVQALARYTRREATCLSLTDKEAVFSGNFKFTAVLPTVLSPVKRRR

SEQ ID NO: 19104 - DNA, 1300 bp, Triticum aestivum
  misc_feature (1)..(1300): Ceres Seq. ID no. 13596110
cccactcaaagcaccaaccctagctcccgcacccccgcaccctcgccgcagccatggcggaagaagccgccgccaccgcctccgcctccgccaccaacttcgaggtggacctgggccacctcctggcctacgacccctcgcaccacctcgccgccggcgccgcgtcctcccgggcggagctgcgggacgagtgcctgcggaaggccacggagctcgcgcaggccgtcgccaacgccctcttctcgctgcccgccaccgagggccgcgacggccctgtcgtccgcctcccgccgcccaccaaccgcctaccccgcgagaagcacttgccaaggccaaagcctcctaccaagtgggagcagttcgcaaagtcgaaagggattatcaagcacaagaagaacaagcgtgcatgggatgagcaaactaattcctggaagcggacgtatggctatgatcgtgttaatgatgacagagacgttcccatcattgaagccaaattgacagacgagcctggtgttgatccttttgctcaaagaagggaagagaagaagggcagggtcgataaacaagaaaagaacagacttgggaatttgaagaatgctgcaaaagttggtgctctgccaagtcatatacagctcgctgccacgtccgtgcccatcacaggaactaaagctgatctgccaagaaaagctaagaaggaagacctcgagaatgtcgctggtatggcttctgcagcaacggctagcggtggaaagtttgataaaaagttgcctggtgagaaacctctaaagaaggctggcaaaaacagaaagttcctccctgttgttgaagggaaaggaatgggcaacctagagaaacagcaaaacgacaagatcctgaacagtctactggccaagaacttcgaggaaccattggatgtcagcaaggcaatcacgatgtacaaggtgaagaaggacaacaagaggaggaaagacaagcaatcatcgtcgtcgtccggatcaaataagttgaagccccagaagaaaatccacaagaaatcttcaaagaaaagcgcttaggtccttccacatcatcgttgagacatgccgtgctgtaggcggcgagcgcagtctccaagcatcaaggatagtcttggcaaattttgtatggtcattgtcctgtttaagtcccaagggagaaatatagttattccggttaccactggttatgatatggcgcaagaagctgagtgccgtgatgacatagctgtacacgtattgtattttcagaagtttgggaaatgtttctggaaagctttgttggc

SEQ ID NO: 19105 - protein, 333 aa, Triticum aestivum
  peptide (1)..(333): Ceres Seq. ID no. 13596111
  misc_feature (16)..(182): Pfam Name: RRS1 Pfam Description: Ribosome biogenesis regulatory protein
  misc_feature (16)..(332): NCBI GI NO: 21593609 NR Description: unknown [Arabidopsis thaliana]
  misc_feature (16)..(332): NCBI GI NO: 18404610 NR Description: expressed protein [Arabidopsis thaliana]
  misc_feature (148)..(332): NCBI GI NO: 21362906 NR Description: Ribosome biogenesis regulatory protein homolog
  misc_feature (16)..(151): NCBI GI NO: 21362906 NR Description: Ribosome biogenesis regulatory protein homolog
  misc_feature (1)..(276): NCBI GI NO: 33585885 NR Description: Ribosome biogenesis regulatory protein homolog
  misc_feature (1)..(327): NCBI GI NO: 21362904 NR Description: Ribosome biogenesis regulatory protein homolog
  misc_feature (1)..(331): NCBI GI NO: 10946930 NR Description: RRS1 ribosome biogenesis regulator homolog
  misc_feature (1)..(327): NCBI GI NO: 12860310 NR Description: unnamed protein product [Mus musculus]
  misc_feature (1)..(317): NCBI GI NO: 27713790 NR Description: similar to regulator for ribosome resistancehomolog
  misc_feature (1)..(327): NCBI GI NO: 12845436 NR Description: unnamed protein product [Mus musculus]
MAEEAAATASASATNFEVDLGHLLAYDPSHHLAAGAASSRAELRDECLRKATELAQAVANALFSLPATEGRDGPVVRLPPPTNRLPREKHLPRPKPPTKWEQFAKSKGIIKHKKNKRAWDEQTNSWKRTYGYDRVNDDRDVPIIEAKLTDEPGVDPFAQRREEKKGRVDKQEKNRLGNLKNAAKVGALPSHIQLAATSVPITGTKADLPRKAKKEDLENVAGMASAATASGGKFDKKLPGEKPLKKAGKNRKFLPVVEGKGMGNLEKQQNDKILNSLLAKNFEEPLDVSKAITMYKVKKDNKRRKDKQSSSSSGSNKLKPQKKIHKKSSKKSA

SEQ ID NO: 19106 - DNA, 1887 bp, Triticum aestivum
  misc_feature (1)..(1887): Ceres Seq. ID no. 15226950
aaaaaacaacccgtgggcagcagcagcttctctgcatacaccaagaagtcgcctcccttgctttccttcctccagcagtgcgcgcccctcctctcgagatcttccccgagttcctgagatctggttgtaagcagccaagatggtgaagatctgctgcatcggagctggctacgtcggcggcccaaccatggccgtcattgccatcaagtgcccggcgatcgaggttgttgtcgtcgacatctccaagccccgcattgacgcctggaacagcgacaccctccccatctacgagcccggcctcgacgacgttgtcaaggcctgcaggggcaagaacctcttcttcagcactgatgttgagaagcatgtcgccgaggccgacatcatctttgtgtccgtgaacacccccaccaagacccgcggcctgggagccggcaaggccgccgacctcacctactgggagagcgccgcccggatgatcgccgacgtgtccaagtcggacaagatcgtcgtcgagaagtccaccgtgcctgtcaagaccgccgaggccatcgagaagatcctgacccacaacagcaagggcatcaactaccagatcctgtccaacccggagttcctcgccgagggcacggcgatcgaggacctgttcaagcccgacagggtgctcatcggcggccgggagacccccgggggccagaaggccgtccaggccctcaaggaggtgtacgcccactgggtgcccgaggcgaacatcatcaccaccaacctgtggtcggccgagctctccaagctggccgccaacgcgttcctggcgcagaggatctcgtccgtgaacgccatgtcggcgctgtgcgaggccaccggcgccaacgtgtcggaggtgtcgtacgccatcggcaaggactcgcggatcgggcccaagttcctgaacgccagcgtggggttcggcgggtcgtgcttccagaaggacatcctgaacctggtgtacatctgcgagtgcaacggcctgccggaggtggccaactactggaagcaggtgatcaagatcaacgactaccagaagagccggttcgtgaaccgggtggtgtcgtccatgttcaacacggtgtccggcaagaagatcgcggtgctcgggttcgcgttcaagaaggacacgggcgacacccgggagacgccggcgatcgacgtgtgcaagggcctggtgggcgacaaggcccaggtgagcatctacgacccgcaggtgacggaggagcagatccagcgggacctggccatgaacaagttcgactgggaccacccgatgcacctgcagccgaccagccccacggcggtgaagcaggtgagcgtggtgtgggacgcgtacgaggcctgcaagggcgcccacggcgtgtgcatcctcaccgagtgggacgagttcaagaagctcgactaccagaagatcttcgacaacatgcagaagccggccttcgtcttcgacggccgcaacgtggtcgacgccgagaagctcagggagatgggcttcatcgtctactccatcggcaagccgctcgacggctggctcaaggacatgcccgccgtggcctaagttcacctcgtcgccccgccggatcggaggaagagcaagaagtggtttgaccatcattcattatttatagtttgcattttgcaggagaagcatctacattttctctgtcggccataaaattttagcaaatcttcatgtcttgtcaagtttcgattcgatacatgtttgcgtctgtagatcttacttataatcaaatcctcgggcccctgtgctgcctgaggaggttttccgttgtatcccatgaacgaactttgtagcctgttttgctgaaatcattacagaatcaatgtgttttttcgccaaac

SEQ ID NO: 19107 - protein, 480 aa, Triticum aestivum
  peptide (1)..(480): Ceres Seq. ID no. 15226951
  misc_feature (2)..(200): Pfam Name: Pfam Description:  UDP-glucose/GDP-mannose dehydrogenase family
  misc_feature (1)..(480): NCBI GI NO: 13236672 NR Description: putative UDP-glucose dehydrogenase
  misc_feature (1)..(480): NCBI GI NO: 29028306 NR Description: UDP-glucose dehydrogenase [Colocasia esculenta]
  misc_feature (1)..(480): NCBI GI NO: 6136119 NR Description: UDP-GLUCOSE 6-DEHYDROGENASE
  misc_feature (1)..(480): NCBI GI NO: 15242316 NR Description: UDP-glucose dehydrogenase-related protein
  misc_feature (1)..(480): NCBI GI NO: 21618158 NR Description: UDP-glucose dehydrogenase, putative
  misc_feature (1)..(480): NCBI GI NO: 15228687 NR Description: UDP-glucose dehydrogenase -related
  misc_feature (1)..(480): NCBI GI NO: 15983404 NR Description: AT3g29360/MUO10_6 [Arabidopsis thaliana]
  misc_feature (1)..(478): NCBI GI NO: 15241704 NR Description: UDP-glucose dehydrogenase-related protein
  misc_feature (1)..(478): NCBI GI NO: 30102540 NR Description: At5g39320 [Arabidopsis thaliana]
  misc_feature (1)..(480): NCBI GI NO: 6164591 NR Description: UDP-glucose dehydrogenase
MVKICCIGAGYVGGPTMAVIAIKCPAIEVVVVDISKPRIDAWNSDTLPIYEPGLDDVVKACRGKNLFFSTDVEKHVAEADIIFVSVNTPTKTRGLGAGKAADLTYWESAARMIADVSKSDKIVVEKSTVPVKTAEAIEKILTHNSKGINYQILSNPEFLAEGTAIEDLFKPDRVLIGGRETPGGQKAVQALKEVYAHWVPEANIITTNLWSAELSKLAANAFLAQRISSVNAMSALCEATGANVSEVSYAIGKDSRIGPKFLNASVGFGGSCFQKDILNLVYICECNGLPEVANYWKQVIKINDYQKSRFVNRVVSSMFNTVSGKKIAVLGFAFKKDTGDTRETPAIDVCKGLVGDKAQVSIYDPQVTEEQIQRDLAMNKFDWDHPMHLQPTSPTAVKQVSVVWDAYEACKGAHGVCILTEWDEFKKLDYQKIFDNMQKPAFVFDGRNVVDAEKLREMGFIVYSIGKPLDGWLKDMPAVA

SEQ ID NO: 19108 - protein, 464 aa, Triticum aestivum
  peptide (1)..(464): Ceres Seq. ID no. 15226952
  misc_feature (1)..(184): Pfam Name: Pfam Description:  UDP-glucose/GDP-mannose dehydrogenase family
  misc_feature (1)..(464): NCBI GI NO: 13236672 NR Description: putative UDP-glucose dehydrogenase
  misc_feature (1)..(464): NCBI GI NO: 29028306 NR Description: UDP-glucose dehydrogenase [Colocasia esculenta]
  misc_feature (1)..(464): NCBI GI NO: 6136119 NR Description: UDP-GLUCOSE 6-DEHYDROGENASE
  misc_feature (1)..(464): NCBI GI NO: 15242316 NR Description: UDP-glucose dehydrogenase-related protein
  misc_feature (1)..(464): NCBI GI NO: 21618158 NR Description: UDP-glucose dehydrogenase, putative
  misc_feature (1)..(464): NCBI GI NO: 15228687 NR Description: UDP-glucose dehydrogenase -related
  misc_feature (1)..(464): NCBI GI NO: 15983404 NR Description: AT3g29360/MUO10_6 [Arabidopsis thaliana]
  misc_feature (1)..(462): NCBI GI NO: 15241704 NR Description: UDP-glucose dehydrogenase-related protein
  misc_feature (1)..(462): NCBI GI NO: 30102540 NR Description: At5g39320 [Arabidopsis thaliana]
  misc_feature (1)..(464): NCBI GI NO: 6164591 NR Description: UDP-glucose dehydrogenase
MAVIAIKCPAIEVVVVDISKPRIDAWNSDTLPIYEPGLDDVVKACRGKNLFFSTDVEKHVAEADIIFVSVNTPTKTRGLGAGKAADLTYWESAARMIADVSKSDKIVVEKSTVPVKTAEAIEKILTHNSKGINYQILSNPEFLAEGTAIEDLFKPDRVLIGGRETPGGQKAVQALKEVYAHWVPEANIITTNLWSAELSKLAANAFLAQRISSVNAMSALCEATGANVSEVSYAIGKDSRIGPKFLNASVGFGGSCFQKDILNLVYICECNGLPEVANYWKQVIKINDYQKSRFVNRVVSSMFNTVSGKKIAVLGFAFKKDTGDTRETPAIDVCKGLVGDKAQVSIYDPQVTEEQIQRDLAMNKFDWDHPMHLQPTSPTAVKQVSVVWDAYEACKGAHGVCILTEWDEFKKLDYQKIFDNMQKPAFVFDGRNVVDAEKLREMGFIVYSIGKPLDGWLKDMPAVA

SEQ ID NO: 19109 - protein, 369 aa, Triticum aestivum
  peptide (1)..(369): Ceres Seq. ID no. 15226953
  misc_feature (1)..(89): Pfam Name: Pfam Description:  UDP-glucose/GDP-mannose dehydrogenase family
  misc_feature (1)..(369): NCBI GI NO: 13236672 NR Description: putative UDP-glucose dehydrogenase
  misc_feature (1)..(369): NCBI GI NO: 29028306 NR Description: UDP-glucose dehydrogenase [Colocasia esculenta]
  misc_feature (1)..(369): NCBI GI NO: 6136119 NR Description: UDP-GLUCOSE 6-DEHYDROGENASE
  misc_feature (1)..(369): NCBI GI NO: 15242316 NR Description: UDP-glucose dehydrogenase-related protein
  misc_feature (1)..(369): NCBI GI NO: 21618158 NR Description: UDP-glucose dehydrogenase, putative
  misc_feature (1)..(369): NCBI GI NO: 15228687 NR Description: UDP-glucose dehydrogenase -related
  misc_feature (1)..(369): NCBI GI NO: 15983404 NR Description: AT3g29360/MUO10_6 [Arabidopsis thaliana]
  misc_feature (1)..(367): NCBI GI NO: 15241704 NR Description: UDP-glucose dehydrogenase-related protein
  misc_feature (1)..(367): NCBI GI NO: 30102540 NR Description: At5g39320 [Arabidopsis thaliana]
  misc_feature (1)..(369): NCBI GI NO: 6164591 NR Description: UDP-glucose dehydrogenase
MIADVSKSDKIVVEKSTVPVKTAEAIEKILTHNSKGINYQILSNPEFLAEGTAIEDLFKPDRVLIGGRETPGGQKAVQALKEVYAHWVPEANIITTNLWSAELSKLAANAFLAQRISSVNAMSALCEATGANVSEVSYAIGKDSRIGPKFLNASVGFGGSCFQKDILNLVYICECNGLPEVANYWKQVIKINDYQKSRFVNRVVSSMFNTVSGKKIAVLGFAFKKDTGDTRETPAIDVCKGLVGDKAQVSIYDPQVTEEQIQRDLAMNKFDWDHPMHLQPTSPTAVKQVSVVWDAYEACKGAHGVCILTEWDEFKKLDYQKIFDNMQKPAFVFDGRNVVDAEKLREMGFIVYSIGKPLDGWLKDMPAVA

SEQ ID NO: 19110 - DNA, 1174 bp, Triticum aestivum
  misc_feature (1)..(1174): Ceres Seq. ID no. 13590940
acccctttcccttcgcctccaaaccccagcggcagaaccttatcccctgcgagtcttatccccctctgcaatggcggccaccctcttctccaccgcgctctcgcaccacttcatcccgctcccctccgccgccaggcccgccgccgcctcggcctccttcgcctgcggcccgctgcgcgccgtgtcggcgctgctggcgccgcggaggcggctcctgctgcccgtggccgtggccgtgtcgtccgagttcgggacggaggacgccgaggaggagcagagcgagggcgagggcggcggcgactccgaggccgagtactccgaggacctcaaggtcttcgtcggcaacctccccttcaccgtggacagcgcgcagctcgccgggctcttcgagcaggccggctccgtcgagatggtcgaggttgtatacgatagaatgaccggacggagccgtggatttggattcgtcacaatgggttcagctgaggaagttgctgccgccgttgagcaattcaatggctatacgttccaaggaagacctctcagggttaactccggaccaccaccacccagagatgaattcgcacccagaacaccgaggaccatgggcggcggtggcggcggcggcagctttgattcagctaacaagctctacgtcggaaacctatcctggggtgttgacaactcaacgctcgagaacctgttcagcgaacaaggaaaggtgcttgatgctaaggtcatctatgaccgcgacagtggcaggtcgaggggtttcggtttcgtcacctatggctctgccgacgaggtcaacaatgcgatctcaaacctcgacggcgtggaccttgacggcaggcagatccgggttaccgtcgcagagtcgaagccgagggagcaaaggcggttttaagagatcctgacgctggttagagattaatcatgtgttccgtaagtgttagtttgtagtttctactactattttctcgcggttgatgagagagactgggaagtgaatttgtataccggaagatttttgtcagccgtgcaactcgttgcgcctcttgatagaaaaagtagaaattttgtcaaagtcattcttatatgcttagcagcagagatgatgtacgataccattaaaaacccatctgaatgtttgttgatgctgtgtatggctctctcc

SEQ ID NO: 19111 - protein, 300 aa, Triticum aestivum
  peptide (1)..(300): Ceres Seq. ID no. 15221016
  misc_feature (216)..(287): Pfam Name: a.k.a. RRM, RBD, or RNP domain Pfam Description: RNA recognition motif.
  misc_feature (24)..(297): NCBI GI NO: 34913270 NR Description: putative ribonucleoprotein
  misc_feature (24)..(297): NCBI GI NO: 18921322 NR Description: putative ribonucleoprotein [Oryza sativa]
  misc_feature (22)..(300): NCBI GI NO: 12230584 NR Description: 29 kDa ribonucleoprotein A, chloroplast precursor
  misc_feature (22)..(300): NCBI GI NO: 1350820 NR Description: 30 kDa ribonucleoprotein, chloroplast precursor
  misc_feature (53)..(212): NCBI GI NO: 681904 NR Description: cp29 [Arabidopsis thaliana]
  misc_feature (53)..(212): NCBI GI NO: 30693824 NR Description: 29 kDa ribonucleoprotein, chloroplast
  misc_feature (53)..(212): NCBI GI NO: 15231817 NR Description: 29 kDa ribonucleoprotein, chloroplast
  misc_feature (202)..(294): NCBI GI NO: 681904 NR Description: cp29 [Arabidopsis thaliana]
  misc_feature (202)..(294): NCBI GI NO: 30693824 NR Description: 29 kDa ribonucleoprotein, chloroplast
  misc_feature (202)..(294): NCBI GI NO: 15231817 NR Description: 29 kDa ribonucleoprotein, chloroplast
PLSLRLQTPAAEPYPLRVLSPSAMAATLFSTALSHHFIPLPSAARPAAASASFACGPLRAVSALLAPRRRLLLPVAVAVSSEFGTEDAEEEQSEGEGGGDSEAEYSEDLKVFVGNLPFTVDSAQLAGLFEQAGSVEMVEVVYDRMTGRSRGFGFVTMGSAEEVAAAVEQFNGYTFQGRPLRVNSGPPPPRDEFAPRTPRTMGGGGGGGSFDSANKLYVGNLSWGVDNSTLENLFSEQGKVLDAKVIYDRDSGRSRGFGFVTYGSADEVNNAISNLDGVDLDGRQIRVTVAESKPREQRRF

SEQ ID NO: 19112 - protein, 277 aa, Triticum aestivum
  peptide (1)..(277): Ceres Seq. ID no. 15221017
  misc_feature (193)..(264): Pfam Name: a.k.a. RRM, RBD, or RNP domain Pfam Description: RNA recognition motif.
  misc_feature (1)..(274): NCBI GI NO: 34913270 NR Description: putative ribonucleoprotein
  misc_feature (1)..(274): NCBI GI NO: 18921322 NR Description: putative ribonucleoprotein [Oryza sativa]
  misc_feature (1)..(277): NCBI GI NO: 12230584 NR Description: 29 kDa ribonucleoprotein A, chloroplast precursor
  misc_feature (1)..(277): NCBI GI NO: 1350820 NR Description: 30 kDa ribonucleoprotein, chloroplast precursor
  misc_feature (30)..(189): NCBI GI NO: 681904 NR Description: cp29 [Arabidopsis thaliana]
  misc_feature (30)..(189): NCBI GI NO: 15231817 NR Description: 29 kDa ribonucleoprotein, chloroplast
  misc_feature (30)..(189): NCBI GI NO: 30693824 NR Description: 29 kDa ribonucleoprotein, chloroplast
  misc_feature (179)..(271): NCBI GI NO: 681904 NR Description: cp29 [Arabidopsis thaliana]
  misc_feature (179)..(271): NCBI GI NO: 30693824 NR Description: 29 kDa ribonucleoprotein, chloroplast
  misc_feature (179)..(271): NCBI GI NO: 15231817 NR Description: 29 kDa ribonucleoprotein, chloroplast
MAATLFSTALSHHFIPLPSAARPAAASASFACGPLRAVSALLAPRRRLLLPVAVAVSSEFGTEDAEEEQSEGEGGGDSEAEYSEDLKVFVGNLPFTVDSAQLAGLFEQAGSVEMVEVVYDRMTGRSRGFGFVTMGSAEEVAAAVEQFNGYTFQGRPLRVNSGPPPPRDEFAPRTPRTMGGGGGGGSFDSANKLYVGNLSWGVDNSTLENLFSEQGKVLDAKVIYDRDSGRSRGFGFVTYGSADEVNNAISNLDGVDLDGRQIRVTVAESKPREQRRF

SEQ ID NO: 19113 - protein, 164 aa, Triticum aestivum
  peptide (1)..(164): Ceres Seq. ID no. 15221018
  misc_feature (80)..(151): Pfam Name: a.k.a. RRM, RBD, or RNP domain Pfam Description: RNA recognition motif.
  misc_feature (1)..(161): NCBI GI NO: 34913270 NR Description: putative ribonucleoprotein
  misc_feature (1)..(161): NCBI GI NO: 18921322 NR Description: putative ribonucleoprotein [Oryza sativa]
  misc_feature (1)..(164): NCBI GI NO: 12230584 NR Description: 29 kDa ribonucleoprotein A, chloroplast precursor
  misc_feature (1)..(164): NCBI GI NO: 1350820 NR Description: 30 kDa ribonucleoprotein, chloroplast precursor
  misc_feature (1)..(76): NCBI GI NO: 681904 NR Description: cp29 [Arabidopsis thaliana]
  misc_feature (1)..(76): NCBI GI NO: 30693824 NR Description: 29 kDa ribonucleoprotein, chloroplast
  misc_feature (1)..(76): NCBI GI NO: 15231817 NR Description: 29 kDa ribonucleoprotein, chloroplast
  misc_feature (66)..(158): NCBI GI NO: 681904 NR Description: cp29 [Arabidopsis thaliana]
  misc_feature (66)..(158): NCBI GI NO: 30693824 NR Description: 29 kDa ribonucleoprotein, chloroplast
  misc_feature (66)..(158): NCBI GI NO: 15231817 NR Description: 29 kDa ribonucleoprotein, chloroplast
MVEVVYDRMTGRSRGFGFVTMGSAEEVAAAVEQFNGYTFQGRPLRVNSGPPPPRDEFAPRTPRTMGGGGGGGSFDSANKLYVGNLSWGVDNSTLENLFSEQGKVLDAKVIYDRDSGRSRGFGFVTYGSADEVNNAISNLDGVDLDGRQIRVTVAESKPREQRRF

SEQ ID NO: 19114 - DNA, 988 bp, Triticum aestivum
  misc_feature (1)..(988): Ceres Seq. ID no. 12627129
atcaatcaatccgcggaatctatcccccccgcagcagacgccatggccgccgcaccgacgccgcagcccttgctcccggtgaccaacccctcctccgggggcggcggctctgccccgtccgccggcagcggcctcaccgactccgcgctcgccacgccggccttccggctcttcctcagcagggtctccgacacggcgcggcgctcgctcgccgaccgccgcccctggacggagctcatcgaccgctcggccatctcgcggccggactccctctccgaggccacctcgcgattgcgccgcaacctgggctacttccgcgtcaactacgccgccgtggtggccttctccctcgcggcctccctcctggcgcaccccttctcgctgctcgtcctcctcggcatcctcggcgcctggtgcttcctctacgtcttccgcgcgcccgaccagcccgtcgtgctcttcggccgcaccttcaccgaccgggagacgctgctcggcctcgtcgtctcgtcgctgctcgccttcttcctcacgtccgtcgcctcgctcatcatctccggcctgctcgtcggcggcgcgctggtggcggtgcacggcgcgttccgcatgcccgaggacctcttcctcgacgactcgagctctgtgtcaagcggcaacacttcccacaggctgctctccttcctcgcgtcgcccggatctggtgtttgagcctgcgcgagatctggtagccttcttgcatcaacgagttcatctcaagtctgagtctaatttcgcgagatctgattttggttttaatatgtatctccagttattcaaagatccgcgtgaagctgtattctctcgtatttgaccagatgttaagcattagcaaattgatcactgtgcactatgaatcgattgagcgttagcaaattgatccgcattattagctgtattcgctcgtatttaaccagattgttcatatacaggttttatggtttccactgtg

SEQ ID NO: 19115 - protein, 241 aa, Triticum aestivum
  peptide (1)..(241): Ceres Seq. ID no. 12627130
QSIRGIYPPRSRRHGRRTDAAALAPGDQPLLRGRRLCPVRRQRPHRLRARHAGLPALPQQGLRHGAALARRPPPLDGAHRPLGHLAAGLPLRGHLAIAPQPGLLPRQLRRRGGLLPRGLPPGAPLLAARPPRHPRRLVLPLRLPRARPARRALRPHLHRPGDAARPRRLVAARLLPHVRRLAHHLRPARRRRAGGGARRVPHARGPLPRRLELCVKRQHFPQAALLPRVARIWCLSLREIW

SEQ ID NO: 19116 - protein, 235 aa, Triticum aestivum
  peptide (1)..(235): Ceres Seq. ID no. 12627131
  misc_feature (23)..(235): NCBI GI NO: 15239101 NR Description: putative protein; protein id: At5g05380.1
  misc_feature (23)..(235): NCBI GI NO: 18072825 NR Description: prenylated Rab receptor 2 [Arabidopsis thaliana]
  misc_feature (20)..(235): NCBI GI NO: 15228824 NR Description: putative protein; protein id: At3g56110
  misc_feature (20)..(235): NCBI GI NO: 15450978 NR Description: putative protein [Arabidopsis thaliana]
  misc_feature (15)..(230): NCBI GI NO: 15226664 NR Description: unknown protein; protein id: At2g40380.1
  misc_feature (18)..(233): NCBI GI NO: 15224494 NR Description: unknown protein; protein id: At2g38360.1
  misc_feature (20)..(235): NCBI GI NO: 15241022 NR Description: putative protein; protein id: At5g01640.1
  misc_feature (23)..(235): NCBI GI NO: 15240698 NR Description: putative protein; protein id: At5g07110
  misc_feature (48)..(214): NCBI GI NO: 18405248 NR Description: expressed protein; protein id: At1g55190
  misc_feature (9)..(218): NCBI GI NO: 40539036 NR Description: putative prenylated rab acceptor protein
INQSAESIPPAADAMAAAPTPQPLLPVTNPSSGGGGSAPSAGSGLTDSALATPAFRLFLSRVSDTARRSLADRRPWTELIDRSAISRPDSLSEATSRLRRNLGYFRVNYAAVVAFSLAASLLAHPFSLLVLLGILGAWCFLYVFRAPDQPVVLFGRTFTDRETLLGLVVSSLLAFFLTSVASLIISGLLVGGALVAVHGAFRMPEDLFLDDSSSVSSGNTSHRLLSFLASPGSGV

SEQ ID NO: 19117 - protein, 221 aa, Triticum aestivum
  peptide (1)..(221): Ceres Seq. ID no. 12627132
  misc_feature (9)..(221): NCBI GI NO: 15239101 NR Description: putative protein; protein id: At5g05380.1
  misc_feature (9)..(221): NCBI GI NO: 18072825 NR Description: prenylated Rab receptor 2 [Arabidopsis thaliana]
  misc_feature (6)..(221): NCBI GI NO: 15228824 NR Description: putative protein; protein id: At3g56110
  misc_feature (6)..(221): NCBI GI NO: 15450978 NR Description: putative protein [Arabidopsis thaliana]
  misc_feature (1)..(216): NCBI GI NO: 15226664 NR Description: unknown protein; protein id: At2g40380.1
  misc_feature (4)..(219): NCBI GI NO: 15224494 NR Description: unknown protein; protein id: At2g38360.1
  misc_feature (6)..(221): NCBI GI NO: 15241022 NR Description: putative protein; protein id: At5g01640.1
  misc_feature (9)..(221): NCBI GI NO: 15240698 NR Description: putative protein; protein id: At5g07110
  misc_feature (34)..(200): NCBI GI NO: 18405248 NR Description: expressed protein; protein id: At1g55190
  misc_feature (1)..(204): NCBI GI NO: 40539036 NR Description: putative prenylated rab acceptor protein
MAAAPTPQPLLPVTNPSSGGGGSAPSAGSGLTDSALATPAFRLFLSRVSDTARRSLADRRPWTELIDRSAISRPDSLSEATSRLRRNLGYFRVNYAAVVAFSLAASLLAHPFSLLVLLGILGAWCFLYVFRAPDQPVVLFGRTFTDRETLLGLVVSSLLAFFLTSVASLIISGLLVGGALVAVHGAFRMPEDLFLDDSSSVSSGNTSHRLLSFLASPGSGV

SEQ ID NO: 19118 - DNA, 1443 bp, Triticum aestivum
  misc_feature (1)..(1443): Ceres Seq. ID no. 13654285
agaacatcctaatcgaaaaaacttcccccaaccaaaagacagcaccgtgtgttctcgtgtgtatatgtctatggcctaatcgagaccatggacgttaccggggacgccggtggaggtcgccgccccaacttccccctgcagctcctcgagaagaaggaggagcatccgtgctccatctccccggctgctgggctcgggacgaatgggtcggcgacgggggagctgcaggtgcggaaggcggcaccgcctaagcggaccacgagcaaggaccggcatacgaaggtggacgggcgcggccgccgcatccggatgccggcgatctgcgcggcgcgggtgttccagctgacgcgggaactggggcacaagacggacggcgagaccatcgagtggctcctgcagcaggcggagcccgctgtgattgcggccaccggcacaggcaccatcccggccaacttcacatctctcaacatctccctccgctcctccggctccatgctctccaccatacccgcccacctccgcgccgccggcctgccggggtctcgctttggaggtggcccatgggcggacgcgtgggaccgcttcgtcggtctcgggttcggcggtggcctcgagagcccggcctccaccaccacctcgtcgtcgtccccgctgctgctgagcttccactccggaagcgtcggcctcgacgtttcgccgtcgtcggcgacggctgcggccaacacggaactgtccaggaagcggcgttgggagcaagaaatgcagcagcagcagcaacaacatcatcaccaccaacagcaacagcagcaacagtaccagcaacagatggccgggtacacgcagagccaaatgccgggcactgtgtggatggtgccgacgagcaacgcccaggccgccggagcggcgcctgccggtggcggcgagtcgatctggacgttcccgcaacccggaagcggcggcggcggcggctcggcgaccgtgtaccgcggcgtgccgagcgggctacatttcatgaacatccccgcgccgatggcagtgcacgcgcagcagctgggactcggccaggccggcggcggcggatcagcagcagcgggcgaggggcacatggggatcctcgccgcgctcaacgcgtaccgtgggcagcatgcagcggcgtcggaggtcaccgtggcggggcacaatggagcagctgaagggactactcaccatcaacatcagaatcagcatcagcatctgcagcacgggggtggcgagccgaacgagagcatgagcggcagcgactcgtaggacttcgtgaccgctggtccgttcgacagctttggcttaccaattttcgtctttggatttgttcttctttggtttgtttctgttcttgactcgatcgcttgttatggctttgttccttctccaaattcttgcacggttcatacgattgcaacttgc

SEQ ID NO: 19119 - protein, 399 aa, Triticum aestivum
  peptide (1)..(399): Ceres Seq. ID no. 15219637
  misc_feature (50)..(293): Pfam Name: Pfam Description:  TCP family transcription factor
  misc_feature (50)..(382): NCBI GI NO: 11357581 NR Description: hypothetical protein F1P2
  misc_feature (50)..(382): NCBI GI NO: 22331641 NR Description: TCP family transcription factor, putative
  misc_feature (6)..(158): NCBI GI NO: 18409345 NR Description: TCP family transcription factor, putative
  misc_feature (27)..(203): NCBI GI NO: 5731257 NR Description: auxin-induced basic helix-loop-helix transcriptionfactor
  misc_feature (29)..(353): NCBI GI NO: 15218305 NR Description: TCP family transcription factor, putative
  misc_feature (51)..(395): NCBI GI NO: 15217857 NR Description: TCP family transcription factor, putative
  misc_feature (30)..(138): NCBI GI NO: 15219640 NR Description: TCP family transcription factor, putative
  misc_feature (8)..(139): NCBI GI NO: 20975251 NR Description: transcription factor PCF3
  misc_feature (54)..(196): NCBI GI NO: 15232059 NR Description: TCP family transcription factor, putative
  misc_feature (44)..(131): NCBI GI NO: 15242216 NR Description: TCP family transcription factor, putative
MDVTGDAGGGRRPNFPLQLLEKKEEHPCSISPAAGLGTNGSATGELQVRKAAPPKRTTSKDRHTKVDGRGRRIRMPAICAARVFQLTRELGHKTDGETIEWLLQQAEPAVIAATGTGTIPANFTSLNISLRSSGSMLSTIPAHLRAAGLPGSRFGGGPWADAWDRFVGLGFGGGLESPASTTTSSSSPLLLSFHSGSVGLDVSPSSATAAANTELSRKRRWEQEMQQQQQQHHHHQQQQQQQYQQQMAGYTQSQMPGTVWMVPTSNAQAAGAAPAGGGESIWTFPQPGSGGGGGSATVYRGVPSGLHFMNIPAPMAVHAQQLGLGQAGGGGSAAAGEGHMGILAALNAYRGQHAAASEVTVAGHNGAAEGTTHHQHQNQHQHLQHGGGEPNESMSGSDS

SEQ ID NO: 19120 - protein, 325 aa, Triticum aestivum
  peptide (1)..(325): Ceres Seq. ID no. 15219638
  misc_feature (1)..(219): Pfam Name: Pfam Description:  TCP family transcription factor
  misc_feature (1)..(308): NCBI GI NO: 11357581 NR Description: hypothetical protein F1P2
  misc_feature (1)..(308): NCBI GI NO: 22331641 NR Description: TCP family transcription factor, putative
  misc_feature (1)..(84): NCBI GI NO: 18409345 NR Description: TCP family transcription factor, putative
  misc_feature (1)..(129): NCBI GI NO: 5731257 NR Description: auxin-induced basic helix-loop-helix transcriptionfactor
  misc_feature (1)..(279): NCBI GI NO: 15218305 NR Description: TCP family transcription factor, putative
  misc_feature (1)..(321): NCBI GI NO: 15217857 NR Description: TCP family transcription factor, putative
  misc_feature (1)..(64): NCBI GI NO: 15219640 NR Description: TCP family transcription factor, putative
  misc_feature (1)..(65): NCBI GI NO: 20975251 NR Description: transcription factor PCF3
  misc_feature (1)..(122): NCBI GI NO: 15232059 NR Description: TCP family transcription factor, putative
  misc_feature (1)..(57): NCBI GI NO: 15242216 NR Description: TCP family transcription factor, putative
MPAICAARVFQLTRELGHKTDGETIEWLLQQAEPAVIAATGTGTIPANFTSLNISLRSSGSMLSTIPAHLRAAGLPGSRFGGGPWADAWDRFVGLGFGGGLESPASTTTSSSSPLLLSFHSGSVGLDVSPSSATAAANTELSRKRRWEQEMQQQQQQHHHHQQQQQQQYQQQMAGYTQSQMPGTVWMVPTSNAQAAGAAPAGGGESIWTFPQPGSGGGGGSATVYRGVPSGLHFMNIPAPMAVHAQQLGLGQAGGGGSAAAGEGHMGILAALNAYRGQHAAASEVTVAGHNGAAEGTTHHQHQNQHQHLQHGGGEPNESMSGSDS

SEQ ID NO: 19121 - protein, 264 aa, Triticum aestivum
  peptide (1)..(264): Ceres Seq. ID no. 15219639
  misc_feature (1)..(158): Pfam Name: Pfam Description:  TCP family transcription factor
  misc_feature (1)..(247): NCBI GI NO: 11357581 NR Description: hypothetical protein F1P2
  misc_feature (1)..(247): NCBI GI NO: 22331641 NR Description: TCP family transcription factor, putative
  misc_feature (1)..(23): NCBI GI NO: 18409345 NR Description: TCP family transcription factor, putative
  misc_feature (1)..(68): NCBI GI NO: 5731257 NR Description: auxin-induced basic helix-loop-helix transcriptionfactor
  misc_feature (1)..(218): NCBI GI NO: 15218305 NR Description: TCP family transcription factor, putative
  misc_feature (1)..(260): NCBI GI NO: 15217857 NR Description: TCP family transcription factor, putative
  misc_feature (1)..(61): NCBI GI NO: 15232059 NR Description: TCP family transcription factor, putative
  misc_feature (1)..(22): NCBI GI NO: 15241596 NR Description: TCP family transcription factor, putative
  misc_feature (1)..(69): NCBI GI NO: 15225538 NR Description: TCP family transcription factor, putative
  misc_feature (1)..(27): NCBI GI NO: 32487528 NR Description: OSJNBb0026E15.1
MLSTIPAHLRAAGLPGSRFGGGPWADAWDRFVGLGFGGGLESPASTTTSSSSPLLLSFHSGSVGLDVSPSSATAAANTELSRKRRWEQEMQQQQQQHHHHQQQQQQQYQQQMAGYTQSQMPGTVWMVPTSNAQAAGAAPAGGGESIWTFPQPGSGGGGGSATVYRGVPSGLHFMNIPAPMAVHAQQLGLGQAGGGGSAAAGEGHMGILAALNAYRGQHAAASEVTVAGHNGAAEGTTHHQHQNQHQHLQHGGGEPNESMSGSDS

SEQ ID NO: 19122 - DNA, 1242 bp, Triticum aestivum
  misc_feature (1)..(1242): Ceres Seq. ID no. 14302299
gcatagctcacatcacatcaatacatcaccaccaccaccaccctcctctctcctctccctccctctctcctcgtagacaccttctccttctaggtctccttgcctgtgcaggctccagcacgtacactcaaggaccgacgacgacgatgcggcttagctgcaacggctgccgcgtgctgcggaagggctgcagcgaggactgcagcatccgcccctgcctgcagtggatcaagagccccgaggcgcaggccaacgccaccgtcttcctcgccaagttctacggccgcgcggggctcatgaacctcatcaacgccggcacggacgacagcctccgccccggcatcttccgctcgctcctctacgaggcctgcggccggatcgtcaaccccatatacggctccgtcggcctgctctggtccaacaactggcagatgtgccaggccgccgtcgaggccgtcctcagcggcaagcccatcgtccaggtctcctccgaggatgccgccgccgaccggacaccgccgctcaaggcgtacgacatccgccacgtctccacctcgccagccgccgacgggaggctccacaaggtcgccaagccgggtcgcacccgcttcaagcgcgcgtcctccgcctcgtcccaccacaacccgtccagcgactccaacaacaagcccaagcccaagccgcagcctcagacgcgggcgcccacggcggaggaggagctggatcgtcaacaccgcaaggagatggaggagggcgcgtcccagcgtgctccgagccacgaatcctccgacagccgacacgaggaccccgtggagccacactgccagcaagaggcgtccgcagacacggaggccgaggcggggtcgcacgtcagccaggcggagcaggagcaggagcagagcacagagccggccgcagagcacgcggaggaggtcgaaaaggaggaggacgaagaactagcgctcgagcttacgcttggattcgctcccgtcgcagtacggccggccggatttcacctgagcgtccggaccgcggcggagccggctttcgtcgggctccggttcctctaaaagcacatttaccttgtgaaaagaatatagagctatttgatggactcttttacctttaattggaaaaaaattaggtccgttagttcgtttttgtttcatggttgcaatgagtgtacagacaatagctccctcatggccaagatttttccaataaaaaatgtgttttgctgac

SEQ ID NO: 19123 - protein, 355 aa, Triticum aestivum
  peptide (1)..(355): Ceres Seq. ID no. 14302300
  misc_feature (52)..(158): Pfam Name: Pfam Description:  Protein of unknown function DUF260
  misc_feature (49)..(333): NCBI GI NO: 34914608 NR Description: P0520B06.17
  misc_feature (49)..(222): NCBI GI NO: 32395577 NR Description: seed specific protein Bn15D17A [Brassica napus]
  misc_feature (49)..(262): NCBI GI NO: 21554191 NR Description: unknown [Arabidopsis thaliana]
  misc_feature (49)..(262): NCBI GI NO: 18396229 NR Description: lateral organ boundaries
  misc_feature (49)..(329): NCBI GI NO: 34895540 NR Description: unnamed protein product
  misc_feature (49)..(226): NCBI GI NO: 15219829 NR Description: lateral organ boundaries (LOB) domain family
  misc_feature (49)..(190): NCBI GI NO: 15221429 NR Description: lateral organ boundaries
  misc_feature (51)..(240): NCBI GI NO: 15229644 NR Description: lateral organ boundaries
  misc_feature (51)..(240): NCBI GI NO: 21553886 NR Description: unknown [Arabidopsis thaliana]
  misc_feature (51)..(264): NCBI GI NO: 15240739 NR Description: lateral organ boundaries
IAHITSIHHHHHHPPLSSPSLSPRRHLLLLGLLACAGSSTYTQGPTTTMRLSCNGCRVLRKGCSEDCSIRPCLQWIKSPEAQANATVFLAKFYGRAGLMNLINAGTDDSLRPGIFRSLLYEACGRIVNPIYGSVGLLWSNNWQMCQAAVEAVLSGKPIVQVSSEDAAADRTPPLKAYDIRHVSTSPAADGRLHKVAKPGRTRFKRASSASSHHNPSSDSNNKPKPKPQPQTRAPTAEEELDRQHRKEMEEGASQRAPSHESSDSRHEDPVEPHCQQEASADTEAEAGSHVSQAEQEQEQSTEPAAEHAEEVEKEEDEELALELTLGFAPVAVRPAGFHLSVRTAAEPAFVGLRFL

SEQ ID NO: 19124 - protein, 307 aa, Triticum aestivum
  peptide (1)..(307): Ceres Seq. ID no. 14302301
  misc_feature (4)..(110): Pfam Name: Pfam Description:  Protein of unknown function DUF260
  misc_feature (1)..(285): NCBI GI NO: 34914608 NR Description: P0520B06.17
  misc_feature (1)..(174): NCBI GI NO: 32395577 NR Description: seed specific protein Bn15D17A [Brassica napus]
  misc_feature (1)..(214): NCBI GI NO: 21554191 NR Description: unknown [Arabidopsis thaliana]
  misc_feature (1)..(214): NCBI GI NO: 18396229 NR Description: lateral organ boundaries
  misc_feature (1)..(281): NCBI GI NO: 34895540 NR Description: unnamed protein product
  misc_feature (1)..(178): NCBI GI NO: 15219829 NR Description: lateral organ boundaries (LOB) domain family
  misc_feature (1)..(142): NCBI GI NO: 15221429 NR Description: lateral organ boundaries
  misc_feature (3)..(192): NCBI GI NO: 15229644 NR Description: lateral organ boundaries
  misc_feature (3)..(192): NCBI GI NO: 21553886 NR Description: unknown [Arabidopsis thaliana]
  misc_feature (3)..(216): NCBI GI NO: 15240739 NR Description: lateral organ boundaries
MRLSCNGCRVLRKGCSEDCSIRPCLQWIKSPEAQANATVFLAKFYGRAGLMNLINAGTDDSLRPGIFRSLLYEACGRIVNPIYGSVGLLWSNNWQMCQAAVEAVLSGKPIVQVSSEDAAADRTPPLKAYDIRHVSTSPAADGRLHKVAKPGRTRFKRASSASSHHNPSSDSNNKPKPKPQPQTRAPTAEEELDRQHRKEMEEGASQRAPSHESSDSRHEDPVEPHCQQEASADTEAEAGSHVSQAEQEQEQSTEPAAEHAEEVEKEEDEELALELTLGFAPVAVRPAGFHLSVRTAAEPAFVGLRFL

SEQ ID NO: 19125 - protein, 257 aa, Triticum aestivum
  peptide (1)..(257): Ceres Seq. ID no. 14302302
  misc_feature (1)..(60): Pfam Name: Pfam Description:  Protein of unknown function DUF260
  misc_feature (1)..(235): NCBI GI NO: 34914608 NR Description: P0520B06.17
  misc_feature (1)..(124): NCBI GI NO: 32395577 NR Description: seed specific protein Bn15D17A [Brassica napus]
  misc_feature (1)..(164): NCBI GI NO: 21554191 NR Description: unknown [Arabidopsis thaliana]
  misc_feature (1)..(164): NCBI GI NO: 18396229 NR Description: lateral organ boundaries
  misc_feature (1)..(231): NCBI GI NO: 34895540 NR Description: unnamed protein product
  misc_feature (1)..(128): NCBI GI NO: 15219829 NR Description: lateral organ boundaries (LOB) domain family
  misc_feature (1)..(92): NCBI GI NO: 15221429 NR Description: lateral organ boundaries
  misc_feature (1)..(142): NCBI GI NO: 15229644 NR Description: lateral organ boundaries
  misc_feature (1)..(142): NCBI GI NO: 21553886 NR Description: unknown [Arabidopsis thaliana]
  misc_feature (1)..(166): NCBI GI NO: 15240739 NR Description: lateral organ boundaries
MNLINAGTDDSLRPGIFRSLLYEACGRIVNPIYGSVGLLWSNNWQMCQAAVEAVLSGKPIVQVSSEDAAADRTPPLKAYDIRHVSTSPAADGRLHKVAKPGRTRFKRASSASSHHNPSSDSNNKPKPKPQPQTRAPTAEEELDRQHRKEMEEGASQRAPSHESSDSRHEDPVEPHCQQEASADTEAEAGSHVSQAEQEQEQSTEPAAEHAEEVEKEEDEELALELTLGFAPVAVRPAGFHLSVRTAAEPAFVGLRFL

SEQ ID NO: 19126 - DNA, 625 bp, Triticum aestivum
  misc_feature (1)..(625): Ceres Seq. ID no. 13596497
  misc_feature (549)..(549): n is a, c, t, g, unknown, or other
  misc_feature (548)..(548): n is a, c, t, g, unknown, or other
  misc_feature (547)..(547): n is a, c, t, g, unknown, or other
aaggagaaatctgctcgtcgtggtctctcttgtggagtgcggtttctaaattcgagagagaagagagtcctacccgctcctatctcctcttgcgagtccaatcgcgaggatagggatggagagctccaacggcaagccgccgcggggagaggaagaggggaaggcggcggggtcgatcggaggccacgagtcgctgcacaggctcctcgagtccaatctccctcccgagctcttcaaggaggcaagccggttgcttttggggttgaattgtgcacaccctcttgaggctatttccctgcctggggccaccactgatcttgctggagcgcataatttcgatgtgcaggcattccgttttaacgctgacaaagagcatatgagacagccgcggattgttcgagttggcttaattcagaactcaattgctgttccaacgacttgtcattttgctgatcaaaagaagtctatcatggagaaagtaaaaccccatcatagacgcagctgttgcttctggtgtcaatattttgtgcttacaggaagcctggannntgccatttgccttctgcacgcgtgaaaaacgatggtgtgagtttgctgagcctgttgatggagaatctactcagtt

SEQ ID NO: 19127 - protein, 152 aa, Triticum aestivum
  peptide (1)..(152): Ceres Seq. ID no. 13596498
  misc_feature (1)..(124): NCBI GI NO: 22775671 NR Description: contains ESTsAU094470
  misc_feature (14)..(124): NCBI GI NO: 30698009 NR Description: beta-ureidopropionase [Arabidopsis thaliana]
  misc_feature (25)..(123): NCBI GI NO: 21358471 NR Description: CG3027-PA [Drosophila melanogaster]
  misc_feature (25)..(123): NCBI GI NO: 40215848 NR Description: LD13390p [Drosophila melanogaster]
  misc_feature (25)..(123): NCBI GI NO: 14334061 NR Description: beta-alanine synthase [Dictyostelium discoideum]
  misc_feature (25)..(123): NCBI GI NO: 3108075 NR Description: putative beta-ureidopropionase [Manduca sexta]
  misc_feature (25)..(123): NCBI GI NO: 16758704 NR Description: ureidopropionase, beta [Rattus norvegicus]
  misc_feature (25)..(123): NCBI GI NO: 7706509 NR Description: beta-ureidopropionase [Homo sapiens]
  misc_feature (25)..(123): NCBI GI NO: 6288790 NR Description: beta-ureidopropionase [Homo sapiens]
  misc_feature (25)..(123): NCBI GI NO: 19527212 NR Description: expressed sequence AI195023 [Mus musculus]
  misc_feature (144)..(144): Xaa is any aa, unknown or other
  misc_feature (145)..(145): Xaa is any aa, unknown or other
MESSNGKPPRGEEEGKAAGSIGGHESLHRLLESNLPPELFKEASRLLLGLNCAHPLEAISLPGATTDLAGAHNFDVQAFRFNADKEHMRQPRIVRVGLIQNSIAVPTTCHFADQKKSIMEKVKPHHRRSCCFWCQYFVLTGSLXXAICLLHA

SEQ ID NO: 19128 - protein, 94 aa, Triticum aestivum
  peptide (1)..(94): Ceres Seq. ID no. 13596499
KEKSARRGLSCGVRFLNSREKRVLPAPISSCESNREDRDGELQRQAAAGRGRGEGGGVDRRPRVAAQAPRVQSPSRALQGGKPVAFGVELCTPS

SEQ ID NO: 19129 - DNA, 1641 bp, Triticum aestivum
  misc_feature (1)..(1641): Ceres Seq. ID no. 13596115
ccagctctccctctcgctcccggcggcggctgcctcgtcggagtcgcccctcgacggcggctagcctcgtcggacgcgctcctcgacggcggtgcgagcctccctgcgcggtctctggggattcttgcagaacttgagtacagtcctgttgggttcatcaccagctgttaaagagtgattcagtgatagagaccataacaggtggcagtggtaagcttagaggagatgtaccgtggtgggcttgaccgcttcaagaaagctcaggccttggagccgttctcggtgcagcagtctggttccggcgcaaagagcgtgccccctgcggtgaaagtgcagccagctccgttggtgccgccgcaaagctcacatcttggtcccagccagagtcagcatgctccgcagagtgctggctcaagcatgggcgggcaagaagctgctggggctcccagacccgccgggacacagtttggtggtgggcagtcgacgtggcaaccgccggactgggcaattgagccgcgccctggggtttactatcttgaggtgatgaaggatgggaatgccattgataggatcaatctggacaagaagaggcatatatttgggaggcaggtgcctgcttgcgagattgtcttggaccatcagtctgtctcacgccaacatgctgctgtcgttccacacaaaaatggaagcatctatgttatcgatttaggatctgtccatggtacatttgttgcaaacgagagattaaccaaggacaaccctgttgaacttgaagttggacagtcacttcgctttgctgcatcaaccagggcgtatgttctacgaaagaacacagctgcttttttccccactcaaagtctcccttcagatgtgagtttgccgtctcctccagactctgacgatgaagacgccgttgttgcatacaatacaatacttaatcgctatggtgttagcaaatcagacgtgccattgaagagaaaaggttcttctggggatgcttctgcttctgctgtaaatgatgacaaccaggcagtcggtagaccatcaaagagaatcagaaagcggagagtgtcatttagagatcaggttggtggagagcttattcaggtggttgggatttctgatggtgcagatgttgaaactgaaccaggcccagtaggtgtgaaggaaggcagtcttgttgggaagtacgagtctcttgtacaggtcactgtcataccaaaaggaaaggagcaaacttcgtcaaaggacagtgcctcccacagtggggtaacagataagctacaacatatgcttaacaaagttaaaagcacatccagaggtggtatgtatgatgacctttacggggactctgttccagcaaaactgggatcatcatgggcgtacaaatcagatggccagccagagcaagtcaaagttgttgatgaaaagaagtctagcagggacgttggtgcaaatccagctgatgatagtgatgatgacttgtttggcgactagttattttgtcacatttccagttagtagtgaattgccttgattacaaacacatggcagcagaaatgttatgtttgccttgggtattttgctttgttctacatgattgtatcctgctgtgaatcaaggtaatctcttttttgcctc

SEQ ID NO: 19130 - protein, 423 aa, Triticum aestivum
  peptide (1)..(423): Ceres Seq. ID no. 15221780
  misc_feature (123)..(191): Pfam Name: Pfam Description:  FHA domain
  misc_feature (1)..(423): NCBI GI NO: 24414059 NR Description: OJ1136_A10.4
  misc_feature (79)..(393): NCBI GI NO: 15238804 NR Description: expressed protein [Arabidopsis thaliana]
  misc_feature (77)..(286): NCBI GI NO: 27732693 NR Description: similar to expressed sequence AU044684
  misc_feature (77)..(286): NCBI GI NO: 13699256 NR Description: protein phosphatase 1 regulatory inhibitor subunit8 isoform alpha
  misc_feature (77)..(286): NCBI GI NO: 22122685 NR Description: RIKEN cDNA 6330548N22 [Mus musculus]
  misc_feature (77)..(286): NCBI GI NO: 27807053 NR Description: protein phosphatase 1, regulatory
  misc_feature (91)..(320): NCBI GI NO: 38174471 NR Description: Unknown (protein for MGC:69160) [Xenopus laevis]
  misc_feature (86)..(273): NCBI GI NO: 19922418 NR Description: Nuclear inhibitor of PP1 CG8980-PA
  misc_feature (17)..(295): NCBI GI NO: 34898708 NR Description: contains ESTs C72150
  misc_feature (91)..(286): NCBI GI NO: 32766445 NR Description: Unknown (protein for MGC:63827) [Danio rerio]
MYRGGLDRFKKAQALEPFSVQQSGSGAKSVPPAVKVQPAPLVPPQSSHLGPSQSQHAPQSAGSSMGGQEAAGAPRPAGTQFGGGQSTWQPPDWAIEPRPGVYYLEVMKDGNAIDRINLDKKRHIFGRQVPACEIVLDHQSVSRQHAAVVPHKNGSIYVIDLGSVHGTFVANERLTKDNPVELEVGQSLRFAASTRAYVLRKNTAAFFPTQSLPSDVSLPSPPDSDDEDAVVAYNTILNRYGVSKSDVPLKRKGSSGDASASAVNDDNQAVGRPSKRIRKRRVSFRDQVGGELIQVVGISDGADVETEPGPVGVKEGSLVGKYESLVQVTVIPKGKEQTSSKDSASHSGVTDKLQHMLNKVKSTSRGGMYDDLYGDSVPAKLGSSWAYKSDGQPEQVKVVDEKKSSRDVGANPADDSDDDLFGD

SEQ ID NO: 19131 - protein, 359 aa, Triticum aestivum
  peptide (1)..(359): Ceres Seq. ID no. 15221781
  misc_feature (59)..(127): Pfam Name: Pfam Description:  FHA domain
  misc_feature (1)..(359): NCBI GI NO: 24414059 NR Description: OJ1136_A10.4
  misc_feature (15)..(329): NCBI GI NO: 15238804 NR Description: expressed protein [Arabidopsis thaliana]
  misc_feature (13)..(222): NCBI GI NO: 27732693 NR Description: similar to expressed sequence AU044684
  misc_feature (13)..(222): NCBI GI NO: 13699256 NR Description: protein phosphatase 1 regulatory inhibitor subunit8 isoform alpha
  misc_feature (13)..(222): NCBI GI NO: 22122685 NR Description: RIKEN cDNA 6330548N22 [Mus musculus]
  misc_feature (13)..(222): NCBI GI NO: 27807053 NR Description: protein phosphatase 1, regulatory
  misc_feature (27)..(256): NCBI GI NO: 38174471 NR Description: Unknown (protein for MGC:69160) [Xenopus laevis]
  misc_feature (22)..(209): NCBI GI NO: 19922418 NR Description: Nuclear inhibitor of PP1 CG8980-PA
  misc_feature (1)..(231): NCBI GI NO: 34898708 NR Description: contains ESTs C72150
  misc_feature (27)..(222): NCBI GI NO: 32766445 NR Description: Unknown (protein for MGC:63827) [Danio rerio]
MGGQEAAGAPRPAGTQFGGGQSTWQPPDWAIEPRPGVYYLEVMKDGNAIDRINLDKKRHIFGRQVPACEIVLDHQSVSRQHAAVVPHKNGSIYVIDLGSVHGTFVANERLTKDNPVELEVGQSLRFAASTRAYVLRKNTAAFFPTQSLPSDVSLPSPPDSDDEDAVVAYNTILNRYGVSKSDVPLKRKGSSGDASASAVNDDNQAVGRPSKRIRKRRVSFRDQVGGELIQVVGISDGADVETEPGPVGVKEGSLVGKYESLVQVTVIPKGKEQTSSKDSASHSGVTDKLQHMLNKVKSTSRGGMYDDLYGDSVPAKLGSSWAYKSDGQPEQVKVVDEKKSSRDVGANPADDSDDDLFGD

SEQ ID NO: 19132 - protein, 317 aa, Triticum aestivum
  peptide (1)..(317): Ceres Seq. ID no. 15221782
  misc_feature (17)..(85): Pfam Name: Pfam Description:  FHA domain
  misc_feature (1)..(317): NCBI GI NO: 24414059 NR Description: OJ1136_A10.4
  misc_feature (1)..(287): NCBI GI NO: 15238804 NR Description: expressed protein [Arabidopsis thaliana]
  misc_feature (1)..(180): NCBI GI NO: 27732693 NR Description: similar to expressed sequence AU044684
  misc_feature (1)..(180): NCBI GI NO: 13699256 NR Description: protein phosphatase 1 regulatory inhibitor subunit8 isoform alpha
  misc_feature (1)..(180): NCBI GI NO: 22122685 NR Description: RIKEN cDNA 6330548N22 [Mus musculus]
  misc_feature (1)..(180): NCBI GI NO: 27807053 NR Description: protein phosphatase 1, regulatory
  misc_feature (1)..(214): NCBI GI NO: 38174471 NR Description: Unknown (protein for MGC:69160) [Xenopus laevis]
  misc_feature (1)..(167): NCBI GI NO: 19922418 NR Description: Nuclear inhibitor of PP1 CG8980-PA
  misc_feature (1)..(189): NCBI GI NO: 34898708 NR Description: contains ESTs C72150
  misc_feature (1)..(180): NCBI GI NO: 32766445 NR Description: Unknown (protein for MGC:63827) [Danio rerio]
MKDGNAIDRINLDKKRHIFGRQVPACEIVLDHQSVSRQHAAVVPHKNGSIYVIDLGSVHGTFVANERLTKDNPVELEVGQSLRFAASTRAYVLRKNTAAFFPTQSLPSDVSLPSPPDSDDEDAVVAYNTILNRYGVSKSDVPLKRKGSSGDASASAVNDDNQAVGRPSKRIRKRRVSFRDQVGGELIQVVGISDGADVETEPGPVGVKEGSLVGKYESLVQVTVIPKGKEQTSSKDSASHSGVTDKLQHMLNKVKSTSRGGMYDDLYGDSVPAKLGSSWAYKSDGQPEQVKVVDEKKSSRDVGANPADDSDDDLFGD

SEQ ID NO: 19133 - DNA, 1388 bp, Triticum aestivum
  misc_feature (1)..(1388): Ceres Seq. ID no. 13654715
atgcccttaggattcactcctgcgtgcgacacgccgaagcgagcaaccaaaagcaacctgaaatgttactcttgcttgcccaactcaagtcaaccatagctagctaaaatggtgctccactcagctatagctgcctagcaagctcagttccacgtctcgatctacctctctatatttaatttgcctccaaaatccatctatatatatatcgttttcgagctaaacaacacttcatccaaacaagcaaaggcaaatacccaagcggagctgcgaatagaaggctagaagccaacaatggcgccgctcgcacccgggaggccaccagcctgcctcctaacccttctctccgtcgtcgcggccctatccctggccgcgccgggcctggcggcggggaagaccggccaggtgacggtgttctggggacggaacaaggccgaggggtccctgcgcgaggcctgcgactccggcatgtacaccatggtcaccatctctttcctcgacgtcttcggcgccaacggaaagtaccaccttgacctctccggccacgacctctccgccgtcggcgccgacatcaagcactgccagtccaagggcgtccccgtctccctctccatcggcggctacggcgcccgctactcgctcccgtccaaccgctccgcgctcgacctcttcgaccacctctgggactcctacttcggcgggtccaagccgggcgtgccccgccccttgggcgacgcgtggctcgacggcgtcgacctcttcctggagcacggcacgccggcggaccgctacgacgtgctggcgctggagctggcgaagcacaacatccgcggcggcccggggaagccgctgcacctgacggcgacggtccggtgcgggtacccgccggcggcgcacgtggggcgagcgctggcgacggggatcttcgagcgcgtccacgtgaggatctacgaggagagcgacaaggcgtgcaaccagtacggggcgtgggaggaggcgtgggacaggtggacggcggcgtacccggccacccggttcttcatcgggctcacggcggacgacaagtcgtaccagtggatacaccccaagaacgtctactacggcatcacgccggtggtgcagaagaaggagaactatggcggggtcatgctctgggaccgatacttcgacaagcagagcgactacagtagctacatcaagtactacgcctgatcggagctatacttccacaagccacgctgcatgttgcatcaccgtcgatttgattttgatgtgttgttgcatacttgcaagcgagaataaagtgaggcttgtacttggataaataattgaacagattggtcgcacagttatggtttagttatcagctccatgactctctttttttc

SEQ ID NO: 19134 - protein, 305 aa, Triticum aestivum
  peptide (1)..(305): Ceres Seq. ID no. 13654716
  misc_feature (36)..(196): Pfam Name: Pfam Description:  Glycosyl hydrolases family 18
  misc_feature (1)..(305): NCBI GI NO: 20804336 NR Description: xylanase inhibitor protein I [Triticum aestivum]
  misc_feature (16)..(305): NCBI GI NO: 34913272 NR Description: putative xylanase inhibitor protein
  misc_feature (4)..(305): NCBI GI NO: 7451378 NR Description: chitinase (EC 3.2.1.14) III C10701 - rice
  misc_feature (4)..(299): NCBI GI NO: 7451377 NR Description: chitinase (EC 3.2.1.14) III C00481 - rice
  misc_feature (8)..(305): NCBI GI NO: 18693099 NR Description: putative xylanase inhibitor protein
  misc_feature (8)..(298): NCBI GI NO: 7451381 NR Description: chitinase (EC 3.2.1.14) III C10150 - rice
  misc_feature (8)..(302): NCBI GI NO: 4884516 NR Description: class III chitinase homologue (OsChib3H-b)
  misc_feature (8)..(302): NCBI GI NO: 7451380 NR Description: chitinase (EC 3.2.1.14) III C10923 - rice
  misc_feature (13)..(305): NCBI GI NO: 4884518 NR Description: class III chitinase homologue (OsChib3H-c)
  misc_feature (23)..(303): NCBI GI NO: 38346492 NR Description: OSJNBa0020I02.6
MAPLAPGRPPACLLTLLSVVAALSLAAPGLAAGKTGQVTVFWGRNKAEGSLREACDSGMYTMVTISFLDVFGANGKYHLDLSGHDLSAVGADIKHCQSKGVPVSLSIGGYGARYSLPSNRSALDLFDHLWDSYFGGSKPGVPRPLGDAWLDGVDLFLEHGTPADRYDVLALELAKHNIRGGPGKPLHLTATVRCGYPPAAHVGRALATGIFERVHVRIYEESDKACNQYGAWEEAWDRWTAAYPATRFFIGLTADDKSYQWIHPKNVYYGITPVVQKKENYGGVMLWDRYFDKQSDYSSYIKYYA

SEQ ID NO: 19135 - protein, 247 aa, Triticum aestivum
  peptide (1)..(247): Ceres Seq. ID no. 13654717
  misc_feature (1)..(138): Pfam Name: Pfam Description:  Glycosyl hydrolases family 18
  misc_feature (1)..(247): NCBI GI NO: 20804336 NR Description: xylanase inhibitor protein I [Triticum aestivum]
  misc_feature (1)..(247): NCBI GI NO: 34913272 NR Description: putative xylanase inhibitor protein
  misc_feature (1)..(247): NCBI GI NO: 7451378 NR Description: chitinase (EC 3.2.1.14) III C10701 - rice
  misc_feature (1)..(241): NCBI GI NO: 7451377 NR Description: chitinase (EC 3.2.1.14) III C00481 - rice
  misc_feature (1)..(247): NCBI GI NO: 18693099 NR Description: putative xylanase inhibitor protein
  misc_feature (1)..(240): NCBI GI NO: 7451381 NR Description: chitinase (EC 3.2.1.14) III C10150 - rice
  misc_feature (1)..(244): NCBI GI NO: 4884516 NR Description: class III chitinase homologue (OsChib3H-b)
  misc_feature (1)..(244): NCBI GI NO: 7451380 NR Description: chitinase (EC 3.2.1.14) III C10923 - rice
  misc_feature (1)..(247): NCBI GI NO: 4884518 NR Description: class III chitinase homologue (OsChib3H-c)
  misc_feature (1)..(245): NCBI GI NO: 38346492 NR Description: OSJNBa0020I02.6
MYTMVTISFLDVFGANGKYHLDLSGHDLSAVGADIKHCQSKGVPVSLSIGGYGARYSLPSNRSALDLFDHLWDSYFGGSKPGVPRPLGDAWLDGVDLFLEHGTPADRYDVLALELAKHNIRGGPGKPLHLTATVRCGYPPAAHVGRALATGIFERVHVRIYEESDKACNQYGAWEEAWDRWTAAYPATRFFIGLTADDKSYQWIHPKNVYYGITPVVQKKENYGGVMLWDRYFDKQSDYSSYIKYYA

SEQ ID NO: 19136 - protein, 244 aa, Triticum aestivum
  peptide (1)..(244): Ceres Seq. ID no. 13654718
  misc_feature (1)..(135): Pfam Name: Pfam Description:  Glycosyl hydrolases family 18
  misc_feature (1)..(244): NCBI GI NO: 20804336 NR Description: xylanase inhibitor protein I [Triticum aestivum]
  misc_feature (1)..(244): NCBI GI NO: 34913272 NR Description: putative xylanase inhibitor protein
  misc_feature (1)..(244): NCBI GI NO: 7451378 NR Description: chitinase (EC 3.2.1.14) III C10701 - rice
  misc_feature (1)..(238): NCBI GI NO: 7451377 NR Description: chitinase (EC 3.2.1.14) III C00481 - rice
  misc_feature (1)..(244): NCBI GI NO: 18693099 NR Description: putative xylanase inhibitor protein
  misc_feature (1)..(237): NCBI GI NO: 7451381 NR Description: chitinase (EC 3.2.1.14) III C10150 - rice
  misc_feature (1)..(241): NCBI GI NO: 4884516 NR Description: class III chitinase homologue (OsChib3H-b)
  misc_feature (1)..(241): NCBI GI NO: 7451380 NR Description: chitinase (EC 3.2.1.14) III C10923 - rice
  misc_feature (1)..(244): NCBI GI NO: 4884518 NR Description: class III chitinase homologue (OsChib3H-c)
  misc_feature (1)..(242): NCBI GI NO: 38346492 NR Description: OSJNBa0020I02.6
MVTISFLDVFGANGKYHLDLSGHDLSAVGADIKHCQSKGVPVSLSIGGYGARYSLPSNRSALDLFDHLWDSYFGGSKPGVPRPLGDAWLDGVDLFLEHGTPADRYDVLALELAKHNIRGGPGKPLHLTATVRCGYPPAAHVGRALATGIFERVHVRIYEESDKACNQYGAWEEAWDRWTAAYPATRFFIGLTADDKSYQWIHPKNVYYGITPVVQKKENYGGVMLWDRYFDKQSDYSSYIKYYA

SEQ ID NO: 19137 - DNA, 1288 bp, Triticum aestivum
  misc_feature (1)..(1288): Ceres Seq. ID no. 13662420
ccaaagcagttggtcgctcgctcgctcgctcgccaccgccgcgttggacttttccctcgccggagaaaccgccgcgaccacagccgcaaccgccgcagccgcctccggaggaggagggtagtaccaccagggaaggaggaggccatggcggggaggtacgaccgcaaccccttcgacgaggatgacgtcaaccccttcgcgggaggaggtgtacctccggcttctaattctcggatgccacctcttcctcacgagcctgctggattctataatgatcgtgctgctaccgtggacatacctcttggttcatcgaaggacttgaagcaaaaggagaaagaactgcagtcgaaggaggctgagcttaacaaacgggaaagagaacttaaaagaagggaagaagctgcagctagagctggtattgtcattgaaaccaaaaactggccaccatttatgcccatcattcatcatgacatttcaaatgagataccaatccacctacaaaggatgcagtaccttgcattttgttcattgttgggattgacgttatgcctcttttggaacatcattgcaactaccgcagcatggattaaaggggcaggtgttgtcatctggttgctagcaatcatctacttcatctctggtgtccctggggcgtatgtgttatggtatcggccgctttataatgcaatgaggactgaaagcgctctgaagtttggatggttttttctgctgtacttgatccatataatattctgcatctggtcagctgtgtctcccccatttcctttcaaaggaaaatctatcgctgggtttttgcctgcaattgacgtcataggcagtaatgttattgtggggatattttattttgttggattcggactgttctgccttgaagcactgctcagcattgtggtgatccagcaagtatacatgtacttccgtggaagtggaaaggctgcgcagatgaggcaagaggcagcacgcggtgccatgagatcggccttctgatagagcggtctcgttgatgaatggatgagaataggatgtgccaatcgttgatggcgtcttgtctttgtacatccctatacatatctctgtgcgtggctgtctggctgagagagaatacttgtagctatagatcttcgtgcattcttgtaatatatatgagtgcttcatttctttcctaggccccagatccatgtgctttatatgtagcttaatcttttgggagatacaacttccaacatcactattctgacgagcttgcttgcaatgtcactgtattatg

SEQ ID NO: 19138 - protein, 335 aa, Triticum aestivum
  peptide (1)..(335): Ceres Seq. ID no. 13662421
  misc_feature (143)..(317): Pfam Name: Pfam Description:  SCAMP family
  misc_feature (49)..(335): NCBI GI NO: 7109232 NR Description: secretory carrier membrane protein [Oryza sativa]
  misc_feature (49)..(334): NCBI GI NO: 15219893 NR Description: secretory carrier membrane protein
  misc_feature (54)..(335): NCBI GI NO: 34899754 NR Description: putative secretory carrier membrane protein
  misc_feature (49)..(334): NCBI GI NO: 15220305 NR Description: secretory carrier membrane protein -related
  misc_feature (52)..(334): NCBI GI NO: 15226410 NR Description: secretory carrier-associated membrane protein -related
  misc_feature (49)..(334): NCBI GI NO: 3941289 NR Description: similarity to SCAMP37 [Pisum sativum]
  misc_feature (52)..(334): NCBI GI NO: 18379111 NR Description: expressed protein [Arabidopsis thaliana]
  misc_feature (49)..(334): NCBI GI NO: 25402653 NR Description: hypothetical protein
  misc_feature (49)..(316): NCBI GI NO: 15222550 NR Description: secretory carrier membrane protein -related
  misc_feature (53)..(316): NCBI GI NO: 38347080 NR Description: OSJNBa0006A01.21
PKQLVARSLARHRRVGLFPRRRNRRDHSRNRRSRLRRRRVVPPGKEEAMAGRYDRNPFDEDDVNPFAGGGVPPASNSRMPPLPHEPAGFYNDRAATVDIPLGSSKDLKQKEKELQSKEAELNKRERELKRREEAAARAGIVIETKNWPPFMPIIHHDISNEIPIHLQRMQYLAFCSLLGLTLCLFWNIIATTAAWIKGAGVVIWLLAIIYFISGVPGAYVLWYRPLYNAMRTESALKFGWFFLLYLIHIIFCIWSAVSPPFPFKGKSIAGFLPAIDVIGSNVIVGIFYFVGFGLFCLEALLSIVVIQQVYMYFRGSGKAAQMRQEAARGAMRSAF

SEQ ID NO: 19139 - protein, 287 aa, Triticum aestivum
  peptide (1)..(287): Ceres Seq. ID no. 13662422
  misc_feature (95)..(269): Pfam Name: Pfam Description:  SCAMP family
  misc_feature (1)..(287): NCBI GI NO: 7109232 NR Description: secretory carrier membrane protein [Oryza sativa]
  misc_feature (1)..(286): NCBI GI NO: 15219893 NR Description: secretory carrier membrane protein
  misc_feature (6)..(287): NCBI GI NO: 34899754 NR Description: putative secretory carrier membrane protein
  misc_feature (1)..(286): NCBI GI NO: 15220305 NR Description: secretory carrier membrane protein -related
  misc_feature (4)..(286): NCBI GI NO: 15226410 NR Description: secretory carrier-associated membrane protein -related
  misc_feature (1)..(286): NCBI GI NO: 3941289 NR Description: similarity to SCAMP37 [Pisum sativum]
  misc_feature (4)..(286): NCBI GI NO: 18379111 NR Description: expressed protein [Arabidopsis thaliana]
  misc_feature (1)..(286): NCBI GI NO: 25402653 NR Description: hypothetical protein
  misc_feature (1)..(268): NCBI GI NO: 15222550 NR Description: secretory carrier membrane protein -related
  misc_feature (5)..(268): NCBI GI NO: 38347080 NR Description: OSJNBa0006A01.21
MAGRYDRNPFDEDDVNPFAGGGVPPASNSRMPPLPHEPAGFYNDRAATVDIPLGSSKDLKQKEKELQSKEAELNKRERELKRREEAAARAGIVIETKNWPPFMPIIHHDISNEIPIHLQRMQYLAFCSLLGLTLCLFWNIIATTAAWIKGAGVVIWLLAIIYFISGVPGAYVLWYRPLYNAMRTESALKFGWFFLLYLIHIIFCIWSAVSPPFPFKGKSIAGFLPAIDVIGSNVIVGIFYFVGFGLFCLEALLSIVVIQQVYMYFRGSGKAAQMRQEAARGAMRSAF

SEQ ID NO: 19140 - protein, 257 aa, Triticum aestivum
  peptide (1)..(257): Ceres Seq. ID no. 13662423
  misc_feature (65)..(239): Pfam Name: Pfam Description:  SCAMP family
  misc_feature (1)..(257): NCBI GI NO: 7109232 NR Description: secretory carrier membrane protein [Oryza sativa]
  misc_feature (1)..(256): NCBI GI NO: 15219893 NR Description: secretory carrier membrane protein
  misc_feature (1)..(257): NCBI GI NO: 34899754 NR Description: putative secretory carrier membrane protein
  misc_feature (1)..(256): NCBI GI NO: 15220305 NR Description: secretory carrier membrane protein -related
  misc_feature (1)..(256): NCBI GI NO: 15226410 NR Description: secretory carrier-associated membrane protein -related
  misc_feature (1)..(256): NCBI GI NO: 3941289 NR Description: similarity to SCAMP37 [Pisum sativum]
  misc_feature (1)..(256): NCBI GI NO: 18379111 NR Description: expressed protein [Arabidopsis thaliana]
  misc_feature (1)..(256): NCBI GI NO: 25402653 NR Description: hypothetical protein
  misc_feature (1)..(238): NCBI GI NO: 15222550 NR Description: secretory carrier membrane protein -related
  misc_feature (1)..(238): NCBI GI NO: 38347080 NR Description: OSJNBa0006A01.21
MPPLPHEPAGFYNDRAATVDIPLGSSKDLKQKEKELQSKEAELNKRERELKRREEAAARAGIVIETKNWPPFMPIIHHDISNEIPIHLQRMQYLAFCSLLGLTLCLFWNIIATTAAWIKGAGVVIWLLAIIYFISGVPGAYVLWYRPLYNAMRTESALKFGWFFLLYLIHIIFCIWSAVSPPFPFKGKSIAGFLPAIDVIGSNVIVGIFYFVGFGLFCLEALLSIVVIQQVYMYFRGSGKAAQMRQEAARGAMRSAF

SEQ ID NO: 19141 - DNA, 1619 bp, Triticum aestivum
  misc_feature (1)..(1619): Ceres Seq. ID no. 13503499
acccacgccacgctcgcgctcaaagcctggtcggtaacagagccaaggtgccatttctcgacccccctctccacatacctctcctagctagctacccatccgcttccacttggccatttcccatcccacatcctgcttgcttccggagctcatcagcatcgcttggcctaaggctcgcttcaactgcctgctcttctcagctcatcccctgctggtgtagcatttggagtctcggagactttgaattggctcgccaagaacgagtcctatggaagaaagctccatgaaaagagaagccatgcctcgactcctggatctcatcccggacgagaaagaatggagcctgagaggaggagcgccagggcagggcaggtcaaaaaacacaggcttcgggagcgacgaggacgagaaactggagctgaagcttggccttccaggcctcgtacaagaggagccagcggccagctcaagagagaagagggtgcatcaggagagcccggccctctaccttgggtacccccctagacactccacggccaccacaacgacgaccaccaccggagcaaagagggggttcctggacacggttgaggccaaagcacaaggttatgagaaggagcaggcgagagcagcaacatgtgggaaggaactggcgatggaggaaaatacagaggccgtcggtgagaggaagaaagggtgctgtcccccaccaccaccagcacatgcccctcctgctacacctgcgcgcaacatcggcaacagaccgcaggcgcggggaagaggggctgcaggtccagtggtcggctggcctccaatccggtcattcaggagaaaccttgcaagcactagtgcatccaaacagccccctgaaccacaaatcggtgaagccgatgccaaggccgtgcttgactgcaagaaaagccctcttgtgaaaatcaacatggatgggatccccattggaaggaaagttgatcttgcagcatgtgacagctacgggagactttcattggctgtcaaagatctcttccacgggtttcttcaagtgcaaagggacccgtcgaaggttgaccgtacacagcaaggagcagatgaaaaaatattttcgcagttgctagacgggtccggtgaatatactctagtttacgaagacagtgaaggagacaggatgctggttggggatgtcccttggaatgtgtttgtttcaaccgctaaaaggctgagggttctgagaagctcagagctttcccatgatctgattggagctactcctgagagagcagcaaatggctgaaatggtgacaccttttcaaccatttggaatgttgctcactgaagccgtaaactaaaggaactcctaagaagcaggggagacctaaatcctgtggtcagtttggagatcgttatcctttttgaggattagtagtttggtaacctttttttcttgtagtgagatgaattagcataccgcagatgcatggagatatcctgcctattttgtaaattaggctaccttgtatttaacgctatagttctcgattcagttacatagatttggcgcctattttctctgacaaatttgtaacctgacatgcaaatctgttcatgacaaaagaggaccc

SEQ ID NO: 19142 - protein, 340 aa, Triticum aestivum
  peptide (1)..(340): Ceres Seq. ID no. 15223236
  misc_feature (49)..(333): Pfam Name: Pfam Description:  AUX/IAA family
  misc_feature (1)..(333): NCBI GI NO: 34909384 NR Description: putative phytochrome-associated protein
  misc_feature (113)..(325): NCBI GI NO: 34906394 NR Description: P0710E05.9
  misc_feature (152)..(329): NCBI GI NO: 4093155 NR Description: phytochrome-associated protein 1
  misc_feature (152)..(329): NCBI GI NO: 15228226 NR Description: auxin-responsive protein
  misc_feature (152)..(329): NCBI GI NO: 21593333 NR Description: phytochrome-associated protein 1 (PAP1)
  misc_feature (171)..(329): NCBI GI NO: 25296228 NR Description: auxin-induced protein IAA18
  misc_feature (171)..(329): NCBI GI NO: 21594025 NR Description: auxin regulated protein IAA18, putative
  misc_feature (171)..(329): NCBI GI NO: 15218080 NR Description: auxin-responsive protein IAA18
  misc_feature (50)..(334): NCBI GI NO: 29465672 NR Description: Aux/IAA protein [Vitis vinifera]
  misc_feature (50)..(334): NCBI GI NO: 6136832 NR Description: CS-IAA2 [Cucumis sativus]
MEESSMKREAMPRLLDLIPDEKEWSLRGGAPGQGRSKNTGFGSDEDEKLELKLGLPGLVQEEPAASSREKRVHQESPALYLGYPPRHSTATTTTTTTGAKRGFLDTVEAKAQGYEKEQARAATCGKELAMEENTEAVGERKKGCCPPPPPAHAPPATPARNIGNRPQARGRGAAGPVVGWPPIRSFRRNLASTSASKQPPEPQIGEADAKAVLDCKKSPLVKINMDGIPIGRKVDLAACDSYGRLSLAVKDLFHGFLQVQRDPSKVDRTQQGADEKIFSQLLDGSGEYTLVYEDSEGDRMLVGDVPWNVFVSTAKRLRVLRSSELSHDLIGATPERAANG

SEQ ID NO: 19143 - protein, 335 aa, Triticum aestivum
  peptide (1)..(335): Ceres Seq. ID no. 15223237
  misc_feature (44)..(328): Pfam Name: Pfam Description:  AUX/IAA family
  misc_feature (1)..(328): NCBI GI NO: 34909384 NR Description: putative phytochrome-associated protein
  misc_feature (108)..(320): NCBI GI NO: 34906394 NR Description: P0710E05.9
  misc_feature (147)..(324): NCBI GI NO: 4093155 NR Description: phytochrome-associated protein 1
  misc_feature (147)..(324): NCBI GI NO: 21593333 NR Description: phytochrome-associated protein 1 (PAP1)
  misc_feature (147)..(324): NCBI GI NO: 15228226 NR Description: auxin-responsive protein
  misc_feature (166)..(324): NCBI GI NO: 25296228 NR Description: auxin-induced protein IAA18
  misc_feature (166)..(324): NCBI GI NO: 21594025 NR Description: auxin regulated protein IAA18, putative
  misc_feature (166)..(324): NCBI GI NO: 15218080 NR Description: auxin-responsive protein IAA18
  misc_feature (45)..(329): NCBI GI NO: 29465672 NR Description: Aux/IAA protein [Vitis vinifera]
  misc_feature (45)..(329): NCBI GI NO: 6136832 NR Description: CS-IAA2 [Cucumis sativus]
MKREAMPRLLDLIPDEKEWSLRGGAPGQGRSKNTGFGSDEDEKLELKLGLPGLVQEEPAASSREKRVHQESPALYLGYPPRHSTATTTTTTTGAKRGFLDTVEAKAQGYEKEQARAATCGKELAMEENTEAVGERKKGCCPPPPPAHAPPATPARNIGNRPQARGRGAAGPVVGWPPIRSFRRNLASTSASKQPPEPQIGEADAKAVLDCKKSPLVKINMDGIPIGRKVDLAACDSYGRLSLAVKDLFHGFLQVQRDPSKVDRTQQGADEKIFSQLLDGSGEYTLVYEDSEGDRMLVGDVPWNVFVSTAKRLRVLRSSELSHDLIGATPERAANG

SEQ ID NO: 19144 - protein, 330 aa, Triticum aestivum
  peptide (1)..(330): Ceres Seq. ID no. 15223238
  misc_feature (39)..(323): Pfam Name: Pfam Description:  AUX/IAA family
  misc_feature (1)..(323): NCBI GI NO: 34909384 NR Description: putative phytochrome-associated protein
  misc_feature (103)..(315): NCBI GI NO: 34906394 NR Description: P0710E05.9
  misc_feature (142)..(319): NCBI GI NO: 4093155 NR Description: phytochrome-associated protein 1
  misc_feature (142)..(319): NCBI GI NO: 21593333 NR Description: phytochrome-associated protein 1 (PAP1)
  misc_feature (142)..(319): NCBI GI NO: 15228226 NR Description: auxin-responsive protein
  misc_feature (161)..(319): NCBI GI NO: 25296228 NR Description: auxin-induced protein IAA18
  misc_feature (161)..(319): NCBI GI NO: 21594025 NR Description: auxin regulated protein IAA18, putative
  misc_feature (161)..(319): NCBI GI NO: 15218080 NR Description: auxin-responsive protein IAA18
  misc_feature (40)..(324): NCBI GI NO: 29465672 NR Description: Aux/IAA protein [Vitis vinifera]
  misc_feature (40)..(324): NCBI GI NO: 6136832 NR Description: CS-IAA2 [Cucumis sativus]
MPRLLDLIPDEKEWSLRGGAPGQGRSKNTGFGSDEDEKLELKLGLPGLVQEEPAASSREKRVHQESPALYLGYPPRHSTATTTTTTTGAKRGFLDTVEAKAQGYEKEQARAATCGKELAMEENTEAVGERKKGCCPPPPPAHAPPATPARNIGNRPQARGRGAAGPVVGWPPIRSFRRNLASTSASKQPPEPQIGEADAKAVLDCKKSPLVKINMDGIPIGRKVDLAACDSYGRLSLAVKDLFHGFLQVQRDPSKVDRTQQGADEKIFSQLLDGSGEYTLVYEDSEGDRMLVGDVPWNVFVSTAKRLRVLRSSELSHDLIGATPERAANG

SEQ ID NO: 19145 - DNA, 1438 bp, Triticum aestivum
  misc_feature (1)..(1438): Ceres Seq. ID no. 14302283
ctacaaaacacacgccaccaccctattcctgcctctccactcctcccctctcccctcctcttctcttctctccactgcccaacttttgctatagacaagaaagaacctaagctaggtagctttcctccagagcagagcaatggccatgcatcctcttgcccaggggcacccgcaagcctggccatggggggtagccatgtacacgaacatacactaccaccaccagtacgagagagagcacctgttcgagaaatcctttacgcccagtgacgtgggcaagctcaacaggctggtgatccccaagcagcacgcggagaggtacttccccctcaacggcggagactcccccggtgacaaggacctgctcctgtctttcgaggacgaggccggcaagccgtggcggttccggtactcgtactggacgagcagccagagctacgttctcaccaagggctggagcaggtacgtcaaggagaagcagcttgacgccggagacatcgtgcacttcgagagggtgcgcggccttggcacaggcgaccggctcttcatccactgcaggcgccgtggcgagagcgcgccgccaccacctgtccgcgtacctccgcccgctctgaacgccggggagcagcagccttggagcccgatgtgctatagcacatcaggatcataccctaccagccctgccaactcccatgcctatcgccgctccgtggagcaagatcacagcgagatgctgcatgcaggtgactcgccgagagaggcagacccaagagcagcacggcatcggggccgccgtcgagacgtctacggctgtttggcgtcaacctcgactgcggtccggagccagaggcagaggcagcaacgccaatgtacggctacacccaccagagcccctacgctgcagcagtggccacggtgccaacttactggggcagttcataagatggtgaggtctgaagccatgctcgagtatcctaacaaccagcagtgaaactagtcactactcccaccagccagcctactagctatgctactctggactgagtgacaggcttgaattgaactctggaagaggaagtggaagtggaagatcccttgtttcccgggcaatcttccttccatccacagagtgccctttttttttcctgttttctttcttctggtcttccagagaccctattcgatcacagtacggggcccttagcaggtggcaggtttcaggaaacgtcaggttgaaaaggtgagggaagtgggagagatagagggatggtgacacacatgaaaaacaaaagggcatgcttagcaagcatgcatgtatgtatgtgtcatctgtatgtactgggtccaagaacaaaccatgaagttgatgtatcctctccagcctcctcaagaaacaaagtcatatcccccatgggccatggccatggagattttgtcc

SEQ ID NO: 19146 - protein, 283 aa, Triticum aestivum
  peptide (1)..(283): Ceres Seq. ID no. 14302284
  misc_feature (35)..(145): Pfam Name: Pfam Description:  B3 DNA binding domain
  misc_feature (23)..(199): NCBI GI NO: 30681787 NR Description: DNA-binding protein, putative
  misc_feature (23)..(153): NCBI GI NO: 30681791 NR Description: DNA-binding protein, putative
  misc_feature (31)..(146): NCBI GI NO: 25408446 NR Description: probable RAV2-like DNA binding protein
  misc_feature (31)..(146): NCBI GI NO: 30686669 NR Description: DNA-binding protein, putative
  misc_feature (31)..(146): NCBI GI NO: 30686674 NR Description: DNA-binding protein, putative
  misc_feature (22)..(184): NCBI GI NO: 15239984 NR Description: DNA-binding protein, putative
  misc_feature (31)..(184): NCBI GI NO: 32492293 NR Description: OSJNBa0088A01.1
  misc_feature (31)..(150): NCBI GI NO: 34902226 NR Description: Putative RAV-like B3 domain DNA binding protein
  misc_feature (31)..(169): NCBI GI NO: 37536454 NR Description: putative DNA-binding protein
  misc_feature (31)..(150): NCBI GI NO: 18407193 NR Description: DNA-binding protein, putative
MAMHPLAQGHPQAWPWGVAMYTNIHYHHQYEREHLFEKSFTPSDVGKLNRLVIPKQHAERYFPLNGGDSPGDKDLLLSFEDEAGKPWRFRYSYWTSSQSYVLTKGWSRYVKEKQLDAGDIVHFERVRGLGTGDRLFIHCRRRGESAPPPPVRVPPPALNAGEQQPWSPMCYSTSGSYPTSPANSHAYRRSVEQDHSEMLHAGDSPREADPRAARHRGRRRDVYGCLASTSTAVRSQRQRQQRQCTATPTRAPTLQQWPRCQLTGAVHKMVRSEAMLEYPNNQQ

SEQ ID NO: 19147 - protein, 281 aa, Triticum aestivum
  peptide (1)..(281): Ceres Seq. ID no. 14302285
  misc_feature (33)..(143): Pfam Name: Pfam Description:  B3 DNA binding domain
  misc_feature (21)..(197): NCBI GI NO: 30681787 NR Description: DNA-binding protein, putative
  misc_feature (21)..(151): NCBI GI NO: 30681791 NR Description: DNA-binding protein, putative
  misc_feature (29)..(144): NCBI GI NO: 25408446 NR Description: probable RAV2-like DNA binding protein
  misc_feature (29)..(144): NCBI GI NO: 30686669 NR Description: DNA-binding protein, putative
  misc_feature (29)..(144): NCBI GI NO: 30686674 NR Description: DNA-binding protein, putative
  misc_feature (20)..(182): NCBI GI NO: 15239984 NR Description: DNA-binding protein, putative
  misc_feature (29)..(182): NCBI GI NO: 32492293 NR Description: OSJNBa0088A01.1
  misc_feature (29)..(148): NCBI GI NO: 34902226 NR Description: Putative RAV-like B3 domain DNA binding protein
  misc_feature (29)..(167): NCBI GI NO: 37536454 NR Description: putative DNA-binding protein
  misc_feature (29)..(148): NCBI GI NO: 18407193 NR Description: DNA-binding protein, putative
MHPLAQGHPQAWPWGVAMYTNIHYHHQYEREHLFEKSFTPSDVGKLNRLVIPKQHAERYFPLNGGDSPGDKDLLLSFEDEAGKPWRFRYSYWTSSQSYVLTKGWSRYVKEKQLDAGDIVHFERVRGLGTGDRLFIHCRRRGESAPPPPVRVPPPALNAGEQQPWSPMCYSTSGSYPTSPANSHAYRRSVEQDHSEMLHAGDSPREADPRAARHRGRRRDVYGCLASTSTAVRSQRQRQQRQCTATPTRAPTLQQWPRCQLTGAVHKMVRSEAMLEYPNNQQ

SEQ ID NO: 19148 - protein, 264 aa, Triticum aestivum
  peptide (1)..(264): Ceres Seq. ID no. 14302286
  misc_feature (16)..(126): Pfam Name: Pfam Description:  B3 DNA binding domain
  misc_feature (4)..(180): NCBI GI NO: 30681787 NR Description: DNA-binding protein, putative
  misc_feature (4)..(134): NCBI GI NO: 30681791 NR Description: DNA-binding protein, putative
  misc_feature (12)..(127): NCBI GI NO: 25408446 NR Description: probable RAV2-like DNA binding protein
  misc_feature (12)..(127): NCBI GI NO: 30686674 NR Description: DNA-binding protein, putative
  misc_feature (12)..(127): NCBI GI NO: 30686669 NR Description: DNA-binding protein, putative
  misc_feature (3)..(165): NCBI GI NO: 15239984 NR Description: DNA-binding protein, putative
  misc_feature (12)..(165): NCBI GI NO: 32492293 NR Description: OSJNBa0088A01.1
  misc_feature (12)..(131): NCBI GI NO: 34902226 NR Description: Putative RAV-like B3 domain DNA binding protein
  misc_feature (12)..(150): NCBI GI NO: 37536454 NR Description: putative DNA-binding protein
  misc_feature (12)..(131): NCBI GI NO: 18407193 NR Description: DNA-binding protein, putative
MYTNIHYHHQYEREHLFEKSFTPSDVGKLNRLVIPKQHAERYFPLNGGDSPGDKDLLLSFEDEAGKPWRFRYSYWTSSQSYVLTKGWSRYVKEKQLDAGDIVHFERVRGLGTGDRLFIHCRRRGESAPPPPVRVPPPALNAGEQQPWSPMCYSTSGSYPTSPANSHAYRRSVEQDHSEMLHAGDSPREADPRAARHRGRRRDVYGCLASTSTAVRSQRQRQQRQCTATPTRAPTLQQWPRCQLTGAVHKMVRSEAMLEYPNNQQ

SEQ ID NO: 19149 - DNA, 1854 bp, Triticum aestivum
  misc_feature (1)..(1854): Ceres Seq. ID no. 15176087
attatcgagcttctgcttcccaccttcttctcatagtagctgtctgttcgatccgtcaaatccggccagccgatcttcaataagctgcaccactgccaactagtactgccaaccccacggacggatccaagagagagcggccggccatggaagacgccgtcctcctcaccgtggccaccaccgtgtccatcctctgctgcacgctactcctccgtgcagctcgctcccatcactccaagtccaagctcgtcaccaccgtcccgccgccttccccgtggcggctcccgctcgtgggcaacctgcaccagctcgcgggcggccgcctcccgcaccgcacgctgtccgccctcgccgccgcccacggccccgtcatgctcctccgcctcggccaggtcccggccgtcgtcgtgtcctcgcccgacgccgcgcgggaggtgatgctggagcaggaccacgtcttcgccacccgcccgtcgctcgccatcccctccaagctcttctacggctgcaccgacgtcgccttcgccccggacggcccctactggctgcacgcgcggaagacgtgcgtgctccacctcctcagccccgccagggtgcgggcctaccgcgccgtccgggaggaggaggtgggcgcgctcctggacaaggtccggcggcaggcgcgcgtcgtgaacctgagcgagctcctcgccgggtttgccaaggacgtgatcgggcggatcgtgttcggggcgagcgccgccacgcgcgccgacaggtggggcgccaaggtggacgcgctgctggaggagggcaacgcgctgctcggaacgttccacgtcggcgactacttcccgagactggcgtgggtcggcgccctggacggcaccgacgccaaggtcggcaaggcgttcgacaggatcgacgccgttctcgaggagatcgtcgacgccgcggagagacgaatgggccgagtccacggaggagacgcgctggggctgcacgacagcaccttcgtcgacgtgctgctgtctctcggcaacaacacctccggcaacggcaccggcggcgcgtccccggagcggcggttcacgagggacaacgtcaaggggctcctagcgaatctcttcggggcaggggcagactccaccatcatcgtgctcgaatgggccatggcagagctgctccgcaacaaggaggccatggagaagctacaagacgagctaaggagtagatccgtaagcaccaactccgatatgatcaccgaagaagatttacaggggatggtctacctgaaagcggtgataaaggagacaatgcggctgcaccctcccgggccgctgctgatcccccgcgaggccatggagtccgcgaggatccagcagtacgacgtgccgagcaagaccatggtgatcgtcaacgcgtgggccatcggaagggacccgggcagctgggagtctccggaggagttccgaccggagaggttcctcggcaccggcggcgaggtggacttccggggccggcatttccagctcgtgccgttcggttccgggaggagggtgtgcccggggatcaacttcaccatgtccatcatggaggttgcgattgccaacctcgtcggccggttcgactgggcgctgccggagggcgcggcagcggcggtggacatggaggaggcgcctgggatcacctcacggaagagggttccgcttcacgtcttggctacaccgcgggcgcaggcatcgtgcaatcacgacgtgtagttcggaattcatattgtgctcctccaaatggttctagcaatttgaaggctcatttctttaacaatactttttgtattaatatcaagaagatataagtatgcttgtcctcttc

SEQ ID NO: 19150 - protein, 531 aa, Triticum aestivum
  peptide (1)..(531): Ceres Seq. ID no. 15176088
  misc_feature (40)..(518): Pfam Name: Pfam Description:  Cytochrome P450
  misc_feature (4)..(519): NCBI GI NO: 25282608 NR Description: cytochrome P-450LXXIA1 [similarity] - avocado
  misc_feature (14)..(521): NCBI GI NO: 584863 NR Description: Cytochrome P450 71A4 (CYPLXXIA4) (P-450EG2)
  misc_feature (28)..(521): NCBI GI NO: 584861 NR Description: Cytochrome P450 71A2 (CYPLXXIA2) (P-450EG4)
  misc_feature (9)..(288): NCBI GI NO: 15723953 NR Description: menthofuran synthase [Mentha x piperita]
  misc_feature (252)..(522): NCBI GI NO: 15723953 NR Description: menthofuran synthase [Mentha x piperita]
  misc_feature (4)..(492): NCBI GI NO: 117188 NR Description: CYTOCHROME P450 71A1 (CYPLXXIA1) (ARP-2)
  misc_feature (58)..(521): NCBI GI NO: 40645046 NR Description: cytochrome P450 [Asparagus officinalis]
  misc_feature (5)..(522): NCBI GI NO: 34904242 NR Description: putative cytochrome P-450LXXIA1 (cyp71A1) family
  misc_feature (40)..(300): NCBI GI NO: 34904240 NR Description: putative cytochrome P-450LXXIA1 (cyp71A1) family
  misc_feature (307)..(521): NCBI GI NO: 34904240 NR Description: putative cytochrome P-450LXXIA1 (cyp71A1) family
MEDAVLLTVATTVSILCCTLLLRAARSHHSKSKLVTTVPPPSPWRLPLVGNLHQLAGGRLPHRTLSALAAAHGPVMLLRLGQVPAVVVSSPDAAREVMLEQDHVFATRPSLAIPSKLFYGCTDVAFAPDGPYWLHARKTCVLHLLSPARVRAYRAVREEEVGALLDKVRRQARVVNLSELLAGFAKDVIGRIVFGASAATRADRWGAKVDALLEEGNALLGTFHVGDYFPRLAWVGALDGTDAKVGKAFDRIDAVLEEIVDAAERRMGRVHGGDALGLHDSTFVDVLLSLGNNTSGNGTGGASPERRFTRDNVKGLLANLFGAGADSTIIVLEWAMAELLRNKEAMEKLQDELRSRSVSTNSDMITEEDLQGMVYLKAVIKETMRLHPPGPLLIPREAMESARIQQYDVPSKTMVIVNAWAIGRDPGSWESPEEFRPERFLGTGGEVDFRGRHFQLVPFGSGRRVCPGINFTMSIMEVAIANLVGRFDWALPEGAAAAVDMEEAPGITSRKRVPLHVLATPRAQASCNHDV

SEQ ID NO: 19151 - protein, 456 aa, Triticum aestivum
  peptide (1)..(456): Ceres Seq. ID no. 15176089
  misc_feature (1)..(443): Pfam Name: Pfam Description:  Cytochrome P450
  misc_feature (1)..(444): NCBI GI NO: 25282608 NR Description: cytochrome P-450LXXIA1 [similarity] - avocado
  misc_feature (1)..(446): NCBI GI NO: 584863 NR Description: Cytochrome P450 71A4 (CYPLXXIA4) (P-450EG2)
  misc_feature (1)..(446): NCBI GI NO: 584861 NR Description: Cytochrome P450 71A2 (CYPLXXIA2) (P-450EG4)
  misc_feature (1)..(213): NCBI GI NO: 15723953 NR Description: menthofuran synthase [Mentha x piperita]
  misc_feature (177)..(447): NCBI GI NO: 15723953 NR Description: menthofuran synthase [Mentha x piperita]
  misc_feature (1)..(417): NCBI GI NO: 117188 NR Description: CYTOCHROME P450 71A1 (CYPLXXIA1) (ARP-2)
  misc_feature (1)..(446): NCBI GI NO: 40645046 NR Description: cytochrome P450 [Asparagus officinalis]
  misc_feature (1)..(447): NCBI GI NO: 34904242 NR Description: putative cytochrome P-450LXXIA1 (cyp71A1) family
  misc_feature (1)..(225): NCBI GI NO: 34904240 NR Description: putative cytochrome P-450LXXIA1 (cyp71A1) family
  misc_feature (232)..(446): NCBI GI NO: 34904240 NR Description: putative cytochrome P-450LXXIA1 (cyp71A1) family
MLLRLGQVPAVVVSSPDAAREVMLEQDHVFATRPSLAIPSKLFYGCTDVAFAPDGPYWLHARKTCVLHLLSPARVRAYRAVREEEVGALLDKVRRQARVVNLSELLAGFAKDVIGRIVFGASAATRADRWGAKVDALLEEGNALLGTFHVGDYFPRLAWVGALDGTDAKVGKAFDRIDAVLEEIVDAAERRMGRVHGGDALGLHDSTFVDVLLSLGNNTSGNGTGGASPERRFTRDNVKGLLANLFGAGADSTIIVLEWAMAELLRNKEAMEKLQDELRSRSVSTNSDMITEEDLQGMVYLKAVIKETMRLHPPGPLLIPREAMESARIQQYDVPSKTMVIVNAWAIGRDPGSWESPEEFRPERFLGTGGEVDFRGRHFQLVPFGSGRRVCPGINFTMSIMEVAIANLVGRFDWALPEGAAAAVDMEEAPGITSRKRVPLHVLATPRAQASCNHDV

SEQ ID NO: 19152 - protein, 434 aa, Triticum aestivum
  peptide (1)..(434): Ceres Seq. ID no. 15176090
  misc_feature (1)..(421): Pfam Name: Pfam Description:  Cytochrome P450
  misc_feature (1)..(422): NCBI GI NO: 25282608 NR Description: cytochrome P-450LXXIA1 [similarity] - avocado
  misc_feature (1)..(424): NCBI GI NO: 584863 NR Description: Cytochrome P450 71A4 (CYPLXXIA4) (P-450EG2)
  misc_feature (1)..(424): NCBI GI NO: 584861 NR Description: Cytochrome P450 71A2 (CYPLXXIA2) (P-450EG4)
  misc_feature (1)..(191): NCBI GI NO: 15723953 NR Description: menthofuran synthase [Mentha x piperita]
  misc_feature (155)..(425): NCBI GI NO: 15723953 NR Description: menthofuran synthase [Mentha x piperita]
  misc_feature (1)..(395): NCBI GI NO: 117188 NR Description: CYTOCHROME P450 71A1 (CYPLXXIA1) (ARP-2)
  misc_feature (1)..(424): NCBI GI NO: 40645046 NR Description: cytochrome P450 [Asparagus officinalis]
  misc_feature (1)..(425): NCBI GI NO: 34904242 NR Description: putative cytochrome P-450LXXIA1 (cyp71A1) family
  misc_feature (1)..(203): NCBI GI NO: 34904240 NR Description: putative cytochrome P-450LXXIA1 (cyp71A1) family
  misc_feature (210)..(424): NCBI GI NO: 34904240 NR Description: putative cytochrome P-450LXXIA1 (cyp71A1) family
MLEQDHVFATRPSLAIPSKLFYGCTDVAFAPDGPYWLHARKTCVLHLLSPARVRAYRAVREEEVGALLDKVRRQARVVNLSELLAGFAKDVIGRIVFGASAATRADRWGAKVDALLEEGNALLGTFHVGDYFPRLAWVGALDGTDAKVGKAFDRIDAVLEEIVDAAERRMGRVHGGDALGLHDSTFVDVLLSLGNNTSGNGTGGASPERRFTRDNVKGLLANLFGAGADSTIIVLEWAMAELLRNKEAMEKLQDELRSRSVSTNSDMITEEDLQGMVYLKAVIKETMRLHPPGPLLIPREAMESARIQQYDVPSKTMVIVNAWAIGRDPGSWESPEEFRPERFLGTGGEVDFRGRHFQLVPFGSGRRVCPGINFTMSIMEVAIANLVGRFDWALPEGAAAAVDMEEAPGITSRKRVPLHVLATPRAQASCNHDV

SEQ ID NO: 19153 - DNA, 885 bp, Triticum aestivum
  misc_feature (1)..(885): Ceres Seq. ID no. 13585222
ccccacgactcaaatcgatccgcttcccctttcccgaatcgccaaatccgctcgccgccgtcgccgtaaaaaccctctccccgcctccgctaaccccaccgccgcggagagatggtgctgtgggagatcacggccatcaccgcctacttcctcggcctccgccgcacctaccgcctcgcgctccgcggccagcgccgcctcatcgggcccaaccaccccaggctccgcgacttcgtctacaggcggacacgttctatattcgacgtcgcagtctcagtgcacaagaacattcaggagagggacttggaagttggtcggaacgtcggaaacgcggtccttcgctggctcgaccgcatgaagccatcagcacagatccgcccccaccctccaggcccgccaggctcccccccggagcaactcaggcacctttcgaccatgaataaggccgtaggagctcagaagcctgcctcaaagacctcgacgcacgactcgagcggcaagatgctgttctcgcccctgaacatccggcccaagtccttccctatcctccccacgatgatgcagtccaccaggatcagcgcgagcaaccagtgcaggcgcctctccagctcgccgttcccgtccgtcaccgccaggaggaaggacatgatggagggtgtcttccggaaggacatcgcccagctaatggtgtaagggatgtctgtaggtagccgtactgctttctgtgactctgaatattgtttactcgactggaatttggcctggagcagaactcatcactagccctgtaataatggtggagtgctgaacataatcgctgttgctccgcctgttttgtggccaatatacattttctaacaaatcatcatacgatgagacttaggt

SEQ ID NO: 19154 - protein, 193 aa, Triticum aestivum
  peptide (1)..(193): Ceres Seq. ID no. 13585223
  misc_feature (1)..(192): NCBI GI NO: 15222623 NR Description: expressed protein [Arabidopsis thaliana]
  misc_feature (1)..(193): NCBI GI NO: 30686423 NR Description: expressed protein [Arabidopsis thaliana]
  misc_feature (45)..(193): NCBI GI NO: 25370789 NR Description: hypothetical protein At2g35480
MVLWEITAITAYFLGLRRTYRLALRGQRRLIGPNHPRLRDFVYRRTRSIFDVAVSVHKNIQERDLEVGRNVGNAVLRWLDRMKPSAQIRPHPPGPPGSPPEQLRHLSTMNKAVGAQKPASKTSTHDSSGKMLFSPLNIRPKSFPILPTMMQSTRISASNQCRRLSSSPFPSVTARRKDMMEGVFRKDIAQLMV

SEQ ID NO: 19155 - protein, 146 aa, Triticum aestivum
  peptide (1)..(146): Ceres Seq. ID no. 13585224
PRLKSIRFPFPESPNPLAAVAVKTLSPPPLTPPPRRDGAVGDHGHHRLLPRPPPHLPPRAPRPAPPHRAQPPQAPRLRLQADTFYIRRRSLSAQEHSGEGLGSWSERRKRGPSLARPHEAISTDPPPPSRPARLPPGATQAPFDHE

SEQ ID NO: 19156 - protein, 118 aa, Triticum aestivum
  peptide (1)..(118): Ceres Seq. ID no. 13585225
  misc_feature (8)..(118): NCBI GI NO: 32699068 NR Description: hypothetical protein FLJ35107 [Homo sapiens]
PTTQIDPLPLSRIAKSARRRRRKNPLPASANPTAAERWCCGRSRPSPPTSSASAAPTASRSAASAASSGPTTPGSATSSTGGHVLYSTSQSQCTRTFRRGTWKLVGTSETRSFAGSTA

SEQ ID NO: 19157 - DNA, 1643 bp, Triticum aestivum
  misc_feature (1)..(1643): Ceres Seq. ID no. 14313563
atgctacaagcagttctacaacactgtacggacgcaggaattcaatggcggttgactccatggaatcggtggccttcgtcgcggtgcccttcccggcgcagggccacctgaaccagctcatgcacctctccctgctggccgcgtcgcgggggctctccgtgcactacgcggcgcccgcggcgcacctccggcaggcccgctcgcgcctgcacggctgggatccgcaggccctcggctccctccagttccacgacctcggcgtctccacgttcgagtccccggcgcccgacccgaccgccccgtgccccttcccgaaccacctcatgtccatgtggcagaccttcaccaccgccgcgcgcgccccgctcgccgccctcctggagagcctctcggccacccaccgccgcgtggtcgtcgtgcacgacaggctcaactccttcgccgccgtcgaggcggcgcggctgagcaacggcgagtcgttcgcgctgcagtgcgtggccatctcgtacaacatcgggtggctggacaccgagcacccgctcctgcgcgacaacgacctccagttccaccccatcgacgcctgcatgtccaaggagttcctggagtacgtcttccagacggagaaggagatggaggaacaggggggcgtgcccaccgccggcatggtcatgaacacgtgccgcgcactcgagggcgacttcatggacgccattgcggcccacccggtgttcaaggaccagaagctcttcgcagttgggccactgaacccgctgctggacgcgagcgcccggacgccggcgacgacgcggcacgactgcatggagtggctcgacaagcagccgccgtcatcggtgctctacgtgtccttcgggacgacgtcgtctctcctgggagagcaaatcgcggagctggcagcggcactcaagggcagcaagcagaggttcatctgggtattgcgcgaggctgaccgtgccgacatattcaaggagcccggcgagagcctgcacgacaagctgctctctgagttcactaaagaaaccgaggggactgggctggtgatcaccgggtgggcgccgcagctggagatcctggcgcacggcgccacggcggcattcatgagccactgcggctggaactcgaccatggagagcctgagccacggcaagccgattctggcatggccaatgcattccgaccagccgtgggacgcggagcttctctgcaagtacctcaaggccgggctcctggtgaggccatgggagaagcacagcgaggtggtgccggcggcggccatccaggaggtgatcgaggaggcgatgctcacggacaaagggatggcggtgcggcagcgggcgaaggtgctcggcgaggccgttcgcgccgccgtggcagacggcggctcctcgagcaaaggcctcgacgacttcgttgcttacgtcacgaggtgatcagcgtatctgtgcgtgccatagacagatacgcattgggcggtttgatcattgcttcggatgtgtttgaaactttgaatcatgctttctacgaaagctggatttcagtatacaatgatttgtcgttttcaatgtattcatctactactcatttttaattacacacaagggccgagaagaaagatttggaggaac

SEQ ID NO: 19158 - protein, 481 aa, Triticum aestivum
  peptide (1)..(481): Ceres Seq. ID no. 14313564
  misc_feature (15)..(481): NCBI GI NO: 38345593 NR Description: OSJNBb0012E24.11
  misc_feature (15)..(481): NCBI GI NO: 14091010 NR Description: cis-zeatin O-glucosyltransferase [Zea mays]
  misc_feature (15)..(481): NCBI GI NO: 19743738 NR Description: cis-zeatin O-glucosyltransferase 2 [Zea mays]
  misc_feature (20)..(481): NCBI GI NO: 18568243 NR Description: putative cis-zeatin O-glucosyltransferase
  misc_feature (22)..(481): NCBI GI NO: 34899110 NR Description: putative cis-zeatin O-glucosyltransferase
  misc_feature (23)..(481): NCBI GI NO: 20067054 NR Description: putative glucosyltransferase [Phaseolus lunatus]
  misc_feature (220)..(481): NCBI GI NO: 34910204 NR Description: putative flavonol glucosyltransferase
  misc_feature (208)..(476): NCBI GI NO: 15226537 NR Description: glucosyltransferase -related
  misc_feature (208)..(476): NCBI GI NO: 30725312 NR Description: At2g15490 [Arabidopsis thaliana]
  misc_feature (187)..(472): NCBI GI NO: 13492674 NR Description: phenylpropanoid:glucosyltransferase 1
ATSSSTTLYGRRNSMAVDSMESVAFVAVPFPAQGHLNQLMHLSLLAASRGLSVHYAAPAAHLRQARSRLHGWDPQALGSLQFHDLGVSTFESPAPDPTAPCPFPNHLMSMWQTFTTAARAPLAALLESLSATHRRVVVVHDRLNSFAAVEAARLSNGESFALQCVAISYNIGWLDTEHPLLRDNDLQFHPIDACMSKEFLEYVFQTEKEMEEQGGVPTAGMVMNTCRALEGDFMDAIAAHPVFKDQKLFAVGPLNPLLDASARTPATTRHDCMEWLDKQPPSSVLYVSFGTTSSLLGEQIAELAAALKGSKQRFIWVLREADRADIFKEPGESLHDKLLSEFTKETEGTGLVITGWAPQLEILAHGATAAFMSHCGWNSTMESLSHGKPILAWPMHSDQPWDAELLCKYLKAGLLVRPWEKHSEVVPAAAIQEVIEEAMLTDKGMAVRQRAKVLGEAVRAAVADGGSSSKGLDDFVAYVTR

SEQ ID NO: 19159 - protein, 467 aa, Triticum aestivum
  peptide (1)..(467): Ceres Seq. ID no. 14313565
  misc_feature (1)..(467): NCBI GI NO: 38345593 NR Description: OSJNBb0012E24.11
  misc_feature (1)..(467): NCBI GI NO: 14091010 NR Description: cis-zeatin O-glucosyltransferase [Zea mays]
  misc_feature (1)..(467): NCBI GI NO: 19743738 NR Description: cis-zeatin O-glucosyltransferase 2 [Zea mays]
  misc_feature (6)..(467): NCBI GI NO: 18568243 NR Description: putative cis-zeatin O-glucosyltransferase
  misc_feature (8)..(467): NCBI GI NO: 34899110 NR Description: putative cis-zeatin O-glucosyltransferase
  misc_feature (9)..(467): NCBI GI NO: 20067054 NR Description: putative glucosyltransferase [Phaseolus lunatus]
  misc_feature (206)..(467): NCBI GI NO: 34910204 NR Description: putative flavonol glucosyltransferase
  misc_feature (194)..(462): NCBI GI NO: 15226537 NR Description: glucosyltransferase -related
  misc_feature (194)..(462): NCBI GI NO: 30725312 NR Description: At2g15490 [Arabidopsis thaliana]
  misc_feature (173)..(458): NCBI GI NO: 13492674 NR Description: phenylpropanoid:glucosyltransferase 1
MAVDSMESVAFVAVPFPAQGHLNQLMHLSLLAASRGLSVHYAAPAAHLRQARSRLHGWDPQALGSLQFHDLGVSTFESPAPDPTAPCPFPNHLMSMWQTFTTAARAPLAALLESLSATHRRVVVVHDRLNSFAAVEAARLSNGESFALQCVAISYNIGWLDTEHPLLRDNDLQFHPIDACMSKEFLEYVFQTEKEMEEQGGVPTAGMVMNTCRALEGDFMDAIAAHPVFKDQKLFAVGPLNPLLDASARTPATTRHDCMEWLDKQPPSSVLYVSFGTTSSLLGEQIAELAAALKGSKQRFIWVLREADRADIFKEPGESLHDKLLSEFTKETEGTGLVITGWAPQLEILAHGATAAFMSHCGWNSTMESLSHGKPILAWPMHSDQPWDAELLCKYLKAGLLVRPWEKHSEVVPAAAIQEVIEEAMLTDKGMAVRQRAKVLGEAVRAAVADGGSSSKGLDDFVAYVTR

SEQ ID NO: 19160 - protein, 462 aa, Triticum aestivum
  peptide (1)..(462): Ceres Seq. ID no. 14313566
  misc_feature (1)..(462): NCBI GI NO: 38345593 NR Description: OSJNBb0012E24.11
  misc_feature (1)..(462): NCBI GI NO: 14091010 NR Description: cis-zeatin O-glucosyltransferase [Zea mays]
  misc_feature (1)..(462): NCBI GI NO: 19743738 NR Description: cis-zeatin O-glucosyltransferase 2 [Zea mays]
  misc_feature (1)..(462): NCBI GI NO: 18568243 NR Description: putative cis-zeatin O-glucosyltransferase
  misc_feature (3)..(462): NCBI GI NO: 34899110 NR Description: putative cis-zeatin O-glucosyltransferase
  misc_feature (4)..(462): NCBI GI NO: 20067054 NR Description: putative glucosyltransferase [Phaseolus lunatus]
  misc_feature (201)..(462): NCBI GI NO: 34910204 NR Description: putative flavonol glucosyltransferase
  misc_feature (189)..(457): NCBI GI NO: 15226537 NR Description: glucosyltransferase -related
  misc_feature (189)..(457): NCBI GI NO: 30725312 NR Description: At2g15490 [Arabidopsis thaliana]
  misc_feature (168)..(453): NCBI GI NO: 13492674 NR Description: phenylpropanoid:glucosyltransferase 1
MESVAFVAVPFPAQGHLNQLMHLSLLAASRGLSVHYAAPAAHLRQARSRLHGWDPQALGSLQFHDLGVSTFESPAPDPTAPCPFPNHLMSMWQTFTTAARAPLAALLESLSATHRRVVVVHDRLNSFAAVEAARLSNGESFALQCVAISYNIGWLDTEHPLLRDNDLQFHPIDACMSKEFLEYVFQTEKEMEEQGGVPTAGMVMNTCRALEGDFMDAIAAHPVFKDQKLFAVGPLNPLLDASARTPATTRHDCMEWLDKQPPSSVLYVSFGTTSSLLGEQIAELAAALKGSKQRFIWVLREADRADIFKEPGESLHDKLLSEFTKETEGTGLVITGWAPQLEILAHGATAAFMSHCGWNSTMESLSHGKPILAWPMHSDQPWDAELLCKYLKAGLLVRPWEKHSEVVPAAAIQEVIEEAMLTDKGMAVRQRAKVLGEAVRAAVADGGSSSKGLDDFVAYVTR

SEQ ID NO: 19161 - DNA, 1487 bp, Triticum aestivum
  misc_feature (1)..(1487): Ceres Seq. ID no. 13596167
cccccctcccgttccaactttattgtgtttaaacatccatcgcttcttccccgaggaagaaaggaaccgccatggcggaggagtgctgcagcgcggacctgctggagtggatcggccctgacgtctcagcatgcgtcttcggccgccttgaccaccccgccgaccttgtccgcgccgccgctgtctccagaacctggcgcagatgcgtggtcgagagcggcttgagcaagagcctttgcctgcggctgtgccccgaggtcgccaccgtcgccgcggcggcagaggtgaccagatcgccgccttcaaccgcctcccccgagtcaggccacgagagggactacaggatatactccaacctcgccggcgcctacgtctccgactccggcgagccctccgcggaatgcatcttgcactgtatcggcgcctcaagcaccgacgacttcccaattgagaccatggagaacaccctcgacgaggaggagataatcaatttccgcccgtcctattggtcgagcggcggggcggacgaccccgaggcgccggagagccttacctacaggctcaactctgacatctgcattgtcgatgaggttcgggtgcgaccgtaccaagccttttttcaggatggtgaccctatatactcttcaaagatggtgcgatttcggatgggccattacaagcttccgcgaggatcagagacgtttgtaatggatgattatgagaataagatggtaaatactgatgaaaaatatatgtggacttacacttcgccagagttccctatgttacagaaaaacgaactacaatccttcaagctcccacgcccagtcctttgcattggtggtgtggtgatgattgaactcttgggcagagtacagaaacaagaagcagatgatatgtactacatatgtgtttgccatgctgaagtgatggggcgttcactctcaccacttttcatggttgacatctcggatcctgaaggttattcaatcctcaagtacttaccgggtgccaaagacctatccatcgatgactttttgcaagatgataccaaagactcgccggagtggcactatcttgttgatagatacaggcagatgaatcacagagcagtagtagtgagtgcacttctggagcctgtacattacatgcatgatgtaggtggcatctcagacgatgatcatgaggatgatgtaggtggcatctcagacgatgattatcttgagtagatttgcgtgctggactgcagctacaactctgccgtggttttactctttgtagtttagtgaacacctctgaactctgcaagcctttgttgcaaacatttctgaagcctcggttctcgaacctagaggacctgatcgagacaagttgcgcttatggtttgcaactctgctcaagcttgcttgtgttttctcttgtgtttttcgtttagtggtgaatatttgtcatatactacttttcaaataaatgccgtttgcggatgg

SEQ ID NO: 19162 - protein, 385 aa, Triticum aestivum
  peptide (1)..(385): Ceres Seq. ID no. 13596168
  misc_feature (9)..(382): NCBI GI NO: 18411435 NR Description: F-box protein family [Arabidopsis thaliana]
  misc_feature (143)..(382): NCBI GI NO: 28393062 NR Description: putative F-box protein [Arabidopsis thaliana]
  misc_feature (46)..(203): NCBI GI NO: 7452420 NR Description: hypothetical protein A_TM018A10
  misc_feature (232)..(298): NCBI GI NO: 18308222 NR Description: unknown protein [Oryza sativa]
  misc_feature (119)..(203): NCBI GI NO: 28850404 NR Description: hypothetical protein [Dictyostelium discoideum]
  misc_feature (231)..(318): NCBI GI NO: 28850404 NR Description: hypothetical protein [Dictyostelium discoideum]
MAEECCSADLLEWIGPDVSACVFGRLDHPADLVRAAAVSRTWRRCVVESGLSKSLCLRLCPEVATVAAAAEVTRSPPSTASPESGHERDYRIYSNLAGAYVSDSGEPSAECILHCIGASSTDDFPIETMENTLDEEEIINFRPSYWSSGGADDPEAPESLTYRLNSDICIVDEVRVRPYQAFFQDGDPIYSSKMVRFRMGHYKLPRGSETFVMDDYENKMVNTDEKYMWTYTSPEFPMLQKNELQSFKLPRPVLCIGGVVMIELLGRVQKQEADDMYYICVCHAEVMGRSLSPLFMVDISDPEGYSILKYLPGAKDLSIDDFLQDDTKDSPEWHYLVDRYRQMNHRAVVVSALLEPVHYMHDVGGISDDDHEDDVGGISDDDYLE

SEQ ID NO: 19163 - protein, 257 aa, Triticum aestivum
  peptide (1)..(257): Ceres Seq. ID no. 13596169
  misc_feature (1)..(254): NCBI GI NO: 18411435 NR Description: F-box protein family [Arabidopsis thaliana]
  misc_feature (15)..(254): NCBI GI NO: 28393062 NR Description: putative F-box protein [Arabidopsis thaliana]
  misc_feature (1)..(75): NCBI GI NO: 7452420 NR Description: hypothetical protein A_TM018A10
  misc_feature (104)..(170): NCBI GI NO: 18308222 NR Description: unknown protein [Oryza sativa]
  misc_feature (1)..(75): NCBI GI NO: 28850404 NR Description: hypothetical protein [Dictyostelium discoideum]
  misc_feature (103)..(190): NCBI GI NO: 28850404 NR Description: hypothetical protein [Dictyostelium discoideum]
MENTLDEEEIINFRPSYWSSGGADDPEAPESLTYRLNSDICIVDEVRVRPYQAFFQDGDPIYSSKMVRFRMGHYKLPRGSETFVMDDYENKMVNTDEKYMWTYTSPEFPMLQKNELQSFKLPRPVLCIGGVVMIELLGRVQKQEADDMYYICVCHAEVMGRSLSPLFMVDISDPEGYSILKYLPGAKDLSIDDFLQDDTKDSPEWHYLVDRYRQMNHRAVVVSALLEPVHYMHDVGGISDDDHEDDVGGISDDDYLE

SEQ ID NO: 19164 - protein, 192 aa, Triticum aestivum
  peptide (1)..(192): Ceres Seq. ID no. 13596170
  misc_feature (1)..(189): NCBI GI NO: 18411435 NR Description: F-box protein family [Arabidopsis thaliana]
  misc_feature (1)..(189): NCBI GI NO: 28393062 NR Description: putative F-box protein [Arabidopsis thaliana]
  misc_feature (39)..(105): NCBI GI NO: 18308222 NR Description: unknown protein [Oryza sativa]
  misc_feature (38)..(125): NCBI GI NO: 28850404 NR Description: hypothetical protein [Dictyostelium discoideum]
MVRFRMGHYKLPRGSETFVMDDYENKMVNTDEKYMWTYTSPEFPMLQKNELQSFKLPRPVLCIGGVVMIELLGRVQKQEADDMYYICVCHAEVMGRSLSPLFMVDISDPEGYSILKYLPGAKDLSIDDFLQDDTKDSPEWHYLVDRYRQMNHRAVVVSALLEPVHYMHDVGGISDDDHEDDVGGISDDDYLE

SEQ ID NO: 19165 - DNA, 719 bp, Triticum aestivum
  misc_feature (1)..(719): Ceres Seq. ID no. 15172660
tagaacatcctaaccgaaaataccgcagccgccacacacgacgaacaccggaacgaagcagatcggcggcgcgtcactccaatcaccggttcataaaatggcgacggtttcggattctctggtctgggagctcgtcaggaagaacaactgcttcctgatcaagcagttcggcaacagcaatgccaaggtccagttcagcaaggagcccaacaacctctacaatgtccactcctacaagtactctggcctggcaaacaagaagactgtgacagtgcagccagctgctgagaaggagatgactgtggtcctctccacaaccaagtcaaagaagcagaacaagcctgccgcgttcacccacaagactgtcatgcgcaaggagttccgcaagatggccaaggctgtcaagaaccaggtcagtgataactactataggcctgacttgaccaagcctgctcttgcaagactgagtgcagtttaccgcagcctccaggttgccaagtccggtgtcaagaagaagaacaggcagtaagcactgaggggccaatgagcttgttttgtggatccgttggtttatgtttccagctttttagatttgttctaaaagtatggaggttgaatatgatgaatggtgtgtgctgcatactggcacaagttttctcagtaggttctatatctgtacccatgactatgttgtgaagcctcttgaaatcatttccacg

SEQ ID NO: 19166 - protein, 143 aa, Triticum aestivum
  peptide (1)..(143): Ceres Seq. ID no. 15172661
  misc_feature (6)..(137): Pfam Name: Pfam Description:  Ribosomal L28e protein family
  misc_feature (1)..(143): NCBI GI NO: 34910390 NR Description: ribosomal protein L28-like
  misc_feature (1)..(143): NCBI GI NO: 15224835 NR Description: 60S ribosomal protein L28 (RPL28A)
  misc_feature (1)..(143): NCBI GI NO: 15233567 NR Description: 60S ribosomal protein L28 (RPL28C)
  misc_feature (1)..(142): NCBI GI NO: 32411169 NR Description: predicted protein [Neurospora crassa]
  misc_feature (1)..(139): NCBI GI NO: 20976820 NR Description: GH04183p [Drosophila melanogaster]
  misc_feature (1)..(139): NCBI GI NO: 24656625 NR Description: CG12740-PA [Drosophila melanogaster]
  misc_feature (1)..(139): NCBI GI NO: 38047791 NR Description: similar to Drosophila melanogaster CG12740
  misc_feature (4)..(135): NCBI GI NO: 24418650 NR Description: 60S ribosomal protein L28
  misc_feature (5)..(135): NCBI GI NO: 31212979 NR Description: ENSANGP00000014265 [Anopheles gambiae]
  misc_feature (4)..(143): NCBI GI NO: 32450198 NR Description: Unknown (protein for MGC:64430) [Xenopus laevis]
MATVSDSLVWELVRKNNCFLIKQFGNSNAKVQFSKEPNNLYNVHSYKYSGLANKKTVTVQPAAEKEMTVVLSTTKSKKQNKPAAFTHKTVMRKEFRKMAKAVKNQVSDNYYRPDLTKPALARLSAVYRSLQVAKSGVKKKNRQ

SEQ ID NO: 19167 - protein, 77 aa, Triticum aestivum
  peptide (1)..(77): Ceres Seq. ID no. 15172662
  misc_feature (1)..(71): Pfam Name: Pfam Description:  Ribosomal L28e protein family
  misc_feature (1)..(77): NCBI GI NO: 34910390 NR Description: ribosomal protein L28-like
  misc_feature (1)..(77): NCBI GI NO: 15224835 NR Description: 60S ribosomal protein L28 (RPL28A)
  misc_feature (1)..(77): NCBI GI NO: 15233567 NR Description: 60S ribosomal protein L28 (RPL28C)
  misc_feature (1)..(76): NCBI GI NO: 32411169 NR Description: predicted protein [Neurospora crassa]
  misc_feature (1)..(73): NCBI GI NO: 20976820 NR Description: GH04183p [Drosophila melanogaster]
  misc_feature (1)..(73): NCBI GI NO: 24656625 NR Description: CG12740-PA [Drosophila melanogaster]
  misc_feature (1)..(73): NCBI GI NO: 38047791 NR Description: similar to Drosophila melanogaster CG12740
  misc_feature (1)..(69): NCBI GI NO: 24418650 NR Description: 60S ribosomal protein L28
  misc_feature (1)..(69): NCBI GI NO: 31212979 NR Description: ENSANGP00000014265 [Anopheles gambiae]
  misc_feature (1)..(77): NCBI GI NO: 32450198 NR Description: Unknown (protein for MGC:64430) [Xenopus laevis]
MTVVLSTTKSKKQNKPAAFTHKTVMRKEFRKMAKAVKNQVSDNYYRPDLTKPALARLSAVYRSLQVAKSGVKKKNRQ

SEQ ID NO: 19168 - DNA, 688 bp, Triticum aestivum
  misc_feature (1)..(688): Ceres Seq. ID no. 13662405
cactttccccacctctcaggccaagcaaacgcacaccaggcgaggcaacgcaaagaagcaggcaggcagccatgtcgtactacgaccggcgcggggagtcgtcggtgctggaggcgttcacgctgtcgccgctgccgtacccggtgatcctgatcctgatgatggtgacgctgctgctgggggcgtcgtggttcttctcgtacgaggacttcatggaggaggcgtcggagcagttcagctggttcctgctgggcgtgcccatcgcgctcgtcctcctcatccgctggatctcctccgtcgacaccttcgagggctacttcgggttctaccccaccgagagccgctggagggggtacccggccgcgccctccgagggcagctccccctggggcgtcgccatggtcgtcgtcctcctgctcctcctcgccagcttccactccaccttccaggacatgtggaagccttgatggaatgatcgatgctccgatccatacctcgtatgtacgtgtatgtgtgtatgtatgtaattccatcgtatcgatctgtagtacacctacgaatgattgttgcttccaccttccaggcggttgctgcacctgcacgtatgtgtgccttgcttttcctcctgtactgtacatagatgaaggttatattctgctagctgaaaaactatagagcttgagtgtcg

SEQ ID NO: 19169 - protein, 157 aa, Triticum aestivum
  peptide (1)..(157): Ceres Seq. ID no. 13662406
TFPTSQAKQTHTRRGNAKKQAGSHVVLRPARGVVGAGGVHAVAAAVPGDPDPDDGDAAAGGVVVLLVRGLHGGGVGAVQLVPAGRAHRARPPHPLDLLRRHLRGLLRVLPHREPLEGVPGRALRGQLPLGRRHGRRPPAPPRQLPLHLPGHVEALME

SEQ ID NO: 19170 - protein, 154 aa, Triticum aestivum
  peptide (1)..(154): Ceres Seq. ID no. 13662407
  misc_feature (24)..(152): NCBI GI NO: 18399613 NR Description: expressed protein [Arabidopsis thaliana]
  misc_feature (33)..(154): NCBI GI NO: 18420057 NR Description: expressed protein [Arabidopsis thaliana]
  misc_feature (43)..(154): NCBI GI NO: 18402822 NR Description: expressed protein [Arabidopsis thaliana]
  misc_feature (43)..(151): NCBI GI NO: 25408197 NR Description: hypothetical protein At2g31940
  misc_feature (45)..(154): NCBI GI NO: 37531542 NR Description: hypothetical protein
LSPPLRPSKRTPGEATQRSRQAAMSYYDRRGESSVLEAFTLSPLPYPVILILMMVTLLLGASWFFSYEDFMEEASEQFSWFLLGVPIALVLLIRWISSVDTFEGYFGFYPTESRWRGYPAAPSEGSSPWGVAMVVVLLLLLASFHSTFQDMWKP

SEQ ID NO: 19171 - protein, 131 aa, Triticum aestivum
  peptide (1)..(131): Ceres Seq. ID no. 13662408
  misc_feature (1)..(129): NCBI GI NO: 18399613 NR Description: expressed protein [Arabidopsis thaliana]
  misc_feature (10)..(131): NCBI GI NO: 18420057 NR Description: expressed protein [Arabidopsis thaliana]
  misc_feature (20)..(131): NCBI GI NO: 18402822 NR Description: expressed protein [Arabidopsis thaliana]
  misc_feature (20)..(128): NCBI GI NO: 25408197 NR Description: hypothetical protein At2g31940
  misc_feature (22)..(131): NCBI GI NO: 37531542 NR Description: hypothetical protein
MSYYDRRGESSVLEAFTLSPLPYPVILILMMVTLLLGASWFFSYEDFMEEASEQFSWFLLGVPIALVLLIRWISSVDTFEGYFGFYPTESRWRGYPAAPSEGSSPWGVAMVVVLLLLLASFHSTFQDMWKP

SEQ ID NO: 19172 - DNA, 709 bp, Triticum aestivum
  misc_feature (1)..(709): Ceres Seq. ID no. 13598351
  misc_feature (669)..(669): n is a, c, t, g, unknown, or other
  misc_feature (670)..(670): n is a, c, t, g, unknown, or other
  misc_feature (671)..(671): n is a, c, t, g, unknown, or other
aacgccccgagaacgagaactcctgtgctgtgctgcccctctctctctccccccactgagtctcctgtgctgcccccgctgacctgcggccaccgacggcgagtggaggcggacgacgggttcccgccgcgggctcttcggcggcgccgcgtcagggctcgcgcgggctggtgctgatttgagggagattcggggccggggccggagccggcgcggcctctggggatggggtggctttcctgctgcaagcggtcgaacggggcccaacccggcaggaagaagaagaaggacacgacatggcggatcttctcactcaaggagcttcagttggcgaccaacaatttcaactacgataacaagcttggtgaaggtggattcggcagtgtctactggggccagctctgggacggatcacagattgcggtgaaaaggctcaagagttggagcaacaaggctgaaaaggagtctgctgtcgaggtcgaggttttggcacgagtgcggcataagagcctcttgagcttacgtggatattgcgctgaaggccaggagcgcctgatagtctacgactatatgcagaacctgagcttgcactctcacctgcacggacagcatgcagctgaatgccatcttggttgggagcgaagaatgaacatcgccattgattcggcnnnaggcatcgcttatcttcatcaccatgcgatcccacata

SEQ ID NO: 19173 - protein, 161 aa, Triticum aestivum
  peptide (1)..(161): Ceres Seq. ID no. 13598352
  misc_feature (5)..(160): NCBI GI NO: 18400939 NR Description: protein kinase family [Arabidopsis thaliana]
  misc_feature (5)..(160): NCBI GI NO: 21593950 NR Description: protein kinase, putative [Arabidopsis thaliana]
  misc_feature (6)..(160): NCBI GI NO: 30695267 NR Description: protein kinase, putative [Arabidopsis thaliana]
  misc_feature (17)..(160): NCBI GI NO: 25287618 NR Description: hypothetical protein F6D8.24
  misc_feature (6)..(160): NCBI GI NO: 34898392 NR Description: ESTs C22458
  misc_feature (1)..(160): NCBI GI NO: 34894174 NR Description: putative protein kinase
  misc_feature (25)..(160): NCBI GI NO: 15234142 NR Description: protein kinase family [Arabidopsis thaliana]
  misc_feature (22)..(160): NCBI GI NO: 34902334 NR Description: Putative serine/threonine protein kinase
  misc_feature (25)..(160): NCBI GI NO: 15223428 NR Description: protein kinase family [Arabidopsis thaliana]
  misc_feature (25)..(160): NCBI GI NO: 30678150 NR Description: protein kinase family [Arabidopsis thaliana]
  misc_feature (148)..(148): Xaa is any aa, unknown or other
  misc_feature (149)..(149): Xaa is any aa, unknown or other
MGWLSCCKRSNGAQPGRKKKKDTTWRIFSLKELQLATNNFNYDNKLGEGGFGSVYWGQLWDGSQIAVKRLKSWSNKAEKESAVEVEVLARVRHKSLLSLRGYCAEGQERLIVYDYMQNLSLHSHLHGQHAAECHLGWERRMNIAIDSXXGIAYLHHHAIPH

SEQ ID NO: 19174 - DNA, 1474 bp, Triticum aestivum
  misc_feature (1)..(1474): Ceres Seq. ID no. 13654329
atttcttgtattttgtggattgttggcccaataaacccaatgagagggagcgtgggcgtcatctccgtccaataaaaaaaggatgcgtgggcgaagaggagaatcaaagcaactactcctggcagcagcagctagccagctacccctgcttgctttgctttgcttccccgtcgaggaagaagaagatggggggcgtgggcgtctcccttgcgctgctcgccgccgtcgtcctctccgccgctgctgctgccccgcagctagcgggagcagccaaggcagagcattccctaggaatcatccagaaggacatcattcagacggtcaacaagcatcccaatgccgggtggacggctggacacaacccctacttcgcaaactacactattgagcaattcaagcatatcctgggtgtgaagccaacgcctccgggtttgctcgctggtgttccaatccaaacccatccagaatcagtggatctccccaaggagtttgacgctagaactcaatggtccagttgcagcacaattgggaacatacttgatcaaggtcactgtggtgcctgttgggcctttgctgccgtggaagctctccaggatcgtttctgtattcatctcaacatgagcgtcacactttcggtcaatgacctactggcttgctgtggttttctgtgtggtagcggttgtaatggaggatatcctatcagcgcatggcgctacttccgtcgcagtggtatcgtcactgaggagtgcgatccatacttcgatcagactggttgccagcatcctggatgcgagccagcttatcctacaccaaaatgtcaaaggaaatgcaaggtgcagaaccaagtgtggaaggaaaagaagcatttcagtgttaatgcgtacagagtacattctgatccccatgacatcatggcagaggtctacaaaaatggccctgtagaagttgctttcaccgtttatgaggacttcgcacactacaagtcaggagtgtacaagcacatcacaggtggcgtgatgggaggtcacgccgtcaagttgattggttggggaaccagtgatgctggcgaggattactggcttcttgcaaatcagtggaacagaggctggggtgatgacgggtacttcaagatcataaggggcaagaatgaatgtggcatcgaagaagatgttactgccggtatgccctcgacaaagaacacggccagaaacaatgatgtcgcctttggaacggccatactttgagcagcgccctggttacaaacacggttgaagttagctgtttgcatgtcaaatgaagccagtaaattagctttgatggttccaggatactgtattatgtacactagcgcaaacgctgatatgttgctgaaacaacaccttgttcagaaacaaaagggagtaataataataccaacaaaaccataaggctgtcatctcgaaaaaaaaaawaavgctgtcatctcgataccgtc

SEQ ID NO: 19175 - protein, 413 aa, Triticum aestivum
  peptide (1)..(413): Ceres Seq. ID no. 15219643
  misc_feature (159)..(394): Pfam Name: Pfam Description:  Papain family cysteine protease
  misc_feature (62)..(413): NCBI GI NO: 7435782 NR Description: cathepsin B-like cysteine proteinase (EC 3
  misc_feature (62)..(370): NCBI GI NO: 21695 NR Description: cathepsin B [Triticum aestivum]
  misc_feature (62)..(401): NCBI GI NO: 40643250 NR Description: cathepsin B [Hordeum vulgare subsp. vulgare]
  misc_feature (103)..(401): NCBI GI NO: 7435783 NR Description: cathepsin B-like cysteine proteinase (EC 3
  misc_feature (69)..(413): NCBI GI NO: 38639325 NR Description: cathepsin B-like cysteine proteinase
  misc_feature (71)..(407): NCBI GI NO: 609175 NR Description: cathepsin B-like cysteine proteinase
  misc_feature (71)..(402): NCBI GI NO: 18378947 NR Description: expressed protein [Arabidopsis thaliana]
  misc_feature (71)..(407): NCBI GI NO: 2129942 NR Description: cathepsin B-like cysteine proteinase (EC 3
  misc_feature (69)..(399): NCBI GI NO: 14582576 NR Description: cathepsin B-like cysteine proteinase
  misc_feature (69)..(399): NCBI GI NO: 6165885 NR Description: cathepsin B-like cysteine proteinase
FLYFVDCWPNKPNERERGRHLRPIKKGCVGEEENQSNYSWQQQLASYPCLLCFASPSRKKKMGGVGVSLALLAAVVLSAAAAAPQLAGAAKAEHSLGIIQKDIIQTVNKHPNAGWTAGHNPYFANYTIEQFKHILGVKPTPPGLLAGVPIQTHPESVDLPKEFDARTQWSSCSTIGNILDQGHCGACWAFAAVEALQDRFCIHLNMSVTLSVNDLLACCGFLCGSGCNGGYPISAWRYFRRSGIVTEECDPYFDQTGCQHPGCEPAYPTPKCQRKCKVQNQVWKEKKHFSVNAYRVHSDPHDIMAEVYKNGPVEVAFTVYEDFAHYKSGVYKHITGGVMGGHAVKLIGWGTSDAGEDYWLLANQWNRGWGDDGYFKIIRGKNECGIEEDVTAGMPSTKNTARNNDVAFGTAIL

SEQ ID NO: 19176 - protein, 352 aa, Triticum aestivum
  peptide (1)..(352): Ceres Seq. ID no. 15219644
  misc_feature (98)..(333): Pfam Name: Pfam Description:  Papain family cysteine protease
  misc_feature (1)..(352): NCBI GI NO: 7435782 NR Description: cathepsin B-like cysteine proteinase (EC 3
  misc_feature (1)..(309): NCBI GI NO: 21695 NR Description: cathepsin B [Triticum aestivum]
  misc_feature (1)..(340): NCBI GI NO: 40643250 NR Description: cathepsin B [Hordeum vulgare subsp. vulgare]
  misc_feature (42)..(340): NCBI GI NO: 7435783 NR Description: cathepsin B-like cysteine proteinase (EC 3
  misc_feature (8)..(352): NCBI GI NO: 38639325 NR Description: cathepsin B-like cysteine proteinase
  misc_feature (10)..(346): NCBI GI NO: 609175 NR Description: cathepsin B-like cysteine proteinase
  misc_feature (10)..(341): NCBI GI NO: 18378947 NR Description: expressed protein [Arabidopsis thaliana]
  misc_feature (10)..(346): NCBI GI NO: 2129942 NR Description: cathepsin B-like cysteine proteinase (EC 3
  misc_feature (8)..(338): NCBI GI NO: 14582576 NR Description: cathepsin B-like cysteine proteinase
  misc_feature (8)..(338): NCBI GI NO: 6165885 NR Description: cathepsin B-like cysteine proteinase
MGGVGVSLALLAAVVLSAAAAAPQLAGAAKAEHSLGIIQKDIIQTVNKHPNAGWTAGHNPYFANYTIEQFKHILGVKPTPPGLLAGVPIQTHPESVDLPKEFDARTQWSSCSTIGNILDQGHCGACWAFAAVEALQDRFCIHLNMSVTLSVNDLLACCGFLCGSGCNGGYPISAWRYFRRSGIVTEECDPYFDQTGCQHPGCEPAYPTPKCQRKCKVQNQVWKEKKHFSVNAYRVHSDPHDIMAEVYKNGPVEVAFTVYEDFAHYKSGVYKHITGGVMGGHAVKLIGWGTSDAGEDYWLLANQWNRGWGDDGYFKIIRGKNECGIEEDVTAGMPSTKNTARNNDVAFGTAIL

SEQ ID NO: 19177 - protein, 208 aa, Triticum aestivum
  peptide (1)..(208): Ceres Seq. ID no. 15219645
  misc_feature (1)..(189): Pfam Name: Pfam Description:  Papain family cysteine protease
  misc_feature (1)..(208): NCBI GI NO: 7435782 NR Description: cathepsin B-like cysteine proteinase (EC 3
  misc_feature (1)..(165): NCBI GI NO: 21695 NR Description: cathepsin B [Triticum aestivum]
  misc_feature (1)..(196): NCBI GI NO: 40643250 NR Description: cathepsin B [Hordeum vulgare subsp. vulgare]
  misc_feature (1)..(196): NCBI GI NO: 7435783 NR Description: cathepsin B-like cysteine proteinase (EC 3
  misc_feature (1)..(208): NCBI GI NO: 38639325 NR Description: cathepsin B-like cysteine proteinase
  misc_feature (1)..(202): NCBI GI NO: 609175 NR Description: cathepsin B-like cysteine proteinase
  misc_feature (1)..(197): NCBI GI NO: 18378947 NR Description: expressed protein [Arabidopsis thaliana]
  misc_feature (1)..(202): NCBI GI NO: 2129942 NR Description: cathepsin B-like cysteine proteinase (EC 3
  misc_feature (1)..(194): NCBI GI NO: 14582576 NR Description: cathepsin B-like cysteine proteinase
  misc_feature (1)..(194): NCBI GI NO: 6165885 NR Description: cathepsin B-like cysteine proteinase
MSVTLSVNDLLACCGFLCGSGCNGGYPISAWRYFRRSGIVTEECDPYFDQTGCQHPGCEPAYPTPKCQRKCKVQNQVWKEKKHFSVNAYRVHSDPHDIMAEVYKNGPVEVAFTVYEDFAHYKSGVYKHITGGVMGGHAVKLIGWGTSDAGEDYWLLANQWNRGWGDDGYFKIIRGKNECGIEEDVTAGMPSTKNTARNNDVAFGTAIL

SEQ ID NO: 19178 - DNA, 1451 bp, Triticum aestivum
  misc_feature (1)..(1451): Ceres Seq. ID no. 13596433
tccacctcgcctcgtcgtccgcccacggtctaatccgattcaaacgcaccgcttcctcgtgtccgaactaagccccaatcccgtcaccaccgccgctggtgctcggcgcgatggcgcagaaggacgccgccaatggcaacggcgccaccacgcgcccgccgcccactccctcccccatccgcttctccaagttcttccaggccaacatgcggatcctggtcaccggcggagctggcttcatcggctcgcacctcgtcgacaagctcatggagaacgagaagaacgaggtcattgttgctgacaactttttcactgggtcaaaagacaacctgaagaagtggatcggacaccctagatttgaactcatccgtcacgatgtcaccgaaccactgctcgtggaggttgaccaaatctaccaccttgcttgtcctgcctcaccaatcttctacaagcacaaccctgtcaagaccatcaagacgaatgtcattggaaccttgaacatgcttggacttgcaaagagagttggagctagaatattgttgacttcgacctctgaagtttatggtgatccccttgagcatcctcagacggaggcatactggggcaatgttaacccaattggagtcaggagctgctacgatgagggtaagcgtgtagctgagacactgatgttcgactaccacaggcagcatggcattgagatccgtattgccaggattttcaacacctacggacctaggatgaacattgatgatggccgtgttgttagtaacttcattgctcaggccattcgtggtgaagcactgactgtccagaagcctggaacacagactaggagcttctgctacgtcgctgatatggtcaatggtcttatgaagctgatgaatggagacaacaccggacccattaacattgggaacccaggtgaattcaccatgctggaacttgccgagaatgtgaaggagttgatcaacccagaagtgacagtgacgatgactgagaacactcctgatgaccctcgccagaggaagcctgacatcaccaaggccaaggaggttctcgactgggagcccaaggtcgtcctgcgcgacggcttggtgctcatggaggacgatttcagggagcgcttggcagtgcccaagaagaccaaggcctaagccccctccccgcgtttggcgtacaacatcaccaatttgccagagcatactcatagttgggtgggttcgtcaatattcgttgctgcgtttcgttacggaatttgagttccaataaaccaattacaccttcgttgttcacttgaaagattgtattattagaaacttcatacaaggcctggctgtttgtattaccgtctctttttgtggaacttgtgctccttacgttttagcctatgcacttccctaaatcaattatagcaatgttggtgccattttgggtttgttattaatttg

SEQ ID NO: 19179 - protein, 348 aa, Triticum aestivum
  peptide (1)..(348): Ceres Seq. ID no. 15221872
  misc_feature (35)..(340): Pfam Name: Pfam Description:  NAD dependent epimerase/dehydratase family
  misc_feature (1)..(348): NCBI GI NO: 18447934 NR Description: UDP-glucuronic acid decarboxylase
  misc_feature (1)..(348): NCBI GI NO: 11121508 NR Description: d-TDP-glucose dehydratase [Phragmites australis]
  misc_feature (5)..(345): NCBI GI NO: 15226950 NR Description: NAD-dependent epimerase/dehydratase family
  misc_feature (5)..(345): NCBI GI NO: 11270075 NR Description: dTDPglucose 4,6-dehydratase (EC 4.2.1.46)
  misc_feature (6)..(344): NCBI GI NO: 15231432 NR Description: NAD-dependent epimerase/dehydratase family
  misc_feature (13)..(344): NCBI GI NO: 15237853 NR Description: NAD-dependent epimerase/dehydratase family
  misc_feature (5)..(344): NCBI GI NO: 13591616 NR Description: UDP-D-glucuronate carboxy-lyase [Pisum sativum]
  misc_feature (13)..(344): NCBI GI NO: 14030703 NR Description: AT5g59290/mnc17_180 [Arabidopsis thaliana]
  misc_feature (82)..(344): NCBI GI NO: 2351580 NR Description: thymidine diphospho-glucose 4-6-dehydratase homolog
  misc_feature (34)..(340): NCBI GI NO: 25396402 NR Description: UDP-glucuronic acid decarboxylase
MAQKDAANGNGATTRPPPTPSPIRFSKFFQANMRILVTGGAGFIGSHLVDKLMENEKNEVIVADNFFTGSKDNLKKWIGHPRFELIRHDVTEPLLVEVDQIYHLACPASPIFYKHNPVKTIKTNVIGTLNMLGLAKRVGARILLTSTSEVYGDPLEHPQTEAYWGNVNPIGVRSCYDEGKRVAETLMFDYHRQHGIEIRIARIFNTYGPRMNIDDGRVVSNFIAQAIRGEALTVQKPGTQTRSFCYVADMVNGLMKLMNGDNTGPINIGNPGEFTMLELAENVKELINPEVTVTMTENTPDDPRQRKPDITKAKEVLDWEPKVVLRDGLVLMEDDFRERLAVPKKTKA

SEQ ID NO: 19180 - protein, 316 aa, Triticum aestivum
  peptide (1)..(316): Ceres Seq. ID no. 15221873
  misc_feature (3)..(308): Pfam Name: Pfam Description:  NAD dependent epimerase/dehydratase family
  misc_feature (1)..(316): NCBI GI NO: 18447934 NR Description: UDP-glucuronic acid decarboxylase
  misc_feature (1)..(316): NCBI GI NO: 11121508 NR Description: d-TDP-glucose dehydratase [Phragmites australis]
  misc_feature (1)..(313): NCBI GI NO: 15226950 NR Description: NAD-dependent epimerase/dehydratase family
  misc_feature (1)..(313): NCBI GI NO: 11270075 NR Description: dTDPglucose 4,6-dehydratase (EC 4.2.1.46)
  misc_feature (1)..(312): NCBI GI NO: 15231432 NR Description: NAD-dependent epimerase/dehydratase family
  misc_feature (1)..(312): NCBI GI NO: 15237853 NR Description: NAD-dependent epimerase/dehydratase family
  misc_feature (1)..(312): NCBI GI NO: 13591616 NR Description: UDP-D-glucuronate carboxy-lyase [Pisum sativum]
  misc_feature (1)..(312): NCBI GI NO: 14030703 NR Description: AT5g59290/mnc17_180 [Arabidopsis thaliana]
  misc_feature (50)..(312): NCBI GI NO: 2351580 NR Description: thymidine diphospho-glucose 4-6-dehydratase homolog
  misc_feature (2)..(308): NCBI GI NO: 25396402 NR Description: UDP-glucuronic acid decarboxylase
MRILVTGGAGFIGSHLVDKLMENEKNEVIVADNFFTGSKDNLKKWIGHPRFELIRHDVTEPLLVEVDQIYHLACPASPIFYKHNPVKTIKTNVIGTLNMLGLAKRVGARILLTSTSEVYGDPLEHPQTEAYWGNVNPIGVRSCYDEGKRVAETLMFDYHRQHGIEIRIARIFNTYGPRMNIDDGRVVSNFIAQAIRGEALTVQKPGTQTRSFCYVADMVNGLMKLMNGDNTGPINIGNPGEFTMLELAENVKELINPEVTVTMTENTPDDPRQRKPDITKAKEVLDWEPKVVLRDGLVLMEDDFRERLAVPKKTKA

SEQ ID NO: 19181 - protein, 296 aa, Triticum aestivum
  peptide (1)..(296): Ceres Seq. ID no. 15221874
  misc_feature (1)..(288): Pfam Name: Pfam Description:  NAD dependent epimerase/dehydratase family
  misc_feature (1)..(296): NCBI GI NO: 18447934 NR Description: UDP-glucuronic acid decarboxylase
  misc_feature (1)..(296): NCBI GI NO: 11121508 NR Description: d-TDP-glucose dehydratase [Phragmites australis]
  misc_feature (1)..(293): NCBI GI NO: 15226950 NR Description: NAD-dependent epimerase/dehydratase family
  misc_feature (1)..(293): NCBI GI NO: 11270075 NR Description: dTDPglucose 4,6-dehydratase (EC 4.2.1.46)
  misc_feature (1)..(292): NCBI GI NO: 15231432 NR Description: NAD-dependent epimerase/dehydratase family
  misc_feature (1)..(292): NCBI GI NO: 15237853 NR Description: NAD-dependent epimerase/dehydratase family
  misc_feature (1)..(292): NCBI GI NO: 13591616 NR Description: UDP-D-glucuronate carboxy-lyase [Pisum sativum]
  misc_feature (1)..(292): NCBI GI NO: 14030703 NR Description: AT5g59290/mnc17_180 [Arabidopsis thaliana]
  misc_feature (30)..(292): NCBI GI NO: 2351580 NR Description: thymidine diphospho-glucose 4-6-dehydratase homolog
  misc_feature (1)..(288): NCBI GI NO: 25396402 NR Description: UDP-glucuronic acid decarboxylase
MENEKNEVIVADNFFTGSKDNLKKWIGHPRFELIRHDVTEPLLVEVDQIYHLACPASPIFYKHNPVKTIKTNVIGTLNMLGLAKRVGARILLTSTSEVYGDPLEHPQTEAYWGNVNPIGVRSCYDEGKRVAETLMFDYHRQHGIEIRIARIFNTYGPRMNIDDGRVVSNFIAQAIRGEALTVQKPGTQTRSFCYVADMVNGLMKLMNGDNTGPINIGNPGEFTMLELAENVKELINPEVTVTMTENTPDDPRQRKPDITKAKEVLDWEPKVVLRDGLVLMEDDFRERLAVPKKTKA

SEQ ID NO: 19182 - DNA, 1410 bp, Triticum aestivum
  misc_feature (1)..(1410): Ceres Seq. ID no. 14316032
tgagttcccagcgccctcagagccacagactcgagcgcgcccccatcctgctccccaaccaagaagcgagacgacggtgaccagtccccagaggccagagcgcactcccatcccatggatctgcagaccttcgtgctgagggtgaccatccactgccatggctgcaagaagaaggtccggaaggtgctcaagagcgtcgaaggcgtgcaggacgtgaaggtggatgcccagctgcacaaggtgatggtgaccggcaccgtggacgccgagacgctcatcaagaggctcaacaagtctggcaagcaggccctgccatggcaacacacgcctgccaagaatcccgaccctgcgccagccgacgcccccgcgccggccgaggacggcagcaaggatgctgctgtggccgacaagaagccggcggaggagccgcaggccgacagctcagacaagaagccggagcaggagacggcctcggagaagaagccggagcaggagacggcctcggagaagaagcctgagacggagaaggaagcagagtctgagaagaaggctgacaaggaggaggcgaaaccaagcgacgaggcaaagaaagacggcggcgagggcgcggcggccgagcccaaacccaaagcaaagggcaccgagcccgccgccgctgcaaaggaggccggcgatgacgagggcgaggcgaagaagaaacagagcaagcccaaggacgcggataggtccctggccccagcgccggcgccggcccatgcgccgaggtacgcgcaccaggaattcaacgcgccgcagccggtgatgagctacaacatggcgcagccgagagcgagcgtgtcccactacgcgccgcagccggagcagggctactcgcagcagcagcaggccgggtactcctcctcctcctccatgatggtgacgcagcacccaccgccaccggcgcagcaggcctactcccagcaggcgcagccaatgcagcaatggtcgccgtcctacctctacatgccgtacccgcacgcgtcgccggagtcctactaccaggactactacagcccgcccgggacgcacgcgtcgccgccgcccccgccgccgctccaggactcgtaccgcctattcgacgacgagaaccccaactcgtgcagcgtcatgtgatctgatcacggctccggccaccggcggaaaagtagaggcggccgtcctcataatcgtaatagagacggacctctctggttgtaggtagagtagcttgttactctcttcgattgggaggtcaaagctctccttgaccaatcctttttcttctcacttcttcctctttaatttcttcttttgttattgctactattactgttctaaatagagcatgtaattgtaatttacatgtagaatagtagcatcaatgagatctcc

SEQ ID NO: 19183 - protein, 345 aa, Triticum aestivum
  peptide (1)..(345): Ceres Seq. ID no. 14316033
  misc_feature (23)..(231): Pfam Name: BASP1 protein Pfam Description: Brain acid soluble protein 1
  misc_feature (1)..(316): NCBI GI NO: 27754505 NR Description: putative copper chaperone (CCH) protein
  misc_feature (1)..(316): NCBI GI NO: 18405728 NR Description: copper chaperone (CCH)-related
  misc_feature (1)..(316): NCBI GI NO: 21536659 NR Description: unknown [Arabidopsis thaliana]
  misc_feature (78)..(322): NCBI GI NO: 33146848 NR Description: copper chaperone
  misc_feature (1)..(162): NCBI GI NO: 25408515 NR Description: probable farnesylated protein
  misc_feature (246)..(345): NCBI GI NO: 25408515 NR Description: probable farnesylated protein
  misc_feature (1)..(248): NCBI GI NO: 33146848 NR Description: copper chaperone
  misc_feature (1)..(162): NCBI GI NO: 18404283 NR Description: heavy-metal-associated domain-containing protein
  misc_feature (246)..(345): NCBI GI NO: 18404283 NR Description: heavy-metal-associated domain-containing protein
  misc_feature (1)..(175): NCBI GI NO: 12083536 NR Description: hypothetical protein [Oryza sativa]
MDLQTFVLRVTIHCHGCKKKVRKVLKSVEGVQDVKVDAQLHKVMVTGTVDAETLIKRLNKSGKQALPWQHTPAKNPDPAPADAPAPAEDGSKDAAVADKKPAEEPQADSSDKKPEQETASEKKPEQETASEKKPETEKEAESEKKADKEEAKPSDEAKKDGGEGAAAEPKPKAKGTEPAAAAKEAGDDEGEAKKKQSKPKDADRSLAPAPAPAHAPRYAHQEFNAPQPVMSYNMAQPRASVSHYAPQPEQGYSQQQQAGYSSSSSMMVTQHPPPPAQQAYSQQAQPMQQWSPSYLYMPYPHASPESYYQDYYSPPGTHASPPPPPPLQDSYRLFDDENPNSCSVM

SEQ ID NO: 19184 - protein, 302 aa, Triticum aestivum
  peptide (1)..(302): Ceres Seq. ID no. 14316034
  misc_feature (1)..(188): Pfam Name: BASP1 protein Pfam Description: Brain acid soluble protein 1
  misc_feature (1)..(273): NCBI GI NO: 27754505 NR Description: putative copper chaperone (CCH) protein
  misc_feature (1)..(273): NCBI GI NO: 18405728 NR Description: copper chaperone (CCH)-related
  misc_feature (1)..(273): NCBI GI NO: 21536659 NR Description: unknown [Arabidopsis thaliana]
  misc_feature (35)..(279): NCBI GI NO: 33146848 NR Description: copper chaperone
  misc_feature (1)..(119): NCBI GI NO: 25408515 NR Description: probable farnesylated protein
  misc_feature (203)..(302): NCBI GI NO: 25408515 NR Description: probable farnesylated protein
  misc_feature (1)..(205): NCBI GI NO: 33146848 NR Description: copper chaperone
  misc_feature (1)..(119): NCBI GI NO: 18404283 NR Description: heavy-metal-associated domain-containing protein
  misc_feature (203)..(302): NCBI GI NO: 18404283 NR Description: heavy-metal-associated domain-containing protein
  misc_feature (1)..(132): NCBI GI NO: 12083536 NR Description: hypothetical protein [Oryza sativa]
MVTGTVDAETLIKRLNKSGKQALPWQHTPAKNPDPAPADAPAPAEDGSKDAAVADKKPAEEPQADSSDKKPEQETASEKKPEQETASEKKPETEKEAESEKKADKEEAKPSDEAKKDGGEGAAAEPKPKAKGTEPAAAAKEAGDDEGEAKKKQSKPKDADRSLAPAPAPAHAPRYAHQEFNAPQPVMSYNMAQPRASVSHYAPQPEQGYSQQQQAGYSSSSSMMVTQHPPPPAQQAYSQQAQPMQQWSPSYLYMPYPHASPESYYQDYYSPPGTHASPPPPPPLQDSYRLFDDENPNSCSVM

SEQ ID NO: 19185 - DNA, 1211 bp, Triticum aestivum
  misc_feature (1)..(1211): Ceres Seq. ID no. 14303535
actttggtcttccacgcccacttccagttccccacactcgcctccatcttcttctcttcgagatgcttcttaggattgcgtcgtctccggccgccgtcgccgcggctagccagctctctgcgtcaagcccggcccacggttatgcgaggctgccgccgttagcgaaagtgtcgtcgacggcgtgcagggccgcggggaaggggaaaaaagaggaggtactcctcagcggtgtgatgttccagccgttcgaggagctcaagggggagctttcgctcgtgccgcaggccgagggccagtcgctcgccaggcaaaagttcgtcgacgaatgcgaggccgccatcaacgagcagatcaatgtggagtacaatgcctcgtacgcgtaccactccctctacgcctacttcgaccgggacaatgttgctctcaagggctttgccaagttctttagggaatcgagcgacgaggagagggaacacgcggagatgcttatggagtaccagaacagacgtggagggcgggtgaggctccagtctatcgtgaccccattgacagagttcgaccactctgagaaaggggatgctctgtatgcaatggagttggctctagctcttgaaaagctcgtgaatgagaagctgcacaacctgcactctgtggcaacaaggtgcaacgatcctcagctgagcgactttgttgagagtcaatttcttcaggagcaggttgtcgccgtgaagaagatctccgagtacgtgacgcagcttaggagaatcggcaaagggcacggggtgtggcactttgatcggatgctgctcgaagaagaggcctagagatcaggccatgaatatgcattgctgctcaggggaagatgcatgtaggtcacaactcacaactgtcaagtagtggatcagccaaccactgtggatgtgtttcttgggtttttcagtgggtttattgagtcgtatgtaaggttttgcgtcctccaaaagaacatggcgcactgaaagtacttcctccgttccaaactactcgtcgcagaaatggatgtatttagaactaaaatacatctagatacacccatacctgcgacaagtaattcggaacggagggagtagtaagtagtagaacatgtgaactatgttacttctgtgcatgtgctgccagtggatacatttgaaattcgcaataaagccaggactatatgtagggtcttgggt

SEQ ID NO: 19186 - protein, 273 aa, Triticum aestivum
  peptide (1)..(273): Ceres Seq. ID no. 14303536
  misc_feature (110)..(255): Pfam Name: Pfam Description:  Ferritin-like domain
  misc_feature (6)..(273): NCBI GI NO: 82687 NR Description: ferritin 1 precursor
  misc_feature (21)..(273): NCBI GI NO: 1103628 NR Description: ferritin [Zea mays]
  misc_feature (28)..(273): NCBI GI NO: 21686526 NR Description: ferritin [Oryza sativa (japonica cultivar-group)]
  misc_feature (24)..(273): NCBI GI NO: 21686528 NR Description: ferritin [Oryza sativa (japonica cultivar-group)]
  misc_feature (21)..(273): NCBI GI NO: 29840836 NR Description: Ferritin 1, chloroplast precursor (ZmFer1)
  misc_feature (24)..(273): NCBI GI NO: 14091661 NR Description: ferritin [Oryza sativa]
  misc_feature (21)..(273): NCBI GI NO: 1103630 NR Description: ferritin [Zea mays]
  misc_feature (20)..(273): NCBI GI NO: 82688 NR Description: ferritin 2 precursor (clone FM2) - maize
  misc_feature (21)..(273): NCBI GI NO: 29840837 NR Description: Ferritin 2, chloroplast precursor (ZmFer2)
  misc_feature (33)..(271): NCBI GI NO: 29839287 NR Description: Ferritin 2, chloroplast precursor
FGLPRPLPVPHTRLHLLLFEMLLRIASSPAAVAAASQLSASSPAHGYARLPPLAKVSSTACRAAGKGKKEEVLLSGVMFQPFEELKGELSLVPQAEGQSLARQKFVDECEAAINEQINVEYNASYAYHSLYAYFDRDNVALKGFAKFFRESSDEEREHAEMLMEYQNRRGGRVRLQSIVTPLTEFDHSEKGDALYAMELALALEKLVNEKLHNLHSVATRCNDPQLSDFVESQFLQEQVVAVKKISEYVTQLRRIGKGHGVWHFDRMLLEEEA

SEQ ID NO: 19187 - protein, 253 aa, Triticum aestivum
  peptide (1)..(253): Ceres Seq. ID no. 14303537
  misc_feature (90)..(235): Pfam Name: Pfam Description:  Ferritin-like domain
  misc_feature (1)..(253): NCBI GI NO: 82687 NR Description: ferritin 1 precursor
  misc_feature (1)..(253): NCBI GI NO: 1103628 NR Description: ferritin [Zea mays]
  misc_feature (8)..(253): NCBI GI NO: 21686526 NR Description: ferritin [Oryza sativa (japonica cultivar-group)]
  misc_feature (4)..(253): NCBI GI NO: 21686528 NR Description: ferritin [Oryza sativa (japonica cultivar-group)]
  misc_feature (1)..(253): NCBI GI NO: 29840836 NR Description: Ferritin 1, chloroplast precursor (ZmFer1)
  misc_feature (4)..(253): NCBI GI NO: 14091661 NR Description: ferritin [Oryza sativa]
  misc_feature (1)..(253): NCBI GI NO: 1103630 NR Description: ferritin [Zea mays]
  misc_feature (1)..(253): NCBI GI NO: 82688 NR Description: ferritin 2 precursor (clone FM2) - maize
  misc_feature (1)..(253): NCBI GI NO: 29840837 NR Description: Ferritin 2, chloroplast precursor (ZmFer2)
  misc_feature (13)..(251): NCBI GI NO: 29839287 NR Description: Ferritin 2, chloroplast precursor
MLLRIASSPAAVAAASQLSASSPAHGYARLPPLAKVSSTACRAAGKGKKEEVLLSGVMFQPFEELKGELSLVPQAEGQSLARQKFVDECEAAINEQINVEYNASYAYHSLYAYFDRDNVALKGFAKFFRESSDEEREHAEMLMEYQNRRGGRVRLQSIVTPLTEFDHSEKGDALYAMELALALEKLVNEKLHNLHSVATRCNDPQLSDFVESQFLQEQVVAVKKISEYVTQLRRIGKGHGVWHFDRMLLEEEA

SEQ ID NO: 19188 - protein, 196 aa, Triticum aestivum
  peptide (1)..(196): Ceres Seq. ID no. 14303538
  misc_feature (33)..(178): Pfam Name: Pfam Description:  Ferritin-like domain
  misc_feature (1)..(196): NCBI GI NO: 82687 NR Description: ferritin 1 precursor
  misc_feature (1)..(196): NCBI GI NO: 1103628 NR Description: ferritin [Zea mays]
  misc_feature (1)..(196): NCBI GI NO: 21686526 NR Description: ferritin [Oryza sativa (japonica cultivar-group)]
  misc_feature (1)..(196): NCBI GI NO: 21686528 NR Description: ferritin [Oryza sativa (japonica cultivar-group)]
  misc_feature (1)..(196): NCBI GI NO: 29840836 NR Description: Ferritin 1, chloroplast precursor (ZmFer1)
  misc_feature (1)..(196): NCBI GI NO: 14091661 NR Description: ferritin [Oryza sativa]
  misc_feature (1)..(196): NCBI GI NO: 1103630 NR Description: ferritin [Zea mays]
  misc_feature (1)..(196): NCBI GI NO: 82688 NR Description: ferritin 2 precursor (clone FM2) - maize
  misc_feature (1)..(196): NCBI GI NO: 29840837 NR Description: Ferritin 2, chloroplast precursor (ZmFer2)
  misc_feature (1)..(194): NCBI GI NO: 29839287 NR Description: Ferritin 2, chloroplast precursor
MFQPFEELKGELSLVPQAEGQSLARQKFVDECEAAINEQINVEYNASYAYHSLYAYFDRDNVALKGFAKFFRESSDEEREHAEMLMEYQNRRGGRVRLQSIVTPLTEFDHSEKGDALYAMELALALEKLVNEKLHNLHSVATRCNDPQLSDFVESQFLQEQVVAVKKISEYVTQLRRIGKGHGVWHFDRMLLEEEA

SEQ ID NO: 19189 - DNA, 1241 bp, Triticum aestivum
  misc_feature (1)..(1241): Ceres Seq. ID no. 13654605
gttaccaccatcctcggcttctctgacgcgccatctccaccgtccgccgtcaatccccaccgcgccacagccgccgcccagatggccgcggctggcggcttctcccccctctccggcaccctcctccgccgccgcatacccctccaccatcaccgccgcttcctctccatcgcggccgctgcctcggaagcccccgcgcctgcccccaccccgtcccagccgccgccgccgccgcgtccacgcggaaaggggtacttccccaagaagaacgagatcctcgagctgacctgcgaggggctcgccttcaaggggaagggcgtctgcaaggtcgacggctcctccttcgtcctgctctgcgacggcgctctccccggcgagcgcctcgtggctcgcgtccgtcgcctccgccgcggcgccttcgccgaggccgccaagctcaagaccctctcgccccaccacgacgccgtcgaggccccctgccccctcgccgccgactgcggcggctgcaagagccagtccctcgcctactctgcgcaaatccaccacaagtacgtccaggtccgcgacctgctggtaaatttcggcaagtttgaccccaggaagctggagagctcggattcagacgccgtccttaagcccatcgtgccgtgcgacgagatatttcggtacaggaacaagatggagttctcgtttgggacgaagaggtggatgaaaagggagtggaaggaggagaaagaggaggtgtcgaagggggaagagttggagactgatggttattcacttggcctccatgcaccagggttctttgacaaggtgcttcacgtcgagacgtgcttgctgcacagtgagccggcagataagactaaagatgaagctagtgaagcaaatgaaaaaggagacatgggctttgatggagaatatgcacatgacactggtgatggtgaaacaatagaaggtggctatgactatgctgattacaacaacgatggctatgctgatggtggtgatgctggagcctacgaggattacgatgggattgattactaatatagtactaaaattctgagaaaacagcccaacaaaataagtcttggtcaaccggaaggggtttatttggacaatgtattatactacctccgtaccaaaatattagctgtttctttaggcgagttttgtagcacaaagaagttccaattaatgatataccgaggcactgcacagtgaagtactccctccgtccc

SEQ ID NO: 19190 - protein, 348 aa, Triticum aestivum
  peptide (1)..(348): Ceres Seq. ID no. 15219686
  misc_feature (175)..(287): Pfam Name: Uracil-5- Pfam Description: tRNA
  misc_feature (22)..(287): NCBI GI NO: 34903506 NR Description: putative RNA methyltransferase
  misc_feature (85)..(286): NCBI GI NO: 9280234 NR Description: RNA methyltransferase-like protein
  misc_feature (85)..(286): NCBI GI NO: 15232519 NR Description: expressed protein [Arabidopsis thaliana]
  misc_feature (85)..(286): NCBI GI NO: 19310570 NR Description: unknown protein [Arabidopsis thaliana]
  misc_feature (88)..(299): NCBI GI NO: 21672850 NR Description: RNA methyltransferase, TrmA family
  misc_feature (89)..(234): NCBI GI NO: 15613250 NR Description: RNA methyltransferase [Bacillus halodurans]
  misc_feature (93)..(289): NCBI GI NO: 34540828 NR Description: RNA methyltransferase, TrmA family
  misc_feature (100)..(303): NCBI GI NO: 29346053 NR Description: RNA methyltransferase
  misc_feature (88)..(234): NCBI GI NO: 16077741 NR Description: alternate gene name: yerS~similar to RNAmethyltransferase
  misc_feature (88)..(240): NCBI GI NO: 23136902 NR Description: hypothetical protein [Cytophaga hutchinsonii]
VTTILGFSDAPSPPSAVNPHRATAAAQMAAAGGFSPLSGTLLRRRIPLHHHRRFLSIAAAASEAPAPAPTPSQPPPPPRPRGKGYFPKKNEILELTCEGLAFKGKGVCKVDGSSFVLLCDGALPGERLVARVRRLRRGAFAEAAKLKTLSPHHDAVEAPCPLAADCGGCKSQSLAYSAQIHHKYVQVRDLLVNFGKFDPRKLESSDSDAVLKPIVPCDEIFRYRNKMEFSFGTKRWMKREWKEEKEEVSKGEELETDGYSLGLHAPGFFDKVLHVETCLLHSEPADKTKDEASEANEKGDMGFDGEYAHDTGDGETIEGGYDYADYNNDGYADGGDAGAYEDYDGIDY

SEQ ID NO: 19191 - protein, 321 aa, Triticum aestivum
  peptide (1)..(321): Ceres Seq. ID no. 15219687
  misc_feature (148)..(260): Pfam Name: Uracil-5- Pfam Description: tRNA
  misc_feature (1)..(260): NCBI GI NO: 34903506 NR Description: putative RNA methyltransferase
  misc_feature (58)..(259): NCBI GI NO: 9280234 NR Description: RNA methyltransferase-like protein
  misc_feature (58)..(259): NCBI GI NO: 19310570 NR Description: unknown protein [Arabidopsis thaliana]
  misc_feature (58)..(259): NCBI GI NO: 15232519 NR Description: expressed protein [Arabidopsis thaliana]
  misc_feature (61)..(272): NCBI GI NO: 21672850 NR Description: RNA methyltransferase, TrmA family
  misc_feature (62)..(207): NCBI GI NO: 15613250 NR Description: RNA methyltransferase [Bacillus halodurans]
  misc_feature (66)..(262): NCBI GI NO: 34540828 NR Description: RNA methyltransferase, TrmA family
  misc_feature (73)..(276): NCBI GI NO: 29346053 NR Description: RNA methyltransferase
  misc_feature (61)..(207): NCBI GI NO: 16077741 NR Description: alternate gene name: yerS~similar to RNAmethyltransferase
  misc_feature (61)..(213): NCBI GI NO: 23136902 NR Description: hypothetical protein [Cytophaga hutchinsonii]
MAAAGGFSPLSGTLLRRRIPLHHHRRFLSIAAAASEAPAPAPTPSQPPPPPRPRGKGYFPKKNEILELTCEGLAFKGKGVCKVDGSSFVLLCDGALPGERLVARVRRLRRGAFAEAAKLKTLSPHHDAVEAPCPLAADCGGCKSQSLAYSAQIHHKYVQVRDLLVNFGKFDPRKLESSDSDAVLKPIVPCDEIFRYRNKMEFSFGTKRWMKREWKEEKEEVSKGEELETDGYSLGLHAPGFFDKVLHVETCLLHSEPADKTKDEASEANEKGDMGFDGEYAHDTGDGETIEGGYDYADYNNDGYADGGDAGAYEDYDGIDY

SEQ ID NO: 19192 - DNA, 958 bp, Triticum aestivum
  misc_feature (1)..(958): Ceres Seq. ID no. 12614289
cagcgactagaatatcccggcccgaaacagcaaggtctctctctcgcgctcgcctctctcctcctcgtcttcggcggcggcgacggcggtggcgatgctgtccggcgacgttcccccgaaccagaccgtctacttcaggaacctcaacgagaaggtcaagaaagaagagctgaagagatcactttatgcattgtgctctcagtatggaaggatagtggatgttgtggccttgaaaactcataaactgagggggcaagcctgggtggcattcagtgaaattacagcggctaccaacgctttccggggcctacaggacttcgatttttacggcaaaaaaatgcgggtacaatatgcaaaaacaaagtctgactgttttgcaaaagcagatgggtcttatgctcctaaagagaaaaggaagaagcaagaggagaaagctgctgagaaaaaacggcgaactgaagatgggcaacaacctggtgctagtgctcctgttgccccaagcaatggaactggtcatcaaccttctcgttttgccaagcctccgcaagagccagctgctccgccgaacaacatcctcttcctccagaacatgccggaccagaccacgagcatgatgctccagatcctgttccagcaataccctggtttccgggaggtgcggatgatcgaagccaagccaggcattgcttttgtggagtacgaggatgagaaccagtccatggttgcaatggaagccctccagggtttcaagatcagcccagagaacccaatggccatctcatacgccaaaaagtgaaaacgatccatgtgatctcggaaccggccaaaagaaatctgtaactgtaagattttccaccttaagctttcaagctgctgtgctgtgcttgtgctggctttctaaccctgtatttcttggaagtgacttgcttgttgtttaagaagttaaaaagtatgtgct

SEQ ID NO: 19193 - protein, 233 aa, Triticum aestivum
  peptide (1)..(233): Ceres Seq. ID no. 12614290
  misc_feature (161)..(228): Pfam Name: a.k.a. RRM, RBD, or RNP domain Pfam Description: RNA recognition motif.
  misc_feature (1)..(233): NCBI GI NO: 421960 NR Description: small nuclear ribonucleoprotein U2B'' - potato
  misc_feature (1)..(233): NCBI GI NO: 15227729 NR Description: small nuclear ribonucleoprotein U2B, putative
  misc_feature (1)..(233): NCBI GI NO: 30679897 NR Description: small nuclear ribonucleoprotein U2B
  misc_feature (1)..(233): NCBI GI NO: 30679892 NR Description: small nuclear ribonucleoprotein U2B
  misc_feature (1)..(233): NCBI GI NO: 21593001 NR Description: putative small nuclear ribonucleoprotein U2B
  misc_feature (1)..(233): NCBI GI NO: 19347861 NR Description: putative spliceosomal protein (U2B)
  misc_feature (1)..(233): NCBI GI NO: 25294325 NR Description: hypothetical protein
  misc_feature (4)..(233): NCBI GI NO: 2119045 NR Description: small nuclear ribonucleoprotein U1A - potato
  misc_feature (1)..(233): NCBI GI NO: 34897622 NR Description: putative small nuclear ribonucleoprotein U1A
  misc_feature (5)..(233): NCBI GI NO: 15226631 NR Description: small nuclear ribonucleoprotein U1A
MLSGDVPPNQTVYFRNLNEKVKKEELKRSLYALCSQYGRIVDVVALKTHKLRGQAWVAFSEITAATNAFRGLQDFDFYGKKMRVQYAKTKSDCFAKADGSYAPKEKRKKQEEKAAEKKRRTEDGQQPGASAPVAPSNGTGHQPSRFAKPPQEPAAPPNNILFLQNMPDQTTSMMLQILFQQYPGFREVRMIEAKPGIAFVEYEDENQSMVAMEALQGFKISPENPMAISYAKK

SEQ ID NO: 19194 - protein, 152 aa, Triticum aestivum
  peptide (1)..(152): Ceres Seq. ID no. 12614291
  misc_feature (80)..(147): Pfam Name: a.k.a. RRM, RBD, or RNP domain Pfam Description: RNA recognition motif.
  misc_feature (1)..(152): NCBI GI NO: 421960 NR Description: small nuclear ribonucleoprotein U2B'' - potato
  misc_feature (1)..(152): NCBI GI NO: 15227729 NR Description: small nuclear ribonucleoprotein U2B, putative
  misc_feature (1)..(152): NCBI GI NO: 30679897 NR Description: small nuclear ribonucleoprotein U2B
  misc_feature (1)..(152): NCBI GI NO: 30679892 NR Description: small nuclear ribonucleoprotein U2B
  misc_feature (1)..(152): NCBI GI NO: 21593001 NR Description: putative small nuclear ribonucleoprotein U2B
  misc_feature (1)..(152): NCBI GI NO: 19347861 NR Description: putative spliceosomal protein (U2B)
  misc_feature (1)..(152): NCBI GI NO: 25294325 NR Description: hypothetical protein
  misc_feature (1)..(152): NCBI GI NO: 2119045 NR Description: small nuclear ribonucleoprotein U1A - potato
  misc_feature (1)..(152): NCBI GI NO: 34897622 NR Description: putative small nuclear ribonucleoprotein U1A
  misc_feature (1)..(152): NCBI GI NO: 15226631 NR Description: small nuclear ribonucleoprotein U1A
MRVQYAKTKSDCFAKADGSYAPKEKRKKQEEKAAEKKRRTEDGQQPGASAPVAPSNGTGHQPSRFAKPPQEPAAPPNNILFLQNMPDQTTSMMLQILFQQYPGFREVRMIEAKPGIAFVEYEDENQSMVAMEALQGFKISPENPMAISYAKK

SEQ ID NO: 19195 - DNA, 984 bp, Triticum aestivum
  misc_feature (1)..(984): Ceres Seq. ID no. 13596420
acaccaaccaccacctcctccgaggcacgaagtccaccacgcccccgcccgccccgcagccggccggcgacgatgtgcaccctggagcggcgcggccgggtcttcgtcctcaccctgacgggcgaggaccagcaccggctgggccacccgctcatcgccgccatccgctccgcgctggccgaggtcctggccgcggcccaggcccagccgcagggcccgggggcggccctggtgacggtcgccgagggccgcttcttctccaacgggctcgacatcgggtgggcgggcacctcccgcgcgcggctcggggagctcgtcgacgcgctccgccccgtcgccgccgacctgctggccctccccatgcccaccgtcgccgccgtcacgggccacgcctccgccgccggcttcctcctcgcgctctgccacgactaccgcgtcatgcgcgccgaccgcggcgtgctctacatgagcgaggtcgacatcggcctccccctcccgccctacttcgtgcacgtgctccgcgccaagatctcccaggcgcaggccctgcgggacgtggtgctgcgcgggaagaagctccgggcgcccgaggccagggagatgggcgtcgtcgacgtcgtctgccccggcgcccccgagaccgccgccgaggccctcaagctcgccgagcagctcgccgccaggaagtgggacggcgccgtgtacgcgtcgattaggatgtccatgttccccgatgcgtgcagggccgtcgggatcgccgtggagagcgacgaggagaagagcaggcacttcgcctccaggctctgatcaggacacagattggagagtgtctatgtaacctgaaatctctcttggtattctgcacctgtacattgatcagccatcggtgctctgtatgaagcaagcagtacatacttctgcagacgttgtatctccttgctttgggagcatgaaataaacacaacgcttgtgtacgactgttgg

SEQ ID NO: 19196 - protein, 268 aa, Triticum aestivum
  peptide (1)..(268): Ceres Seq. ID no. 13596421
  misc_feature (36)..(205): Pfam Name: Pfam Description:  Enoyl-CoA hydratase/isomerase family
  misc_feature (25)..(252): NCBI GI NO: 21555734 NR Description: carnitine racemase like protein
  misc_feature (25)..(252): NCBI GI NO: 15236498 NR Description: enoyl-CoA hydratase/isomerase family
  misc_feature (25)..(256): NCBI GI NO: 15236499 NR Description: enoyl-CoA hydratase/isomerase family
  misc_feature (23)..(245): NCBI GI NO: 34903766 NR Description: unnamed protein product
  misc_feature (25)..(268): NCBI GI NO: 15218713 NR Description: enoyl-CoA hydratase/isomerase family
  misc_feature (12)..(250): NCBI GI NO: 23017142 NR Description: hypothetical protein [Thermobifida fusca]
  misc_feature (33)..(250): NCBI GI NO: 15828352 NR Description: possible enoyl-CoA hydratase
  misc_feature (46)..(215): NCBI GI NO: 21230604 NR Description: conserved hypothetical protein
  misc_feature (27)..(248): NCBI GI NO: 40739395 NR Description: hypothetical protein AN6767.2
  misc_feature (46)..(226): NCBI GI NO: 23017529 NR Description: hypothetical protein [Thermobifida fusca]
TPTTTSSEARSPPRPRPPRSRPATMCTLERRGRVFVLTLTGEDQHRLGHPLIAAIRSALAEVLAAAQAQPQGPGAALVTVAEGRFFSNGLDIGWAGTSRARLGELVDALRPVAADLLALPMPTVAAVTGHASAAGFLLALCHDYRVMRADRGVLYMSEVDIGLPLPPYFVHVLRAKISQAQALRDVVLRGKKLRAPEAREMGVVDVVCPGAPETAAEALKLAEQLAARKWDGAVYASIRMSMFPDACRAVGIAVESDEEKSRHFASRL

SEQ ID NO: 19197 - protein, 244 aa, Triticum aestivum
  peptide (1)..(244): Ceres Seq. ID no. 13596422
  misc_feature (12)..(181): Pfam Name: Pfam Description:  Enoyl-CoA hydratase/isomerase family
  misc_feature (1)..(228): NCBI GI NO: 21555734 NR Description: carnitine racemase like protein
  misc_feature (1)..(228): NCBI GI NO: 15236498 NR Description: enoyl-CoA hydratase/isomerase family
  misc_feature (1)..(232): NCBI GI NO: 15236499 NR Description: enoyl-CoA hydratase/isomerase family
  misc_feature (1)..(221): NCBI GI NO: 34903766 NR Description: unnamed protein product
  misc_feature (1)..(244): NCBI GI NO: 15218713 NR Description: enoyl-CoA hydratase/isomerase family
  misc_feature (1)..(226): NCBI GI NO: 23017142 NR Description: hypothetical protein [Thermobifida fusca]
  misc_feature (9)..(226): NCBI GI NO: 15828352 NR Description: possible enoyl-CoA hydratase
  misc_feature (22)..(191): NCBI GI NO: 21230604 NR Description: conserved hypothetical protein
  misc_feature (3)..(224): NCBI GI NO: 40739395 NR Description: hypothetical protein AN6767.2
  misc_feature (22)..(202): NCBI GI NO: 23017529 NR Description: hypothetical protein [Thermobifida fusca]
MCTLERRGRVFVLTLTGEDQHRLGHPLIAAIRSALAEVLAAAQAQPQGPGAALVTVAEGRFFSNGLDIGWAGTSRARLGELVDALRPVAADLLALPMPTVAAVTGHASAAGFLLALCHDYRVMRADRGVLYMSEVDIGLPLPPYFVHVLRAKISQAQALRDVVLRGKKLRAPEAREMGVVDVVCPGAPETAAEALKLAEQLAARKWDGAVYASIRMSMFPDACRAVGIAVESDEEKSRHFASRL

SEQ ID NO: 19198 - protein, 237 aa, Triticum aestivum
  peptide (1)..(237): Ceres Seq. ID no. 13596423
  misc_feature (24)..(232): Pfam Name: Pfam Description:  HlyD family secretion protein
  misc_feature (7)..(237): NCBI GI NO: 29247944 NR Description: GLP_26_54603_52153 [Giardia lamblia ATCC 50803]
  misc_feature (27)..(233): NCBI GI NO: 23018055 NR Description: hypothetical protein [Thermobifida fusca]
  misc_feature (6)..(231): NCBI GI NO: 29247944 NR Description: GLP_26_54603_52153 [Giardia lamblia ATCC 50803]
  misc_feature (90)..(237): NCBI GI NO: 18958209 NR Description: subtilisin-like protease PR1G
  misc_feature (16)..(229): NCBI GI NO: 23104656 NR Description: hypothetical protein [Azotobacter vinelandii]
  misc_feature (14)..(231): NCBI GI NO: 23105938 NR Description: hypothetical protein [Azotobacter vinelandii]
  misc_feature (8)..(232): NCBI GI NO: 23018055 NR Description: hypothetical protein [Thermobifida fusca]
  misc_feature (7)..(237): NCBI GI NO: 25143299 NR Description: pre-mRNA splicing SR protein related RSR-1 (68
  misc_feature (62)..(235): NCBI GI NO: 23104656 NR Description: hypothetical protein [Azotobacter vinelandii]
  misc_feature (15)..(173): NCBI GI NO: 25989119 NR Description: unknown [Streptomyces aureofaciens]
TNHHLLRGTKSTTPPPAPQPAGDDVHPGAARPGLRPHPDGRGPAPAGPPAHRRHPLRAGRGPGRGPGPAAGPGGGPGDGRRGPLLLQRARHRVGGHLPRAARGARRRAPPRRRRPAGPPHAHRRRRHGPRLRRRLPPRALPRLPRHARRPRRALHERGRHRPPPPALLRARAPRQDLPGAGPAGRGAAREEAPGARGQGDGRRRRRLPRRPRDRRRGPQARRAARRQEVGRRRVRVD

SEQ ID NO: 19199 - DNA, 1421 bp, Triticum aestivum
  misc_feature (1)..(1421): Ceres Seq. ID no. 13598353
aaaaaaaaaaaaagtatttttcccgtcgttacttcacttccggtgttccctcccctgctggcggctgccggggagcgcagccgcaccagccagccatgaagcgcttcttccagcccgtactcaaggacggatcccccgccaagaagaggcccgccggagccgcgatctctgactgcgttgatggccgcgcccccaccgcggccgacgccggcggggacggccctcccggcgaggagccacgcaggttcatcacgtggaacgccaacagccttctgctccggatgaagagcgactggcccgcgttctgtcagttcgtcgcccgcctcgaccccgacgtcatctgcgtccaggaagtgcggatgccagcagctggttccaaaggggcacctaaaaatcctagtgagctaaaagacgacacaacgtcgtcacgcgaagaaaaacagacagtgctgcgtgctttgtcgagctcacctttcaaagactaccgtgtgtggtggtccctttcagattcaaaatatgcaggcacagctgtgtttatgaagaagaagtttgaaccaaagaaagtgtcattcaacttggatagaacatctactaagcatgatgcagacggtcgtgtcatcattgtggaatttgaatcattcttgttgctaaacacatatgctccaaacaacgggtggaaagaggaggaaaattcatttcaaagaagaagaaagtgggataaaagaatgtcggagtttgttcaacaagtagacaagcccttaatctggtgcggagacctgaacgttagtcatgacgaaatcgatgtcagccatcctgatttttttagcgatgctaagctcaatggatatatccctccaaataaagaggactgtggacagccaggattcacccttgcagagagacagcgctttggcaatatattgtcccagggaaagctggtagatgcttacagatacctgcacaaagaaaaagacatggagtgtggcttctcttggtctgggaatccagttgggaagtaccgaggaaagagaatgcggattgactattttgttatttcagaagggttgaaagacagaattgtttcatgtgaaatgcatggtcatggaattgaactggaaggattttatggaagtgatcactgtcctgtttcacttgtgctctccaaagaagcagcggaagcaccagaatcgaagagctccagctaacttctgtgtttttctcgaaccggacaccatggattattagattattattaggtcagttgaagcgcttggcctatcatgagctatttaaacattttttatgacctgtaggccactactgcggcgcaccctctagtccggatctggattggaattagagttcaactcttactgtgatcagctattggtatctaagttcagatttctaagagttgttcc

SEQ ID NO: 19200 - protein, 400 aa, Triticum aestivum
  peptide (1)..(400): Ceres Seq. ID no. 13598354
  misc_feature (147)..(386): Pfam Name: Pfam Description:  Endonuclease/Exonuclease/phosphatase family
  misc_feature (147)..(395): NCBI GI NO: 18481705 NR Description: putative T29H11.60 protein [Sorghum bicolor]
  misc_feature (32)..(118): NCBI GI NO: 18481705 NR Description: putative T29H11.60 protein [Sorghum bicolor]
  misc_feature (31)..(400): NCBI GI NO: 7487536 NR Description: hypothetical protein T29H11
  misc_feature (136)..(400): NCBI GI NO: 18408629 NR Description: endonuclease/exonuclease/phosphatase family
  misc_feature (32)..(147): NCBI GI NO: 18408629 NR Description: endonuclease/exonuclease/phosphatase family
  misc_feature (49)..(319): NCBI GI NO: 14578320 NR Description: PV1H14200_P [Plasmodium vivax]
  misc_feature (336)..(393): NCBI GI NO: 14578320 NR Description: PV1H14200_P [Plasmodium vivax]
  misc_feature (149)..(384): NCBI GI NO: 23490314 NR Description: putative AP endonuclease-related
  misc_feature (77)..(163): NCBI GI NO: 23490314 NR Description: putative AP endonuclease-related
  misc_feature (130)..(389): NCBI GI NO: 23957727 NR Description: AP endonuclease
KKKKYFSRRYFTSGVPSPAGGCRGAQPHQPAMKRFFQPVLKDGSPAKKRPAGAAISDCVDGRAPTAADAGGDGPPGEEPRRFITWNANSLLLRMKSDWPAFCQFVARLDPDVICVQEVRMPAAGSKGAPKNPSELKDDTTSSREEKQTVLRALSSSPFKDYRVWWSLSDSKYAGTAVFMKKKFEPKKVSFNLDRTSTKHDADGRVIIVEFESFLLLNTYAPNNGWKEEENSFQRRRKWDKRMSEFVQQVDKPLIWCGDLNVSHDEIDVSHPDFFSDAKLNGYIPPNKEDCGQPGFTLAERQRFGNILSQGKLVDAYRYLHKEKDMECGFSWSGNPVGKYRGKRMRIDYFVISEGLKDRIVSCEMHGHGIELEGFYGSDHCPVSLVLSKEAAEAPESKSSS

SEQ ID NO: 19201 - protein, 369 aa, Triticum aestivum
  peptide (1)..(369): Ceres Seq. ID no. 13598355
  misc_feature (116)..(355): Pfam Name: Pfam Description:  Endonuclease/Exonuclease/phosphatase family
  misc_feature (116)..(364): NCBI GI NO: 18481705 NR Description: putative T29H11.60 protein [Sorghum bicolor]
  misc_feature (1)..(87): NCBI GI NO: 18481705 NR Description: putative T29H11.60 protein [Sorghum bicolor]
  misc_feature (1)..(369): NCBI GI NO: 7487536 NR Description: hypothetical protein T29H11
  misc_feature (105)..(369): NCBI GI NO: 18408629 NR Description: endonuclease/exonuclease/phosphatase family
  misc_feature (1)..(116): NCBI GI NO: 18408629 NR Description: endonuclease/exonuclease/phosphatase family
  misc_feature (18)..(288): NCBI GI NO: 14578320 NR Description: PV1H14200_P [Plasmodium vivax]
  misc_feature (305)..(362): NCBI GI NO: 14578320 NR Description: PV1H14200_P [Plasmodium vivax]
  misc_feature (118)..(353): NCBI GI NO: 23490314 NR Description: putative AP endonuclease-related
  misc_feature (46)..(132): NCBI GI NO: 23490314 NR Description: putative AP endonuclease-related
  misc_feature (99)..(358): NCBI GI NO: 23957727 NR Description: AP endonuclease
MKRFFQPVLKDGSPAKKRPAGAAISDCVDGRAPTAADAGGDGPPGEEPRRFITWNANSLLLRMKSDWPAFCQFVARLDPDVICVQEVRMPAAGSKGAPKNPSELKDDTTSSREEKQTVLRALSSSPFKDYRVWWSLSDSKYAGTAVFMKKKFEPKKVSFNLDRTSTKHDADGRVIIVEFESFLLLNTYAPNNGWKEEENSFQRRRKWDKRMSEFVQQVDKPLIWCGDLNVSHDEIDVSHPDFFSDAKLNGYIPPNKEDCGQPGFTLAERQRFGNILSQGKLVDAYRYLHKEKDMECGFSWSGNPVGKYRGKRMRIDYFVISEGLKDRIVSCEMHGHGIELEGFYGSDHCPVSLVLSKEAAEAPESKSSS

SEQ ID NO: 19202 - protein, 307 aa, Triticum aestivum
  peptide (1)..(307): Ceres Seq. ID no. 13598356
  misc_feature (54)..(293): Pfam Name: Pfam Description:  Endonuclease/Exonuclease/phosphatase family
  misc_feature (54)..(302): NCBI GI NO: 18481705 NR Description: putative T29H11.60 protein [Sorghum bicolor]
  misc_feature (1)..(25): NCBI GI NO: 18481705 NR Description: putative T29H11.60 protein [Sorghum bicolor]
  misc_feature (1)..(307): NCBI GI NO: 7487536 NR Description: hypothetical protein T29H11
  misc_feature (43)..(307): NCBI GI NO: 18408629 NR Description: endonuclease/exonuclease/phosphatase family
  misc_feature (1)..(54): NCBI GI NO: 18408629 NR Description: endonuclease/exonuclease/phosphatase family
  misc_feature (1)..(226): NCBI GI NO: 14578320 NR Description: PV1H14200_P [Plasmodium vivax]
  misc_feature (243)..(300): NCBI GI NO: 14578320 NR Description: PV1H14200_P [Plasmodium vivax]
  misc_feature (56)..(291): NCBI GI NO: 23490314 NR Description: putative AP endonuclease-related
  misc_feature (1)..(70): NCBI GI NO: 23490314 NR Description: putative AP endonuclease-related
  misc_feature (37)..(296): NCBI GI NO: 23957727 NR Description: AP endonuclease
MKSDWPAFCQFVARLDPDVICVQEVRMPAAGSKGAPKNPSELKDDTTSSREEKQTVLRALSSSPFKDYRVWWSLSDSKYAGTAVFMKKKFEPKKVSFNLDRTSTKHDADGRVIIVEFESFLLLNTYAPNNGWKEEENSFQRRRKWDKRMSEFVQQVDKPLIWCGDLNVSHDEIDVSHPDFFSDAKLNGYIPPNKEDCGQPGFTLAERQRFGNILSQGKLVDAYRYLHKEKDMECGFSWSGNPVGKYRGKRMRIDYFVISEGLKDRIVSCEMHGHGIELEGFYGSDHCPVSLVLSKEAAEAPESKSSS

SEQ ID NO: 19203 - DNA, 1728 bp, Triticum aestivum
  misc_feature (1)..(1728): Ceres Seq. ID no. 13662416
agcgttctactcctctcttttgtttcccctcgacggcggcggcggcggcggcaaccagggtttagaggaggagaagcttgctcggcgcaaaaccctagccccgcaccttcatctacggattcatcgcgcctctgcagcgcatccttgccgagtgccccgcctcgctgcatcggcggtcgcgatgagggtgaaggtgatatcgcgctcgaccgacgacttcacgcgcgagcgcagccaggacctgcagaaagtattccgcaattatgatccagcactccgtagtcaagagaaagctgttgagtacactcgagcccttaatgctgcaaagttagagaagatatttgccaggccatttattggagcaatggatggtcacattgatgctgtttcgtgcatggcgaagaactccaattatgtgaaagctatgttttctggctcgatggatggggatattcgactatgggacattgctgcaaggaagacagtctgccagttccctggacaccagggtgctgtgagaggtttggcaacatctaccgacggcgatcttctgatatcctgtggtgttgattgcactgttcgactctggaaagatcctatgcgtaagatgatggacactaatgatgctattggagatgcttcccagccgtcagcagtctatacatggaagcatgcattttggggtgttgaccaccagtgggatcgtaatgttttcgcaactgtaggtgctcaggtagatatatgggaccataacaggtcggagccaataaataccttcgaatggggtaaagatacagttctttctgtgcggtttaatcctggagaacctgatgttttacttacatcatctagtgatcggagtttaacactttttgacctgcgcatgtcatccccagctagaaagttaatcatgaagacaaggtgcaattcagtttgctggaaccctagggagcccatgaacttcactgctgcaaacgaagatacaaactgttattcttttgatgctagaaagctgaatgaagccaaggttgttcacaagggtcatgtttcagcagtgatggatgttgattacaacccaacaggacgggaatttgttactggttcctacgatagaacggtacggatcttcaattataacggtgatcatagcagggagatataccatactaagaggatgcaaagggtgttttgtgtgaaatacacatatgatgggacctatctagtttctggcagtgatgacacaaatcttcgtctgtggaagtccaaagcttcagaacaattgggagttattcttccaagggaacgcaaaaagcaagaatatcttgatgctgtcaaggcgcggtataatcaccttccagaaatcaggcggattgacaaacataagcacttgcccaagccgatctacaaggcaggcaagataaggcgcgccatgattgaagcagaaagccggaaagaagaaagaaggcgagcgcacagtgctccagggagcaggactatgcagcccttcagaaagagaaggctcatcacagaagttgagtagggtgggatctgaccatcgcgaggccaaacaaagtggcattacgttggagtattatttttggtcgagtgtgagtgatgggaagctgggaacatatttattatgtgtagtgtcatgttgttacttgcaaaccttggacaacgtaccggattacttttgagaaggaaataaagaggacttgttgtatgggc

SEQ ID NO: 19204 - protein, 512 aa, Triticum aestivum
  peptide (1)..(512): Ceres Seq. ID no. 13662417
  misc_feature (61)..(512): NCBI GI NO: 34904476 NR Description: putative DKFZP564O0463 protein
  misc_feature (61)..(512): NCBI GI NO: 13937179 NR Description: AT4g28450/F20O9_130 [Arabidopsis thaliana]
  misc_feature (61)..(512): NCBI GI NO: 17065094 NR Description: SOF1 protein-like protein [Arabidopsis thaliana]
  misc_feature (84)..(512): NCBI GI NO: 30687972 NR Description: transducin / WD-40 repeat protein family
  misc_feature (55)..(512): NCBI GI NO: 22760354 NR Description: unnamed protein product [Homo sapiens]
  misc_feature (61)..(512): NCBI GI NO: 38348458 NR Description: Unknown (protein for MGC:65348) [Mus musculus]
  misc_feature (61)..(512): NCBI GI NO: 19913460 NR Description: DKFZP564O0463 protein [Homo sapiens]
  misc_feature (61)..(512): NCBI GI NO: 27769416 NR Description: Similar to DKFZP564O0463 protein [Xenopus laevis]
  misc_feature (62)..(510): NCBI GI NO: 40740135 NR Description: hypothetical protein AN4226.2
  misc_feature (61)..(512): NCBI GI NO: 39595100 NR Description: Hypothetical protein CBG03683
AFYSSLLFPLDGGGGGGNQGLEEEKLARRKTLAPHLHLRIHRASAAHPCRVPRLAASAVAMRVKVISRSTDDFTRERSQDLQKVFRNYDPALRSQEKAVEYTRALNAAKLEKIFARPFIGAMDGHIDAVSCMAKNSNYVKAMFSGSMDGDIRLWDIAARKTVCQFPGHQGAVRGLATSTDGDLLISCGVDCTVRLWKDPMRKMMDTNDAIGDASQPSAVYTWKHAFWGVDHQWDRNVFATVGAQVDIWDHNRSEPINTFEWGKDTVLSVRFNPGEPDVLLTSSSDRSLTLFDLRMSSPARKLIMKTRCNSVCWNPREPMNFTAANEDTNCYSFDARKLNEAKVVHKGHVSAVMDVDYNPTGREFVTGSYDRTVRIFNYNGDHSREIYHTKRMQRVFCVKYTYDGTYLVSGSDDTNLRLWKSKASEQLGVILPRERKKQEYLDAVKARYNHLPEIRRIDKHKHLPKPIYKAGKIRRAMIEAESRKEERRRAHSAPGSRTMQPFRKRRLITEVE

SEQ ID NO: 19205 - protein, 452 aa, Triticum aestivum
  peptide (1)..(452): Ceres Seq. ID no. 13662418
  misc_feature (1)..(452): NCBI GI NO: 34904476 NR Description: putative DKFZP564O0463 protein
  misc_feature (1)..(452): NCBI GI NO: 13937179 NR Description: AT4g28450/F20O9_130 [Arabidopsis thaliana]
  misc_feature (1)..(452): NCBI GI NO: 17065094 NR Description: SOF1 protein-like protein [Arabidopsis thaliana]
  misc_feature (24)..(452): NCBI GI NO: 30687972 NR Description: transducin / WD-40 repeat protein family
  misc_feature (1)..(452): NCBI GI NO: 22760354 NR Description: unnamed protein product [Homo sapiens]
  misc_feature (1)..(452): NCBI GI NO: 38348458 NR Description: Unknown (protein for MGC:65348) [Mus musculus]
  misc_feature (1)..(452): NCBI GI NO: 19913460 NR Description: DKFZP564O0463 protein [Homo sapiens]
  misc_feature (1)..(452): NCBI GI NO: 27769416 NR Description: Similar to DKFZP564O0463 protein [Xenopus laevis]
  misc_feature (2)..(450): NCBI GI NO: 40740135 NR Description: hypothetical protein AN4226.2
  misc_feature (1)..(452): NCBI GI NO: 39595100 NR Description: Hypothetical protein CBG03683
MRVKVISRSTDDFTRERSQDLQKVFRNYDPALRSQEKAVEYTRALNAAKLEKIFARPFIGAMDGHIDAVSCMAKNSNYVKAMFSGSMDGDIRLWDIAARKTVCQFPGHQGAVRGLATSTDGDLLISCGVDCTVRLWKDPMRKMMDTNDAIGDASQPSAVYTWKHAFWGVDHQWDRNVFATVGAQVDIWDHNRSEPINTFEWGKDTVLSVRFNPGEPDVLLTSSSDRSLTLFDLRMSSPARKLIMKTRCNSVCWNPREPMNFTAANEDTNCYSFDARKLNEAKVVHKGHVSAVMDVDYNPTGREFVTGSYDRTVRIFNYNGDHSREIYHTKRMQRVFCVKYTYDGTYLVSGSDDTNLRLWKSKASEQLGVILPRERKKQEYLDAVKARYNHLPEIRRIDKHKHLPKPIYKAGKIRRAMIEAESRKEERRRAHSAPGSRTMQPFRKRRLITEVE

SEQ ID NO: 19206 - protein, 391 aa, Triticum aestivum
  peptide (1)..(391): Ceres Seq. ID no. 13662419
  misc_feature (1)..(391): NCBI GI NO: 34904476 NR Description: putative DKFZP564O0463 protein
  misc_feature (1)..(391): NCBI GI NO: 13937179 NR Description: AT4g28450/F20O9_130 [Arabidopsis thaliana]
  misc_feature (1)..(391): NCBI GI NO: 17065094 NR Description: SOF1 protein-like protein [Arabidopsis thaliana]
  misc_feature (1)..(391): NCBI GI NO: 30687972 NR Description: transducin / WD-40 repeat protein family
  misc_feature (1)..(391): NCBI GI NO: 22760354 NR Description: unnamed protein product [Homo sapiens]
  misc_feature (1)..(391): NCBI GI NO: 38348458 NR Description: Unknown (protein for MGC:65348) [Mus musculus]
  misc_feature (1)..(391): NCBI GI NO: 19913460 NR Description: DKFZP564O0463 protein [Homo sapiens]
  misc_feature (1)..(391): NCBI GI NO: 27769416 NR Description: Similar to DKFZP564O0463 protein [Xenopus laevis]
  misc_feature (1)..(389): NCBI GI NO: 40740135 NR Description: hypothetical protein AN4226.2
  misc_feature (1)..(391): NCBI GI NO: 39595100 NR Description: Hypothetical protein CBG03683
MDGHIDAVSCMAKNSNYVKAMFSGSMDGDIRLWDIAARKTVCQFPGHQGAVRGLATSTDGDLLISCGVDCTVRLWKDPMRKMMDTNDAIGDASQPSAVYTWKHAFWGVDHQWDRNVFATVGAQVDIWDHNRSEPINTFEWGKDTVLSVRFNPGEPDVLLTSSSDRSLTLFDLRMSSPARKLIMKTRCNSVCWNPREPMNFTAANEDTNCYSFDARKLNEAKVVHKGHVSAVMDVDYNPTGREFVTGSYDRTVRIFNYNGDHSREIYHTKRMQRVFCVKYTYDGTYLVSGSDDTNLRLWKSKASEQLGVILPRERKKQEYLDAVKARYNHLPEIRRIDKHKHLPKPIYKAGKIRRAMIEAESRKEERRRAHSAPGSRTMQPFRKRRLITEVE

SEQ ID NO: 19207 - DNA, 1370 bp, Triticum aestivum
  misc_feature (1)..(1370): Ceres Seq. ID no. 13596227
atcaccagtaaagcagcaagtaattccactctcgccgccgcagccagccagcctccggcgctctctcggacgctcccgcatacgtacaagcaaaagcaaccagagccagccatgtgccccggggcgccggtcgcggcggcggcgtcggacaagagcgtgtgcgtgatggacgcgtccggcccgctgggccacgcgctcgtgcaccgcctcctccgccggggctacaccgtccacgccgccacctacggccactcgctcgacgcgctcgcgctgctcgccgccgccggccacgacgaggaccggctcaagctcttccgcgccgaccccttcgactaccacaccatcgccgacgccgtccgcggctgctccggcctcttctgcatgttcaacacccacgaggaccaggcgggctgcgacgaggttatggtggaggtggaggtccgggcggcgcagaacgtgctggaggcgtgcgcgcagacggtgaccatggagagggtggtcttcacctcctccgtcaccgccgtcgtctggaaggacgaccacaagctggtcgacgcctttgacgagaggaactggagcgacctcaacctctgcaggaaacgcaagttgtggcacgctctggcaaagacgctgtcggagaagacggcctgggccttggccatggacagaggggtggacatggtggccatcaacgccggcctgctcaccgggccggggctctcctccgcccacccctgcctcaagggggtcccggagatgtacgagcacggcgtcctcgtcaccgtcgacgccgacttcctcgccgacgcccacgtggctgcctacgagtgccccacggcgttcggccgctacctctgcttcaacaatgtcgtgtgcaggcctgaggacgccctccagttcgctcagatgctcaccccgtccgctccatgctacccgccaagtgacgagctgaaggtgatcccgcagaggattcagaacaagaagctgaacaacctgatggtggagtttgccagtgccatatacggggacttggattagggattccattattcattcgtttacctcacaagggcagctagggttgtattctttatgtacctaaatatctgtattctttttcctcctgaaaagggaaatatggttggtcagatgtacaaatctgtacgaggccaagcatgccgcatgtattccactcttaccaggctggtaagagcatttgagccagtgcttagcaaggtagtaatccttaggtccaccaaaagggaaaataagtctgcagttatgttactgccttgtacagcagcaatatatgaatatatgatggtgaacaaatgttgaaaaaaaaaaaaaaaaaagcttatcgataccgt

SEQ ID NO: 19208 - protein, 345 aa, Triticum aestivum
  peptide (1)..(345): Ceres Seq. ID no. 15221812
  misc_feature (51)..(345): NCBI GI NO: 37537132 NR Description: putative cinnamoyl-CoA reductase
  misc_feature (54)..(333): NCBI GI NO: 25412171 NR Description: probable cinnamoyl CoA reductase
  misc_feature (54)..(333): NCBI GI NO: 18400407 NR Description: cinnamoyl-CoA reductase-related
  misc_feature (54)..(333): NCBI GI NO: 21553382 NR Description: putative cinnamoyl CoA reductase
  misc_feature (50)..(339): NCBI GI NO: 15234751 NR Description: cinnamoyl-CoA reductase-related
  misc_feature (50)..(339): NCBI GI NO: 21553548 NR Description: cinnamoyl-CoA reductase-like protein
  misc_feature (41)..(336): NCBI GI NO: 3341511 NR Description: cinnamoyl-CoA reductase [Saccharum officinarum]
  misc_feature (51)..(339): NCBI GI NO: 17978649 NR Description: cinnamoyl-CoA reductase [Pinus taeda]
  misc_feature (41)..(336): NCBI GI NO: 3242328 NR Description: cinnamoyl-CoA reductase [Zea mays]
  misc_feature (47)..(304): NCBI GI NO: 34911590 NR Description: putative cinnamoyl CoA reductase
ITSKAASNSTLAAAASQPPALSRTLPHTYKQKQPEPAMCPGAPVAAAASDKSVCVMDASGPLGHALVHRLLRRGYTVHAATYGHSLDALALLAAAGHDEDRLKLFRADPFDYHTIADAVRGCSGLFCMFNTHEDQAGCDEVMVEVEVRAAQNVLEACAQTVTMERVVFTSSVTAVVWKDDHKLVDAFDERNWSDLNLCRKRKLWHALAKTLSEKTAWALAMDRGVDMVAINAGLLTGPGLSSAHPCLKGVPEMYEHGVLVTVDADFLADAHVAAYECPTAFGRYLCFNNVVCRPEDALQFAQMLTPSAPCYPPSDELKVIPQRIQNKKLNNLMVEFASAIYGDLD

SEQ ID NO: 19209 - protein, 308 aa, Triticum aestivum
  peptide (1)..(308): Ceres Seq. ID no. 15221813
  misc_feature (14)..(308): NCBI GI NO: 37537132 NR Description: putative cinnamoyl-CoA reductase
  misc_feature (17)..(296): NCBI GI NO: 25412171 NR Description: probable cinnamoyl CoA reductase
  misc_feature (17)..(296): NCBI GI NO: 18400407 NR Description: cinnamoyl-CoA reductase-related
  misc_feature (17)..(296): NCBI GI NO: 21553382 NR Description: putative cinnamoyl CoA reductase
  misc_feature (13)..(302): NCBI GI NO: 15234751 NR Description: cinnamoyl-CoA reductase-related
  misc_feature (13)..(302): NCBI GI NO: 21553548 NR Description: cinnamoyl-CoA reductase-like protein
  misc_feature (4)..(299): NCBI GI NO: 3341511 NR Description: cinnamoyl-CoA reductase [Saccharum officinarum]
  misc_feature (14)..(302): NCBI GI NO: 17978649 NR Description: cinnamoyl-CoA reductase [Pinus taeda]
  misc_feature (4)..(299): NCBI GI NO: 3242328 NR Description: cinnamoyl-CoA reductase [Zea mays]
  misc_feature (10)..(267): NCBI GI NO: 34911590 NR Description: putative cinnamoyl CoA reductase
MCPGAPVAAAASDKSVCVMDASGPLGHALVHRLLRRGYTVHAATYGHSLDALALLAAAGHDEDRLKLFRADPFDYHTIADAVRGCSGLFCMFNTHEDQAGCDEVMVEVEVRAAQNVLEACAQTVTMERVVFTSSVTAVVWKDDHKLVDAFDERNWSDLNLCRKRKLWHALAKTLSEKTAWALAMDRGVDMVAINAGLLTGPGLSSAHPCLKGVPEMYEHGVLVTVDADFLADAHVAAYECPTAFGRYLCFNNVVCRPEDALQFAQMLTPSAPCYPPSDELKVIPQRIQNKKLNNLMVEFASAIYGDLD

SEQ ID NO: 19210 - protein, 290 aa, Triticum aestivum
  peptide (1)..(290): Ceres Seq. ID no. 15221814
  misc_feature (1)..(290): NCBI GI NO: 37537132 NR Description: putative cinnamoyl-CoA reductase
  misc_feature (1)..(278): NCBI GI NO: 25412171 NR Description: probable cinnamoyl CoA reductase
  misc_feature (1)..(278): NCBI GI NO: 18400407 NR Description: cinnamoyl-CoA reductase-related
  misc_feature (1)..(278): NCBI GI NO: 21553382 NR Description: putative cinnamoyl CoA reductase
  misc_feature (1)..(284): NCBI GI NO: 15234751 NR Description: cinnamoyl-CoA reductase-related
  misc_feature (1)..(284): NCBI GI NO: 21553548 NR Description: cinnamoyl-CoA reductase-like protein
  misc_feature (1)..(281): NCBI GI NO: 3341511 NR Description: cinnamoyl-CoA reductase [Saccharum officinarum]
  misc_feature (1)..(284): NCBI GI NO: 17978649 NR Description: cinnamoyl-CoA reductase [Pinus taeda]
  misc_feature (1)..(281): NCBI GI NO: 3242328 NR Description: cinnamoyl-CoA reductase [Zea mays]
  misc_feature (1)..(249): NCBI GI NO: 34911590 NR Description: putative cinnamoyl CoA reductase
MDASGPLGHALVHRLLRRGYTVHAATYGHSLDALALLAAAGHDEDRLKLFRADPFDYHTIADAVRGCSGLFCMFNTHEDQAGCDEVMVEVEVRAAQNVLEACAQTVTMERVVFTSSVTAVVWKDDHKLVDAFDERNWSDLNLCRKRKLWHALAKTLSEKTAWALAMDRGVDMVAINAGLLTGPGLSSAHPCLKGVPEMYEHGVLVTVDADFLADAHVAAYECPTAFGRYLCFNNVVCRPEDALQFAQMLTPSAPCYPPSDELKVIPQRIQNKKLNNLMVEFASAIYGDLD

SEQ ID NO: 19211 - DNA, 1264 bp, Triticum aestivum
  misc_feature (1)..(1264): Ceres Seq. ID no. 13596436
aaaaacaaaatccacaaaagatcttgcagaaattaaaaataggaaacggaaacgcccccctctctctcttccagctcctcctccacgccaccccgattcgatcactccccgagcagaatccccccgattcgatcaccggcgaggagaggagggaggggatgaggaagcgggagcgggagaacccgtgcgggatctgcgggcactaccacaagtacgaggagggggagccgtgcggggtgtgcggccaccgcccgccggcgctggggcccgccgggccggcggccgcgccgcggcaggagtcggcgttcccctcggagatactcaaggacttcctcttcctcggcagctacgacaacgcctcccgctccgagctcctcaagaccatcggcatctcccacatcctcaacactgtacccttatgccaaaacctttaccggaactcttttacttatcactgccttcaagacgacaagactttgcagtttgatgatgcaatccaattcctagaacaatgcgagagggataaagcacgagtgctagtccattgcatgtcagggaaaagtaggtcagctgcatttgttgtagccttcttgatgaagtccagaggctggcgacttgcacaatgttttcagtgggtgaaagaacggaggccacaagtgcaactggctgatgcggcacagcagcagttgattgagtatgagcagaagcttttcagttgcaatgttgctccaacggattcattcccttctcttggatttggttttccgaagccgtctggtgatgtccaggtgcctatctttaaccagcaggctccagggtccatctttgagcgggtcagcccgaataacatcccgagtaatttcacatttggggccaccgaagctaagctcccggatggcagtaacttcggtgtggtcaacttggctgggactgatagcatgatggacagctcctaggttactactattgcaatgctataaacggatgagctgcccatttagtcagatttcttggaacattttgaatttctgggaaggaaggttgcattctttgtacgaggcttcttacaatatgtgcaagcattttggccgttgtgatgttctgcagtttaacatgcacgtgcgcttttgttcaactttgtagagtaattcaggtgaactgaaattacgctagaaagtttgagtagaagtatcatatgtggctgttaaattgtacagattcgtgtgtcaagaaagtacagctcaaaatctatacatgttgcccc

SEQ ID NO: 19212 - protein, 317 aa, Triticum aestivum
  peptide (1)..(317): Ceres Seq. ID no. 13596437
  misc_feature (53)..(304): NCBI GI NO: 28393745 NR Description: putative protein phosphatase
  misc_feature (53)..(316): NCBI GI NO: 15228155 NR Description: protein phosphatase -related
  misc_feature (94)..(283): NCBI GI NO: 30851156 NR Description: Unknown (protein for MGC:55423) [Danio rerio]
  misc_feature (84)..(249): NCBI GI NO: 16950652 NR Description: dual specificity phosphatase 4 isoform 2
  misc_feature (103)..(252): NCBI GI NO: 24666604 NR Description: Mitogen-activated protein kinase phosphatase 3CG14080-PA
  misc_feature (103)..(252): NCBI GI NO: 28317042 NR Description: RE08706p [Drosophila melanogaster]
  misc_feature (79)..(240): NCBI GI NO: 4758206 NR Description: dual specificity phosphatase 2
  misc_feature (96)..(284): NCBI GI NO: 1083719 NR Description: dual specificity phosphatase (EC 3
  misc_feature (96)..(284): NCBI GI NO: 25742822 NR Description: MAP kinase phosphatase [Rattus norvegicus]
  misc_feature (96)..(284): NCBI GI NO: 28892737 NR Description: dual specificity phosphatase 4 [Mus musculus]
KQNPQKILQKLKIGNGNAPLSLFQLLLHATPIRSLPEQNPPDSITGEERREGMRKRERENPCGICGHYHKYEEGEPCGVCGHRPPALGPAGPAAAPRQESAFPSEILKDFLFLGSYDNASRSELLKTIGISHILNTVPLCQNLYRNSFTYHCLQDDKTLQFDDAIQFLEQCERDKARVLVHCMSGKSRSAAFVVAFLMKSRGWRLAQCFQWVKERRPQVQLADAAQQQLIEYEQKLFSCNVAPTDSFPSLGFGFPKPSGDVQVPIFNQQAPGSIFERVSPNNIPSNFTFGATEAKLPDGSNFGVVNLAGTDSMMDSS

SEQ ID NO: 19213 - protein, 265 aa, Triticum aestivum
  peptide (1)..(265): Ceres Seq. ID no. 13596438
  misc_feature (1)..(252): NCBI GI NO: 28393745 NR Description: putative protein phosphatase
  misc_feature (1)..(264): NCBI GI NO: 15228155 NR Description: protein phosphatase -related
  misc_feature (42)..(231): NCBI GI NO: 30851156 NR Description: Unknown (protein for MGC:55423) [Danio rerio]
  misc_feature (32)..(197): NCBI GI NO: 16950652 NR Description: dual specificity phosphatase 4 isoform 2
  misc_feature (51)..(200): NCBI GI NO: 24666604 NR Description: Mitogen-activated protein kinase phosphatase 3CG14080-PA
  misc_feature (51)..(200): NCBI GI NO: 28317042 NR Description: RE08706p [Drosophila melanogaster]
  misc_feature (27)..(188): NCBI GI NO: 4758206 NR Description: dual specificity phosphatase 2
  misc_feature (44)..(232): NCBI GI NO: 1083719 NR Description: dual specificity phosphatase (EC 3
  misc_feature (44)..(232): NCBI GI NO: 25742822 NR Description: MAP kinase phosphatase [Rattus norvegicus]
  misc_feature (44)..(232): NCBI GI NO: 28892737 NR Description: dual specificity phosphatase 4 [Mus musculus]
MRKRERENPCGICGHYHKYEEGEPCGVCGHRPPALGPAGPAAAPRQESAFPSEILKDFLFLGSYDNASRSELLKTIGISHILNTVPLCQNLYRNSFTYHCLQDDKTLQFDDAIQFLEQCERDKARVLVHCMSGKSRSAAFVVAFLMKSRGWRLAQCFQWVKERRPQVQLADAAQQQLIEYEQKLFSCNVAPTDSFPSLGFGFPKPSGDVQVPIFNQQAPGSIFERVSPNNIPSNFTFGATEAKLPDGSNFGVVNLAGTDSMMDSS

SEQ ID NO: 19214 - protein, 161 aa, Triticum aestivum
  peptide (1)..(161): Ceres Seq. ID no. 13596439
KTKSTKDLAEIKNRKRKRPPLSLPAPPPRHPDSITPRAESPRFDHRRGEEGGDEEAGAGEPVRDLRALPQVRGGGAVRGVRPPPAGAGARRAGGRAAAGVGVPLGDTQGLPLPRQLRQRLPLRAPQDHRHLPHPQHCTLMPKPLPELFYLSLPSRRQDFAV

SEQ ID NO: 19215 - DNA, 1344 bp, Triticum aestivum
  misc_feature (1)..(1344): Ceres Seq. ID no. 13598319
aaaaactcaccaagcaaacacttgagctaaccatatctagtccatatcctctcccaagctagctcgaagcagcaatggcgaaatctttcaccttattagcgctacttagcgcactggttgtcctctcacttcttgtgagccccattgcttgttcccgcaagctccccaggcctgcaaccaaggcccacaagaaccacaccgctgctaccccttcgtcgtctgccgcttatggctccggcggctggttagccggcggcgcgacgtattacggcgcccccaacggcgacggaagcgacggtggcgcgtgtggctaccagagcgctgtcggcaaccggccgttctcgtcgatgatcgccgccggcaacccgtcgctctacagagatggcaagggctgcggagcgtgctacgaggttaaatgcacaggcaaccaggcatgctccggccagccggcgaccgtcgtcatcaccgacgagtgccccgccggggccgcttgcctcggtgaggccgcccacttcgacatgagcggcacctccatgggcgccatggcgaagcctggcatggccgacaaactccgggccggcggtatcatcaagatccagtacaagagggtgccatgcaagtaccctggcatgaacattgccttcaaggtggaccagggctccaacccctactacctggaggtcctgatcgaattcgaggacgacgacggcgacctcaacgccgtggacctcatggaggccaactgcggcacctggacgcccatggcgcagaactggggcgcgctgtaccgcctcaactccaacaccggcaagccgctgcgcgggcccttctcgctccggctcacctccgactccggcaggaagctcgtcgtcaacaacgtcatccccgccagctggaaggccggagccacctaccgctccttggttaactacccctaagttacagcctcatcaactttttttcactgcgccgtacgtgcttggctagtaaccaagaagtgcagtgcagagtgtggtcgtggtaatttagaaccgcgggttaatttctaccgcggggattgtatttatacgaatatgcgtccgggaacggcaggaggctgtgtcagaggaggaggagcaggccatgcaaagattgtgccagctcttccctccatggtctctcggcgctcccctagtgatgcgtgtcgtcgatttgtatgtattttgtttctcttcctctgttttgtcgatgaggagaaaagcttgtagtgcagtgcaaactaaagttgcacgccgatgtatcaagttgtgtgagtgtgtttttggagcccaatccttgagagaaatgaacttttaccatcagatc

SEQ ID NO: 19216 - protein, 287 aa, Triticum aestivum
  peptide (1)..(287): Ceres Seq. ID no. 13598320
  misc_feature (188)..(271): Pfam Name: Pfam Description:  Pollen allergen
  misc_feature (1)..(286): NCBI GI NO: 16517013 NR Description: beta-expansin [Oryza sativa]
  misc_feature (1)..(287): NCBI GI NO: 40363749 NR Description: putative beta-expansin [Triticum aestivum]
  misc_feature (23)..(287): NCBI GI NO: 14193767 NR Description: beta-expansin 4 [Zea mays]
  misc_feature (30)..(286): NCBI GI NO: 16303229 NR Description: beta-expansin 5 [Oryza sativa]
  misc_feature (30)..(286): NCBI GI NO: 8118428 NR Description: beta-expansin [Oryza sativa]
  misc_feature (1)..(286): NCBI GI NO: 34101047 NR Description: beta-expansin 1 precursor [Hordeum vulgare]
  misc_feature (57)..(286): NCBI GI NO: 21666630 NR Description: beta-expansin [Oryza sativa]
  misc_feature (1)..(286): NCBI GI NO: 1076486 NR Description: cim1 protein - soybean
  misc_feature (56)..(281): NCBI GI NO: 16303233 NR Description: beta-expansin [Oryza sativa]
  misc_feature (56)..(281): NCBI GI NO: 16517017 NR Description: beta-expansin [Oryza sativa]
MAKSFTLLALLSALVVLSLLVSPIACSRKLPRPATKAHKNHTAATPSSSAAYGSGGWLAGGATYYGAPNGDGSDGGACGYQSAVGNRPFSSMIAAGNPSLYRDGKGCGACYEVKCTGNQACSGQPATVVITDECPAGAACLGEAAHFDMSGTSMGAMAKPGMADKLRAGGIIKIQYKRVPCKYPGMNIAFKVDQGSNPYYLEVLIEFEDDDGDLNAVDLMEANCGTWTPMAQNWGALYRLNSNTGKPLRGPFSLRLTSDSGRKLVVNNVIPASWKAGATYRSLVNYP

SEQ ID NO: 19217 - protein, 196 aa, Triticum aestivum
  peptide (1)..(196): Ceres Seq. ID no. 13598321
  misc_feature (97)..(180): Pfam Name: Pfam Description:  Pollen allergen
  misc_feature (1)..(195): NCBI GI NO: 16517013 NR Description: beta-expansin [Oryza sativa]
  misc_feature (1)..(196): NCBI GI NO: 40363749 NR Description: putative beta-expansin [Triticum aestivum]
  misc_feature (1)..(196): NCBI GI NO: 14193767 NR Description: beta-expansin 4 [Zea mays]
  misc_feature (1)..(195): NCBI GI NO: 16303229 NR Description: beta-expansin 5 [Oryza sativa]
  misc_feature (1)..(195): NCBI GI NO: 8118428 NR Description: beta-expansin [Oryza sativa]
  misc_feature (1)..(195): NCBI GI NO: 34101047 NR Description: beta-expansin 1 precursor [Hordeum vulgare]
  misc_feature (1)..(195): NCBI GI NO: 21666630 NR Description: beta-expansin [Oryza sativa]
  misc_feature (1)..(195): NCBI GI NO: 1076486 NR Description: cim1 protein - soybean
  misc_feature (1)..(190): NCBI GI NO: 16303233 NR Description: beta-expansin [Oryza sativa]
  misc_feature (1)..(190): NCBI GI NO: 16517017 NR Description: beta-expansin [Oryza sativa]
MIAAGNPSLYRDGKGCGACYEVKCTGNQACSGQPATVVITDECPAGAACLGEAAHFDMSGTSMGAMAKPGMADKLRAGGIIKIQYKRVPCKYPGMNIAFKVDQGSNPYYLEVLIEFEDDDGDLNAVDLMEANCGTWTPMAQNWGALYRLNSNTGKPLRGPFSLRLTSDSGRKLVVNNVIPASWKAGATYRSLVNYP

SEQ ID NO: 19218 - DNA, 1753 bp, Triticum aestivum
  misc_feature (1)..(1753): Ceres Seq. ID no. 13590666
atttttccactctcactccccgcagtcccccgctcgaagcctccaaaaccctaccgaactccgccccgccagccatggcgccgccccccacctccggcccgcagcagcggcggctcctccaggcggcggccgacggcgacctccgcctcttcaagagcatcgcgagcgcgctggacggcgggaagggccgcgtcaaggaggcggtggaggccgtcaggaattgcggcgccggggcgctgcacaccgccgccggccgcgggaggaccccgatgtgcgcgtacttggtggaggagcttggcgtggacgtcaatgctgcagacgacaaaggtgctacacctctgacttatgcacttcgttggcgggctgtggatactgtgaggtatctctttgatcatggtgccgatgcagaaaagcctggtgaacaaggttttacccctcttcatgtggcagctggagcaggattgtgtgaaatgatagaagtcttgctctcaaaaggagctgatgttaattgcttttcttaccgtgggacactactgcattctgctattatcggaaagcaggttgctgccgtgaagctcttgttggatcatcatgcggattgtaacaagccagtgtccctacattatacacctcttatcgctgctctccatgcccgctcgctgaaatgtgtgaagcttctgattgaggcgggtgctgatgcgaagggtgttcctccgctaacccccttagtagttgctgcaaatgacggtttaactgatttctacgaacctttacttcgggttggtgctgatcctgatgttcgtgatgatggaggtcagctgccaatagagattgctgcacgtaacaatagacggaaagatgttgagatcctttttccagtaacatctcatattccctatgtgcgtgattggagtgttgatgggatacttgcttatgtcaaatcagtgccgaaggaggaggatgacccgttatacaaaatggggccagcttatctgaaactggaaggaaccaaggcttacaagagaaaagattatgtttctgcaataaatttctactccatggcaatcaagcttaaccctggagatgtaaccttgcattcaaataagagcctttgctggattaacctgggggaaggagacaaggccttggaggacgccgagttttgcaggatgatacggcctgattggccaaaggcctgttacaggcaaggggctgcccaaatgttattgaagaactatgaaaaggcatgtgaagcattccaagatggtctgaagttggacccaacaaatgttgagattgagaatgcattacgtgtgcggttcagggaaccggaggtgagacaatgcgacatgaagcaggctagtatggacgtactcctccttgcgtattccggtgtggttgcagtaaggcctgtgaaatgcccaacacacagtgctcaagacccgatttgcggcagcgtggatgaatgtgtccaagaatgcggcgatgaaggctaccattttgggatgtgcagccattgcaaatgtttctgcttcaactgcacctcatcacttgacgctaaaccggcacccggagccttgagtccttgaacgagtacgcacctaatctaaaaagctgcatcaataaacaaaaattgatatccttttcctttgtttttcttctttggtcctttgtatgtggatggtcaaagaggatcttgtgttctatatatattaacgtgggatagcggaacccattcagccgatttgtatgg

SEQ ID NO: 19219 - protein, 528 aa, Triticum aestivum
  peptide (1)..(528): Ceres Seq. ID no. 15220995
  misc_feature (397)..(429): Pfam Name: Pfam Description:  TPR Domain
  misc_feature (25)..(437): NCBI GI NO: 27542768 NR Description: ankyrin-like protein-like protein
  misc_feature (41)..(437): NCBI GI NO: 27542766 NR Description: ankyrin-like protein-like protein
  misc_feature (29)..(435): NCBI GI NO: 34896852 NR Description: putative ankyrin [Oryza sativa]
  misc_feature (33)..(328): NCBI GI NO: 13435243 NR Description: putative gag-pol polyprotein [Oryza sativa]
  misc_feature (329)..(436): NCBI GI NO: 13435243 NR Description: putative gag-pol polyprotein [Oryza sativa]
  misc_feature (75)..(436): NCBI GI NO: 13435247 NR Description: putative ankyrin [Oryza sativa]
  misc_feature (37)..(316): NCBI GI NO: 34329680 NR Description: unknown [Nicotiana benthamiana]
  misc_feature (37)..(437): NCBI GI NO: 28201548 NR Description: putative ankyrin
  misc_feature (36)..(321): NCBI GI NO: 15229331 NR Description: ankyrin-related protein [Arabidopsis thaliana]
  misc_feature (25)..(321): NCBI GI NO: 24745936 NR Description: ankyrin-like protein [Solanum tuberosum]
FSTLTPRSPPLEASKTLPNSAPPAMAPPPTSGPQQRRLLQAAADGDLRLFKSIASALDGGKGRVKEAVEAVRNCGAGALHTAAGRGRTPMCAYLVEELGVDVNAADDKGATPLTYALRWRAVDTVRYLFDHGADAEKPGEQGFTPLHVAAGAGLCEMIEVLLSKGADVNCFSYRGTLLHSAIIGKQVAAVKLLLDHHADCNKPVSLHYTPLIAALHARSLKCVKLLIEAGADAKGVPPLTPLVVAANDGLTDFYEPLLRVGADPDVRDDGGQLPIEIAARNNRRKDVEILFPVTSHIPYVRDWSVDGILAYVKSVPKEEDDPLYKMGPAYLKLEGTKAYKRKDYVSAINFYSMAIKLNPGDVTLHSNKSLCWINLGEGDKALEDAEFCRMIRPDWPKACYRQGAAQMLLKNYEKACEAFQDGLKLDPTNVEIENALRVRFREPEVRQCDMKQASMDVLLLAYSGVVAVRPVKCPTHSAQDPICGSVDECVQECGDEGYHFGMCSHCKCFCFNCTSSLDAKPAPGALSP

SEQ ID NO: 19220 - protein, 504 aa, Triticum aestivum
  peptide (1)..(504): Ceres Seq. ID no. 15220996
  misc_feature (373)..(405): Pfam Name: Pfam Description:  TPR Domain
  misc_feature (1)..(413): NCBI GI NO: 27542768 NR Description: ankyrin-like protein-like protein
  misc_feature (17)..(413): NCBI GI NO: 27542766 NR Description: ankyrin-like protein-like protein
  misc_feature (5)..(411): NCBI GI NO: 34896852 NR Description: putative ankyrin [Oryza sativa]
  misc_feature (9)..(304): NCBI GI NO: 13435243 NR Description: putative gag-pol polyprotein [Oryza sativa]
  misc_feature (305)..(412): NCBI GI NO: 13435243 NR Description: putative gag-pol polyprotein [Oryza sativa]
  misc_feature (51)..(412): NCBI GI NO: 13435247 NR Description: putative ankyrin [Oryza sativa]
  misc_feature (13)..(292): NCBI GI NO: 34329680 NR Description: unknown [Nicotiana benthamiana]
  misc_feature (13)..(413): NCBI GI NO: 28201548 NR Description: putative ankyrin
  misc_feature (12)..(297): NCBI GI NO: 15229331 NR Description: ankyrin-related protein [Arabidopsis thaliana]
  misc_feature (1)..(297): NCBI GI NO: 24745936 NR Description: ankyrin-like protein [Solanum tuberosum]
MAPPPTSGPQQRRLLQAAADGDLRLFKSIASALDGGKGRVKEAVEAVRNCGAGALHTAAGRGRTPMCAYLVEELGVDVNAADDKGATPLTYALRWRAVDTVRYLFDHGADAEKPGEQGFTPLHVAAGAGLCEMIEVLLSKGADVNCFSYRGTLLHSAIIGKQVAAVKLLLDHHADCNKPVSLHYTPLIAALHARSLKCVKLLIEAGADAKGVPPLTPLVVAANDGLTDFYEPLLRVGADPDVRDDGGQLPIEIAARNNRRKDVEILFPVTSHIPYVRDWSVDGILAYVKSVPKEEDDPLYKMGPAYLKLEGTKAYKRKDYVSAINFYSMAIKLNPGDVTLHSNKSLCWINLGEGDKALEDAEFCRMIRPDWPKACYRQGAAQMLLKNYEKACEAFQDGLKLDPTNVEIENALRVRFREPEVRQCDMKQASMDVLLLAYSGVVAVRPVKCPTHSAQDPICGSVDECVQECGDEGYHFGMCSHCKCFCFNCTSSLDAKPAPGALSP

SEQ ID NO: 19221 - protein, 439 aa, Triticum aestivum
  peptide (1)..(439): Ceres Seq. ID no. 15220997
  misc_feature (308)..(340): Pfam Name: Pfam Description:  TPR Domain
  misc_feature (1)..(348): NCBI GI NO: 27542768 NR Description: ankyrin-like protein-like protein
  misc_feature (1)..(348): NCBI GI NO: 27542766 NR Description: ankyrin-like protein-like protein
  misc_feature (1)..(346): NCBI GI NO: 34896852 NR Description: putative ankyrin [Oryza sativa]
  misc_feature (1)..(239): NCBI GI NO: 13435243 NR Description: putative gag-pol polyprotein [Oryza sativa]
  misc_feature (240)..(347): NCBI GI NO: 13435243 NR Description: putative gag-pol polyprotein [Oryza sativa]
  misc_feature (1)..(347): NCBI GI NO: 13435247 NR Description: putative ankyrin [Oryza sativa]
  misc_feature (1)..(227): NCBI GI NO: 34329680 NR Description: unknown [Nicotiana benthamiana]
  misc_feature (1)..(348): NCBI GI NO: 28201548 NR Description: putative ankyrin
  misc_feature (1)..(232): NCBI GI NO: 15229331 NR Description: ankyrin-related protein [Arabidopsis thaliana]
  misc_feature (1)..(232): NCBI GI NO: 24745936 NR Description: ankyrin-like protein [Solanum tuberosum]
MCAYLVEELGVDVNAADDKGATPLTYALRWRAVDTVRYLFDHGADAEKPGEQGFTPLHVAAGAGLCEMIEVLLSKGADVNCFSYRGTLLHSAIIGKQVAAVKLLLDHHADCNKPVSLHYTPLIAALHARSLKCVKLLIEAGADAKGVPPLTPLVVAANDGLTDFYEPLLRVGADPDVRDDGGQLPIEIAARNNRRKDVEILFPVTSHIPYVRDWSVDGILAYVKSVPKEEDDPLYKMGPAYLKLEGTKAYKRKDYVSAINFYSMAIKLNPGDVTLHSNKSLCWINLGEGDKALEDAEFCRMIRPDWPKACYRQGAAQMLLKNYEKACEAFQDGLKLDPTNVEIENALRVRFREPEVRQCDMKQASMDVLLLAYSGVVAVRPVKCPTHSAQDPICGSVDECVQECGDEGYHFGMCSHCKCFCFNCTSSLDAKPAPGALSP

SEQ ID NO: 19222 - DNA, 888 bp, Triticum aestivum
  misc_feature (1)..(888): Ceres Seq. ID no. 12614779
acggacacacacacgcacacacacatacctcgtcggacctcgtcggttccttccgcaggagatcggcatgggagctgagcagcagcagcagcagaccgccgggggcagcaggttcgccgcggcgtttggcctgctgcgccagtacatgaaggaccagcctgggggcggcgtggtcaccgtgggcctcatgccgggcggcggcgacggcgtcgaggcggtcgcgccggaggagaggatccggaccatggagctcttcccccagcaggccggcatggtcagggactcgcgcgaaaggacggggccggagagggcgccgctgaccatcttctacgccgggaggacggtggtgttcgacgacttccccgccgagaaggccaaggagctcatgcagctcgccggctccttcggcgcgctgccggccgcctccgacgccggcgccgagcccgtctgccagaacgcgccggggcagccttgctttgcagacctgccgatcgcgaggaaggcgtcgctccataggttcctggagaagaggaagagcaggctggccgcggcagatccgtaccctgcgccggtggcggcgccaggggctgggacggccggcaagcctgtgccggaggacggcggcgcgccgtggctcggcgtcaactccgcgctccagctcaactgaaggatttgacgagccggggagaggaacaaatcactgccttgctgcttctccacgtagtagtatatacagtactactctactactacgtggatccttgattgttgccgtttttatcttactaccacgcccgttaattggctgcgtcagggtaattaactgcgtggcgccggctaaatatatatcctgggttaagtagtataagtatgttcttcatctgtttg

SEQ ID NO: 19223 - protein, 221 aa, Triticum aestivum
  peptide (1)..(221): Ceres Seq. ID no. 12614780
  misc_feature (102)..(134): Pfam Name: Pfam Description:  ZIM motif
  misc_feature (33)..(220): NCBI GI NO: 24960745 NR Description: Unknown protein
  misc_feature (33)..(214): NCBI GI NO: 37533958 NR Description: unknown protein
  misc_feature (37)..(212): NCBI GI NO: 24960746 NR Description: Unknown protein
  misc_feature (36)..(187): NCBI GI NO: 12247470 NR Description: PnFL-2 [Ipomoea nil]
  misc_feature (31)..(196): NCBI GI NO: 37533948 NR Description: hypothetical protein
  misc_feature (34)..(166): NCBI GI NO: 29788814 NR Description: unknown protein
  misc_feature (147)..(214): NCBI GI NO: 18394706 NR Description: expressed protein; protein id: At1g19180
  misc_feature (147)..(214): NCBI GI NO: 21593416 NR Description: unknown [Arabidopsis thaliana]
  misc_feature (102)..(132): NCBI GI NO: 18394706 NR Description: expressed protein; protein id: At1g19180
  misc_feature (102)..(132): NCBI GI NO: 21593416 NR Description: unknown [Arabidopsis thaliana]
RTHTRTHTYLVGPRRFLPQEIGMGAEQQQQQTAGGSRFAAAFGLLRQYMKDQPGGGVVTVGLMPGGGDGVEAVAPEERIRTMELFPQQAGMVRDSRERTGPERAPLTIFYAGRTVVFDDFPAEKAKELMQLAGSFGALPAASDAGAEPVCQNAPGQPCFADLPIARKASLHRFLEKRKSRLAAADPYPAPVAAPGAGTAGKPVPEDGGAPWLGVNSALQLN

SEQ ID NO: 19224 - protein, 199 aa, Triticum aestivum
  peptide (1)..(199): Ceres Seq. ID no. 12614781
  misc_feature (80)..(112): Pfam Name: Pfam Description:  ZIM motif
  misc_feature (11)..(198): NCBI GI NO: 24960745 NR Description: Unknown protein
  misc_feature (11)..(192): NCBI GI NO: 37533958 NR Description: unknown protein
  misc_feature (15)..(190): NCBI GI NO: 24960746 NR Description: Unknown protein
  misc_feature (14)..(165): NCBI GI NO: 12247470 NR Description: PnFL-2 [Ipomoea nil]
  misc_feature (9)..(174): NCBI GI NO: 37533948 NR Description: hypothetical protein
  misc_feature (12)..(144): NCBI GI NO: 29788814 NR Description: unknown protein
  misc_feature (125)..(192): NCBI GI NO: 18394706 NR Description: expressed protein; protein id: At1g19180
  misc_feature (125)..(192): NCBI GI NO: 21593416 NR Description: unknown [Arabidopsis thaliana]
  misc_feature (80)..(110): NCBI GI NO: 18394706 NR Description: expressed protein; protein id: At1g19180
  misc_feature (80)..(110): NCBI GI NO: 21593416 NR Description: unknown [Arabidopsis thaliana]
MGAEQQQQQTAGGSRFAAAFGLLRQYMKDQPGGGVVTVGLMPGGGDGVEAVAPEERIRTMELFPQQAGMVRDSRERTGPERAPLTIFYAGRTVVFDDFPAEKAKELMQLAGSFGALPAASDAGAEPVCQNAPGQPCFADLPIARKASLHRFLEKRKSRLAAADPYPAPVAAPGAGTAGKPVPEDGGAPWLGVNSALQLN

SEQ ID NO: 19225 - protein, 173 aa, Triticum aestivum
  peptide (1)..(173): Ceres Seq. ID no. 12614782
  misc_feature (54)..(86): Pfam Name: Pfam Description:  ZIM motif
  misc_feature (1)..(172): NCBI GI NO: 24960745 NR Description: Unknown protein
  misc_feature (1)..(166): NCBI GI NO: 37533958 NR Description: unknown protein
  misc_feature (1)..(164): NCBI GI NO: 24960746 NR Description: Unknown protein
  misc_feature (1)..(139): NCBI GI NO: 12247470 NR Description: PnFL-2 [Ipomoea nil]
  misc_feature (1)..(148): NCBI GI NO: 37533948 NR Description: hypothetical protein
  misc_feature (1)..(118): NCBI GI NO: 29788814 NR Description: unknown protein
  misc_feature (99)..(166): NCBI GI NO: 18394706 NR Description: expressed protein; protein id: At1g19180
  misc_feature (99)..(166): NCBI GI NO: 21593416 NR Description: unknown [Arabidopsis thaliana]
  misc_feature (54)..(84): NCBI GI NO: 18394706 NR Description: expressed protein; protein id: At1g19180
  misc_feature (54)..(84): NCBI GI NO: 21593416 NR Description: unknown [Arabidopsis thaliana]
MKDQPGGGVVTVGLMPGGGDGVEAVAPEERIRTMELFPQQAGMVRDSRERTGPERAPLTIFYAGRTVVFDDFPAEKAKELMQLAGSFGALPAASDAGAEPVCQNAPGQPCFADLPIARKASLHRFLEKRKSRLAAADPYPAPVAAPGAGTAGKPVPEDGGAPWLGVNSALQLN

SEQ ID NO: 19226 - DNA, 1481 bp, Triticum aestivum
  misc_feature (1)..(1481): Ceres Seq. ID no. 13596440
acaactcctgctccggcacccccttccctccccagccttctccaccgctctccctcccccctcgtcggcggcgaaaatctccggatccatcccggcctccgttccatcgccaccctctccacccgcaagggtttaattctgaggggaatttccgagcatttcctgcctgcctacggcgtaaatacaggtctgcgggctgtcctgcttcgtctcgcggtcttcgatgcgtggtggaggcaacacggataggatgcagcaggttcagcacacggttcagacgcacggatatggactggccagaaagcacacttatgactgggtcgttcttacgctcctagctgcggccgtggtcgtcttgcattatgctccgccgtttaatcggttcgttgggaaggatatgatggctgatattaggtacccggtgaaacagagtactgtgccagcatgggctgttcctgtaatctctatgctgtgtccagtgcttgttttcgtagcggtgtatgttgctagaagggacgtctatgaccttcaccacgcaacgctaggtgttattttcgctgtgctgatcactgccgcgttcactgatgtgataaagactgcagtagggagaccaaggccagacttcttttggcggtgttttcctgatggaaggcaggtatatgatcaagtgacaggtggtgtgatttgccatggcgagaaaggtttcttaaccgatgggcgcaagagttttcctagtggacacacgtcgtggtcttttgctggacttggatttttgtcactatacttatctggcaaaattaaggcgtttgatcgcaaaggtcatgtggcaaaactttgcatcgtgattcttcctcttcttcttgcttcgcttgttggggtttctagaatagacaactatcggcaccactgggaggatgtgcttgtcggtggcctgattggatatatcatggcagtgctgtgctatctgcacttctttcctcctccatatcaccatcaaggttggggtccctatgcgtacttccacatgctggaagagcttgaggtgcacaattcaaataatgcacaaaaccagcagtctgcaggtgagcatcatatcggattgaccggccaacaccataacgggagatcaagaaatgatttggaatctggaagtgtgtaactcacccctctgtggaaccgactagcataccttgtacagtaagcatgcgttaaaaacttttttatgtgtgcactaagcaagtattaggagtttagaactagatatgtgctatctccccctcatgtttgtgtacaaaagtcattcgctcagtatattctgacctagttgttctagggccacctgttgtatctaaatgatgtgttaacgtcgtagaccgtgtgagtggccggtggacgtactgagtacgaacttattccgctgttcaacaagcacaactgagcgatgataatgacaagcatatctagagccattgaacattccc

SEQ ID NO: 19227 - protein, 311 aa, Triticum aestivum
  peptide (1)..(311): Ceres Seq. ID no. 13596441
  misc_feature (114)..(255): Pfam Name: Pfam Description:  PAP2 superfamily
  misc_feature (8)..(263): NCBI GI NO: 34895654 NR Description: putative phosphatidic acid phosphatase alpha
  misc_feature (7)..(309): NCBI GI NO: 9621903 NR Description: phosphatidic acid phosphatase alpha
  misc_feature (9)..(309): NCBI GI NO: 18396250 NR Description: phosphatidic acid phosphatase (PAP2) family
  misc_feature (15)..(309): NCBI GI NO: 6957723 NR Description: putative phosphatidate phosphohydrolase
  misc_feature (15)..(293): NCBI GI NO: 15218051 NR Description: phosphatidic acid phosphatase (PAP2) family
  misc_feature (1)..(279): NCBI GI NO: 15724220 NR Description: At2g01180/F10A8.6 [Arabidopsis thaliana]
  misc_feature (1)..(279): NCBI GI NO: 18379166 NR Description: phosphatidic acid phosphatase (PAP2) family
  misc_feature (10)..(279): NCBI GI NO: 25353094 NR Description: probable phosphatidic acid phosphatase
  misc_feature (1)..(279): NCBI GI NO: 21554001 NR Description: putative phosphatidic acid phosphatase
  misc_feature (15)..(305): NCBI GI NO: 38637528 NR Description: unknown protein
MRGGGNTDRMQQVQHTVQTHGYGLARKHTYDWVVLTLLAAAVVVLHYAPPFNRFVGKDMMADIRYPVKQSTVPAWAVPVISMLCPVLVFVAVYVARRDVYDLHHATLGVIFAVLITAAFTDVIKTAVGRPRPDFFWRCFPDGRQVYDQVTGGVICHGEKGFLTDGRKSFPSGHTSWSFAGLGFLSLYLSGKIKAFDRKGHVAKLCIVILPLLLASLVGVSRIDNYRHHWEDVLVGGLIGYIMAVLCYLHFFPPPYHHQGWGPYAYFHMLEELEVHNSNNAQNQQSAGEHHIGLTGQHHNGRSRNDLESGSV

SEQ ID NO: 19228 - protein, 302 aa, Triticum aestivum
  peptide (1)..(302): Ceres Seq. ID no. 13596442
  misc_feature (105)..(246): Pfam Name: Pfam Description:  PAP2 superfamily
  misc_feature (1)..(254): NCBI GI NO: 34895654 NR Description: putative phosphatidic acid phosphatase alpha
  misc_feature (1)..(300): NCBI GI NO: 9621903 NR Description: phosphatidic acid phosphatase alpha
  misc_feature (1)..(300): NCBI GI NO: 18396250 NR Description: phosphatidic acid phosphatase (PAP2) family
  misc_feature (6)..(300): NCBI GI NO: 6957723 NR Description: putative phosphatidate phosphohydrolase
  misc_feature (6)..(284): NCBI GI NO: 15218051 NR Description: phosphatidic acid phosphatase (PAP2) family
  misc_feature (1)..(270): NCBI GI NO: 15724220 NR Description: At2g01180/F10A8.6 [Arabidopsis thaliana]
  misc_feature (1)..(270): NCBI GI NO: 18379166 NR Description: phosphatidic acid phosphatase (PAP2) family
  misc_feature (1)..(270): NCBI GI NO: 25353094 NR Description: probable phosphatidic acid phosphatase
  misc_feature (1)..(270): NCBI GI NO: 21554001 NR Description: putative phosphatidic acid phosphatase
  misc_feature (6)..(296): NCBI GI NO: 38637528 NR Description: unknown protein
MQQVQHTVQTHGYGLARKHTYDWVVLTLLAAAVVVLHYAPPFNRFVGKDMMADIRYPVKQSTVPAWAVPVISMLCPVLVFVAVYVARRDVYDLHHATLGVIFAVLITAAFTDVIKTAVGRPRPDFFWRCFPDGRQVYDQVTGGVICHGEKGFLTDGRKSFPSGHTSWSFAGLGFLSLYLSGKIKAFDRKGHVAKLCIVILPLLLASLVGVSRIDNYRHHWEDVLVGGLIGYIMAVLCYLHFFPPPYHHQGWGPYAYFHMLEELEVHNSNNAQNQQSAGEHHIGLTGQHHNGRSRNDLESGSV

SEQ ID NO: 19229 - protein, 253 aa, Triticum aestivum
  peptide (1)..(253): Ceres Seq. ID no. 13596443
  misc_feature (56)..(197): Pfam Name: Pfam Description:  PAP2 superfamily
  misc_feature (1)..(205): NCBI GI NO: 34895654 NR Description: putative phosphatidic acid phosphatase alpha
  misc_feature (1)..(251): NCBI GI NO: 9621903 NR Description: phosphatidic acid phosphatase alpha
  misc_feature (1)..(251): NCBI GI NO: 18396250 NR Description: phosphatidic acid phosphatase (PAP2) family
  misc_feature (1)..(251): NCBI GI NO: 6957723 NR Description: putative phosphatidate phosphohydrolase
  misc_feature (1)..(235): NCBI GI NO: 15218051 NR Description: phosphatidic acid phosphatase (PAP2) family
  misc_feature (1)..(221): NCBI GI NO: 15724220 NR Description: At2g01180/F10A8.6 [Arabidopsis thaliana]
  misc_feature (1)..(221): NCBI GI NO: 18379166 NR Description: phosphatidic acid phosphatase (PAP2) family
  misc_feature (1)..(221): NCBI GI NO: 25353094 NR Description: probable phosphatidic acid phosphatase
  misc_feature (1)..(221): NCBI GI NO: 21554001 NR Description: putative phosphatidic acid phosphatase
  misc_feature (1)..(247): NCBI GI NO: 38637528 NR Description: unknown protein
MMADIRYPVKQSTVPAWAVPVISMLCPVLVFVAVYVARRDVYDLHHATLGVIFAVLITAAFTDVIKTAVGRPRPDFFWRCFPDGRQVYDQVTGGVICHGEKGFLTDGRKSFPSGHTSWSFAGLGFLSLYLSGKIKAFDRKGHVAKLCIVILPLLLASLVGVSRIDNYRHHWEDVLVGGLIGYIMAVLCYLHFFPPPYHHQGWGPYAYFHMLEELEVHNSNNAQNQQSAGEHHIGLTGQHHNGRSRNDLESGSV

SEQ ID NO: 19230 - DNA, 955 bp, Triticum aestivum
  misc_feature (1)..(955): Ceres Seq. ID no. 14302111
aaccaatcaactgaccaaccaccacgagccaagagccaacccacaccactctgtgtctgtactcagcgcgagctcacgggctccacaatgcctcgctccggcgctctccccctcctcgccgcgctggtcctcgccttggcggccgcggcggcggcgtcggcctcgaactcgaagggcgctccggcggccaccgacttcatccgcaagtcgtgccgcgagacgcagtacccgtcggtgtgcatgcagagcctgtcgtcgtacggcaaaccgccgccgcgcagcccgcaggagctggcgcgcgcggcgctgtcggtgagcgcggaccgcgcgcggtcggcgtcggcgtacgtggggcggatctgcgggccgggcctccgcagcggcagcggcgccaaggcgaagagcagccccgcgcgcgactgcctggagaacatggcggacagcgtgggccacctgcgcgacgcggccaaggagctggacgggagcctgggccgggccgggtcgccggcgttcaggtggcacctgagcaacgtgcagacctggtgcagcgcggcgctcaccgacgagaacacctgcctcgacgggctctcccgcggcgtggacgccggcacgcgcgccgccatccggagcaaggtcgtggaggtcgcccaggtcaccagcaacgccctggcgctcgtcaacaaggtcgggtccgggcactagcccggcccgtcccaggcccatccccactcgtttcgccttgctacgtactactacgcgcgtacgcatggcagctcgaatcctggtgctctataatcttgggtcatgtactactgtattccagtttcgatgtgttcttgctgtgctgtaaaatgtacttagctaagacaatcaattaagagtgtaattaatgataaggtggcgaaactaagccaaagtgtgtgttctcttgctagctatagcttttgattaacat

SEQ ID NO: 19231 - protein, 233 aa, Triticum aestivum
  peptide (1)..(233): Ceres Seq. ID no. 14302112
  misc_feature (37)..(233): NCBI GI NO: 32489696 NR Description: OSJNBb0004G23.9
  misc_feature (30)..(228): NCBI GI NO: 7406663 NR Description: putative ripening-related protein [Vitis vinifera]
  misc_feature (30)..(233): NCBI GI NO: 112717 NR Description: 21 KD PROTEIN PRECURSOR (1.2 PROTEIN)
  misc_feature (30)..(233): NCBI GI NO: 15234982 NR Description: pectinesterase - related [Arabidopsis thaliana]
  misc_feature (64)..(233): NCBI GI NO: 7488727 NR Description: 21K protein precursor - alfalfa
  misc_feature (42)..(228): NCBI GI NO: 21618013 NR Description: putative ripening-related protein
  misc_feature (42)..(228): NCBI GI NO: 18407657 NR Description: pectinesterase family [Arabidopsis thaliana]
  misc_feature (38)..(233): NCBI GI NO: 15234547 NR Description: pectinesterase - related [Arabidopsis thaliana]
  misc_feature (36)..(227): NCBI GI NO: 21618088 NR Description: ripening-related protein-like
  misc_feature (38)..(227): NCBI GI NO: 15241799 NR Description: pectinesterase family [Arabidopsis thaliana]
NQSTDQPPRAKSQPTPLCVCTQRELTGSTMPRSGALPLLAALVLALAAAAAASASNSKGAPAATDFIRKSCRETQYPSVCMQSLSSYGKPPPRSPQELARAALSVSADRARSASAYVGRICGPGLRSGSGAKAKSSPARDCLENMADSVGHLRDAAKELDGSLGRAGSPAFRWHLSNVQTWCSAALTDENTCLDGLSRGVDAGTRAAIRSKVVEVAQVTSNALALVNKVGSGH

SEQ ID NO: 19232 - protein, 204 aa, Triticum aestivum
  peptide (1)..(204): Ceres Seq. ID no. 14302113
  misc_feature (8)..(204): NCBI GI NO: 32489696 NR Description: OSJNBb0004G23.9
  misc_feature (1)..(199): NCBI GI NO: 7406663 NR Description: putative ripening-related protein [Vitis vinifera]
  misc_feature (1)..(204): NCBI GI NO: 112717 NR Description: 21 KD PROTEIN PRECURSOR (1.2 PROTEIN)
  misc_feature (1)..(204): NCBI GI NO: 15234982 NR Description: pectinesterase - related [Arabidopsis thaliana]
  misc_feature (35)..(204): NCBI GI NO: 7488727 NR Description: 21K protein precursor - alfalfa
  misc_feature (13)..(199): NCBI GI NO: 21618013 NR Description: putative ripening-related protein
  misc_feature (13)..(199): NCBI GI NO: 18407657 NR Description: pectinesterase family [Arabidopsis thaliana]
  misc_feature (9)..(204): NCBI GI NO: 15234547 NR Description: pectinesterase - related [Arabidopsis thaliana]
  misc_feature (7)..(198): NCBI GI NO: 21618088 NR Description: ripening-related protein-like
  misc_feature (9)..(198): NCBI GI NO: 15241799 NR Description: pectinesterase family [Arabidopsis thaliana]
MPRSGALPLLAALVLALAAAAAASASNSKGAPAATDFIRKSCRETQYPSVCMQSLSSYGKPPPRSPQELARAALSVSADRARSASAYVGRICGPGLRSGSGAKAKSSPARDCLENMADSVGHLRDAAKELDGSLGRAGSPAFRWHLSNVQTWCSAALTDENTCLDGLSRGVDAGTRAAIRSKVVEVAQVTSNALALVNKVGSGH

SEQ ID NO: 19233 - protein, 153 aa, Triticum aestivum
  peptide (1)..(153): Ceres Seq. ID no. 14302114
  misc_feature (1)..(153): NCBI GI NO: 32489696 NR Description: OSJNBb0004G23.9
  misc_feature (1)..(148): NCBI GI NO: 7406663 NR Description: putative ripening-related protein [Vitis vinifera]
  misc_feature (1)..(153): NCBI GI NO: 112717 NR Description: 21 KD PROTEIN PRECURSOR (1.2 PROTEIN)
  misc_feature (1)..(153): NCBI GI NO: 15234982 NR Description: pectinesterase - related [Arabidopsis thaliana]
  misc_feature (1)..(153): NCBI GI NO: 7488727 NR Description: 21K protein precursor - alfalfa
  misc_feature (1)..(148): NCBI GI NO: 21618013 NR Description: putative ripening-related protein
  misc_feature (1)..(148): NCBI GI NO: 18407657 NR Description: pectinesterase family [Arabidopsis thaliana]
  misc_feature (1)..(153): NCBI GI NO: 15234547 NR Description: pectinesterase - related [Arabidopsis thaliana]
  misc_feature (1)..(147): NCBI GI NO: 21618088 NR Description: ripening-related protein-like
  misc_feature (1)..(147): NCBI GI NO: 15241799 NR Description: pectinesterase family [Arabidopsis thaliana]
MQSLSSYGKPPPRSPQELARAALSVSADRARSASAYVGRICGPGLRSGSGAKAKSSPARDCLENMADSVGHLRDAAKELDGSLGRAGSPAFRWHLSNVQTWCSAALTDENTCLDGLSRGVDAGTRAAIRSKVVEVAQVTSNALALVNKVGSGH

SEQ ID NO: 19234 - DNA, 1268 bp, Triticum aestivum
  misc_feature (1)..(1268): Ceres Seq. ID no. 12593499
aatcgaaaagatcgggacggtaccggtacgggagtccgccaatttccggcgcgcgggaaaatttcccgcactcgcgctcgagcctcgcccgctataagaaagaatcgcaccaccacggtttcctgctccacttcccccacttccgccgcctcccaccgaatgggccgcaagaggagggctagggtttccagcgacagcgacggcgacgacgtcgagatgaacggcgatgagcccgcccccgccgccgcggagagcaagagcctctacgagatattaggggttgcgagcacagcttcacaacaggagataaaaaaggcatatcacaagttggccttgcgtcttcacccagataagaatcctggagatgaggaagccaacgaaaaatttcagcagctgcaaaaggtgatatctattcttggagatcaggagaaaagggcattgtatgatgagactggaattactgatgatgatgcactggttggagaagctgcagacaatctccaagcgtacttcagaacagtgtacagaaaggtcacagaggctgacattgaagaatttgaagctaagtatagagggtcagactctgagaaaaaggatttaaaggaactgtacacaaaatttaagggcaacatgaacagactcttctgctcaatgatttgctcagatgccaagcttgattctcaccgcttcaaagatataattgatcaggcaattgctgaaggcgaggtgaagtccaccaaagtgtatgcgaaatgggctaaaaagatctctgagatagaaccacccacaaacccattggagaggagagtgaagaaaaagaagagccaggagagcgacctcatcctggcgatctcgcagcgcagggaacagaggaaggagcggtttgactctgttctgtcatctataatgtccaagtgtgatgacaacaaggcgggcagctcagagcccacggaggaggagtttgagcgcgctcggcagaggcttgagaagaagcgcaccaaggggcgcaaatggtatgaatcttgacatgcatgcgcaaatgatatgaatcttgacatgcatgcaggcccttcgagaaaagatgggtgttgagtggagtggagtggaggggttgtgtcgcaactgtagtgtcgctttgttttatgagtgggcgtgtgtataagtaactgaatgcaagtgtggtgtggttttagatgtgaacaactgtggaagtgtcctgtcccatgaatgaaatgaaatccccggcatggccaggtgatagtctgtcc

SEQ ID NO: 19235 - protein, 341 aa, Triticum aestivum
  peptide (1)..(341): Ceres Seq. ID no. 12593500
  misc_feature (87)..(152): Pfam Name: Pfam Description:  DnaJ domain
  misc_feature (54)..(337): NCBI GI NO: 15240212 NR Description: DnaJ homologue (gb|AAB91418
  misc_feature (54)..(337): NCBI GI NO: 2689720 NR Description: DnaJ homologue [Arabidopsis thaliana]
  misc_feature (83)..(337): NCBI GI NO: 15230424 NR Description: DnaJ protein, putative; protein id: At3g12170.1
  misc_feature (83)..(225): NCBI GI NO: 12322012 NR Description: DnaJ protein, putative, 3' partial; 1110-1
  misc_feature (88)..(336): NCBI GI NO: 32398706 NR Description: DNAJ protein-like, possible
  misc_feature (85)..(315): NCBI GI NO: 39794528 NR Description: Unknown (protein for MGC:76175)
  misc_feature (88)..(315): NCBI GI NO: 27597059 NR Description: DnaJ homolog, subfamily C, member 9
  misc_feature (88)..(320): NCBI GI NO: 34868976 NR Description: similar to J domain of DnaJ-like-protein 1 - rat
  misc_feature (88)..(320): NCBI GI NO: 25513803 NR Description: J domain of DnaJ-like-protein 1 - rat
  misc_feature (88)..(320): NCBI GI NO: 23956266 NR Description: similar to DnaJ protein SB73
NRKDRDGTGTGVRQFPARGKISRTRARASPAIRKNRTTTVSCSTSPTSAASHRMGRKRRARVSSDSDGDDVEMNGDEPAPAAAESKSLYEILGVASTASQQEIKKAYHKLALRLHPDKNPGDEEANEKFQQLQKVISILGDQEKRALYDETGITDDDALVGEAADNLQAYFRTVYRKVTEADIEEFEAKYRGSDSEKKDLKELYTKFKGNMNRLFCSMICSDAKLDSHRFKDIIDQAIAEGEVKSTKVYAKWAKKISEIEPPTNPLERRVKKKKSQESDLILAISQRREQRKERFDSVLSSIMSKCDDNKAGSSEPTEEEFERARQRLEKKRTKGRKWYES

SEQ ID NO: 19236 - protein, 288 aa, Triticum aestivum
  peptide (1)..(288): Ceres Seq. ID no. 12593501
  misc_feature (34)..(99): Pfam Name: Pfam Description:  DnaJ domain
  misc_feature (1)..(284): NCBI GI NO: 15240212 NR Description: DnaJ homologue (gb|AAB91418
  misc_feature (1)..(284): NCBI GI NO: 2689720 NR Description: DnaJ homologue [Arabidopsis thaliana]
  misc_feature (30)..(284): NCBI GI NO: 15230424 NR Description: DnaJ protein, putative; protein id: At3g12170.1
  misc_feature (30)..(172): NCBI GI NO: 12322012 NR Description: DnaJ protein, putative, 3' partial; 1110-1
  misc_feature (35)..(283): NCBI GI NO: 32398706 NR Description: DNAJ protein-like, possible
  misc_feature (32)..(262): NCBI GI NO: 39794528 NR Description: Unknown (protein for MGC:76175)
  misc_feature (35)..(262): NCBI GI NO: 27597059 NR Description: DnaJ homolog, subfamily C, member 9
  misc_feature (35)..(267): NCBI GI NO: 34868976 NR Description: similar to J domain of DnaJ-like-protein 1 - rat
  misc_feature (35)..(267): NCBI GI NO: 25513803 NR Description: J domain of DnaJ-like-protein 1 - rat
  misc_feature (35)..(267): NCBI GI NO: 23956266 NR Description: similar to DnaJ protein SB73
MGRKRRARVSSDSDGDDVEMNGDEPAPAAAESKSLYEILGVASTASQQEIKKAYHKLALRLHPDKNPGDEEANEKFQQLQKVISILGDQEKRALYDETGITDDDALVGEAADNLQAYFRTVYRKVTEADIEEFEAKYRGSDSEKKDLKELYTKFKGNMNRLFCSMICSDAKLDSHRFKDIIDQAIAEGEVKSTKVYAKWAKKISEIEPPTNPLERRVKKKKSQESDLILAISQRREQRKERFDSVLSSIMSKCDDNKAGSSEPTEEEFERARQRLEKKRTKGRKWYES

SEQ ID NO: 19237 - protein, 269 aa, Triticum aestivum
  peptide (1)..(269): Ceres Seq. ID no. 12593502
  misc_feature (15)..(80): Pfam Name: Pfam Description:  DnaJ domain
  misc_feature (1)..(265): NCBI GI NO: 15240212 NR Description: DnaJ homologue (gb|AAB91418
  misc_feature (1)..(265): NCBI GI NO: 2689720 NR Description: DnaJ homologue [Arabidopsis thaliana]
  misc_feature (11)..(265): NCBI GI NO: 15230424 NR Description: DnaJ protein, putative; protein id: At3g12170.1
  misc_feature (11)..(153): NCBI GI NO: 12322012 NR Description: DnaJ protein, putative, 3' partial; 1110-1
  misc_feature (16)..(264): NCBI GI NO: 32398706 NR Description: DNAJ protein-like, possible
  misc_feature (13)..(243): NCBI GI NO: 39794528 NR Description: Unknown (protein for MGC:76175)
  misc_feature (16)..(243): NCBI GI NO: 27597059 NR Description: DnaJ homolog, subfamily C, member 9
  misc_feature (16)..(248): NCBI GI NO: 34868976 NR Description: similar to J domain of DnaJ-like-protein 1 - rat
  misc_feature (16)..(248): NCBI GI NO: 25513803 NR Description: J domain of DnaJ-like-protein 1 - rat
  misc_feature (16)..(248): NCBI GI NO: 23956266 NR Description: similar to DnaJ protein SB73
MNGDEPAPAAAESKSLYEILGVASTASQQEIKKAYHKLALRLHPDKNPGDEEANEKFQQLQKVISILGDQEKRALYDETGITDDDALVGEAADNLQAYFRTVYRKVTEADIEEFEAKYRGSDSEKKDLKELYTKFKGNMNRLFCSMICSDAKLDSHRFKDIIDQAIAEGEVKSTKVYAKWAKKISEIEPPTNPLERRVKKKKSQESDLILAISQRREQRKERFDSVLSSIMSKCDDNKAGSSEPTEEEFERARQRLEKKRTKGRKWYES

SEQ ID NO: 19238 - DNA, 1637 bp, Triticum aestivum
  misc_feature (1)..(1637): Ceres Seq. ID no. 13661452
aacccgcgtgctctcgccgcctcctcctccctccccccgcggcgtcgccgaacgaaaccctagctccgtcgcgcccgcccgcgccgtcgtctcgccggagagcggagagggcggagagggagagggagcgggaggcggggatggggaagaagaagaagcgggtggagaaggtgttctgctactactgcgaccgggagttcgacgacgagaagatcctggtgcagcaccagaaggccaagcacttcaagtgccacgtctgccacaagaagctctcgaccgccggcggcatggccatccacgtcctccaggtccacaaggagtccgtcaccaaggttccgaatgccaagcccgagagggattccaccgagatcgagatcttcggcatgcaggggatcccctccgacgtgctcgccgcccactatggggaagaggaagatccttcatcaaaggtggccaaagtagaagtgccgacaataagacctcctattatgcctaattatccgctaggcatgccttttcctcctcggccttatggtgcagcccgccctatgtataatcctgcaatgatggtccgacctccgatttggcctcttcagcagccgcaaccttggtttgctcaacaaccaccggtttcagttcccccaatgatggctgggcaagcaccacagcaaccactattccccattcaaaacatgcccaatcctatgatgacatcagcacctgctaatttacttcagacatcatacgctatgcccaccacaggggttccttcacctgttgcccctcaggcttcccagcttttgtttcccgttaacaccagtggcaatggagcagcaaattcgtcattcagctcgtcaatttcacctgcaactattgcagcaaattctccagcatcagttggtactgcaggatatggctatgtagctaataaccatggtacaggagggccagcaattggacagccacctgcacctgccactaatagtaaaacgtctgctactcaaccagctacgagtgaggtctatctggtgtgggatgatgaagcaatgtcaatggaggaaagaaggttggcgctgcccatgtaccaggtgcatgacgaaactagccagatgagctcggttgatgcagcgttcgatcgaagaatatcagatattacattttctagacaattgacataaacaagctgcgcctggtgttcagtaaacagcttgatgcgattcaccaacgggctcacccgtgcatccatgggagggacgccgtgcaatcggtggtcctggatcccccctgttgttgatctacttagttagtgactggagctaccgcagtggaaagattgtgttggtctgacttggagattttgattcaacatcgtttgtcctgtcttttcgtaccgagagtggaaacctgttagacctagaagtcatttgttccgttgtcgattgactgacgatatgagtatcttcagctctgtaaacctgacgatgagattagcagtgtcttttcagcggctgtgctgctgttgagtaccatatgttgttggcaccgtcattttgccttccgcagcgtgatcatgtatccatggctagcaaaagcaaaagaggtgttgcttgtttcagcaaatttctcatagggaatgc

SEQ ID NO: 19239 - protein, 391 aa, Triticum aestivum
  peptide (1)..(391): Ceres Seq. ID no. 15218781
  misc_feature (81)..(104): Pfam Name: Pfam Description:  Zinc finger, C2H2 type
  misc_feature (47)..(338): NCBI GI NO: 18397747 NR Description: zinc finger protein -related
  misc_feature (47)..(338): NCBI GI NO: 21553740 NR Description: putative zinc finger protein
  misc_feature (47)..(338): NCBI GI NO: 9755379 NR Description: F17F8.14 [Arabidopsis thaliana]
  misc_feature (47)..(338): NCBI GI NO: 14517410 NR Description: At1g30970/F17F8_14 [Arabidopsis thaliana]
  misc_feature (47)..(295): NCBI GI NO: 31235796 NR Description: ENSANGP00000025039 [Anopheles gambiae]
  misc_feature (47)..(240): NCBI GI NO: 39593757 NR Description: Hypothetical protein CBG06068
  misc_feature (47)..(265): NCBI GI NO: 17538208 NR Description: Putative nuclear protein of eukaryotic origin (33
  misc_feature (47)..(265): NCBI GI NO: 17538210 NR Description: Putative nuclear protein of eukaryotic origin (37
  misc_feature (47)..(281): NCBI GI NO: 19921442 NR Description: CG17912-PA [Drosophila melanogaster]
  misc_feature (130)..(383): NCBI GI NO: 18397747 NR Description: zinc finger protein -related
PACSRRLLLPPPAASPNETLAPSRPPAPSSRRRAERAEREREREAGMGKKKKRVEKVFCYYCDREFDDEKILVQHQKAKHFKCHVCHKKLSTAGGMAIHVLQVHKESVTKVPNAKPERDSTEIEIFGMQGIPSDVLAAHYGEEEDPSSKVAKVEVPTIRPPIMPNYPLGMPFPPRPYGAARPMYNPAMMVRPPIWPLQQPQPWFAQQPPVSVPPMMAGQAPQQPLFPIQNMPNPMMTSAPANLLQTSYAMPTTGVPSPVAPQASQLLFPVNTSGNGAANSSFSSSISPATIAANSPASVGTAGYGYVANNHGTGGPAIGQPPAPATNSKTSATQPATSEVYLVWDDEAMSMEERRLALPMYQVHDETSQMSSVDAAFDRRISDITFSRQLT

SEQ ID NO: 19240 - protein, 345 aa, Triticum aestivum
  peptide (1)..(345): Ceres Seq. ID no. 15218782
  misc_feature (35)..(58): Pfam Name: Pfam Description:  Zinc finger, C2H2 type
  misc_feature (1)..(292): NCBI GI NO: 18397747 NR Description: zinc finger protein -related
  misc_feature (1)..(292): NCBI GI NO: 21553740 NR Description: putative zinc finger protein
  misc_feature (1)..(292): NCBI GI NO: 9755379 NR Description: F17F8.14 [Arabidopsis thaliana]
  misc_feature (1)..(292): NCBI GI NO: 14517410 NR Description: At1g30970/F17F8_14 [Arabidopsis thaliana]
  misc_feature (1)..(249): NCBI GI NO: 31235796 NR Description: ENSANGP00000025039 [Anopheles gambiae]
  misc_feature (1)..(194): NCBI GI NO: 39593757 NR Description: Hypothetical protein CBG06068
  misc_feature (1)..(219): NCBI GI NO: 17538208 NR Description: Putative nuclear protein of eukaryotic origin (33
  misc_feature (1)..(219): NCBI GI NO: 17538210 NR Description: Putative nuclear protein of eukaryotic origin (37
  misc_feature (1)..(235): NCBI GI NO: 19921442 NR Description: CG17912-PA [Drosophila melanogaster]
  misc_feature (84)..(337): NCBI GI NO: 18397747 NR Description: zinc finger protein -related
MGKKKKRVEKVFCYYCDREFDDEKILVQHQKAKHFKCHVCHKKLSTAGGMAIHVLQVHKESVTKVPNAKPERDSTEIEIFGMQGIPSDVLAAHYGEEEDPSSKVAKVEVPTIRPPIMPNYPLGMPFPPRPYGAARPMYNPAMMVRPPIWPLQQPQPWFAQQPPVSVPPMMAGQAPQQPLFPIQNMPNPMMTSAPANLLQTSYAMPTTGVPSPVAPQASQLLFPVNTSGNGAANSSFSSSISPATIAANSPASVGTAGYGYVANNHGTGGPAIGQPPAPATNSKTSATQPATSEVYLVWDDEAMSMEERRLALPMYQVHDETSQMSSVDAAFDRRISDITFSRQLT

SEQ ID NO: 19241 - protein, 296 aa, Triticum aestivum
  peptide (1)..(296): Ceres Seq. ID no. 15218783
  misc_feature (38)..(236): Pfam Name: Pfam Description:  Single-stranded DNA binding protein, SSDP
  misc_feature (1)..(243): NCBI GI NO: 18397747 NR Description: zinc finger protein -related
  misc_feature (1)..(243): NCBI GI NO: 21553740 NR Description: putative zinc finger protein
  misc_feature (1)..(243): NCBI GI NO: 9755379 NR Description: F17F8.14 [Arabidopsis thaliana]
  misc_feature (1)..(243): NCBI GI NO: 14517410 NR Description: At1g30970/F17F8_14 [Arabidopsis thaliana]
  misc_feature (1)..(200): NCBI GI NO: 31235796 NR Description: ENSANGP00000025039 [Anopheles gambiae]
  misc_feature (1)..(145): NCBI GI NO: 39593757 NR Description: Hypothetical protein CBG06068
  misc_feature (1)..(170): NCBI GI NO: 17538208 NR Description: Putative nuclear protein of eukaryotic origin (33
  misc_feature (1)..(170): NCBI GI NO: 17538210 NR Description: Putative nuclear protein of eukaryotic origin (37
  misc_feature (1)..(186): NCBI GI NO: 19921442 NR Description: CG17912-PA [Drosophila melanogaster]
  misc_feature (35)..(288): NCBI GI NO: 18397747 NR Description: zinc finger protein -related
MAIHVLQVHKESVTKVPNAKPERDSTEIEIFGMQGIPSDVLAAHYGEEEDPSSKVAKVEVPTIRPPIMPNYPLGMPFPPRPYGAARPMYNPAMMVRPPIWPLQQPQPWFAQQPPVSVPPMMAGQAPQQPLFPIQNMPNPMMTSAPANLLQTSYAMPTTGVPSPVAPQASQLLFPVNTSGNGAANSSFSSSISPATIAANSPASVGTAGYGYVANNHGTGGPAIGQPPAPATNSKTSATQPATSEVYLVWDDEAMSMEERRLALPMYQVHDETSQMSSVDAAFDRRISDITFSRQLT

SEQ ID NO: 19242 - DNA, 1426 bp, Triticum aestivum
  misc_feature (1)..(1426): Ceres Seq. ID no. 13495341
atcactcatcacaccaacctaaacgaacctttcctgaagcggcggcacggcggcggcgcggccaaaacccgccgaatccagctcgccgcggtggtcgtcaccctccaccgctccctctccgcgcggcgacaccatttaaacctcgccgcctgccgccgcttttttcctcccagatgcttcccccaatctccaccatcccacccacctttccccttccccaccccgccttcacaaaacctagcctcccttaccacctccgctcgccctccctcctggcaaccttctcctcctccgcggcgggtcgggcctgcgggatagcgggccgttggatgggctcggttcgagcctcgccctctgaggcggggggctgggcggtggctgcggcgggtaaggagggggtggacatggagcggctggtggcggtggcgcagagcgcggcggatgcggcgggggaggtgctcaggaagtacttcaggcagcgcttcgagatcatcgacaaagaggaccacagtcccgtcacgatcgctgatagagaagcagaagaagcaatgacctcagtcatactgaagagctttcctactcatgctgttttcggtgaggagaacggttggaggtgtgcagagaagtctgctgactatgtttgggtcttggaccccatagatggaacaaagagcttcataactgggaagcctctttttggtacgcttattgcgcttcttcacaatggaaagccggttatgggcattattgatcagccaatcttgagagagagatgggttggggtggacgggaagaaaactaccttaaatggacaagaaatatctgtccgtccttgcaatgtactggagcaagcttacttatatactacgagtccacatctctttgaaggagatgctgaagatgcattcattcgtgtacgagacaaggtgaaagtcccattgtatggctgtgattgttatgcttatgctctcctggcttctggttttgtggatcttgttgttgaatctggattgaagccatacgattttctctcgctggtaccggtgattgaaggagctgggggctcaataactgattgggaagggaacaagctccactggcctgtctcttcggaatctcggccaacaagtttcaacgtggtggcagccggagattcccatgtccatgggcaggccctggcagcgttgcggtggcgctagcctgcctgcagcacggggcggctcctattgtttatttagaaggctgcaactgttattcatctatccaataaaactgagtctgtacgcttcctcagtgggtaaagcaagttgttcacggtgcaccctttactcaataatgatcagtggtttcttgttgtgtgttatgatcagccgttatgtactcagttactcaagtcatttgatgatcgctgagcgacttgattgcc

SEQ ID NO: 19243 - protein, 398 aa, Triticum aestivum
  peptide (1)..(398): Ceres Seq. ID no. 15222951
  misc_feature (58)..(397): NCBI GI NO: 34394555 NR Description: putative N-amidino-scyllo-inosamine-4-phosphatephosphatase
  misc_feature (65)..(397): NCBI GI NO: 30692186 NR Description: Inositol monophosphatase - like protein
  misc_feature (134)..(397): NCBI GI NO: 7487342 NR Description: hypothetical protein T22F8
  misc_feature (139)..(395): NCBI GI NO: 23015473 NR Description: hypothetical protein
  misc_feature (135)..(395): NCBI GI NO: 22967233 NR Description: hypothetical protein [Rhodospirillum rubrum]
  misc_feature (119)..(364): NCBI GI NO: 22959506 NR Description: hypothetical protein [Rhodobacter sphaeroides]
  misc_feature (146)..(398): NCBI GI NO: 15966578 NR Description: PUTATIVE MONOPHOSPHATASE PROTEIN
  misc_feature (146)..(395): NCBI GI NO: 27382842 NR Description: inositol monophosphatase family protein
  misc_feature (146)..(395): NCBI GI NO: 22962885 NR Description: hypothetical protein [Rhodopseudomonas palustris]
  misc_feature (146)..(395): NCBI GI NO: 15891078 NR Description: AGR_L_1926p [Agrobacterium tumefaciens]
HSSHQPKRTFPEAAARRRRGQNPPNPARRGGRHPPPLPLRAATPFKPRRLPPLFSSQMLPPISTIPPTFPLPHPAFTKPSLPYHLRSPSLLATFSSSAAGRACGIAGRWMGSVRASPSEAGGWAVAAAGKEGVDMERLVAVAQSAADAAGEVLRKYFRQRFEIIDKEDHSPVTIADREAEEAMTSVILKSFPTHAVFGEENGWRCAEKSADYVWVLDPIDGTKSFITGKPLFGTLIALLHNGKPVMGIIDQPILRERWVGVDGKKTTLNGQEISVRPCNVLEQAYLYTTSPHLFEGDAEDAFIRVRDKVKVPLYGCDCYAYALLASGFVDLVVESGLKPYDFLSLVPVIEGAGGSITDWEGNKLHWPVSSESRPTSFNVVAAGDSHVHGQALAALRWR

SEQ ID NO: 19244 - protein, 341 aa, Triticum aestivum
  peptide (1)..(341): Ceres Seq. ID no. 15222952
  misc_feature (1)..(340): NCBI GI NO: 34394555 NR Description: putative N-amidino-scyllo-inosamine-4-phosphatephosphatase
  misc_feature (8)..(340): NCBI GI NO: 30692186 NR Description: Inositol monophosphatase - like protein
  misc_feature (77)..(340): NCBI GI NO: 7487342 NR Description: hypothetical protein T22F8
  misc_feature (82)..(338): NCBI GI NO: 23015473 NR Description: hypothetical protein
  misc_feature (78)..(338): NCBI GI NO: 22967233 NR Description: hypothetical protein [Rhodospirillum rubrum]
  misc_feature (62)..(307): NCBI GI NO: 22959506 NR Description: hypothetical protein [Rhodobacter sphaeroides]
  misc_feature (89)..(341): NCBI GI NO: 15966578 NR Description: PUTATIVE MONOPHOSPHATASE PROTEIN
  misc_feature (89)..(338): NCBI GI NO: 27382842 NR Description: inositol monophosphatase family protein
  misc_feature (89)..(338): NCBI GI NO: 22962885 NR Description: hypothetical protein [Rhodopseudomonas palustris]
  misc_feature (89)..(338): NCBI GI NO: 15891078 NR Description: AGR_L_1926p [Agrobacterium tumefaciens]
MLPPISTIPPTFPLPHPAFTKPSLPYHLRSPSLLATFSSSAAGRACGIAGRWMGSVRASPSEAGGWAVAAAGKEGVDMERLVAVAQSAADAAGEVLRKYFRQRFEIIDKEDHSPVTIADREAEEAMTSVILKSFPTHAVFGEENGWRCAEKSADYVWVLDPIDGTKSFITGKPLFGTLIALLHNGKPVMGIIDQPILRERWVGVDGKKTTLNGQEISVRPCNVLEQAYLYTTSPHLFEGDAEDAFIRVRDKVKVPLYGCDCYAYALLASGFVDLVVESGLKPYDFLSLVPVIEGAGGSITDWEGNKLHWPVSSESRPTSFNVVAAGDSHVHGQALAALRWR

SEQ ID NO: 19245 - protein, 289 aa, Triticum aestivum
  peptide (1)..(289): Ceres Seq. ID no. 15222953
  misc_feature (1)..(288): NCBI GI NO: 34394555 NR Description: putative N-amidino-scyllo-inosamine-4-phosphatephosphatase
  misc_feature (1)..(288): NCBI GI NO: 30692186 NR Description: Inositol monophosphatase - like protein
  misc_feature (25)..(288): NCBI GI NO: 7487342 NR Description: hypothetical protein T22F8
  misc_feature (30)..(286): NCBI GI NO: 23015473 NR Description: hypothetical protein
  misc_feature (26)..(286): NCBI GI NO: 22967233 NR Description: hypothetical protein [Rhodospirillum rubrum]
  misc_feature (10)..(255): NCBI GI NO: 22959506 NR Description: hypothetical protein [Rhodobacter sphaeroides]
  misc_feature (37)..(289): NCBI GI NO: 15966578 NR Description: PUTATIVE MONOPHOSPHATASE PROTEIN
  misc_feature (37)..(286): NCBI GI NO: 27382842 NR Description: inositol monophosphatase family protein
  misc_feature (37)..(286): NCBI GI NO: 22962885 NR Description: hypothetical protein [Rhodopseudomonas palustris]
  misc_feature (37)..(286): NCBI GI NO: 15891078 NR Description: AGR_L_1926p [Agrobacterium tumefaciens]
MGSVRASPSEAGGWAVAAAGKEGVDMERLVAVAQSAADAAGEVLRKYFRQRFEIIDKEDHSPVTIADREAEEAMTSVILKSFPTHAVFGEENGWRCAEKSADYVWVLDPIDGTKSFITGKPLFGTLIALLHNGKPVMGIIDQPILRERWVGVDGKKTTLNGQEISVRPCNVLEQAYLYTTSPHLFEGDAEDAFIRVRDKVKVPLYGCDCYAYALLASGFVDLVVESGLKPYDFLSLVPVIEGAGGSITDWEGNKLHWPVSSESRPTSFNVVAAGDSHVHGQALAALRWR

SEQ ID NO: 19246 - DNA, 1341 bp, Triticum aestivum
  misc_feature (1)..(1341): Ceres Seq. ID no. 13596228
aagtattaaaagcttgagagggattcggagaccatttgcaaggatgtgttcttcgtacttgaccgtgcaatcatatgcaatgatgtgtcttctcgtcaggtagaagtagctagctggagatcgagcgagcatggatgactcgaacatgttcatccagtgggcaatggagacgcttgagcaggagcaggacggcgccgccaccggacacgtcttcccgtcgtcactcctagagctcgacaactcggcggcgctgcagaacggcacgcacatggcggcccaccgacacggagccaccgacagctggagctcaggcgacagtggcgccgcggtggccgtggagaacgacggctggtcgtccaactgcagcaccaactacccggccgcgagctggaacttcatctcggccataccgcagccgcccagcattatcgaggccaccccgagcccacccgcagctcccagccacgtcgtgccggagctggcgcacaggtcgccaccgtcgaggaaatcctcaggcgycagtacagggacggtgccgaccgtgcaggaacacgtcatggcggagcggaagcgccgggagaagatcaaccgacgcttcatcgagctctccaccgtcatccccggcctcaagaagatggacaaggcgaccatcttgtcggacgccgtgaggtacgtcaaggagcagcaggagaagctcaaggcactccaggaccgtgacgcgaggagcatcgactcggtggtgctagtgaagaggccgtgcatctccaacggcgatgatggctgcccgtcaccgccgccgtcagcagcagctggaggaggtccgccgacgacaagggtcacgttgccggagatcgaggcgaggatctcggagagcaatgtgatgatgaggatccactgccaggacggcaaaggggtccttgtcacgttgctcgccgaggtcgaggggctccaccttagcatcacacataccaatgtcgtgtctttcccggcttccactctgatcattaacctcatggccaagttagacgagggcttcgccgtcacagcggacgacattgtatggaagctcgactctgctttgcgcggacatcatagcggcaaatgatagttctagctaggagaggaccaataaacatgaagacgcaaaggcttaagaagcggcaagcaggcagctcatgtccaattagcatgttcaattagtgcgtgtgtgtgcgcgcgcgtgcattgtgagttacactaatagtgaccagtgtgaatctcgggcacatgttcaatttagcatgttaccgttttttgggtgcatctgtacgtgtcactacagcatcaaggcgttgatttttt

SEQ ID NO: 19247 - protein, 324 aa, Triticum aestivum
  peptide (1)..(324): Ceres Seq. ID no. 15221815
  misc_feature (139)..(186): Pfam Name: Pfam Description:  Helix-loop-helix DNA-binding domain
  misc_feature (107)..(297): NCBI GI NO: 29788848 NR Description: putative ammonium transporter
  misc_feature (1)..(316): NCBI GI NO: 7488716 NR Description: symbiotic ammonium transport protein SAT1
  misc_feature (1)..(297): NCBI GI NO: 29788829 NR Description: putative ammonium transporter
  misc_feature (110)..(317): NCBI GI NO: 30681807 NR Description: bHLH protein family [Arabidopsis thaliana]
  misc_feature (138)..(317): NCBI GI NO: 20127018 NR Description: putative bHLH transcription factor
  misc_feature (138)..(317): NCBI GI NO: 30681819 NR Description: bHLH transcription factor -related
  misc_feature (139)..(317): NCBI GI NO: 20127022 NR Description: putative bHLH transcription factor
  misc_feature (139)..(317): NCBI GI NO: 30691602 NR Description: bHLH protein family [Arabidopsis thaliana]
  misc_feature (105)..(317): NCBI GI NO: 20127016 NR Description: putative bHLH transcription factor
  misc_feature (105)..(317): NCBI GI NO: 30681813 NR Description: bHLH protein [Arabidopsis thaliana]
  misc_feature (130)..(130): Xaa is any aa, unknown or other
MDDSNMFIQWAMETLEQEQDGAATGHVFPSSLLELDNSAALQNGTHMAAHRHGATDSWSSGDSGAAVAVENDGWSSNCSTNYPAASWNFISAIPQPPSIIEATPSPPAAPSHVVPELAHRSPPSRKSSGXSTGTVPTVQEHVMAERKRREKINRRFIELSTVIPGLKKMDKATILSDAVRYVKEQQEKLKALQDRDARSIDSVVLVKRPCISNGDDGCPSPPPSAAAGGGPPTTRVTLPEIEARISESNVMMRIHCQDGKGVLVTLLAEVEGLHLSITHTNVVSFPASTLIINLMAKLDEGFAVTADDIVWKLDSALRGHHSGK

SEQ ID NO: 19248 - protein, 319 aa, Triticum aestivum
  peptide (1)..(319): Ceres Seq. ID no. 15221816
  misc_feature (134)..(181): Pfam Name: Pfam Description:  Helix-loop-helix DNA-binding domain
  misc_feature (102)..(292): NCBI GI NO: 29788848 NR Description: putative ammonium transporter
  misc_feature (1)..(311): NCBI GI NO: 7488716 NR Description: symbiotic ammonium transport protein SAT1
  misc_feature (1)..(292): NCBI GI NO: 29788829 NR Description: putative ammonium transporter
  misc_feature (105)..(312): NCBI GI NO: 30681807 NR Description: bHLH protein family [Arabidopsis thaliana]
  misc_feature (133)..(312): NCBI GI NO: 20127018 NR Description: putative bHLH transcription factor
  misc_feature (133)..(312): NCBI GI NO: 30681819 NR Description: bHLH transcription factor -related
  misc_feature (134)..(312): NCBI GI NO: 20127022 NR Description: putative bHLH transcription factor
  misc_feature (134)..(312): NCBI GI NO: 30691602 NR Description: bHLH protein family [Arabidopsis thaliana]
  misc_feature (100)..(312): NCBI GI NO: 20127016 NR Description: putative bHLH transcription factor
  misc_feature (100)..(312): NCBI GI NO: 30681813 NR Description: bHLH protein [Arabidopsis thaliana]
  misc_feature (125)..(125): Xaa is any aa, unknown or other
MFIQWAMETLEQEQDGAATGHVFPSSLLELDNSAALQNGTHMAAHRHGATDSWSSGDSGAAVAVENDGWSSNCSTNYPAASWNFISAIPQPPSIIEATPSPPAAPSHVVPELAHRSPPSRKSSGXSTGTVPTVQEHVMAERKRREKINRRFIELSTVIPGLKKMDKATILSDAVRYVKEQQEKLKALQDRDARSIDSVVLVKRPCISNGDDGCPSPPPSAAAGGGPPTTRVTLPEIEARISESNVMMRIHCQDGKGVLVTLLAEVEGLHLSITHTNVVSFPASTLIINLMAKLDEGFAVTADDIVWKLDSALRGHHSGK

SEQ ID NO: 19249 - protein, 313 aa, Triticum aestivum
  peptide (1)..(313): Ceres Seq. ID no. 15221817
  misc_feature (128)..(175): Pfam Name: Pfam Description:  Helix-loop-helix DNA-binding domain
  misc_feature (96)..(286): NCBI GI NO: 29788848 NR Description: putative ammonium transporter
  misc_feature (1)..(305): NCBI GI NO: 7488716 NR Description: symbiotic ammonium transport protein SAT1
  misc_feature (1)..(286): NCBI GI NO: 29788829 NR Description: putative ammonium transporter
  misc_feature (99)..(306): NCBI GI NO: 30681807 NR Description: bHLH protein family [Arabidopsis thaliana]
  misc_feature (127)..(306): NCBI GI NO: 20127018 NR Description: putative bHLH transcription factor
  misc_feature (127)..(306): NCBI GI NO: 30681819 NR Description: bHLH transcription factor -related
  misc_feature (128)..(306): NCBI GI NO: 20127022 NR Description: putative bHLH transcription factor
  misc_feature (128)..(306): NCBI GI NO: 30691602 NR Description: bHLH protein family [Arabidopsis thaliana]
  misc_feature (94)..(306): NCBI GI NO: 20127016 NR Description: putative bHLH transcription factor
  misc_feature (94)..(306): NCBI GI NO: 30681813 NR Description: bHLH protein [Arabidopsis thaliana]
  misc_feature (119)..(119): Xaa is any aa, unknown or other
METLEQEQDGAATGHVFPSSLLELDNSAALQNGTHMAAHRHGATDSWSSGDSGAAVAVENDGWSSNCSTNYPAASWNFISAIPQPPSIIEATPSPPAAPSHVVPELAHRSPPSRKSSGXSTGTVPTVQEHVMAERKRREKINRRFIELSTVIPGLKKMDKATILSDAVRYVKEQQEKLKALQDRDARSIDSVVLVKRPCISNGDDGCPSPPPSAAAGGGPPTTRVTLPEIEARISESNVMMRIHCQDGKGVLVTLLAEVEGLHLSITHTNVVSFPASTLIINLMAKLDEGFAVTADDIVWKLDSALRGHHSGK

SEQ ID NO: 19250 - DNA, 1463 bp, Triticum aestivum
  misc_feature (1)..(1463): Ceres Seq. ID no. 14302236
gaagccatctcgtacggactccatagctcccacctccaagcacgatcaccagcgagctcccgaaccccatggcaggcggcggcgggaaggtggcgtgcgcggcgtggatccggcgccgggaggacaaggccacccgcgtcttcgcggtgcacggccggccctccccgccggccctggaggttctcggcttcgactccgggagctgctcgctctccgaggagcccctggcgaggattgtgctcggggacgatccagacgacgcgccgctcgccgtcgcggtgcaccccaccggcgacgagctcgtgtgcaccacggccaaggggtgcaggctatttaaactgatttttgaagagttcaccgttcgctttattgaaagtaaagctccagcgatcgaatctgttggactgcagaaatgtgttgccttcagcacagatggtgctaaatttgctatcggtggtgaggatgggcatctaagaatatttcattggccaagcatgaaggtgctcttagatgaacccaacgctcataaatccttcagagacatggatatcagcttagattcagagtttttagtttcatcgtctactgatggcactgcaagaatttggaagataaatgagggggtaccattggtcaacttgactcgatcttcggacgagaagattgagtgttgccgcttttctagggatggcatgaaaccgttcctgttttgcacagttgcaaaaggtagcaaagctgtgactgttgtttggaacataagtgattggtctagaattgggtacaaaagactactgggaaaacctgcctccacactttcagttagcttggatgggaaatttctggctttaggaaaccaggatggtgatttttgtgttgtggatgtaaaggagatggagatttctcactggagcaagaaggtccatcttggttcccctatatgcggaattgaattttgtcctactgaaagagttgtaatctccacatcgccacagtggggagcagagctgacaagactgaatgtgcctgctgactggaaagaatggcaaatctggctcatactcttggcgctcttccttgcatcagccgtcctgttctacgtattctaccagaactccggttccttctggagcggaacgccccgacgggacgtcatcgacctaccaagccatgcagagttctgaacgagcctcctcggtctcgtgaaaaccaaaactcctggtgaaactgttcaccagtgtgattccctttcaagcaatccagcactgcagtgttatttatttcattcataccaagagctctttctttctttactagtgtagtcaatgttgtatcaatccagtggcgcgcctatctatctggcgacgtcagtatttatcggggggaacactgtaaaatgacactgtaaatgataatagttcgagaatgtcatcgagtgttaatgggacattcaagatcgccaactg

SEQ ID NO: 19251 - protein, 370 aa, Triticum aestivum
  peptide (1)..(370): Ceres Seq. ID no. 14302237
  misc_feature (145)..(181): Pfam Name: Pfam Description:  WD domain, G-beta repeat
  misc_feature (1)..(354): NCBI GI NO: 34394605 NR Description: transducin / WD-40 repeat protein-like
  misc_feature (4)..(348): NCBI GI NO: 34897162 NR Description: putative membrane protein
  misc_feature (6)..(353): NCBI GI NO: 18409509 NR Description: transducin / WD-40 repeat protein family
  misc_feature (117)..(353): NCBI GI NO: 26450470 NR Description: unknown protein [Arabidopsis thaliana]
  misc_feature (29)..(344): NCBI GI NO: 18423177 NR Description: St12p protein [Arabidopsis thaliana]
  misc_feature (29)..(314): NCBI GI NO: 8777388 NR Description: protein transport protein SEC12p-like
  misc_feature (42)..(343): NCBI GI NO: 11358859 NR Description: St12p protein [imported] - Arabidopsis thaliana
  misc_feature (42)..(343): NCBI GI NO: 15226281 NR Description: SEC12p protein / St12p protein
  misc_feature (42)..(321): NCBI GI NO: 322598 NR Description: St12p protein - Arabidopsis thaliana
  misc_feature (42)..(207): NCBI GI NO: 17473926 NR Description: putative protein transport protein SEC12p
MAGGGGKVACAAWIRRREDKATRVFAVHGRPSPPALEVLGFDSGSCSLSEEPLARIVLGDDPDDAPLAVAVHPTGDELVCTTAKGCRLFKLIFEEFTVRFIESKAPAIESVGLQKCVAFSTDGAKFAIGGEDGHLRIFHWPSMKVLLDEPNAHKSFRDMDISLDSEFLVSSSTDGTARIWKINEGVPLVNLTRSSDEKIECCRFSRDGMKPFLFCTVAKGSKAVTVVWNISDWSRIGYKRLLGKPASTLSVSLDGKFLALGNQDGDFCVVDVKEMEISHWSKKVHLGSPICGIEFCPTERVVISTSPQWGAELTRLNVPADWKEWQIWLILLALFLASAVLFYVFYQNSGSFWSGTPRRDVIDLPSHAEF

SEQ ID NO: 19252 - protein, 228 aa, Triticum aestivum
  peptide (1)..(228): Ceres Seq. ID no. 14302238
  misc_feature (3)..(39): Pfam Name: Pfam Description:  WD domain, G-beta repeat
  misc_feature (1)..(212): NCBI GI NO: 34394605 NR Description: transducin / WD-40 repeat protein-like
  misc_feature (1)..(206): NCBI GI NO: 34897162 NR Description: putative membrane protein
  misc_feature (1)..(211): NCBI GI NO: 18409509 NR Description: transducin / WD-40 repeat protein family
  misc_feature (1)..(211): NCBI GI NO: 26450470 NR Description: unknown protein [Arabidopsis thaliana]
  misc_feature (1)..(202): NCBI GI NO: 18423177 NR Description: St12p protein [Arabidopsis thaliana]
  misc_feature (1)..(172): NCBI GI NO: 8777388 NR Description: protein transport protein SEC12p-like
  misc_feature (1)..(201): NCBI GI NO: 11358859 NR Description: St12p protein [imported] - Arabidopsis thaliana
  misc_feature (1)..(201): NCBI GI NO: 15226281 NR Description: SEC12p protein / St12p protein
  misc_feature (1)..(179): NCBI GI NO: 322598 NR Description: St12p protein - Arabidopsis thaliana
  misc_feature (1)..(65): NCBI GI NO: 17473926 NR Description: putative protein transport protein SEC12p
MKVLLDEPNAHKSFRDMDISLDSEFLVSSSTDGTARIWKINEGVPLVNLTRSSDEKIECCRFSRDGMKPFLFCTVAKGSKAVTVVWNISDWSRIGYKRLLGKPASTLSVSLDGKFLALGNQDGDFCVVDVKEMEISHWSKKVHLGSPICGIEFCPTERVVISTSPQWGAELTRLNVPADWKEWQIWLILLALFLASAVLFYVFYQNSGSFWSGTPRRDVIDLPSHAEF

SEQ ID NO: 19253 - protein, 212 aa, Triticum aestivum
  peptide (1)..(212): Ceres Seq. ID no. 14302239
  misc_feature (1)..(196): NCBI GI NO: 34394605 NR Description: transducin / WD-40 repeat protein-like
  misc_feature (1)..(190): NCBI GI NO: 34897162 NR Description: putative membrane protein
  misc_feature (1)..(195): NCBI GI NO: 18409509 NR Description: transducin / WD-40 repeat protein family
  misc_feature (1)..(195): NCBI GI NO: 26450470 NR Description: unknown protein [Arabidopsis thaliana]
  misc_feature (1)..(186): NCBI GI NO: 18423177 NR Description: St12p protein [Arabidopsis thaliana]
  misc_feature (1)..(156): NCBI GI NO: 8777388 NR Description: protein transport protein SEC12p-like
  misc_feature (1)..(185): NCBI GI NO: 11358859 NR Description: St12p protein [imported] - Arabidopsis thaliana
  misc_feature (1)..(185): NCBI GI NO: 15226281 NR Description: SEC12p protein / St12p protein
  misc_feature (1)..(163): NCBI GI NO: 322598 NR Description: St12p protein - Arabidopsis thaliana
  misc_feature (1)..(49): NCBI GI NO: 17473926 NR Description: putative protein transport protein SEC12p
MDISLDSEFLVSSSTDGTARIWKINEGVPLVNLTRSSDEKIECCRFSRDGMKPFLFCTVAKGSKAVTVVWNISDWSRIGYKRLLGKPASTLSVSLDGKFLALGNQDGDFCVVDVKEMEISHWSKKVHLGSPICGIEFCPTERVVISTSPQWGAELTRLNVPADWKEWQIWLILLALFLASAVLFYVFYQNSGSFWSGTPRRDVIDLPSHAEF

SEQ ID NO: 19254 - DNA, 1170 bp, Triticum aestivum
  misc_feature (1)..(1170): Ceres Seq. ID no. 12625248
atcagttagattagggtttctggtcggctagttcatacggcgaggagcacgggaagggaggcggagctcgggagaagagatgggtgcgccgaagcagaagtggacgtcggaggaggaggaggcgctgcggcgcggcgtgctcaagcatggcgctggcaagtggcgcaccatccagaaggaccccgagttcagccccgtcctttcctctcgctccaacatcgacctcaaggacaaatggaggaatttgagttttagtgcaagtggactaggttcaagggataaacaaagggttccaaggccgaaagcaccttcgtcctccccatcacctagcccgcagcttctgcttctcccagcaacgaataatgttgctgaggcttctccaccagaagattgtgaaaagagcccacaggatgacaagactccaagtccaaagtacagttccatgatcctggaagctctcggcgaactgaaagagccaaatggttcagaagttactacaatttgcaatttcatagagattgataagtcctataagctgacggattcatatgcaaaaagggctctggctccaatgaaagatccatctctaaagaagaaggattcagccaagtcatccaaggcagcaaagggtcaaggcctgtttaccgctgcgagccctgcactgggcgcggctgaagctgcagcgacgaaagtagccgatgcggaggccaaatcgcacctcgcaaacgagcacatgatggaggttgaaaggatcggcaagatggccgaggagaccgagtctctcctcgagctcgcctcagagctctacgagcgatgttcaagaggagaggtgctcacaatactgcaagtggcgcacagggagttttgatggtgttgtcgacccccgtcagctgcgcgccgacatctgctctcttgtacatggatggatggaagcgttggcccagcctgttgtcttcttgcccgcgtgttgtctctgtgttgtatcataactcgaatcaattcgttggttgtacctgagaggccattcctttcattgcctaggaatgattttaagttggtgcattttggatgctgtcctgtgttgaaatcagggaataatgtgtatctcgtcctgccgccttttcctgtatgtactctaatgcaagtttggtcatatgctccctccttggc

SEQ ID NO: 19255 - protein, 262 aa, Triticum aestivum
  peptide (1)..(262): Ceres Seq. ID no. 12625249
  misc_feature (5)..(57): Pfam Name: Pfam Description:  Myb-like DNA-binding domain
  misc_feature (1)..(193): NCBI GI NO: 34910440 NR Description: histone H1-like protein
  misc_feature (1)..(193): NCBI GI NO: 27125811 NR Description: MYB28 protein
  misc_feature (1)..(211): NCBI GI NO: 34105717 NR Description: Single myb histone 3 [Zea mays subsp. mays]
  misc_feature (1)..(215): NCBI GI NO: 18463961 NR Description: histone H1-like protein [Zea mays]
  misc_feature (1)..(215): NCBI GI NO: 34105721 NR Description: Single myb histone 4 [Zea mays subsp. mays]
  misc_feature (1)..(246): NCBI GI NO: 8778473 NR Description: F1L3.23 [Arabidopsis thaliana]
  misc_feature (146)..(262): NCBI GI NO: 27125811 NR Description: MYB28 protein
  misc_feature (146)..(262): NCBI GI NO: 34910440 NR Description: histone H1-like protein
  misc_feature (1)..(248): NCBI GI NO: 34912214 NR Description: putative telomere repeat binding factor
  misc_feature (1)..(146): NCBI GI NO: 18402853 NR Description: DNA-binding protein PcMYB1, putative
MGAPKQKWTSEEEEALRRGVLKHGAGKWRTIQKDPEFSPVLSSRSNIDLKDKWRNLSFSASGLGSRDKQRVPRPKAPSSSPSPSPQLLLLPATNNVAEASPPEDCEKSPQDDKTPSPKYSSMILEALGELKEPNGSEVTTICNFIEIDKSYKLTDSYAKRALAPMKDPSLKKKDSAKSSKAAKGQGLFTAASPALGAAEAAATKVADAEAKSHLANEHMMEVERIGKMAEETESLLELASELYERCSRGEVLTILQVAHREF

SEQ ID NO: 19256 - protein, 141 aa, Triticum aestivum
  peptide (1)..(141): Ceres Seq. ID no. 12625250
  misc_feature (1)..(72): NCBI GI NO: 34910440 NR Description: histone H1-like protein
  misc_feature (1)..(72): NCBI GI NO: 27125811 NR Description: MYB28 protein
  misc_feature (1)..(90): NCBI GI NO: 34105717 NR Description: Single myb histone 3 [Zea mays subsp. mays]
  misc_feature (1)..(94): NCBI GI NO: 18463961 NR Description: histone H1-like protein [Zea mays]
  misc_feature (1)..(94): NCBI GI NO: 34105721 NR Description: Single myb histone 4 [Zea mays subsp. mays]
  misc_feature (1)..(125): NCBI GI NO: 8778473 NR Description: F1L3.23 [Arabidopsis thaliana]
  misc_feature (25)..(141): NCBI GI NO: 27125811 NR Description: MYB28 protein
  misc_feature (25)..(141): NCBI GI NO: 34910440 NR Description: histone H1-like protein
  misc_feature (1)..(127): NCBI GI NO: 34912214 NR Description: putative telomere repeat binding factor
  misc_feature (1)..(25): NCBI GI NO: 18402853 NR Description: DNA-binding protein PcMYB1, putative
MILEALGELKEPNGSEVTTICNFIEIDKSYKLTDSYAKRALAPMKDPSLKKKDSAKSSKAAKGQGLFTAASPALGAAEAAATKVADAEAKSHLANEHMMEVERIGKMAEETESLLELASELYERCSRGEVLTILQVAHREF

SEQ ID NO: 19257 - DNA, 1349 bp, Triticum aestivum
  misc_feature (1)..(1349): Ceres Seq. ID no. 13596229
gtccccgtcccctcgcttccaagctactaccccgagcgcgcgagagcgagagcgagccagccagcgccacttgactccagctccttccttccctccccatccttccgtcctcggcttgcacatcacatcgcgtcaccggagccagctacgagcgcgtgagaccagcagcgggacagcatggaggggggcggcgaggggaagggccgggcggcgccggcgacggcggcggggggagggttcggagggtacgagtcggccggggaccgcaagtggtggccctggctcgtgcccaccgtcatcgtcgcctgcgtcgccgtcttcgtcgtcgagatgtgggtcaacgactgccccaggcacggcagcgcgctcggcggcggctgcgtcgcgggattcctccggcgattctccttccagccgctccgcgagaacccgctcctcgggccctcctccaccactttggggaaaatgggagctctggactggaacaaggttgtccatcagcaccaggggtggcgtctcattagctgcatctggctccatgctggcctgatccatttggttgtgaacatgctaagtctgctgtttattgggattcgtcttgagcagcaatttgggtttgttcgcattggcgctatctacctactgtctggtttcggtggcagcgtgatgtctgcactcttcctacgaaataactacatctctgttggtgcatctggagctttatttgggctgcttggatctatgctttctgagctacttatgaactggactatttactccaacaaggttgcagccataataacccttctgtttataatcgcgatcaacgtggcaatcgggatactaccgcatgctgataactttgctcacattggtggattcctgaccgggttccttttggggttcgttctgctggcaaggccacaattcggttggttggaacgcagcgagctgccccataccaatcagccccccaagtacaaaccataccaatatgtcctgtgggttgtggcactcgtcttgctgcttgtcgggttcacgctttcgttggtgatgctcttcaagggcaagaacgggaatgacggctgccactggtgccactacctgaactgtgtgccgacgtcgaggtggaagtgcgatacctaggcggttccttctttcggttttcgacgaaaacccgtagtgttgtgaggaccattttcatgcttttatgtttgtagataggaacttgttctttagtgaactctgtaaatttgtttggcaggctctgtaagtttgtaactcgagcactctccagtgatttcatgcgtgtttttgtgttaaaaaaaaaaaaaaaaaaaaaaaaaaaa

SEQ ID NO: 19258 - protein, 322 aa, Triticum aestivum
  peptide (1)..(322): Ceres Seq. ID no. 13596230
  misc_feature (1)..(322): NCBI GI NO: 294845 NR Description: membrane protein
  misc_feature (4)..(321): NCBI GI NO: 15240744 NR Description: membrane protein, Rhomboid family
  misc_feature (25)..(320): NCBI GI NO: 15221690 NR Description: membrane protein, Rhomboid family
  misc_feature (23)..(320): NCBI GI NO: 15222058 NR Description: membrane protein, Rhomboid family
  misc_feature (23)..(320): NCBI GI NO: 25402744 NR Description: protein T12C24.28
  misc_feature (30)..(321): NCBI GI NO: 30693911 NR Description: membrane protein, Rhomboid family
  misc_feature (1)..(320): NCBI GI NO: 37536172 NR Description: putative membrane protein
  misc_feature (5)..(321): NCBI GI NO: 38344377 NR Description: OSJNBb0032E06.11
  misc_feature (30)..(321): NCBI GI NO: 11357824 NR Description: hypothetical protein F5K20
  misc_feature (23)..(318): NCBI GI NO: 15236387 NR Description: membrane protein, Rhomboid family
MEGGGEGKGRAAPATAAGGGFGGYESAGDRKWWPWLVPTVIVACVAVFVVEMWVNDCPRHGSALGGGCVAGFLRRFSFQPLRENPLLGPSSTTLGKMGALDWNKVVHQHQGWRLISCIWLHAGLIHLVVNMLSLLFIGIRLEQQFGFVRIGAIYLLSGFGGSVMSALFLRNNYISVGASGALFGLLGSMLSELLMNWTIYSNKVAAIITLLFIIAINVAIGILPHADNFAHIGGFLTGFLLGFVLLARPQFGWLERSELPHTNQPPKYKPYQYVLWVVALVLLLVGFTLSLVMLFKGKNGNDGCHWCHYLNCVPTSRWKCDT

SEQ ID NO: 19259 - protein, 271 aa, Triticum aestivum
  peptide (1)..(271): Ceres Seq. ID no. 13596231
  misc_feature (1)..(271): NCBI GI NO: 294845 NR Description: membrane protein
  misc_feature (1)..(270): NCBI GI NO: 15240744 NR Description: membrane protein, Rhomboid family
  misc_feature (1)..(269): NCBI GI NO: 15221690 NR Description: membrane protein, Rhomboid family
  misc_feature (1)..(269): NCBI GI NO: 15222058 NR Description: membrane protein, Rhomboid family
  misc_feature (1)..(269): NCBI GI NO: 25402744 NR Description: protein T12C24.28
  misc_feature (1)..(270): NCBI GI NO: 30693911 NR Description: membrane protein, Rhomboid family
  misc_feature (1)..(269): NCBI GI NO: 37536172 NR Description: putative membrane protein
  misc_feature (1)..(270): NCBI GI NO: 38344377 NR Description: OSJNBb0032E06.11
  misc_feature (1)..(270): NCBI GI NO: 11357824 NR Description: hypothetical protein F5K20
  misc_feature (1)..(267): NCBI GI NO: 15236387 NR Description: membrane protein, Rhomboid family
MWVNDCPRHGSALGGGCVAGFLRRFSFQPLRENPLLGPSSTTLGKMGALDWNKVVHQHQGWRLISCIWLHAGLIHLVVNMLSLLFIGIRLEQQFGFVRIGAIYLLSGFGGSVMSALFLRNNYISVGASGALFGLLGSMLSELLMNWTIYSNKVAAIITLLFIIAINVAIGILPHADNFAHIGGFLTGFLLGFVLLARPQFGWLERSELPHTNQPPKYKPYQYVLWVVALVLLLVGFTLSLVMLFKGKNGNDGCHWCHYLNCVPTSRWKCDT

SEQ ID NO: 19260 - protein, 226 aa, Triticum aestivum
  peptide (1)..(226): Ceres Seq. ID no. 13596232
  misc_feature (1)..(226): NCBI GI NO: 294845 NR Description: membrane protein
  misc_feature (1)..(225): NCBI GI NO: 15240744 NR Description: membrane protein, Rhomboid family
  misc_feature (1)..(224): NCBI GI NO: 15221690 NR Description: membrane protein, Rhomboid family
  misc_feature (1)..(224): NCBI GI NO: 15222058 NR Description: membrane protein, Rhomboid family
  misc_feature (1)..(224): NCBI GI NO: 25402744 NR Description: protein T12C24.28
  misc_feature (1)..(225): NCBI GI NO: 30693911 NR Description: membrane protein, Rhomboid family
  misc_feature (1)..(224): NCBI GI NO: 37536172 NR Description: putative membrane protein
  misc_feature (1)..(225): NCBI GI NO: 38344377 NR Description: OSJNBb0032E06.11
  misc_feature (1)..(225): NCBI GI NO: 11357824 NR Description: hypothetical protein F5K20
  misc_feature (1)..(222): NCBI GI NO: 15236387 NR Description: membrane protein, Rhomboid family
MGALDWNKVVHQHQGWRLISCIWLHAGLIHLVVNMLSLLFIGIRLEQQFGFVRIGAIYLLSGFGGSVMSALFLRNNYISVGASGALFGLLGSMLSELLMNWTIYSNKVAAIITLLFIIAINVAIGILPHADNFAHIGGFLTGFLLGFVLLARPQFGWLERSELPHTNQPPKYKPYQYVLWVVALVLLLVGFTLSLVMLFKGKNGNDGCHWCHYLNCVPTSRWKCDT

SEQ ID NO: 19261 - DNA, 897 bp, Triticum aestivum
  misc_feature (1)..(897): Ceres Seq. ID no. 12614309
acatcccgacgaattattttcctgaacctaattattcgcggcgctcggtcccacttcgcggcagaagaacaccgccgccgccgccgccgccgccgccgccgtcacaggaattccttgccatggagggcgttggcgcgcggttagggcgctcgtcggcccgttacggccccgcgatgacgttcaccgggcctgttaggaagtggcggaaggaatgggtcaccatctccgccgccacggccacggccacctccgccgcggcctcctccaccgggactggatctcgtggaaataacctcatcctgttcaagtggaccccgctgaacggcgccaacgaacgagatgaggagcagacggcaccggcgaagacggccacgagaaggcggctgtacgtgccggtttctgtagttcaagatcaaaggcaagaatctgccaaatctgatgatgagaacaaggctaatgatggagaaccttcatctacggaaactgagcagtctattgggaaaactaatatggatgatatacttatggatgagtcccaggcatcagatgaggttcgagattctggaaatttcgttggtggaactgatctaaatctgaacttaggtccaaaagaccccgacggtgaagatgaaggtgatacaggtgagcaacacgaggttcgaacagaacacagattgaagaggaaatctgttacccctgacctcgagatgagaatgtaacaggcggcttcatttattccttggattctttattattacagtttcccttttgggccatttatgtaattttcttgacatactgtatacgtggagagacaagtcaacagaatcacaactacatagtgaaacgcgcattgtgttgccaaataacgttaatgaaacttttctttcgttttgc

SEQ ID NO: 19262 - protein, 238 aa, Triticum aestivum
  peptide (1)..(238): Ceres Seq. ID no. 12614310
  misc_feature (40)..(183): NCBI GI NO: 7486827 NR Description: hypothetical protein T10I14
  misc_feature (40)..(183): NCBI GI NO: 30685783 NR Description: expressed protein [Arabidopsis thaliana]
  misc_feature (40)..(197): NCBI GI NO: 15240476 NR Description: putative protein; protein id: At5g55210.1
IPTNYFPEPNYSRRSVPLRGRRTPPPPPPPPPPSQEFLAMEGVGARLGRSSARYGPAMTFTGPVRKWRKEWVTISAATATATSAAASSTGTGSRGNNLILFKWTPLNGANERDEEQTAPAKTATRRRLYVPVSVVQDQRQESAKSDDENKANDGEPSSTETEQSIGKTNMDDILMDESQASDEVRDSGNFVGGTDLNLNLGPKDPDGEDEGDTGEQHEVRTEHRLKRKSVTPDLEMRM

SEQ ID NO: 19263 - protein, 199 aa, Triticum aestivum
  peptide (1)..(199): Ceres Seq. ID no. 12614311
  misc_feature (1)..(144): NCBI GI NO: 7486827 NR Description: hypothetical protein T10I14
  misc_feature (1)..(144): NCBI GI NO: 30685783 NR Description: expressed protein [Arabidopsis thaliana]
  misc_feature (1)..(158): NCBI GI NO: 15240476 NR Description: putative protein; protein id: At5g55210.1
MEGVGARLGRSSARYGPAMTFTGPVRKWRKEWVTISAATATATSAAASSTGTGSRGNNLILFKWTPLNGANERDEEQTAPAKTATRRRLYVPVSVVQDQRQESAKSDDENKANDGEPSSTETEQSIGKTNMDDILMDESQASDEVRDSGNFVGGTDLNLNLGPKDPDGEDEGDTGEQHEVRTEHRLKRKSVTPDLEMRM

SEQ ID NO: 19264 - protein, 181 aa, Triticum aestivum
  peptide (1)..(181): Ceres Seq. ID no. 12614312
  misc_feature (1)..(126): NCBI GI NO: 7486827 NR Description: hypothetical protein T10I14
  misc_feature (1)..(126): NCBI GI NO: 30685783 NR Description: expressed protein [Arabidopsis thaliana]
  misc_feature (1)..(140): NCBI GI NO: 15240476 NR Description: putative protein; protein id: At5g55210.1
MTFTGPVRKWRKEWVTISAATATATSAAASSTGTGSRGNNLILFKWTPLNGANERDEEQTAPAKTATRRRLYVPVSVVQDQRQESAKSDDENKANDGEPSSTETEQSIGKTNMDDILMDESQASDEVRDSGNFVGGTDLNLNLGPKDPDGEDEGDTGEQHEVRTEHRLKRKSVTPDLEMRM

SEQ ID NO: 19265 - DNA, 1243 bp, Triticum aestivum
  misc_feature (1)..(1243): Ceres Seq. ID no. 12614809
aacatccaatcgaaaaacacactgttaacctcggtagcagaggcatcactccacagcttgcctgcaagccatcttctccacgattccgctcacggttcatcggttgccacccgattctggtgcgccgtcgcagagcggcgaagatggccaccaaggggcgcaaggtcgtcgaggtccgtgacgcgagcaggacggacgggaagggcgacgccgcggacgtccacgtcgtccgcgaggggaagagcgaccacgacaccgccggcggcgtcggccaccgcggcgcgagcaggacggacgggcatggcgacgcgggcggcaaggtcggggacttccgcggcatcgacgggaaggactccctgaagatcgtcgcgatgcaggcgccggtcaccgtggagcgccccgtccgcggcgacctcgaggagcacgtccccaagccctatttggcgagggctttggcggctccggacatgtaccacccggaggggacgacggatgatcaccagcaccacaacatgagcgtgctgcagcagcacgtcgccttcttcgaccgcgacaacaacggcatcatctatccctgggagacttacgatggatgccgtgcggttgggttcaacgtgttcatgtccgccttcatcgcgtttctggtgaacctggtcatgagctatcccaccctgcccggttggctgccgaaccctctcttcccgatctacgtgcacaacatccacaagagcaagcacgggagtgattcggggacctatgacaaagagggccggttcatgccggtgaatttcgagaacatcttcagcaagtacgcccgcacgtacccggacaggctcagctacagggagctgtggcggatgaccgaggggtgccgggaggtgttcgatttcttcggctgggtggcgatgaagctggagtggtcgttcctgtacgtgctggctcgggacgacgaagggtacctgtcgagggaggccatccggcgcatgtacgacggcagcctcttcgagtacatggagaggcagcgcatggagcacgtcaagatgtcctagatcacagtcgacggtgaaactcgcatggtcggagctgcacccacctgtgatgctttccgtgtccgtgtgtgtgatgtacagcaggccacagatccatgcggtgtgccgctggtgtggcgaaatgaaaacataaataacgtgatatatgccatggtttaaaaaaaaaaaaaaaaaagcttatcgataccgtcgac

SEQ ID NO: 19266 - protein, 348 aa, Triticum aestivum
  peptide (1)..(348): Ceres Seq. ID no. 12614810
  misc_feature (166)..(336): Pfam Name: Pfam Description:  Caleosin related protein
  misc_feature (48)..(348): NCBI GI NO: 34538473 NR Description: caleosin 1 [Hordeum vulgare]
  misc_feature (112)..(348): NCBI GI NO: 32488447 NR Description: OSJNBa0004N05.4
  misc_feature (126)..(347): NCBI GI NO: 6478218 NR Description: caleosin [Sesamum indicum]
  misc_feature (116)..(348): NCBI GI NO: 7459611 NR Description: Ca+2-binding EF hand protein homolog PM13
  misc_feature (117)..(346): NCBI GI NO: 7459612 NR Description: abscisic acid-induced protein - rice
  misc_feature (116)..(343): NCBI GI NO: 15240486 NR Description: embryo-specific protein 1
  misc_feature (116)..(336): NCBI GI NO: 15236846 NR Description: embryo-specific protein 1
  misc_feature (116)..(336): NCBI GI NO: 17380858 NR Description: putative embryo-specific protein ATS1
  misc_feature (116)..(346): NCBI GI NO: 34538477 NR Description: caleosin 2 [Hordeum vulgare]
  misc_feature (117)..(341): NCBI GI NO: 15226103 NR Description: RD20 protein; protein id: At2g33380
HPIEKHTVNLGSRGITPQLACKPSSPRFRSRFIGCHPILVRRRRAAKMATKGRKVVEVRDASRTDGKGDAADVHVVREGKSDHDTAGGVGHRGASRTDGHGDAGGKVGDFRGIDGKDSLKIVAMQAPVTVERPVRGDLEEHVPKPYLARALAAPDMYHPEGTTDDHQHHNMSVLQQHVAFFDRDNNGIIYPWETYDGCRAVGFNVFMSAFIAFLVNLVMSYPTLPGWLPNPLFPIYVHNIHKSKHGSDSGTYDKEGRFMPVNFENIFSKYARTYPDRLSYRELWRMTEGCREVFDFFGWVAMKLEWSFLYVLARDDEGYLSREAIRRMYDGSLFEYMERQRMEHVKMS

SEQ ID NO: 19267 - protein, 301 aa, Triticum aestivum
  peptide (1)..(301): Ceres Seq. ID no. 12614811
  misc_feature (119)..(289): Pfam Name: Pfam Description:  Caleosin related protein
  misc_feature (1)..(301): NCBI GI NO: 34538473 NR Description: caleosin 1 [Hordeum vulgare]
  misc_feature (65)..(301): NCBI GI NO: 32488447 NR Description: OSJNBa0004N05.4
  misc_feature (79)..(300): NCBI GI NO: 6478218 NR Description: caleosin [Sesamum indicum]
  misc_feature (69)..(301): NCBI GI NO: 7459611 NR Description: Ca+2-binding EF hand protein homolog PM13
  misc_feature (70)..(299): NCBI GI NO: 7459612 NR Description: abscisic acid-induced protein - rice
  misc_feature (69)..(296): NCBI GI NO: 15240486 NR Description: embryo-specific protein 1
  misc_feature (69)..(289): NCBI GI NO: 15236846 NR Description: embryo-specific protein 1
  misc_feature (69)..(289): NCBI GI NO: 17380858 NR Description: putative embryo-specific protein ATS1
  misc_feature (69)..(299): NCBI GI NO: 34538477 NR Description: caleosin 2 [Hordeum vulgare]
  misc_feature (70)..(294): NCBI GI NO: 15226103 NR Description: RD20 protein; protein id: At2g33380
MATKGRKVVEVRDASRTDGKGDAADVHVVREGKSDHDTAGGVGHRGASRTDGHGDAGGKVGDFRGIDGKDSLKIVAMQAPVTVERPVRGDLEEHVPKPYLARALAAPDMYHPEGTTDDHQHHNMSVLQQHVAFFDRDNNGIIYPWETYDGCRAVGFNVFMSAFIAFLVNLVMSYPTLPGWLPNPLFPIYVHNIHKSKHGSDSGTYDKEGRFMPVNFENIFSKYARTYPDRLSYRELWRMTEGCREVFDFFGWVAMKLEWSFLYVLARDDEGYLSREAIRRMYDGSLFEYMERQRMEHVKMS

SEQ ID NO: 19268 - protein, 225 aa, Triticum aestivum
  peptide (1)..(225): Ceres Seq. ID no. 12614812
  misc_feature (43)..(213): Pfam Name: Pfam Description:  Caleosin related protein
  misc_feature (1)..(225): NCBI GI NO: 34538473 NR Description: caleosin 1 [Hordeum vulgare]
  misc_feature (1)..(225): NCBI GI NO: 32488447 NR Description: OSJNBa0004N05.4
  misc_feature (3)..(224): NCBI GI NO: 6478218 NR Description: caleosin [Sesamum indicum]
  misc_feature (1)..(225): NCBI GI NO: 7459611 NR Description: Ca+2-binding EF hand protein homolog PM13
  misc_feature (1)..(223): NCBI GI NO: 7459612 NR Description: abscisic acid-induced protein - rice
  misc_feature (1)..(220): NCBI GI NO: 15240486 NR Description: embryo-specific protein 1
  misc_feature (1)..(213): NCBI GI NO: 15236846 NR Description: embryo-specific protein 1
  misc_feature (1)..(213): NCBI GI NO: 17380858 NR Description: putative embryo-specific protein ATS1
  misc_feature (1)..(223): NCBI GI NO: 34538477 NR Description: caleosin 2 [Hordeum vulgare]
  misc_feature (1)..(218): NCBI GI NO: 15226103 NR Description: RD20 protein; protein id: At2g33380
MQAPVTVERPVRGDLEEHVPKPYLARALAAPDMYHPEGTTDDHQHHNMSVLQQHVAFFDRDNNGIIYPWETYDGCRAVGFNVFMSAFIAFLVNLVMSYPTLPGWLPNPLFPIYVHNIHKSKHGSDSGTYDKEGRFMPVNFENIFSKYARTYPDRLSYRELWRMTEGCREVFDFFGWVAMKLEWSFLYVLARDDEGYLSREAIRRMYDGSLFEYMERQRMEHVKMS

SEQ ID NO: 19269 - DNA, 1452 bp, Triticum aestivum
  misc_feature (1)..(1452): Ceres Seq. ID no. 13598326
ctttcttttcttttcttgatctctcctccggaaattagctatccttctcctcgactcctcctcgtcgtcatggcaccactgaggggggccaagcgccggaagcggcaccccgagaaggccctgccggcgggggtgatggcgcccttgcccccgcccgacgccgccgattggtgggactccttctcccgcaggcttgcagcaggacactactccaaagactgccagaactttgagtcagtcttcaagatgtcgaggaagacattcgactacatttgcactctgattaccggggacttctcaagaaagacacagggtttcagaaatttcaggtttggagacaagatgattcttgcgttggaggatcaagtagctgttgctctgttgagactgacgactggtgagtcacttctgagcatagggaatcgctttggaatgaaccactcagcaatctcaaacatcacttggaagttcattgagtccttggaggatcacgcaatcagtcatctgaagtggcctgaccctgaggagatggcgaccatcaaagcaaagttcgaaaagctccagggcctccccaactgctgcggcgccatagacacaacacacatcctcatgtgctcttcagctcagcctaacagcaatgtctggcttgactgtgaracacarkaacagcatggtcctgcaggccgttgtcgaccccgacatgcggttcagagacgttgtcagtggctggcctgggagcatggatgactcctgcatcctgcgcacctcgggcttctacaagctgtgcgagaaaggcgggaggctggacggacaaatggagcttcctggggagccagcagggtcagtggtcagagagtacatcatcggggacacgggctaccctctccttccctggctgatgactccataccaagagcgcgatctgtctccagcaaaagcagcattcaacaagcagcacgccacggcgagaatggtggtgcagggtgctatggccaggctgaaggaaaggtggcaggtactcaagggggagctgtggaggcctgacaagcaccggctaccgaggatcatctacgcctgctgcctgctcaccaacatcatgatcgacctcggggacacacacagagaacgggcaccggcgtcgcacgaccatgatgacggttactatcagcagttcagcaatgtggccgacgacggtgcggttgcacagagggacgtgctttgccagtatgtcagcaggctaggcggcaaattgccggagtgattctcgccctctagctgcataccgtgcgcctcttcgcctatttttctctctgctcgacatgaaacaaatgatagctacagaacatagaatcgtgatctggatatttgttacccttgagacggtttgctgcgattgttattggtattattaaataggtcatagaagttgtaacctgaattgcggttactttg

SEQ ID NO: 19270 - protein, 248 aa, Triticum aestivum
  peptide (1)..(248): Ceres Seq. ID no. 15222305
  misc_feature (56)..(219): NCBI GI NO: 15233248 NR Description: expressed protein [Arabidopsis thaliana]
  misc_feature (24)..(221): NCBI GI NO: 34908114 NR Description: P0031D11.14
  misc_feature (24)..(217): NCBI GI NO: 25553597 NR Description: OJ1656_E11.28
  misc_feature (26)..(219): NCBI GI NO: 18412695 NR Description: expressed protein [Arabidopsis thaliana]
  misc_feature (26)..(153): NCBI GI NO: 11357482 NR Description: hypothetical protein F16M2
  misc_feature (153)..(219): NCBI GI NO: 11357482 NR Description: hypothetical protein F16M2
  misc_feature (57)..(202): NCBI GI NO: 15239835 NR Description: expressed protein [Arabidopsis thaliana]
  misc_feature (55)..(214): NCBI GI NO: 34906342 NR Description: unnamed protein product
  misc_feature (57)..(202): NCBI GI NO: 21902022 NR Description: B1097D05.23
  misc_feature (56)..(202): NCBI GI NO: 7452044 NR Description: hypothetical protein F27B13
  misc_feature (219)..(219): Xaa is any aa, unknown or other
  misc_feature (221)..(221): Xaa is any aa, unknown or other
  misc_feature (222)..(222): Xaa is any aa, unknown or other
LSFLFLISPPEISYPSPRLLLVVMAPLRGAKRRKRHPEKALPAGVMAPLPPPDAADWWDSFSRRLAAGHYSKDCQNFESVFKMSRKTFDYICTLITGDFSRKTQGFRNFRFGDKMILALEDQVAVALLRLTTGESLLSIGNRFGMNHSAISNITWKFIESLEDHAISHLKWPDPEEMATIKAKFEKLQGLPNCCGAIDTTHILMCSSAQPNSNVWLDCXTXXQHGPAGRCRPRHAVQRRCQWLAWEHG

SEQ ID NO: 19271 - protein, 225 aa, Triticum aestivum
  peptide (1)..(225): Ceres Seq. ID no. 15222306
  misc_feature (33)..(196): NCBI GI NO: 15233248 NR Description: expressed protein [Arabidopsis thaliana]
  misc_feature (1)..(198): NCBI GI NO: 34908114 NR Description: P0031D11.14
  misc_feature (1)..(194): NCBI GI NO: 25553597 NR Description: OJ1656_E11.28
  misc_feature (3)..(196): NCBI GI NO: 18412695 NR Description: expressed protein [Arabidopsis thaliana]
  misc_feature (3)..(130): NCBI GI NO: 11357482 NR Description: hypothetical protein F16M2
  misc_feature (130)..(196): NCBI GI NO: 11357482 NR Description: hypothetical protein F16M2
  misc_feature (34)..(179): NCBI GI NO: 15239835 NR Description: expressed protein [Arabidopsis thaliana]
  misc_feature (32)..(191): NCBI GI NO: 34906342 NR Description: unnamed protein product
  misc_feature (34)..(179): NCBI GI NO: 21902022 NR Description: B1097D05.23
  misc_feature (33)..(179): NCBI GI NO: 7452044 NR Description: hypothetical protein F27B13
  misc_feature (196)..(196): Xaa is any aa, unknown or other
  misc_feature (198)..(198): Xaa is any aa, unknown or other
  misc_feature (199)..(199): Xaa is any aa, unknown or other
MAPLRGAKRRKRHPEKALPAGVMAPLPPPDAADWWDSFSRRLAAGHYSKDCQNFESVFKMSRKTFDYICTLITGDFSRKTQGFRNFRFGDKMILALEDQVAVALLRLTTGESLLSIGNRFGMNHSAISNITWKFIESLEDHAISHLKWPDPEEMATIKAKFEKLQGLPNCCGAIDTTHILMCSSAQPNSNVWLDCXTXXQHGPAGRCRPRHAVQRRCQWLAWEHG

SEQ ID NO: 19272 - protein, 207 aa, Triticum aestivum
  peptide (1)..(207): Ceres Seq. ID no. 15222307
  misc_feature (11)..(194): NCBI GI NO: 15233248 NR Description: expressed protein [Arabidopsis thaliana]
  misc_feature (1)..(206): NCBI GI NO: 34908114 NR Description: P0031D11.14
  misc_feature (11)..(198): NCBI GI NO: 25553597 NR Description: OJ1656_E11.28
  misc_feature (11)..(200): NCBI GI NO: 18412695 NR Description: expressed protein [Arabidopsis thaliana]
  misc_feature (11)..(179): NCBI GI NO: 11357482 NR Description: hypothetical protein F16M2
  misc_feature (11)..(153): NCBI GI NO: 15239835 NR Description: expressed protein [Arabidopsis thaliana]
  misc_feature (11)..(203): NCBI GI NO: 34906342 NR Description: unnamed protein product
  misc_feature (11)..(159): NCBI GI NO: 21902022 NR Description: B1097D05.23
  misc_feature (11)..(153): NCBI GI NO: 7452044 NR Description: hypothetical protein F27B13
  misc_feature (11)..(153): NCBI GI NO: 21592524 NR Description: unknown [Arabidopsis thaliana]
  misc_feature (7)..(7): Xaa is any aa, unknown or other
  misc_feature (9)..(9): Xaa is any aa, unknown or other
MSGLTVXHXNSMVLQAVVDPDMRFRDVVSGWPGSMDDSCILRTSGFYKLCEKGGRLDGQMELPGEPAGSVVREYIIGDTGYPLLPWLMTPYQERDLSPAKAAFNKQHATARMVVQGAMARLKERWQVLKGELWRPDKHRLPRIIYACCLLTNIMIDLGDTHRERAPASHDHDDGYYQQFSNVADDGAVAQRDVLCQYVSRLGGKLPE

SEQ ID NO: 19273 - DNA, 1151 bp, Triticum aestivum
  misc_feature (1)..(1151): Ceres Seq. ID no. 12614814
cttttcgcattgcagcctctcaaaacagccaaaccgaaccccaaaagctcgccgagaaacgcagaaaggagcgaagcaaaccaagcagcagcagcagcggaagaagaagaagaagcgaggagctgagccagctagcaatggcggcggacctgggcttcgaggcgaccgagctccggctcggcctgcccggcggcggcgagggggaggcgaggagctcctccggcaagaggggcttcgccgagaccatcgacctgaagctcaagctggagccggccggcgaggaggcgccggccgaggaggatcgggccgacgtggccgtggtcgccgccgcggcggcagagaaccaggaggagacggcgaccgacgccggcggagggaagatgaagaggtcgccgagccagagcagcgtcgtcaccaccgccgcgctgcccgaccccgccgagaagccgcgcgctcccaaggcgcaggtggtggggtggcctccggtccggtcgttccggaagaacatcctggcggagaagtcgtcgccggcggcagcggcggcgttcgtcaaggtgagcatggacggcgcgccctacctgcgcaaggtggacctcaacatgtacaagacctaccaggacctctccaaggccctcgagaagatgttcagctccttcaccatcggaaactgtggaactccagggatgaacggcatgaacgagagcaagctgatggatcttctcaacggatccgagtatgttccgacgtacgaggacaaggacggcgactggatgctcgtcggcgacgtcccatgggagatgttcgtcgagtcatgcaagcgccttcggataatgaagggatcagaagctattggccttgcaccaagggcgatggagaaatgcaagaacaggagctgaggagaggatgcactaaatgttatgcaagaatcaaaatacctatataaccttgcttgctcatccctgtatcatattctctgtcctaagtctaagtctgtatctcctgatcagtgaagtcattttggtttgtgatcttctcttttccagtcagtcagtcccaagtctcatcttgttatatacataagaaagaagaatccaagaacatgtgagatgtatctgtacctgtctgccacataattgtgtcttctccttttc

SEQ ID NO: 19274 - protein, 313 aa, Triticum aestivum
  peptide (1)..(313): Ceres Seq. ID no. 12614815
  misc_feature (13)..(249): NCBI GI NO: 32455928 NR Description: MC8 [Micrococcus sp. 28]
FSHCSLSKQPNRTPKARRETQKGAKQTKQQQQRKKKKKRGAEPASNGGGPGLRGDRAPARPARRRRGGGEELLRQEGLRRDHRPEAQAGAGRRGGAGRGGSGRRGRGRRRGGREPGGDGDRRRRREDEEVAEPEQRRHHRRAARPRREAARSQGAGGGVASGPVVPEEHPGGEVVAGGSGGVRQGEHGRRALPAQGGPQHVQDLPGPLQGPREDVQLLHHRKLWNSRDERHEREQADGSSQRIRVCSDVRGQGRRLDARRRRPMGDVRRVMQAPSDNEGIRSYWPCTKGDGEMQEQELRRGCTKCYARIKIPI

SEQ ID NO: 19275 - protein, 297 aa, Triticum aestivum
  peptide (1)..(297): Ceres Seq. ID no. 12614816
  misc_feature (144)..(289): Pfam Name: Pfam Description:  AUX/IAA family
  misc_feature (113)..(297): NCBI GI NO: 4887022 NR Description: Nt-iaa4.1 deduced protein [Nicotiana tabacum]
  misc_feature (49)..(73): NCBI GI NO: 4887022 NR Description: Nt-iaa4.1 deduced protein [Nicotiana tabacum]
  misc_feature (50)..(297): NCBI GI NO: 114734 NR Description: AUXIN-INDUCED PROTEIN AUX28
  misc_feature (48)..(297): NCBI GI NO: 20269059 NR Description: aux/IAA protein
  misc_feature (50)..(297): NCBI GI NO: 20385508 NR Description: auxin-regulated protein
  misc_feature (144)..(297): NCBI GI NO: 4887020 NR Description: Nt-iaa28 deduced protein [Nicotiana tabacum]
  misc_feature (50)..(297): NCBI GI NO: 15229343 NR Description: auxin-induced protein; protein id: At3g04730
  misc_feature (122)..(296): NCBI GI NO: 22725714 NR Description: auxin-responsive protein IAA1; MjAux/IAA1
  misc_feature (68)..(297): NCBI GI NO: 32396295 NR Description: auxin-induced protein 2 [Pinus taeda]
  misc_feature (68)..(297): NCBI GI NO: 17976835 NR Description: putative auxin induced transcription factor Aux/IAA
FRIAASQNSQTEPQKLAEKRRKERSKPSSSSSGRRRRSEELSQLAMAADLGFEATELRLGLPGGGEGEARSSSGKRGFAETIDLKLKLEPAGEEAPAEEDRADVAVVAAAAAENQEETATDAGGGKMKRSPSQSSVVTTAALPDPAEKPRAPKAQVVGWPPVRSFRKNILAEKSSPAAAAAFVKVSMDGAPYLRKVDLNMYKTYQDLSKALEKMFSSFTIGNCGTPGMNGMNESKLMDLLNGSEYVPTYEDKDGDWMLVGDVPWEMFVESCKRLRIMKGSEAIGLAPRAMEKCKNRS

SEQ ID NO: 19276 - protein, 252 aa, Triticum aestivum
  peptide (1)..(252): Ceres Seq. ID no. 12614817
  misc_feature (99)..(244): Pfam Name: Pfam Description:  AUX/IAA family
  misc_feature (68)..(252): NCBI GI NO: 4887022 NR Description: Nt-iaa4.1 deduced protein [Nicotiana tabacum]
  misc_feature (4)..(28): NCBI GI NO: 4887022 NR Description: Nt-iaa4.1 deduced protein [Nicotiana tabacum]
  misc_feature (5)..(252): NCBI GI NO: 114734 NR Description: AUXIN-INDUCED PROTEIN AUX28
  misc_feature (3)..(252): NCBI GI NO: 20269059 NR Description: aux/IAA protein
  misc_feature (5)..(252): NCBI GI NO: 20385508 NR Description: auxin-regulated protein
  misc_feature (99)..(252): NCBI GI NO: 4887020 NR Description: Nt-iaa28 deduced protein [Nicotiana tabacum]
  misc_feature (5)..(252): NCBI GI NO: 15229343 NR Description: auxin-induced protein; protein id: At3g04730
  misc_feature (77)..(251): NCBI GI NO: 22725714 NR Description: auxin-responsive protein IAA1; MjAux/IAA1
  misc_feature (23)..(252): NCBI GI NO: 32396295 NR Description: auxin-induced protein 2 [Pinus taeda]
  misc_feature (23)..(252): NCBI GI NO: 17976835 NR Description: putative auxin induced transcription factor Aux/IAA
MAADLGFEATELRLGLPGGGEGEARSSSGKRGFAETIDLKLKLEPAGEEAPAEEDRADVAVVAAAAAENQEETATDAGGGKMKRSPSQSSVVTTAALPDPAEKPRAPKAQVVGWPPVRSFRKNILAEKSSPAAAAAFVKVSMDGAPYLRKVDLNMYKTYQDLSKALEKMFSSFTIGNCGTPGMNGMNESKLMDLLNGSEYVPTYEDKDGDWMLVGDVPWEMFVESCKRLRIMKGSEAIGLAPRAMEKCKNRS

SEQ ID NO: 19277 - DNA, 548 bp, Triticum aestivum
  misc_feature (1)..(548): Ceres Seq. ID no. 13654415
aaaaaaaagtggggcgaggaagaaaccgaaacactcacacagaacaccacaccccccaccccggcgacacaccacccctcccgccccaaatctcagatcagagcgccgggagatctgccatttccgggtggagggatcgagccccgcgcttctcgattaaatcctgggctctgtatcttgtgtggatggcatttgtgcctcagagactgtagctcaccaagtgttgatttgaacctgtgaagatagagatgggttctccgagaaaatccgacaagaaggccgccttagactttgcagcatggggtttcaatatcacctcatccgttgggatcatcatggtcaacaaagccctaatggctacacatggattcagttttgccacaacattaactggccttcatttattgacaacgaccttgatgactattgtgtttcggtggttaggcctgagccagccctctcacttaccgctaccagatctgattaagttcgtaatcttttcaaatttgtcgatcgttggcatgaatgtgagcttgatgtggaattct

SEQ ID NO: 19278 - protein, 100 aa, Triticum aestivum
  peptide (1)..(100): Ceres Seq. ID no. 13654416
  misc_feature (1)..(99): NCBI GI NO: 30313364 NR Description: putative transmembrane protein [Oryza sativa]
  misc_feature (1)..(99): NCBI GI NO: 15234794 NR Description: transporter-related [Arabidopsis thaliana]
  misc_feature (1)..(99): NCBI GI NO: 18399097 NR Description: transporter-related [Arabidopsis thaliana]
  misc_feature (1)..(99): NCBI GI NO: 21595054 NR Description: unknown [Arabidopsis thaliana]
  misc_feature (6)..(99): NCBI GI NO: 7486049 NR Description: hypothetical protein F23K16
  misc_feature (6)..(99): NCBI GI NO: 21593003 NR Description: unknown [Arabidopsis thaliana]
  misc_feature (6)..(99): NCBI GI NO: 18420440 NR Description: transporter-related [Arabidopsis thaliana]
  misc_feature (1)..(99): NCBI GI NO: 18411172 NR Description: transporter-related [Arabidopsis thaliana]
  misc_feature (6)..(99): NCBI GI NO: 18394949 NR Description: transporter-related [Arabidopsis thaliana]
  misc_feature (1)..(99): NCBI GI NO: 21536703 NR Description: unknown [Arabidopsis thaliana]
MGSPRKSDKKAALDFAAWGFNITSSVGIIMVNKALMATHGFSFATTLTGLHLLTTTLMTIVFRWLGLSQPSHLPLPDLIKFVIFSNLSIVGMNVSLMWNS

SEQ ID NO: 19279 - protein, 79 aa, Triticum aestivum
  peptide (1)..(79): Ceres Seq. ID no. 13654417
KKKWGEEETETLTQNTTPPTPATHHPSRPKSQIRAPGDLPFPGGGIEPRASRLNPGLCILCGWHLCLRDCSSPSVDLNL

SEQ ID NO: 19280 - protein, 71 aa, Triticum aestivum
  peptide (1)..(71): Ceres Seq. ID no. 13654418
  misc_feature (1)..(70): NCBI GI NO: 30313364 NR Description: putative transmembrane protein [Oryza sativa]
  misc_feature (1)..(70): NCBI GI NO: 15234794 NR Description: transporter-related [Arabidopsis thaliana]
  misc_feature (1)..(70): NCBI GI NO: 18399097 NR Description: transporter-related [Arabidopsis thaliana]
  misc_feature (1)..(70): NCBI GI NO: 21595054 NR Description: unknown [Arabidopsis thaliana]
  misc_feature (1)..(70): NCBI GI NO: 7486049 NR Description: hypothetical protein F23K16
  misc_feature (1)..(70): NCBI GI NO: 21593003 NR Description: unknown [Arabidopsis thaliana]
  misc_feature (1)..(70): NCBI GI NO: 18420440 NR Description: transporter-related [Arabidopsis thaliana]
  misc_feature (1)..(70): NCBI GI NO: 18411172 NR Description: transporter-related [Arabidopsis thaliana]
  misc_feature (1)..(70): NCBI GI NO: 18394949 NR Description: transporter-related [Arabidopsis thaliana]
  misc_feature (1)..(70): NCBI GI NO: 21536703 NR Description: unknown [Arabidopsis thaliana]
MVNKALMATHGFSFATTLTGLHLLTTTLMTIVFRWLGLSQPSHLPLPDLIKFVIFSNLSIVGMNVSLMWNS

SEQ ID NO: 19281 - DNA, 1433 bp, Triticum aestivum
  misc_feature (1)..(1433): Ceres Seq. ID no. 14302856
taaaaccctagacaaaagctcagcggcgcagcacagcccagccgccgcgcaccacgctcttcccccctccccctccctctcccccaccctcctccgaccaccttctcccgaaacgcgcggagatgctctccgctgccttcgctgtccaccccgccgccgtcgcgccgcggctgcattcggtccgccagcgccagcaattctgcgctccaatcggcacggcgacgccaaggcggcggttgccagtggcgatgctttcggtcactaacgccgtcaccacccagagccgcgagagcgcccccgcagcgcctcgcaagctctctttcccgatactggtgaacagttgcaccgggaaaatggggaagtctgttgctgaagcagctgtgtctgctggtcttcagttagttccgatgtcattcagtgcaatagaggttcctgatggaaagctcaacatctgtgacagagatattcatattcatgatccatctgaaagtgaacgtattctccgttccattgctaaggactacccagatatgatagttgttgactacactgtgcctgatgctgttaatgccaatgctgaactttactgcaaacttggcttgccatttgtaatgggcacaactggtggaaataggcaactgttgaacaaaactgtgcaggatgcgaatgtttatgctgtgatatctccacagatggggaagcaggttgttgctttccttgctgccatggaaatcatggcagagaaattccctggtgcatttgcaggttacaaactagaggtaatggagtctcatcaagcgacaaaattggacgtttctggcactgccaaagctgtaatctcttgctttcagaagttgggtgtctcattcgacttaaacgaggtaaacttggttagggaccccgaagagcagcttgccattgttggtgtcccagaagaacatcttggagggcatgcatttcacaattaccatctcacttcgcctgatgaaacagtgtcatttgagttccagcacaatgtgtgtggccgttcaatatacgcagagggaactgttgatgccgccatgtttctccacacaaagatacgatctggggcggacaagaaattatatgatatgatcgatgtcctgagagaaggcaacatgagatgagcaggggcatttgtagggttaggaggagagcttatgcagcaaaattaggtcactgtccggatgcagcatctttgcgttgtaattggatcttagatttgttttactagttatattaactcttatttacttctcggcgaaaaaaggagtcatttggacgagataaggatgttaacttggacttgggcctctgtttgaggccagagttagctgttgttgtggcatgaatgatggaaggcaaatgcagtacgaataatatattgtggaagttgaaatagtttgctaatt

SEQ ID NO: 19282 - protein, 341 aa, Triticum aestivum
  peptide (1)..(341): Ceres Seq. ID no. 14302857
  misc_feature (194)..(336): Pfam Name: Pfam Description:  Dihydrodipicolinate reductase, C-terminus
  misc_feature (36)..(341): NCBI GI NO: 18411368 NR Description: expressed protein [Arabidopsis thaliana]
  misc_feature (37)..(341): NCBI GI NO: 18406430 NR Description: expressed protein [Arabidopsis thaliana]
  misc_feature (37)..(320): NCBI GI NO: 7486478 NR Description: hypothetical protein At2g44040
  misc_feature (36)..(319): NCBI GI NO: 11357603 NR Description: hypothetical protein F24G16
  misc_feature (127)..(335): NCBI GI NO: 23474665 NR Description: hypothetical protein
MLSAAFAVHPAAVAPRLHSVRQRQQFCAPIGTATPRRRLPVAMLSVTNAVTTQSRESAPAAPRKLSFPILVNSCTGKMGKSVAEAAVSAGLQLVPMSFSAIEVPDGKLNICDRDIHIHDPSESERILRSIAKDYPDMIVVDYTVPDAVNANAELYCKLGLPFVMGTTGGNRQLLNKTVQDANVYAVISPQMGKQVVAFLAAMEIMAEKFPGAFAGYKLEVMESHQATKLDVSGTAKAVISCFQKLGVSFDLNEVNLVRDPEEQLAIVGVPEEHLGGHAFHNYHLTSPDETVSFEFQHNVCGRSIYAEGTVDAAMFLHTKIRSGADKKLYDMIDVLREGNMR

SEQ ID NO: 19283 - protein, 299 aa, Triticum aestivum
  peptide (1)..(299): Ceres Seq. ID no. 14302858
  misc_feature (152)..(294): Pfam Name: Pfam Description:  Dihydrodipicolinate reductase, C-terminus
  misc_feature (1)..(299): NCBI GI NO: 18411368 NR Description: expressed protein [Arabidopsis thaliana]
  misc_feature (1)..(299): NCBI GI NO: 18406430 NR Description: expressed protein [Arabidopsis thaliana]
  misc_feature (1)..(278): NCBI GI NO: 7486478 NR Description: hypothetical protein At2g44040
  misc_feature (1)..(277): NCBI GI NO: 11357603 NR Description: hypothetical protein F24G16
  misc_feature (85)..(293): NCBI GI NO: 23474665 NR Description: hypothetical protein
MLSVTNAVTTQSRESAPAAPRKLSFPILVNSCTGKMGKSVAEAAVSAGLQLVPMSFSAIEVPDGKLNICDRDIHIHDPSESERILRSIAKDYPDMIVVDYTVPDAVNANAELYCKLGLPFVMGTTGGNRQLLNKTVQDANVYAVISPQMGKQVVAFLAAMEIMAEKFPGAFAGYKLEVMESHQATKLDVSGTAKAVISCFQKLGVSFDLNEVNLVRDPEEQLAIVGVPEEHLGGHAFHNYHLTSPDETVSFEFQHNVCGRSIYAEGTVDAAMFLHTKIRSGADKKLYDMIDVLREGNMR

SEQ ID NO: 19284 - protein, 264 aa, Triticum aestivum
  peptide (1)..(264): Ceres Seq. ID no. 14302859
  misc_feature (117)..(259): Pfam Name: Pfam Description:  Dihydrodipicolinate reductase, C-terminus
  misc_feature (1)..(264): NCBI GI NO: 18411368 NR Description: expressed protein [Arabidopsis thaliana]
  misc_feature (1)..(264): NCBI GI NO: 18406430 NR Description: expressed protein [Arabidopsis thaliana]
  misc_feature (1)..(243): NCBI GI NO: 7486478 NR Description: hypothetical protein At2g44040
  misc_feature (1)..(242): NCBI GI NO: 11357603 NR Description: hypothetical protein F24G16
  misc_feature (50)..(258): NCBI GI NO: 23474665 NR Description: hypothetical protein
MGKSVAEAAVSAGLQLVPMSFSAIEVPDGKLNICDRDIHIHDPSESERILRSIAKDYPDMIVVDYTVPDAVNANAELYCKLGLPFVMGTTGGNRQLLNKTVQDANVYAVISPQMGKQVVAFLAAMEIMAEKFPGAFAGYKLEVMESHQATKLDVSGTAKAVISCFQKLGVSFDLNEVNLVRDPEEQLAIVGVPEEHLGGHAFHNYHLTSPDETVSFEFQHNVCGRSIYAEGTVDAAMFLHTKIRSGADKKLYDMIDVLREGNMR

SEQ ID NO: 19285 - DNA, 1414 bp, Triticum aestivum
  misc_feature (1)..(1414): Ceres Seq. ID no. 13654649
cctctcccctcccctccctctcttttgcgcgctggcccctgccgtttcggacccgccacgctccggtcccccgctccgccgccgccgccgtccgtccccgtcgccccacctcctccgccccgtcagaggaagctgcggactggcatgacctaggggggccatggaagaggcagacaaggaccgcaattcctgcaagcgcctgcgggcggtgggcggcggcggcgactcggcggatgcgtggcggagtttccgggtggcgcgcgcggcggcgggcggcaaggaccggcacagcaaggtggtgacctcgcgcggcctccgcgaccgccgcatccggctctcggtgcagacggccattcagttctatgacatccaggaccgcctgggtgtcgaccagcccagcaaggccatcgagtggctcatccaagccgccgccaccgccatcgatggtctcccgtcgttggactgctccttcgccttccctgtcgcctccccagcagcagaagacaccgcggaggtcagcacctcggagaccagcaagggctccgtgctctcgctcgccaacggccctgccgacaatgacaatgccgctcaccaagccagtgcatacaacgggggcagtgccaatggcacgtttgccgggctcctgcactgctccaacgccgccgacaagccaatgcagcatcagcatcagcagcagcagccgacgcttgcctactacgccgccccgggttcgcacatcgcgcccatgtccttcgagatgattccccagctcaccttctcccaggaccagcagcactgccaccaccaccaccaccaccaccatgcctctgtctccttcgacaggagcacacttcagtccaacaccgtctccacgcctcagtggcccccgtcccagcacccgttcctgatgcagaggttctctgctgctccagccgagccttcgcctatgtttcccttctttcttggaggcaacaacgctgctgctgcggctgctcctgcggcggccaatgcgccggagcggaggctgcagctctgggacttcaaggaggaaaggaagacatagtttcttcttgggagattcggcggtgtaccaaactaccaagtcatatgatccattcagcacagcaaaacccagaaggagagaagatgcaaggcaacgaaggagtcggcgccatggagccgcgtggaatgcaatcgctttgctggatctccgaatcttctccgcgcggttttcgttttgccgttgtcatcctctgacctatgtttttgtgatcggaaaccaaatgtttttgagctgcactctgttgctgtgccctctatctttctccttacgaaaaagatgtttttttttaactttctggcgaggaacagaatttcgcgcttgcatggatgctggtggcgtgtactgagtggc

SEQ ID NO: 19286 - protein, 300 aa, Triticum aestivum
  peptide (1)..(300): Ceres Seq. ID no. 13654650
  misc_feature (28)..(277): Pfam Name: Pfam Description:  TCP family transcription factor
  misc_feature (1)..(300): NCBI GI NO: 21624267 NR Description: transcription factor PCF8
  misc_feature (26)..(284): NCBI GI NO: 33146716 NR Description: putative transcription factor PCF6
  misc_feature (35)..(110): NCBI GI NO: 34394387 NR Description: transcription factor PCF8-like
  misc_feature (28)..(133): NCBI GI NO: 18397402 NR Description: TCP family transcription factor, putative
  misc_feature (163)..(300): NCBI GI NO: 37532292 NR Description: hypothetical protein
  misc_feature (36)..(135): NCBI GI NO: 20975255 NR Description: transcription factor PCF6
  misc_feature (28)..(146): NCBI GI NO: 25369264 NR Description: probable basic helix-loop-helix DNA binding proteinTCP2
  misc_feature (28)..(146): NCBI GI NO: 7486304 NR Description: hypothetical protein F28J12
  misc_feature (28)..(146): NCBI GI NO: 18415079 NR Description: TCP family transcription factor, putative
  misc_feature (40)..(150): NCBI GI NO: 21624281 NR Description: PlCYC4 [Pueraria montana var. lobata]
MEEADKDRNSCKRLRAVGGGGDSADAWRSFRVARAAAGGKDRHSKVVTSRGLRDRRIRLSVQTAIQFYDIQDRLGVDQPSKAIEWLIQAAATAIDGLPSLDCSFAFPVASPAAEDTAEVSTSETSKGSVLSLANGPADNDNAAHQASAYNGGSANGTFAGLLHCSNAADKPMQHQHQQQQPTLAYYAAPGSHIAPMSFEMIPQLTFSQDQQHCHHHHHHHHASVSFDRSTLQSNTVSTPQWPPSQHPFLMQRFSAAPAEPSPMFPFFLGGNNAAAAAAPAAANAPERRLQLWDFKEERKT

SEQ ID NO: 19287 - DNA, 1501 bp, Triticum aestivum
  misc_feature (1)..(1501): Ceres Seq. ID no. 13662360
atacctacatagtcttctgccagtttgagtactcacgacgaacgccgtccacacgccccagagcacttcgaacacgaggccgccagcgagcatgggcaagggagctggcgccgccggcgtggacgagccgctgctcccggagctctcgggcgggcacggcggcggggcgtcggtctccggcgcggtgttcaacctgtccacgagcatcatcggcgccggcattatgtcgatcccggcggcaatgcgcgtgctcggggtcgtccccgcgctcgccctcatcgcggccgtcgccctcctctccgacgtctccgtggagttcatgctgcggtacacggcctgggccagcggcacgccctcgtacgcggggatcatgggcgacgcgttcggccgccgcgccggcgccgcggcgctcaacatcttcatagccttcaccaccgccggcaccctcgtcgtctacctcatcatcataggggatgtgctgtccgggagcgtggaggggggaggcgagcacgccggggtgctgcaggagctgttcggccggcagtggtggaccggcagggagtttgtgatactggccacggccgtcgtcgttctgctgccgctggtgctcctccgccgcgtcgattcgctgaggtacacatcggcagtgtccatccttctggcggcggtgttcatgctcatcacgatggggatcgcggtctacactgtcttcaccggcactgcgaagatgccgcggatgctgccggacttctccaccctcgcgtcccccttcgagctcttcaccgccgtcccggtcatcgtcgtcgccttcaccttccacttcaacgtgcacccgatccgcgcggagctcagcaagacgtcggacatgaagtcggcggtgcgcatctcgctggtgctctgcgccgccatctacgccgcggtgggcttcttcggcttcctcctcttcggggacgccaccatgcccgacgtgctcgccaacttcgaccgcagctccggctccggcgtcccgcaggcgctcaacgacgccgcgcgcctcagctacgcgctgcacctcgtgctcgtcttcccgctcctccactactcgctccgcgtcaacgtcgacgagctcctcttcccaggccgccgcccgctggccaccgacacgcgccgcttcgtggcgctcacggccgtgctcatggcggtgctctacgtgctcgccatcgccatccccagcatctggacgctcttccagtactcgggctccacgttcgccgtctgcatatcgcttatcttccctggcgccatcgttctcagggatgttcacggaatagcgaagaggaaagacaaggcaatggcagcgatgatgatcactctggcggtgatcacgagcagcatcgccattgcttccaacgtcatgagctccatcaagggcgaagtgaaaggtgttaatgccggagctagctagcatgtacagtttcattatttatatagctataatataaatcaaaattctttcacccgc

SEQ ID NO: 19288 - protein, 450 aa, Triticum aestivum
  peptide (1)..(450): Ceres Seq. ID no. 13662361
  misc_feature (1)..(401): NCBI GI NO: 34907894 NR Description: P0439E11.11
  misc_feature (9)..(436): NCBI GI NO: 34898706 NR Description: hypothetical protein
  misc_feature (14)..(436): NCBI GI NO: 15228851 NR Description: amino acid transporter family
  misc_feature (13)..(439): NCBI GI NO: 18406463 NR Description: amino acid transporter family
  misc_feature (13)..(439): NCBI GI NO: 9758059 NR Description: amino acid transporter-like protein
  misc_feature (13)..(439): NCBI GI NO: 15241555 NR Description: amino acid transporter family
  misc_feature (10)..(434): NCBI GI NO: 30688270 NR Description: amino acid transporter family
  misc_feature (63)..(434): NCBI GI NO: 25408697 NR Description: hypothetical protein At2g40420
  misc_feature (10)..(54): NCBI GI NO: 25408697 NR Description: hypothetical protein At2g40420
  misc_feature (11)..(436): NCBI GI NO: 18412864 NR Description: amino acid transporter family
MGKGAGAAGVDEPLLPELSGGHGGGASVSGAVFNLSTSIIGAGIMSIPAAMRVLGVVPALALIAAVALLSDVSVEFMLRYTAWASGTPSYAGIMGDAFGRRAGAAALNIFIAFTTAGTLVVYLIIIGDVLSGSVEGGGEHAGVLQELFGRQWWTGREFVILATAVVVLLPLVLLRRVDSLRYTSAVSILLAAVFMLITMGIAVYTVFTGTAKMPRMLPDFSTLASPFELFTAVPVIVVAFTFHFNVHPIRAELSKTSDMKSAVRISLVLCAAIYAAVGFFGFLLFGDATMPDVLANFDRSSGSGVPQALNDAARLSYALHLVLVFPLLHYSLRVNVDELLFPGRRPLATDTRRFVALTAVLMAVLYVLAIAIPSIWTLFQYSGSTFAVCISLIFPGAIVLRDVHGIAKRKDKAMAAMMITLAVITSSIAIASNVMSSIKGEVKGVNAGAS

SEQ ID NO: 19289 - protein, 406 aa, Triticum aestivum
  peptide (1)..(406): Ceres Seq. ID no. 13662362
  misc_feature (1)..(357): NCBI GI NO: 34907894 NR Description: P0439E11.11
  misc_feature (1)..(392): NCBI GI NO: 34898706 NR Description: hypothetical protein
  misc_feature (1)..(392): NCBI GI NO: 15228851 NR Description: amino acid transporter family
  misc_feature (1)..(395): NCBI GI NO: 18406463 NR Description: amino acid transporter family
  misc_feature (1)..(395): NCBI GI NO: 9758059 NR Description: amino acid transporter-like protein
  misc_feature (1)..(395): NCBI GI NO: 15241555 NR Description: amino acid transporter family
  misc_feature (1)..(390): NCBI GI NO: 30688270 NR Description: amino acid transporter family
  misc_feature (19)..(390): NCBI GI NO: 25408697 NR Description: hypothetical protein At2g40420
  misc_feature (1)..(392): NCBI GI NO: 18412864 NR Description: amino acid transporter family
  misc_feature (1)..(139): NCBI GI NO: 34907896 NR Description: P0439E11.12
MSIPAAMRVLGVVPALALIAAVALLSDVSVEFMLRYTAWASGTPSYAGIMGDAFGRRAGAAALNIFIAFTTAGTLVVYLIIIGDVLSGSVEGGGEHAGVLQELFGRQWWTGREFVILATAVVVLLPLVLLRRVDSLRYTSAVSILLAAVFMLITMGIAVYTVFTGTAKMPRMLPDFSTLASPFELFTAVPVIVVAFTFHFNVHPIRAELSKTSDMKSAVRISLVLCAAIYAAVGFFGFLLFGDATMPDVLANFDRSSGSGVPQALNDAARLSYALHLVLVFPLLHYSLRVNVDELLFPGRRPLATDTRRFVALTAVLMAVLYVLAIAIPSIWTLFQYSGSTFAVCISLIFPGAIVLRDVHGIAKRKDKAMAAMMITLAVITSSIAIASNVMSSIKGEVKGVNAGAS

SEQ ID NO: 19290 - protein, 400 aa, Triticum aestivum
  peptide (1)..(400): Ceres Seq. ID no. 13662363
  misc_feature (1)..(351): NCBI GI NO: 34907894 NR Description: P0439E11.11
  misc_feature (1)..(386): NCBI GI NO: 34898706 NR Description: hypothetical protein
  misc_feature (1)..(386): NCBI GI NO: 15228851 NR Description: amino acid transporter family
  misc_feature (1)..(389): NCBI GI NO: 18406463 NR Description: amino acid transporter family
  misc_feature (1)..(389): NCBI GI NO: 9758059 NR Description: amino acid transporter-like protein
  misc_feature (1)..(389): NCBI GI NO: 15241555 NR Description: amino acid transporter family
  misc_feature (1)..(384): NCBI GI NO: 30688270 NR Description: amino acid transporter family
  misc_feature (13)..(384): NCBI GI NO: 25408697 NR Description: hypothetical protein At2g40420
  misc_feature (1)..(386): NCBI GI NO: 18412864 NR Description: amino acid transporter family
  misc_feature (1)..(133): NCBI GI NO: 34907896 NR Description: P0439E11.12
MRVLGVVPALALIAAVALLSDVSVEFMLRYTAWASGTPSYAGIMGDAFGRRAGAAALNIFIAFTTAGTLVVYLIIIGDVLSGSVEGGGEHAGVLQELFGRQWWTGREFVILATAVVVLLPLVLLRRVDSLRYTSAVSILLAAVFMLITMGIAVYTVFTGTAKMPRMLPDFSTLASPFELFTAVPVIVVAFTFHFNVHPIRAELSKTSDMKSAVRISLVLCAAIYAAVGFFGFLLFGDATMPDVLANFDRSSGSGVPQALNDAARLSYALHLVLVFPLLHYSLRVNVDELLFPGRRPLATDTRRFVALTAVLMAVLYVLAIAIPSIWTLFQYSGSTFAVCISLIFPGAIVLRDVHGIAKRKDKAMAAMMITLAVITSSIAIASNVMSSIKGEVKGVNAGAS

SEQ ID NO: 19291 - DNA, 1367 bp, Triticum aestivum
  misc_feature (1)..(1367): Ceres Seq. ID no. 13596238
gaccmttwcctatraacatyctaatcgaaaaacacacacacacaccaccaccaccaccaccaccaccacacttggatcacaagatagtggttcgttgctacccacgatgagagcgttcgcgttgtttgccgtgcttgccatggcggccgccatggccgtcgccgagcagtgcggctcccaggccggcggggcgacctgccccaactgcctctgctgcagccgcttcggctggtgcggctccacctcggactactgcggcgacggatgccagagccagtgctccggttgcggcagcacgcccgtcacccccacaccctccggcggtggcggcgtgtcctccatcatctcccgcgccctcttcgaccgcatgctactgcaccgcaacgacggcgcctgccaggccaagggcttctacacctacgacgccttcgtcgcggccgccggcaccttccggggcttcagcaccacgggcagcacggacacccggaagcgcgaggtggccgccttcctggcccagacctcccacgagaccaccggtgggtgggcgacggcgccggacggagccttcgcgtggggctactgcttcaagcaggagcgtggcgccacctccaactattgcactccgagcgcgcaatggccgtgcgccccagggaagagctactacggccgtgggccgatccagctctcccacaactacaactacgggccggcaggccgggccattggggtcgatctgctgcgcaacccagacctggttgccacggacccgacggtgtcttttaagacagcgatgtggttttggatgacggcacaggcgccaaagccgtcgagccatgctgtgatcacgggccaatggagcccatcagggacggaccgggctgcagggcgggtgcccgggtttggcgtgatcaccaacatagttaacggcgggatcgagtgcgggcatgggcaggacagccgagtcgccgatcggataggattttacaagcgctactgtgacatcctcggtgttggctatggtgacaacctcgactgctacaatcagaggcccttcgcttaactaattagttatatttatataacccctccaaacaaaatacaataagagcatcctctctcatctagatgttggaagttgtaactatggttacatctcataaggaactcaataaaagcatccagtatagatgctttgtattgagggcgtgtttggttgagaagtcttatgactttttctagtcccagggactaatcaaaaaagactctctagtagagtctttttctagtccctgtagaaaaagtccctcctgtttggttcctagtgactttttctagtctctgggactaaaaagtccctggyggaatcc

SEQ ID NO: 19292 - protein, 352 aa, Triticum aestivum
  peptide (1)..(352): Ceres Seq. ID no. 15221818
  misc_feature (54)..(93): Pfam Name: Pfam Description:  Chitin recognition protein
  misc_feature (36)..(352): NCBI GI NO: 2506281 NR Description: 26 kDa endochitinase 1 precursor
  misc_feature (36)..(352): NCBI GI NO: 11344587 NR Description: seed chitinase-a [Secale cereale]
  misc_feature (55)..(352): NCBI GI NO: 542173 NR Description: chitinase (EC 3.2.1.14) a - rye
  misc_feature (55)..(352): NCBI GI NO: 741317 NR Description: chitinase a
  misc_feature (36)..(351): NCBI GI NO: 6164588 NR Description: chitinase [Poa pratensis]
  misc_feature (36)..(352): NCBI GI NO: 18146829 NR Description: chitinase 3 [Triticum aestivum]
  misc_feature (36)..(352): NCBI GI NO: 481478 NR Description: chitinase (EC 3.2.1.14) - wheat
  misc_feature (36)..(352): NCBI GI NO: 12407647 NR Description: 31
  misc_feature (36)..(351): NCBI GI NO: 6164585 NR Description: chitinase [Poa pratensis]
  misc_feature (36)..(351): NCBI GI NO: 500617 NR Description: endochitinase
  misc_feature (2)..(2): Xaa is any aa, unknown or other
  misc_feature (3)..(3): Xaa is any aa, unknown or other
  misc_feature (5)..(5): Xaa is any aa, unknown or other
  misc_feature (7)..(7): Xaa is any aa, unknown or other
TXXYXHXNRKTHTHTTTTTTTTTLGSQDSGSLLPTMRAFALFAVLAMAAAMAVAEQCGSQAGGATCPNCLCCSRFGWCGSTSDYCGDGCQSQCSGCGSTPVTPTPSGGGGVSSIISRALFDRMLLHRNDGACQAKGFYTYDAFVAAAGTFRGFSTTGSTDTRKREVAAFLAQTSHETTGGWATAPDGAFAWGYCFKQERGATSNYCTPSAQWPCAPGKSYYGRGPIQLSHNYNYGPAGRAIGVDLLRNPDLVATDPTVSFKTAMWFWMTAQAPKPSSHAVITGQWSPSGTDRAAGRVPGFGVITNIVNGGIECGHGQDSRVADRIGFYKRYCDILGVGYGDNLDCYNQRPFA

SEQ ID NO: 19293 - protein, 317 aa, Triticum aestivum
  peptide (1)..(317): Ceres Seq. ID no. 15221819
  misc_feature (19)..(58): Pfam Name: Pfam Description:  Chitin recognition protein
  misc_feature (1)..(317): NCBI GI NO: 2506281 NR Description: 26 kDa endochitinase 1 precursor
  misc_feature (1)..(317): NCBI GI NO: 11344587 NR Description: seed chitinase-a [Secale cereale]
  misc_feature (20)..(317): NCBI GI NO: 542173 NR Description: chitinase (EC 3.2.1.14) a - rye
  misc_feature (20)..(317): NCBI GI NO: 741317 NR Description: chitinase a
  misc_feature (1)..(316): NCBI GI NO: 6164588 NR Description: chitinase [Poa pratensis]
  misc_feature (1)..(317): NCBI GI NO: 18146829 NR Description: chitinase 3 [Triticum aestivum]
  misc_feature (1)..(317): NCBI GI NO: 481478 NR Description: chitinase (EC 3.2.1.14) - wheat
  misc_feature (1)..(317): NCBI GI NO: 12407647 NR Description: 31
  misc_feature (1)..(316): NCBI GI NO: 6164585 NR Description: chitinase [Poa pratensis]
  misc_feature (1)..(316): NCBI GI NO: 500617 NR Description: endochitinase
MRAFALFAVLAMAAAMAVAEQCGSQAGGATCPNCLCCSRFGWCGSTSDYCGDGCQSQCSGCGSTPVTPTPSGGGGVSSIISRALFDRMLLHRNDGACQAKGFYTYDAFVAAAGTFRGFSTTGSTDTRKREVAAFLAQTSHETTGGWATAPDGAFAWGYCFKQERGATSNYCTPSAQWPCAPGKSYYGRGPIQLSHNYNYGPAGRAIGVDLLRNPDLVATDPTVSFKTAMWFWMTAQAPKPSSHAVITGQWSPSGTDRAAGRVPGFGVITNIVNGGIECGHGQDSRVADRIGFYKRYCDILGVGYGDNLDCYNQRPFA

SEQ ID NO: 19294 - protein, 306 aa, Triticum aestivum
  peptide (1)..(306): Ceres Seq. ID no. 15221820
  misc_feature (8)..(47): Pfam Name: Pfam Description:  Chitin recognition protein
  misc_feature (1)..(306): NCBI GI NO: 2506281 NR Description: 26 kDa endochitinase 1 precursor
  misc_feature (1)..(306): NCBI GI NO: 11344587 NR Description: seed chitinase-a [Secale cereale]
  misc_feature (9)..(306): NCBI GI NO: 542173 NR Description: chitinase (EC 3.2.1.14) a - rye
  misc_feature (9)..(306): NCBI GI NO: 741317 NR Description: chitinase a
  misc_feature (1)..(305): NCBI GI NO: 6164588 NR Description: chitinase [Poa pratensis]
  misc_feature (1)..(306): NCBI GI NO: 18146829 NR Description: chitinase 3 [Triticum aestivum]
  misc_feature (1)..(306): NCBI GI NO: 481478 NR Description: chitinase (EC 3.2.1.14) - wheat
  misc_feature (1)..(306): NCBI GI NO: 12407647 NR Description: 31
  misc_feature (1)..(305): NCBI GI NO: 6164585 NR Description: chitinase [Poa pratensis]
  misc_feature (1)..(305): NCBI GI NO: 500617 NR Description: endochitinase
MAAAMAVAEQCGSQAGGATCPNCLCCSRFGWCGSTSDYCGDGCQSQCSGCGSTPVTPTPSGGGGVSSIISRALFDRMLLHRNDGACQAKGFYTYDAFVAAAGTFRGFSTTGSTDTRKREVAAFLAQTSHETTGGWATAPDGAFAWGYCFKQERGATSNYCTPSAQWPCAPGKSYYGRGPIQLSHNYNYGPAGRAIGVDLLRNPDLVATDPTVSFKTAMWFWMTAQAPKPSSHAVITGQWSPSGTDRAAGRVPGFGVITNIVNGGIECGHGQDSRVADRIGFYKRYCDILGVGYGDNLDCYNQRPFA

SEQ ID NO: 19295 - DNA, 1259 bp, Triticum aestivum
  misc_feature (1)..(1259): Ceres Seq. ID no. 13596450
aacgagctctccccgtcccggccccgctccccgccacgccaagtcgacggccgctcgccgccgcccctccctccgcctcgccgtcgccgacctcggccgttcggcccctcccgcgggtgggtgagcggcgagcctcccttgcttctctgtcctgccctgcacggcaagcaagacgagagcgatcggcgtcgggatgctgaggcggcggctgagctcccttctcctccgatccccgtgctcctccgccgtcgcctcctcaatccagcagcagcaccacctcatcctccccacccacgccgagaaaccgccggccctgaatctgctcaggctcttcacatccctagctggaaccgatggtgacaggccgttcatcgcttttgtcttagggggacctgggagtgggaaaggaacgcaatgtagtaggatcgcttcggattttggattttctcatgtgagtgctggtgaccttctgcggaatgaaatatctgctggcactgatcaaggggagtggatcctggagataataagggaagggaggattgttccatcagagataaccgttgaactggtcagaaaagcaattgaatcaagcactgctaaacgggttcttatcgatggttttccaaggtgtgaggaaaacagaatcgcctttgaaaaaataactggaactgaaccagaccttgtgcttttttttgactgtcctgaggatgagatggttaaacgtctcctaagccgtaaccagggacgagttgatgataacattgagacaatcaagaagcgtctaaaagtgttcgagagtttgaatcttcctgttgttgagtactactcttcaaggggaaaggcacacaagataaacgcaacgggaactgaagatgaaatctttgaagcagttcgcaagttgttttcctccttaaggctatgaggaggctgtcgtcgtcttccgcaggagcctgagggaattagaattgcgcctggcggaaatactcttttctttccttttacttttacatctcttagcacaataattgtacatattctgatacacggtctatgcctgtgaaaacagagggccactggtgaaacgcccagcctgctatgataaacccttaccctcacgctctcgtcgtgcgccacggtataacccatgacacgctggtatggcagcagcaaaactgctacgacgatatttttcttaccagaatatgatataattgtaraaaaaaaaaraaaaaagctctatcgataccgtcgacctcgag

SEQ ID NO: 19296 - protein, 242 aa, Triticum aestivum
  peptide (1)..(242): Ceres Seq. ID no. 15221881
  misc_feature (63)..(216): Pfam Name: Pfam Description:  Adenylate kinase
  misc_feature (1)..(241): NCBI GI NO: 38346873 NR Description: OSJNBb0004G23.5
  misc_feature (58)..(240): NCBI GI NO: 3913952 NR Description: ADENYLATE KINASE (ATP-AMP TRANSPHOSPHORYLASE)
  misc_feature (58)..(239): NCBI GI NO: 30686829 NR Description: UMP/CMP kinase like protein [Arabidopsis thaliana]
  misc_feature (51)..(238): NCBI GI NO: 30690243 NR Description: predicted protein [Arabidopsis thaliana]
  misc_feature (51)..(238): NCBI GI NO: 30690246 NR Description: predicted protein [Arabidopsis thaliana]
  misc_feature (58)..(218): NCBI GI NO: 7484791 NR Description: adenylate kinase homolog F24A6
  misc_feature (60)..(239): NCBI GI NO: 11260827 NR Description: URIDYLATE KINASE-like protein
  misc_feature (60)..(239): NCBI GI NO: 18411518 NR Description: URIDYLATE KINASE-related protein
  misc_feature (55)..(238): NCBI GI NO: 6683813 NR Description: UMP/CMP kinase b [Oryza sativa]
  misc_feature (55)..(238): NCBI GI NO: 6683811 NR Description: UMP/CMP kinase a [Oryza sativa]
MLRRRLSSLLLRSPCSSAVASSIQQQHHLILPTHAEKPPALNLLRLFTSLAGTDGDRPFIAFVLGGPGSGKGTQCSRIASDFGFSHVSAGDLLRNEISAGTDQGEWILEIIREGRIVPSEITVELVRKAIESSTAKRVLIDGFPRCEENRIAFEKITGTEPDLVLFFDCPEDEMVKRLLSRNQGRVDDNIETIKKRLKVFESLNLPVVEYYSSRGKAHKINATGTEDEIFEAVRKLFSSLRL

SEQ ID NO: 19297 - DNA, 1345 bp, Triticum aestivum
  misc_feature (1)..(1345): Ceres Seq. ID no. 15226238
atacaactactgtcaaaggtgtgcgtgcgtgcgtgagagagaacctgctttgcttttgcgtgagctgcagtgcagggcatacgggtcgggactgacccggggtggtggtggtgtatataaccagtcgtcacgcacaagaatcatcctagcccctctctctctctctgagcttctctctgcttcatcaagcgagcgaacgacccaccgctagtctgctcggaagaacggaaaggaaaagaaaagaagatggccgtctctgtccgcctcggctcctccccatccatccttctgctcccgctcctcttcctcttcaccatcccgtcgctcgcctccgcctgcgaccgctgcgcgcgccactccaaggccgcctactacacctcctcgctcaccctcgccgccggctcctgcgggtacggcacggcggccgcctccttcaacggcggcctgctcgccgccgccggcccggccctgtaccggggcggcgtcggctgcggcgcctgcttccaggtgaggtgcaaggacaagaagctctgcagcggcgccggcgccagggtcgtggtgacggaccgcgccaggatgaggacgaaccgcacggacctggtgctgagcagcccggcgttcgccgccatggcccgccccggcatggccgcgcggctcaccaagctccgcgccgtcgatgtcgagtacaagagggtgccgtgcgagtacaggggcaagaacctctcggtgcgggtggaggagcggagccgcgcgcccagcgagctcgccgtccggttcctctaccagggcggccagaccgacatcgtcgccgtcgacgtcgcgcaggtcgggtcgtcgagctggaagttcatgacgcgggagcacgggccggcgtggagcacgcggcaggcgccggcggggccgctgcagttcagggtggtggtgaccggcgggtacgacgggaagtgggtgtgggccgaccgggaggtgctgcccagccggtggcgcgccggcgaggtctacgacacgggggtccagatcaccgacgtcgcgcaggagggctgctttccatgcgacacgcaggagtggaggtgaaagcaggcaggctagtaaacaaacaaagagccaaagaagaagctgatggctcctcgttttggccgggctatgcatcacagcacaaggccacaccacaccagagatgattagtttagtctaacagttaacaccagatgatgactcatagggtcctcctgatgatccatcggccacttttgctgccgccgctcgttttcttttctctttgttttgtgagccttctgtatgtacatgagctgctgacgtgaatcaagataagtaaattaagtag

SEQ ID NO: 19298 - protein, 275 aa, Triticum aestivum
  peptide (1)..(275): Ceres Seq. ID no. 15226239
  misc_feature (159)..(243): Pfam Name: Pfam Description:  Pollen allergen
  misc_feature (1)..(275): NCBI GI NO: 21654743 NR Description: expansin-like protein 1 [Oryza sativa]
  misc_feature (1)..(275): NCBI GI NO: 20502989 NR Description: Putative pollen allergen
  misc_feature (3)..(275): NCBI GI NO: 37536544 NR Description: putative pollen allergen
  misc_feature (62)..(275): NCBI GI NO: 25136297 NR Description: expansin-like protein
  misc_feature (1)..(275): NCBI GI NO: 34901594 NR Description: P0571D04.11
  misc_feature (10)..(275): NCBI GI NO: 33111959 NR Description: expansin-like protein [Quercus robur]
  misc_feature (13)..(274): NCBI GI NO: 15231303 NR Description: expansin protein family (EXPL1)
  misc_feature (13)..(274): NCBI GI NO: 21555265 NR Description: Expansin-like 1 precursor
  misc_feature (13)..(274): NCBI GI NO: 15233841 NR Description: expansin protein family (EXPL2)
  misc_feature (13)..(269): NCBI GI NO: 20138389 NR Description: Expansin-like 3 precursor
MAVSVRLGSSPSILLLPLLFLFTIPSLASACDRCARHSKAAYYTSSLTLAAGSCGYGTAAASFNGGLLAAAGPALYRGGVGCGACFQVRCKDKKLCSGAGARVVVTDRARMRTNRTDLVLSSPAFAAMARPGMAARLTKLRAVDVEYKRVPCEYRGKNLSVRVEERSRAPSELAVRFLYQGGQTDIVAVDVAQVGSSSWKFMTREHGPAWSTRQAPAGPLQFRVVVTGGYDGKWVWADREVLPSRWRAGEVYDTGVQITDVAQEGCFPCDTQEWR

SEQ ID NO: 19299 - protein, 165 aa, Triticum aestivum
  peptide (1)..(165): Ceres Seq. ID no. 15226240
  misc_feature (49)..(133): Pfam Name: Pfam Description:  Pollen allergen
  misc_feature (1)..(165): NCBI GI NO: 21654743 NR Description: expansin-like protein 1 [Oryza sativa]
  misc_feature (1)..(165): NCBI GI NO: 20502989 NR Description: Putative pollen allergen
  misc_feature (1)..(165): NCBI GI NO: 37536544 NR Description: putative pollen allergen
  misc_feature (1)..(165): NCBI GI NO: 25136297 NR Description: expansin-like protein
  misc_feature (1)..(165): NCBI GI NO: 34901594 NR Description: P0571D04.11
  misc_feature (1)..(165): NCBI GI NO: 33111959 NR Description: expansin-like protein [Quercus robur]
  misc_feature (1)..(164): NCBI GI NO: 15231303 NR Description: expansin protein family (EXPL1)
  misc_feature (1)..(164): NCBI GI NO: 21555265 NR Description: Expansin-like 1 precursor
  misc_feature (1)..(164): NCBI GI NO: 15233841 NR Description: expansin protein family (EXPL2)
  misc_feature (1)..(159): NCBI GI NO: 20138389 NR Description: Expansin-like 3 precursor
MRTNRTDLVLSSPAFAAMARPGMAARLTKLRAVDVEYKRVPCEYRGKNLSVRVEERSRAPSELAVRFLYQGGQTDIVAVDVAQVGSSSWKFMTREHGPAWSTRQAPAGPLQFRVVVTGGYDGKWVWADREVLPSRWRAGEVYDTGVQITDVAQEGCFPCDTQEWR

SEQ ID NO: 19300 - protein, 148 aa, Triticum aestivum
  peptide (1)..(148): Ceres Seq. ID no. 15226241
  misc_feature (32)..(116): Pfam Name: Pfam Description:  Pollen allergen
  misc_feature (1)..(148): NCBI GI NO: 21654743 NR Description: expansin-like protein 1 [Oryza sativa]
  misc_feature (1)..(148): NCBI GI NO: 20502989 NR Description: Putative pollen allergen
  misc_feature (1)..(148): NCBI GI NO: 37536544 NR Description: putative pollen allergen
  misc_feature (1)..(148): NCBI GI NO: 25136297 NR Description: expansin-like protein
  misc_feature (1)..(148): NCBI GI NO: 34901594 NR Description: P0571D04.11
  misc_feature (1)..(148): NCBI GI NO: 33111959 NR Description: expansin-like protein [Quercus robur]
  misc_feature (1)..(147): NCBI GI NO: 15231303 NR Description: expansin protein family (EXPL1)
  misc_feature (1)..(147): NCBI GI NO: 21555265 NR Description: Expansin-like 1 precursor
  misc_feature (1)..(147): NCBI GI NO: 15233841 NR Description: expansin protein family (EXPL2)
  misc_feature (1)..(142): NCBI GI NO: 20138389 NR Description: Expansin-like 3 precursor
MARPGMAARLTKLRAVDVEYKRVPCEYRGKNLSVRVEERSRAPSELAVRFLYQGGQTDIVAVDVAQVGSSSWKFMTREHGPAWSTRQAPAGPLQFRVVVTGGYDGKWVWADREVLPSRWRAGEVYDTGVQITDVAQEGCFPCDTQEWR

SEQ ID NO: 19301 - DNA, 1406 bp, Triticum aestivum
  misc_feature (1)..(1406): Ceres Seq. ID no. 12614832
gactaatcccttccatcccgcacccttcgtctaatcgtccccagcccatggaggattccaaggggagcgacggcggcggcgagaggcccggcgccgaccacaaccctatcccggatcagccgccgccgctcgctgctcccggaggagggcgcgatgccgccgcggctgctgctgctgctgcggcggcggcggcggccttggccgaggacgaggcgcggcgcccgttcacggccctcagccaggtcgacgccgacctagccctggcgcgcgtcctccaggagcaggaacgggcgtatatgatgctccggatgaacggagtcggcggcggcggcggcgagggcagcgactacgggagctcggaggccgggagctacgagtacgacgaggatgccgaggaggactacgaggaggagctcgagaaccacctccgcgtccaccaccacgagcacccaggcggtggcgagggcgatggggacgatgatctcgaggctgatggcgagggcaagggtgagggtgagggcgaggatgaaggcgagggtgacggttctgaagagagcgagtacgaggaggaggggttcgatgaggacgaggaggtggaggatgtggatctagacccggcagagtacgaggacgacgaggcttatgcgcgggcgcttcaggacgctgaggagcgtgaggttgccgcgcggcttatggctctcgctgggatcagcgattggcgggcggtggagcatgtcgaggatcagataaacgacgcgcaggattcatggcaagaggttgatccagatgagtactcttatgaggagttagttgcattgggtgaagtagttggcacagaaagtagaggtctctctgctgatacacttgcttccttaccttcagtaacttacaagacaaaagatatgcaagatggcaacacagaacaatgtgtaatttgtcgtgtggaatttgaggaaggtgaatctttggttgcacttccctgcaatcattcataccatcctgactgcattaatcagtggcttcaaataaataaggtatgccctatgtgtagcgcagaagtttctacctcagcaagcaagcaggcatgaccaacagtcgttggtaaaccaacttcatcttcagaaaagaaaagaaaaacaccagttgttggcacttggtaggagtatcgagtatgtagtggcatcattctagtatccctgatgtttaaaccaaagcaaggcagcagaatttctacagtacaaacttgcaaggggaccagggacatggagcattttttttatgccttgccgctgatgctccgcgttctcttactcttgtacactaactgtgttactaccgtcgatcaattttttcttttctcagtgtatattatgagtatcgcattaatgcattgggatttagagatt

SEQ ID NO: 19302 - protein, 361 aa, Triticum aestivum
  peptide (1)..(361): Ceres Seq. ID no. 12614833
  misc_feature (309)..(349): Pfam Name: RING finger Pfam Description: Zinc finger, C3HC4 type
  misc_feature (158)..(361): NCBI GI NO: 18402411 NR Description: expressed protein; protein id: At3g19910
  misc_feature (158)..(361): NCBI GI NO: 21536693 NR Description: unknown [Arabidopsis thaliana]
  misc_feature (154)..(357): NCBI GI NO: 10334499 NR Description: hypothetical protein [Cicer arietinum]
  misc_feature (241)..(353): NCBI GI NO: 22331928 NR Description: putative protein; protein id: At3g63530.1
  misc_feature (190)..(356): NCBI GI NO: 15232746 NR Description: zinc-finger protein-like protein
  misc_feature (211)..(353): NCBI GI NO: 38567912 NR Description: OSJNBa0088I22.8
  misc_feature (178)..(353): NCBI GI NO: 34898016 NR Description: ESTs C26000
  misc_feature (71)..(223): NCBI GI NO: 18402411 NR Description: expressed protein; protein id: At3g19910
  misc_feature (71)..(223): NCBI GI NO: 21536693 NR Description: unknown [Arabidopsis thaliana]
  misc_feature (259)..(360): NCBI GI NO: 11358785 NR Description: RING-H2 finger protein RHG1a
LIPSIPHPSSNRPQPMEDSKGSDGGGERPGADHNPIPDQPPPLAAPGGGRDAAAAAAAAAAAAAALAEDEARRPFTALSQVDADLALARVLQEQERAYMMLRMNGVGGGGGEGSDYGSSEAGSYEYDEDAEEDYEEELENHLRVHHHEHPGGGEGDGDDDLEADGEGKGEGEGEDEGEGDGSEESEYEEEGFDEDEEVEDVDLDPAEYEDDEAYARALQDAEEREVAARLMALAGISDWRAVEHVEDQINDAQDSWQEVDPDEYSYEELVALGEVVGTESRGLSADTLASLPSVTYKTKDMQDGNTEQCVICRVEFEEGESLVALPCNHSYHPDCINQWLQINKVCPMCSAEVSTSASKQA

SEQ ID NO: 19303 - protein, 346 aa, Triticum aestivum
  peptide (1)..(346): Ceres Seq. ID no. 12614834
  misc_feature (294)..(334): Pfam Name: RING finger Pfam Description: Zinc finger, C3HC4 type
  misc_feature (143)..(346): NCBI GI NO: 18402411 NR Description: expressed protein; protein id: At3g19910
  misc_feature (143)..(346): NCBI GI NO: 21536693 NR Description: unknown [Arabidopsis thaliana]
  misc_feature (139)..(342): NCBI GI NO: 10334499 NR Description: hypothetical protein [Cicer arietinum]
  misc_feature (226)..(338): NCBI GI NO: 22331928 NR Description: putative protein; protein id: At3g63530.1
  misc_feature (175)..(341): NCBI GI NO: 15232746 NR Description: zinc-finger protein-like protein
  misc_feature (196)..(338): NCBI GI NO: 38567912 NR Description: OSJNBa0088I22.8
  misc_feature (163)..(338): NCBI GI NO: 34898016 NR Description: ESTs C26000
  misc_feature (56)..(208): NCBI GI NO: 18402411 NR Description: expressed protein; protein id: At3g19910
  misc_feature (56)..(208): NCBI GI NO: 21536693 NR Description: unknown [Arabidopsis thaliana]
  misc_feature (244)..(345): NCBI GI NO: 11358785 NR Description: RING-H2 finger protein RHG1a
MEDSKGSDGGGERPGADHNPIPDQPPPLAAPGGGRDAAAAAAAAAAAAAALAEDEARRPFTALSQVDADLALARVLQEQERAYMMLRMNGVGGGGGEGSDYGSSEAGSYEYDEDAEEDYEEELENHLRVHHHEHPGGGEGDGDDDLEADGEGKGEGEGEDEGEGDGSEESEYEEEGFDEDEEVEDVDLDPAEYEDDEAYARALQDAEEREVAARLMALAGISDWRAVEHVEDQINDAQDSWQEVDPDEYSYEELVALGEVVGTESRGLSADTLASLPSVTYKTKDMQDGNTEQCVICRVEFEEGESLVALPCNHSYHPDCINQWLQINKVCPMCSAEVSTSASKQA

SEQ ID NO: 19304 - protein, 263 aa, Triticum aestivum
  peptide (1)..(263): Ceres Seq. ID no. 12614835
  misc_feature (211)..(251): Pfam Name: RING finger Pfam Description: Zinc finger, C3HC4 type
  misc_feature (60)..(263): NCBI GI NO: 18402411 NR Description: expressed protein; protein id: At3g19910
  misc_feature (60)..(263): NCBI GI NO: 21536693 NR Description: unknown [Arabidopsis thaliana]
  misc_feature (56)..(259): NCBI GI NO: 10334499 NR Description: hypothetical protein [Cicer arietinum]
  misc_feature (143)..(255): NCBI GI NO: 22331928 NR Description: putative protein; protein id: At3g63530.1
  misc_feature (92)..(258): NCBI GI NO: 15232746 NR Description: zinc-finger protein-like protein
  misc_feature (113)..(255): NCBI GI NO: 38567912 NR Description: OSJNBa0088I22.8
  misc_feature (80)..(255): NCBI GI NO: 34898016 NR Description: ESTs C26000
  misc_feature (1)..(125): NCBI GI NO: 18402411 NR Description: expressed protein; protein id: At3g19910
  misc_feature (1)..(125): NCBI GI NO: 21536693 NR Description: unknown [Arabidopsis thaliana]
  misc_feature (161)..(262): NCBI GI NO: 11358785 NR Description: RING-H2 finger protein RHG1a
MMLRMNGVGGGGGEGSDYGSSEAGSYEYDEDAEEDYEEELENHLRVHHHEHPGGGEGDGDDDLEADGEGKGEGEGEDEGEGDGSEESEYEEEGFDEDEEVEDVDLDPAEYEDDEAYARALQDAEEREVAARLMALAGISDWRAVEHVEDQINDAQDSWQEVDPDEYSYEELVALGEVVGTESRGLSADTLASLPSVTYKTKDMQDGNTEQCVICRVEFEEGESLVALPCNHSYHPDCINQWLQINKVCPMCSAEVSTSASKQA

SEQ ID NO: 19305 - DNA, 1417 bp, Triticum aestivum
  misc_feature (1)..(1417): Ceres Seq. ID no. 12625092
gaataagtatatctcgagaaagaaaataaaaatatcacaccactagtatggcgctgctgagcccgcgtgttccgcggctgcccctcgccgcccactccgccggcgccggcgccggatccctccggtgctgcgtccgggttgctgcctccgctgcgcgatgccaagtgacggcgtcgggaagcgtggcggcgggctcctcgtcgtcgtcggagctggaggccatccggtggggcagcgccaagctgcagggagctcgcgaggagatggaggacgaggtcgtcctccgccctgactccctcctccacggcttctccttcgccgccgtcctcgacggccacgccggtttctccaccgtccagttcctgagggacgagttgttcaaggaatgcgcagccgcgttggacgggggcgcggtgcttaacaccaagaatctcgaggccatcacggactcgatcaggcgtgcctttgccaccatggacgccaacctctccacctggcttcagcaaatggataaggaagacgactctggtgccacggccacggccttgtttctgaggaacgatgtccttgttgtctcgcacattggcgactcctgcttggtcatatcgcgtggtggaagacctcagtctctgacaaattttcatcgaccatacgggaacaacaaaacatcccttgaagaggtcaagcggattagggcagcaggtggatggattcgtgatggacgcgtatgtggagacatttctgtatctcgtgcttttggagacataagatttaaaacacggaagaatgagatgctagtaaaaggagttaaagaaggaagatggactgaaaaattcgtttcacgaataaattttaaaggggatctaataatctcttcacctgacgtatctctggtggagcttggaccggatgtggaatttgttttggtagcaaccgatggtctttgggattacattaaaagcactgaagctgtagcttttgtcagagatcaactatgtcaacatggagatgtccagcgggcctgtgaggcgcttggggagaaagctctggatcggcggtcacaagacaatattagcatagtcatagctgacttggggaggacaaactggcaggagttgcccgttccaaggccaaacgtgttgttggagctaagtcaagcagttgcgactgtaggggctgtatcagtaggaatttggatttcatcgcttctcactttgcaataggcctagttaaggtcgggggtgacattttcacatcttcggctccagctgcaaatatatatgtatatccttataggtaattagtttcctgattaaactgttcagtggtatctggactgatgaaaagaagaagaaaaacttgtgctccagctgctatctggcagcgtactaccatagggacctgtgagacgcccgtc

SEQ ID NO: 19306 - protein, 391 aa, Triticum aestivum
  peptide (1)..(391): Ceres Seq. ID no. 12625093
  misc_feature (59)..(342): Pfam Name: Pfam Description:  Protein phosphatase 2C
  misc_feature (32)..(390): NCBI GI NO: 3643090 NR Description: protein phosphatase-2C; PP2C
  misc_feature (1)..(389): NCBI GI NO: 15234274 NR Description: protein phosphatase homolog
  misc_feature (1)..(389): NCBI GI NO: 7488010 NR Description: phosphoprotein phosphatase homolog T27E11
  misc_feature (17)..(358): NCBI GI NO: 995839 NR Description: protein phosphatase homolog
  misc_feature (1)..(334): NCBI GI NO: 30687733 NR Description: Protein phosphatase 2C PPH1  (PPH1) (PP2C)
  misc_feature (1)..(326): NCBI GI NO: 30687740 NR Description: Protein phosphatase 2C PPH1  (PPH1) (PP2C)
  misc_feature (1)..(221): NCBI GI NO: 34913920 NR Description: putative protein phosphatase-2C
  misc_feature (33)..(243): NCBI GI NO: 33944913 NR Description: protein phosphatase 2C, putative
  misc_feature (272)..(346): NCBI GI NO: 33944913 NR Description: protein phosphatase 2C, putative
  misc_feature (41)..(243): NCBI GI NO: 25355102 NR Description: protein T23F11.1
MALLSPRVPRLPLAAHSAGAGAGSLRCCVRVAASAARCQVTASGSVAAGSSSSSELEAIRWGSAKLQGAREEMEDEVVLRPDSLLHGFSFAAVLDGHAGFSTVQFLRDELFKECAAALDGGAVLNTKNLEAITDSIRRAFATMDANLSTWLQQMDKEDDSGATATALFLRNDVLVVSHIGDSCLVISRGGRPQSLTNFHRPYGNNKTSLEEVKRIRAAGGWIRDGRVCGDISVSRAFGDIRFKTRKNEMLVKGVKEGRWTEKFVSRINFKGDLIISSPDVSLVELGPDVEFVLVATDGLWDYIKSTEAVAFVRDQLCQHGDVQRACEALGEKALDRRSQDNISIVIADLGRTNWQELPVPRPNVLLELSQAVATVGAVSVGIWISSLLTLQ

SEQ ID NO: 19307 - protein, 319 aa, Triticum aestivum
  peptide (1)..(319): Ceres Seq. ID no. 12625094
  misc_feature (1)..(270): Pfam Name: Pfam Description:  Protein phosphatase 2C
  misc_feature (1)..(318): NCBI GI NO: 3643090 NR Description: protein phosphatase-2C; PP2C
  misc_feature (1)..(317): NCBI GI NO: 15234274 NR Description: protein phosphatase homolog
  misc_feature (1)..(317): NCBI GI NO: 7488010 NR Description: phosphoprotein phosphatase homolog T27E11
  misc_feature (1)..(286): NCBI GI NO: 995839 NR Description: protein phosphatase homolog
  misc_feature (1)..(262): NCBI GI NO: 30687733 NR Description: Protein phosphatase 2C PPH1  (PPH1) (PP2C)
  misc_feature (1)..(254): NCBI GI NO: 30687740 NR Description: Protein phosphatase 2C PPH1  (PPH1) (PP2C)
  misc_feature (1)..(149): NCBI GI NO: 34913920 NR Description: putative protein phosphatase-2C
  misc_feature (1)..(171): NCBI GI NO: 33944913 NR Description: protein phosphatase 2C, putative
  misc_feature (200)..(274): NCBI GI NO: 33944913 NR Description: protein phosphatase 2C, putative
  misc_feature (1)..(171): NCBI GI NO: 25355102 NR Description: protein T23F11.1
MEDEVVLRPDSLLHGFSFAAVLDGHAGFSTVQFLRDELFKECAAALDGGAVLNTKNLEAITDSIRRAFATMDANLSTWLQQMDKEDDSGATATALFLRNDVLVVSHIGDSCLVISRGGRPQSLTNFHRPYGNNKTSLEEVKRIRAAGGWIRDGRVCGDISVSRAFGDIRFKTRKNEMLVKGVKEGRWTEKFVSRINFKGDLIISSPDVSLVELGPDVEFVLVATDGLWDYIKSTEAVAFVRDQLCQHGDVQRACEALGEKALDRRSQDNISIVIADLGRTNWQELPVPRPNVLLELSQAVATVGAVSVGIWISSLLTLQ

SEQ ID NO: 19308 - protein, 249 aa, Triticum aestivum
  peptide (1)..(249): Ceres Seq. ID no. 12625095
  misc_feature (1)..(200): Pfam Name: Pfam Description:  Protein phosphatase 2C
  misc_feature (1)..(248): NCBI GI NO: 3643090 NR Description: protein phosphatase-2C; PP2C
  misc_feature (1)..(247): NCBI GI NO: 15234274 NR Description: protein phosphatase homolog
  misc_feature (1)..(247): NCBI GI NO: 7488010 NR Description: phosphoprotein phosphatase homolog T27E11
  misc_feature (1)..(216): NCBI GI NO: 995839 NR Description: protein phosphatase homolog
  misc_feature (1)..(192): NCBI GI NO: 30687733 NR Description: Protein phosphatase 2C PPH1  (PPH1) (PP2C)
  misc_feature (1)..(184): NCBI GI NO: 30687740 NR Description: Protein phosphatase 2C PPH1  (PPH1) (PP2C)
  misc_feature (1)..(79): NCBI GI NO: 34913920 NR Description: putative protein phosphatase-2C
  misc_feature (1)..(101): NCBI GI NO: 33944913 NR Description: protein phosphatase 2C, putative
  misc_feature (130)..(204): NCBI GI NO: 33944913 NR Description: protein phosphatase 2C, putative
  misc_feature (1)..(101): NCBI GI NO: 25355102 NR Description: protein T23F11.1
MDANLSTWLQQMDKEDDSGATATALFLRNDVLVVSHIGDSCLVISRGGRPQSLTNFHRPYGNNKTSLEEVKRIRAAGGWIRDGRVCGDISVSRAFGDIRFKTRKNEMLVKGVKEGRWTEKFVSRINFKGDLIISSPDVSLVELGPDVEFVLVATDGLWDYIKSTEAVAFVRDQLCQHGDVQRACEALGEKALDRRSQDNISIVIADLGRTNWQELPVPRPNVLLELSQAVATVGAVSVGIWISSLLTLQ

SEQ ID NO: 19309 - DNA, 2181 bp, Zea mays subsp. mays
  misc_feature (1)..(2181): Ceres Seq. ID no. 14307940
tctcccatcacagtgcgccacccgcacccaccaacgaggcaacgaaacccagtcggaagctagaccggcgacaagtgcagcgctcgccgcgatggattctgactacggcgtgccgcgcgagctgtcggaggtgcagaagaagcgcgcgctctaccagcccgaggtgcccccctgcctccaggggactactgtcagggtggagtatggtgacgccgcaattgcagctgaccaggcaggcgctcatgtgatcagccatgcgttccctcacacctatgggcagccccttgcacatttcctcaggaagacggctgttgtccttgatgctaaggtcatatctgaacacccggtggtcagggttggcattgtcttctgtggcaggcaatccccaggaggccacaatgttgtttggggactctatgaggctatcaaggcccacaaccaaaacagcaaactcattggtttcctcggtggatcagatggtttgctagcgcagagaacattggagatcactaatgaagttcttgcttcatataaaaatcaaggtggatatgacatgcttggtcggacaaaggatcagattaggacgacagagcaggtcaatggtgcaatggctagttgccaggctttgaagttggatgctctggttataattggaggtgtcacttccaacactgacgctgctcaacttgctgagacttttgctgaggcaaagtgtgcaacgaaggttgtaggtgttcctgtaactttgaatggggacctcaagaaccagtttgttgagactactgttggctttgacaccatatgcaaggtgaatgcacaacttatcagcaatgtctgcactgatgctctatctgctgagaagtattactacttcattcgtttgatgggacgcaaggcttctcatgtggcattggaatgtgctcttcaatcacacccgaacatggtcatcctaggagaggaggtggctgcttccaaacttacaatttttgatattacgaagcagatttgtgatgcggttcaggcaagggcagaaaaagacaagaaccatggggttgttcttattcctgagggtcttgtggagagtattcctgaactatatgctctgcttcaggaaatccatggcctccatggcaaaggtgtttctgttgagaatatctcttctcagctttcaccctgggcatctgcactctttgagtttttgcccccttttatcaggaagcagctacttctccatcctgaatctgatgattcagctcaactttctcagattgagacagagaagcttctagcccagttagttgagactgagatgaacagacgtttgaaggagggcacttacaaaggaaagaagtttaatgcaatctgtcacttctttggctaccaagctaggggagcactgccttccaagtttgactgcgattatgcctatgtcttggggcatgtgtgctaccacatcatagctgccggtttgaacggttacatggccacagtgacaaatgttaagagtccagtgaacaagtggcgatgtggtgcggctcctatttcgtctatgatgactgtgcagcgatggtcgcgtggcccttcagccacccaaatcggaaagcctgctgttcacatggctagcgttgacttgaaaggaaaagcatacgatgtattgaggcagaattcttccaggtttttgttggaagatgtctacaggaacccaggtccgctccagtttgaaggaccaggtgccgattcaaagcctatctcactgtgcgtcgaggatcaagactacatgggcaggataaagaaattgcaggaatacctggagaaggtgaagagcattgtgaagcctgggtgctcgcaggatgtccttaaggcggcgctgagcgccatgtcttctgtgacggagacactgaacatcatgacctcatcgtccaccggccagactgcactgtgactcgtttggtgccgttttgtggtgcggatcagaatccccactttttccatggtgtcgattgacaaagttaggagcagtaatcctggtgccacacgggtcattcttttgtagcttcttgggagagttctgtcagttttgaattcgatagtttattatggagaggcttgttggtgagtttgagctcgaataatttttgaaacagacggattgcggaatcttaataaaccaaaatttgtgac

SEQ ID NO: 19310 - protein, 646 aa, Zea mays subsp. mays
  peptide (1)..(646): Ceres Seq. ID no. 14307941
  misc_feature (118)..(398): Pfam Name: Pfam Description:  Phosphofructokinase
  misc_feature (31)..(646): NCBI GI NO: 2499488 NR Description: Pyrophosphate --fructose 6-phosphate 1-phosphotransferase alpha subunit
  misc_feature (31)..(646): NCBI GI NO: 3790102 NR Description: pyrophosphate-dependent phosphofructokinase alpha subunit
  misc_feature (31)..(643): NCBI GI NO: 15223082 NR Description: pyrophosphate-dependent phosphofructokinase alpha subunit -related
  misc_feature (31)..(644): NCBI GI NO: 129881 NR Description: Pyrophosphate --fructose 6-phosphate 1-phosphotransferase alpha subunit
  misc_feature (31)..(643): NCBI GI NO: 15218074 NR Description: pyrophosphate-dependent phosphofructokinase alpha subunit -related
  misc_feature (31)..(637): NCBI GI NO: 29647436 NR Description: putative pyrophosphate--fructose 6-phosphate 1-phosphotransferase alpha subunit
  misc_feature (118)..(515): NCBI GI NO: 29367525 NR Description: fructose-6-phosphate 1-phosphotransferase
  misc_feature (41)..(576): NCBI GI NO: 11528427 NR Description: pyrophosphate-dependent phosphofructokinase
  misc_feature (42)..(588): NCBI GI NO: 15221156 NR Description: pyrophosphate -fructose-6-phosphate 1-phosphotransferase -related
  misc_feature (42)..(588): NCBI GI NO: 2507174 NR Description: PYROPHOSPHATE --FRUCTOSE 6-PHOSPHATE 1-PHOSPHOTRANSFERASE BETA SUBUNIT
LPSQCATRTHQRGNETQSEARPATSAALAAMDSDYGVPRELSEVQKKRALYQPEVPPCLQGTTVRVEYGDAAIAADQAGAHVISHAFPHTYGQPLAHFLRKTAVVLDAKVISEHPVVRVGIVFCGRQSPGGHNVVWGLYEAIKAHNQNSKLIGFLGGSDGLLAQRTLEITNEVLASYKNQGGYDMLGRTKDQIRTTEQVNGAMASCQALKLDALVIIGGVTSNTDAAQLAETFAEAKCATKVVGVPVTLNGDLKNQFVETTVGFDTICKVNAQLISNVCTDALSAEKYYYFIRLMGRKASHVALECALQSHPNMVILGEEVAASKLTIFDITKQICDAVQARAEKDKNHGVVLIPEGLVESIPELYALLQEIHGLHGKGVSVENISSQLSPWASALFEFLPPFIRKQLLLHPESDDSAQLSQIETEKLLAQLVETEMNRRLKEGTYKGKKFNAICHFFGYQARGALPSKFDCDYAYVLGHVCYHIIAAGLNGYMATVTNVKSPVNKWRCGAAPISSMMTVQRWSRGPSATQIGKPAVHMASVDLKGKAYDVLRQNSSRFLLEDVYRNPGPLQFEGPGADSKPISLCVEDQDYMGRIKKLQEYLEKVKSIVKPGCSQDVLKAALSAMSSVTETLNIMTSSSTGQTAL

SEQ ID NO: 19311 - protein, 616 aa, Zea mays subsp. mays
  peptide (1)..(616): Ceres Seq. ID no. 14307942
  misc_feature (88)..(368): Pfam Name: Pfam Description:  Phosphofructokinase
  misc_feature (1)..(616): NCBI GI NO: 2499488 NR Description: Pyrophosphate --fructose 6-phosphate 1-phosphotransferase alpha subunit
  misc_feature (1)..(616): NCBI GI NO: 3790102 NR Description: pyrophosphate-dependent phosphofructokinase alpha subunit
  misc_feature (1)..(613): NCBI GI NO: 15223082 NR Description: pyrophosphate-dependent phosphofructokinase alpha subunit -related
  misc_feature (1)..(614): NCBI GI NO: 129881 NR Description: Pyrophosphate --fructose 6-phosphate 1-phosphotransferase alpha subunit
  misc_feature (1)..(613): NCBI GI NO: 15218074 NR Description: pyrophosphate-dependent phosphofructokinase alpha subunit -related
  misc_feature (1)..(607): NCBI GI NO: 29647436 NR Description: putative pyrophosphate--fructose 6-phosphate 1-phosphotransferase alpha subunit
  misc_feature (88)..(485): NCBI GI NO: 29367525 NR Description: fructose-6-phosphate 1-phosphotransferase
  misc_feature (11)..(546): NCBI GI NO: 11528427 NR Description: pyrophosphate-dependent phosphofructokinase
  misc_feature (12)..(558): NCBI GI NO: 15221156 NR Description: pyrophosphate -fructose-6-phosphate 1-phosphotransferase -related
  misc_feature (12)..(558): NCBI GI NO: 2507174 NR Description: PYROPHOSPHATE --FRUCTOSE 6-PHOSPHATE 1-PHOSPHOTRANSFERASE BETA SUBUNIT
MDSDYGVPRELSEVQKKRALYQPEVPPCLQGTTVRVEYGDAAIAADQAGAHVISHAFPHTYGQPLAHFLRKTAVVLDAKVISEHPVVRVGIVFCGRQSPGGHNVVWGLYEAIKAHNQNSKLIGFLGGSDGLLAQRTLEITNEVLASYKNQGGYDMLGRTKDQIRTTEQVNGAMASCQALKLDALVIIGGVTSNTDAAQLAETFAEAKCATKVVGVPVTLNGDLKNQFVETTVGFDTICKVNAQLISNVCTDALSAEKYYYFIRLMGRKASHVALECALQSHPNMVILGEEVAASKLTIFDITKQICDAVQARAEKDKNHGVVLIPEGLVESIPELYALLQEIHGLHGKGVSVENISSQLSPWASALFEFLPPFIRKQLLLHPESDDSAQLSQIETEKLLAQLVETEMNRRLKEGTYKGKKFNAICHFFGYQARGALPSKFDCDYAYVLGHVCYHIIAAGLNGYMATVTNVKSPVNKWRCGAAPISSMMTVQRWSRGPSATQIGKPAVHMASVDLKGKAYDVLRQNSSRFLLEDVYRNPGPLQFEGPGADSKPISLCVEDQDYMGRIKKLQEYLEKVKSIVKPGCSQDVLKAALSAMSSVTETLNIMTSSSTGQTAL

SEQ ID NO: 19312 - protein, 462 aa, Zea mays subsp. mays
  peptide (1)..(462): Ceres Seq. ID no. 14307943
  misc_feature (1)..(214): Pfam Name: Pfam Description:  Phosphofructokinase
  misc_feature (1)..(462): NCBI GI NO: 2499488 NR Description: Pyrophosphate --fructose 6-phosphate 1-phosphotransferase alpha subunit
  misc_feature (1)..(462): NCBI GI NO: 3790102 NR Description: pyrophosphate-dependent phosphofructokinase alpha subunit
  misc_feature (1)..(459): NCBI GI NO: 15223082 NR Description: pyrophosphate-dependent phosphofructokinase alpha subunit -related
  misc_feature (1)..(460): NCBI GI NO: 129881 NR Description: Pyrophosphate --fructose 6-phosphate 1-phosphotransferase alpha subunit
  misc_feature (1)..(459): NCBI GI NO: 15218074 NR Description: pyrophosphate-dependent phosphofructokinase alpha subunit -related
  misc_feature (1)..(453): NCBI GI NO: 29647436 NR Description: putative pyrophosphate--fructose 6-phosphate 1-phosphotransferase alpha subunit
  misc_feature (1)..(331): NCBI GI NO: 29367525 NR Description: fructose-6-phosphate 1-phosphotransferase
  misc_feature (1)..(392): NCBI GI NO: 11528427 NR Description: pyrophosphate-dependent phosphofructokinase
  misc_feature (1)..(404): NCBI GI NO: 15221156 NR Description: pyrophosphate -fructose-6-phosphate 1-phosphotransferase -related
  misc_feature (1)..(404): NCBI GI NO: 2507174 NR Description: PYROPHOSPHATE --FRUCTOSE 6-PHOSPHATE 1-PHOSPHOTRANSFERASE BETA SUBUNIT
MLGRTKDQIRTTEQVNGAMASCQALKLDALVIIGGVTSNTDAAQLAETFAEAKCATKVVGVPVTLNGDLKNQFVETTVGFDTICKVNAQLISNVCTDALSAEKYYYFIRLMGRKASHVALECALQSHPNMVILGEEVAASKLTIFDITKQICDAVQARAEKDKNHGVVLIPEGLVESIPELYALLQEIHGLHGKGVSVENISSQLSPWASALFEFLPPFIRKQLLLHPESDDSAQLSQIETEKLLAQLVETEMNRRLKEGTYKGKKFNAICHFFGYQARGALPSKFDCDYAYVLGHVCYHIIAAGLNGYMATVTNVKSPVNKWRCGAAPISSMMTVQRWSRGPSATQIGKPAVHMASVDLKGKAYDVLRQNSSRFLLEDVYRNPGPLQFEGPGADSKPISLCVEDQDYMGRIKKLQEYLEKVKSIVKPGCSQDVLKAALSAMSSVTETLNIMTSSSTGQTAL

SEQ ID NO: 19313 - DNA, 958 bp, Zea mays subsp. mays
  misc_feature (1)..(958): Ceres Seq. ID no. 14306246
aagtacgcctctatccgaagccaaaccacacgcacacgccgcgccagcctcacgctctcacccatgttttgtgcgcgcacgcgtcctgcttcttctcgccaacgacaagccgcacgcagcgtctcgccagctagctgatcatgagcaacggcgacacgctcgacaagctggtggtgttcctggcgaagcgcgacggcatcgacaagctggtcaagacgttccagtacgtgtccaagctggcgcactggggcgccgagtcttcgctcccggagctcgcgcagcgcgccaagagctgggagacggcgtccgggctgagccgcaaggcgttccggtcgggccgcttcctggccgggttcaacgcgctgcgccgcggcccggtcccggtcccgggggagctcggcgcgctggccgtgctggccaacgccggcgagatggtctacttcttcttcgaccacttcacgtggctgtcccgcgcgggcgtgctcgagccctggctggcgcgccgggccagcttcgtgtcggccttcggcgaggccgtcggctacgtgtttttcatcgccatggacttcatcatgatcaggcggggcctgcggcaggagagggagctgctgagggaaggcgccaaggacgccgcggagaaggaggtgcggaggatccgggtggacagggtgatgcggctcatggcgacggcggccaacgccgccgacctgatcatcgccgtcgcggaaaccgatcccaacccgttctgcaaccacgccgtcacgctggggattagcggcctcgtgtcagcgtgggctggctggtacagaaactggccctcgtgaactgggccgcttcggcctacatgtgcatatttttcattcacttatttaactgcggctgcgatgcatgatgatattgccagatttgaaccttttctatctccagcaataacctttaaggcctaatttgaaaactt

SEQ ID NO: 19314 - protein, 257 aa, Zea mays subsp. mays
  peptide (1)..(257): Ceres Seq. ID no. 14306247
  misc_feature (43)..(220): NCBI GI NO: 34499419 NR Description: conserved hypothetical protein
STPLSEAKPHAHAAPASRSHPCFVRARVLLLLANDKPHAASRQLADHEQRRHARQAGGVPGEARRHRQAGQDVPVRVQAGALGRRVFAPGARAARQELGDGVRAEPQGVPVGPLPGRVQRAAPRPGPGPGGARRAGRAGQRRRDGLLLLRPLHVAVPRGRARALAGAPGQLRVGLRRGRRLRVFHRHGLHHDQAGPAAGEGAAEGRRQGRRGEGGAEDPGGQGDAAHGDGGQRRRPDHRRRGNRSQPVLQPRRHAGD

SEQ ID NO: 19315 - protein, 227 aa, Zea mays subsp. mays
  peptide (1)..(227): Ceres Seq. ID no. 14306248
  misc_feature (7)..(225): Pfam Name: PEX11 Pfam Description: Peroxisomal biogenesis factor 11
  misc_feature (1)..(227): NCBI GI NO: 38605902 NR Description: OSJNBb0020O11.14
  misc_feature (5)..(227): NCBI GI NO: 15232797 NR Description: expressed protein [Arabidopsis thaliana]
  misc_feature (5)..(227): NCBI GI NO: 18401872 NR Description: expressed protein [Arabidopsis thaliana]
  misc_feature (5)..(227): NCBI GI NO: 21536511 NR Description: unknown [Arabidopsis thaliana]
MSNGDTLDKLVVFLAKRDGIDKLVKTFQYVSKLAHWGAESSLPELAQRAKSWETASGLSRKAFRSGRFLAGFNALRRGPVPVPGELGALAVLANAGEMVYFFFDHFTWLSRAGVLEPWLARRASFVSAFGEAVGYVFFIAMDFIMIRRGLRQERELLREGAKDAAEKEVRRIRVDRVMRLMATAANAADLIIAVAETDPNPFCNHAVTLGISGLVSAWAGWYRNWPS

SEQ ID NO: 19316 - protein, 130 aa, Zea mays subsp. mays
  peptide (1)..(130): Ceres Seq. ID no. 14306249
  misc_feature (1)..(128): Pfam Name: PEX11 Pfam Description: Peroxisomal biogenesis factor 11
  misc_feature (1)..(130): NCBI GI NO: 38605902 NR Description: OSJNBb0020O11.14
  misc_feature (1)..(130): NCBI GI NO: 15232797 NR Description: expressed protein [Arabidopsis thaliana]
  misc_feature (1)..(130): NCBI GI NO: 18401872 NR Description: expressed protein [Arabidopsis thaliana]
  misc_feature (1)..(130): NCBI GI NO: 21536511 NR Description: unknown [Arabidopsis thaliana]
MVYFFFDHFTWLSRAGVLEPWLARRASFVSAFGEAVGYVFFIAMDFIMIRRGLRQERELLREGAKDAAEKEVRRIRVDRVMRLMATAANAADLIIAVAETDPNPFCNHAVTLGISGLVSAWAGWYRNWPS

SEQ ID NO: 19317 - DNA, 748 bp, Zea mays subsp. mays
  misc_feature (1)..(748): Ceres Seq. ID no. 12635481
acaacacacgtacgattcctttcctctgctctcctctctctctctctctctacaaaccctgcgatcctcttcctcaagattcgagtatgaaaggaggtaaatcgaagactgaaaccaggagctccaagctctctgtggctaagaagcctgctaaagcagcaggtcgtagcaaagcggcggctaaggatcctaacaaacctaagaggccagccagtgccttcttcgttttcatggaggactttcgtcagacttacaagaaggatcaccccaacaacaaatctgttgctgctgttggtaaagctggtggagagaagtggaagtcgttgtctgactctgagaaggctcccttcgtagctaaggctgataagcgcaaggttgagtatgagaagaccatgaaagcctacaacaagaagctggaggaaggtccaaaggaggacgaggaggaatctgacaagtctgtgtccgaggtgaatgatgaggatgatgccgatgatggtagtgatgaggaggaagacgatgactaaaagaagttgaagctggtagcacaatataggaacgctacaacaaggatctctcggatgttttttattttctttctttttactgatgttttcaacttagtaaaagctgccactatctctctgattatgattctacgggtaatggaaaaagtgtgtgtagaatgtttgaatgggagatatgcacctctatgtaacgatttagcttttttatcattctgaaatatgtt

SEQ ID NO: 19318 - protein, 173 aa, Zea mays subsp. mays
  peptide (1)..(173): Ceres Seq. ID no. 12635482
  misc_feature (66)..(135): Pfam Name: high mobility group Pfam Description: HMG
  misc_feature (29)..(173): NCBI GI NO: 18394898 NR Description: Expressed protein; protein id: At1g20693
  misc_feature (26)..(173): NCBI GI NO: 25402921 NR Description: protein F2D10.18 [imported] - Arabidopsis thaliana
  misc_feature (26)..(173): NCBI GI NO: 25402921 NR Description: protein F2D10.18 [imported] - Arabidopsis thaliana
  misc_feature (29)..(173): NCBI GI NO: 18394900 NR Description: Expressed protein; protein id: At1g20696
  misc_feature (29)..(173): NCBI GI NO: 123379 NR Description: HMG1/2-LIKE PROTEIN (SB11 PROTEIN)
  misc_feature (29)..(173): NCBI GI NO: 1052956 NR Description: high mobility group protein 2 HMG2 [Ipomoea nil]
  misc_feature (29)..(172): NCBI GI NO: 7446212 NR Description: high mobility group protein - potato
  misc_feature (29)..(173): NCBI GI NO: 7446213 NR Description: high mobility group protein HMG-1 - common tobacco
  misc_feature (29)..(173): NCBI GI NO: 729736 NR Description: HMG1/2-LIKE PROTEIN
  misc_feature (29)..(173): NCBI GI NO: 729737 NR Description: HMG1/2-LIKE PROTEIN
NTRTIPFLCSPLSLSLYKPCDPLPQDSSMKGGKSKTETRSSKLSVAKKPAKAAGRSKAAAKDPNKPKRPASAFFVFMEDFRQTYKKDHPNNKSVAAVGKAGGEKWKSLSDSEKAPFVAKADKRKVEYEKTMKAYNKKLEEGPKEDEEESDKSVSEVNDEDDADDGSDEEEDDD

SEQ ID NO: 19319 - protein, 145 aa, Zea mays subsp. mays
  peptide (1)..(145): Ceres Seq. ID no. 12635483
  misc_feature (38)..(107): Pfam Name: high mobility group Pfam Description: HMG
  misc_feature (1)..(145): NCBI GI NO: 18394898 NR Description: Expressed protein; protein id: At1g20693
  misc_feature (1)..(145): NCBI GI NO: 25402921 NR Description: protein F2D10.18 [imported] - Arabidopsis thaliana
  misc_feature (1)..(145): NCBI GI NO: 25402921 NR Description: protein F2D10.18 [imported] - Arabidopsis thaliana
  misc_feature (1)..(145): NCBI GI NO: 18394900 NR Description: Expressed protein; protein id: At1g20696
  misc_feature (1)..(145): NCBI GI NO: 123379 NR Description: HMG1/2-LIKE PROTEIN (SB11 PROTEIN)
  misc_feature (1)..(145): NCBI GI NO: 1052956 NR Description: high mobility group protein 2 HMG2 [Ipomoea nil]
  misc_feature (1)..(144): NCBI GI NO: 7446212 NR Description: high mobility group protein - potato
  misc_feature (1)..(145): NCBI GI NO: 7446213 NR Description: high mobility group protein HMG-1 - common tobacco
  misc_feature (1)..(145): NCBI GI NO: 729736 NR Description: HMG1/2-LIKE PROTEIN
  misc_feature (1)..(145): NCBI GI NO: 729737 NR Description: HMG1/2-LIKE PROTEIN
MKGGKSKTETRSSKLSVAKKPAKAAGRSKAAAKDPNKPKRPASAFFVFMEDFRQTYKKDHPNNKSVAAVGKAGGEKWKSLSDSEKAPFVAKADKRKVEYEKTMKAYNKKLEEGPKEDEEESDKSVSEVNDEDDADDGSDEEEDDD

SEQ ID NO: 19320 - protein, 97 aa, Zea mays subsp. mays
  peptide (1)..(97): Ceres Seq. ID no. 12635484
  misc_feature (1)..(59): Pfam Name: high mobility group Pfam Description: HMG
  misc_feature (1)..(97): NCBI GI NO: 18394898 NR Description: Expressed protein; protein id: At1g20693
  misc_feature (1)..(97): NCBI GI NO: 25402921 NR Description: protein F2D10.18 [imported] - Arabidopsis thaliana
  misc_feature (1)..(97): NCBI GI NO: 25402921 NR Description: protein F2D10.18 [imported] - Arabidopsis thaliana
  misc_feature (1)..(97): NCBI GI NO: 18394900 NR Description: Expressed protein; protein id: At1g20696
  misc_feature (1)..(97): NCBI GI NO: 123379 NR Description: HMG1/2-LIKE PROTEIN (SB11 PROTEIN)
  misc_feature (1)..(97): NCBI GI NO: 1052956 NR Description: high mobility group protein 2 HMG2 [Ipomoea nil]
  misc_feature (1)..(96): NCBI GI NO: 7446212 NR Description: high mobility group protein - potato
  misc_feature (1)..(97): NCBI GI NO: 7446213 NR Description: high mobility group protein HMG-1 - common tobacco
  misc_feature (1)..(97): NCBI GI NO: 729736 NR Description: HMG1/2-LIKE PROTEIN
  misc_feature (1)..(97): NCBI GI NO: 729737 NR Description: HMG1/2-LIKE PROTEIN
MEDFRQTYKKDHPNNKSVAAVGKAGGEKWKSLSDSEKAPFVAKADKRKVEYEKTMKAYNKKLEEGPKEDEEESDKSVSEVNDEDDADDGSDEEEDDD

SEQ ID NO: 19321 - DNA, 1106 bp, Zea mays subsp. mays
  misc_feature (1)..(1106): Ceres Seq. ID no. 13599456
attatctatcttcgttaataatatcgacgcggttaattgattctctctctctggaagcaaaagaaaacaaaaagacatggattcgttctcgtccttcttcgattctcagccaggcagcagaagctggagctatgattctctcaagaacctccatcagatctccccgtccgtccagaatcatctcaagcgggtttacctcactttatgctatgcccttgttgcgtctgcctttggagcttacctccacgtgctctggaacatcggtggtattctcacaaccattgcatgttgtggaaccatgatttggcttctctcatgccctccttatgaacaacaaaagaggctctcacttctcttcatgtctgccgttcttgaaggtgcctctgttggccccttgatcaaagtggctgttgattttgacccaagcatccttatcactgcgtttgtcggaactgcgatagcgtttatctgtttctcaggagcagcgatgctggcaagacgcagagagtatctctacctcggaggacttctctcttctggcttgtccatgcttatgtggcttcagtttgcttcttccatctttggtggctctgcgtccatctttaagttcgagctctactttggactcttgatctttgtgggatacatggtggtggacacacaagagattatagagaaagcacacctaggggacatggactatgtgaaacatgcattgacccttttcaccgattttgtggctgtgtttgtccgtgttctcatcataatgctgaagaactcggcagataaagaggagaagaagaagaagaggagaaactgaaactaaaagtgacaaggaaagctaataagagtgggtgttttaaataacatgaaagcgttggtgtttttacgtgttaggacgtacttttggtttgcgtatgcctcttatcgcacgcgattgtaaatggatcaagtagttttcgtttttatctcgactctcgttcactttcgtattgttcgaagtgtttcctctactgtttaatcactttgagatgagaattagcagggtaataattaagtaattggaccaaaaaaaaaaaaaaaaaagcttatcgataccgtcgacc

SEQ ID NO: 19322 - protein, 247 aa, Zea mays subsp. mays
  peptide (1)..(247): Ceres Seq. ID no. 13599457
  misc_feature (28)..(235): Pfam Name: Pfam Description:  Uncharacterised protein family UPF0005
  misc_feature (1)..(245): NCBI GI NO: 17981376 NR Description: bax inhibitor-like protein [Brassica oleracea]
  misc_feature (1)..(247): NCBI GI NO: 14719274 NR Description: Bax inhibitor 1 [Brassica napus]
  misc_feature (1)..(247): NCBI GI NO: 15238017 NR Description: Bax inhibitor-1 (BI-1), putative
  misc_feature (1)..(247): NCBI GI NO: 21593125 NR Description: Bax inhibitor-1 like [Arabidopsis thaliana]
  misc_feature (1)..(247): NCBI GI NO: 14719276 NR Description: Bax inhibitor 1 [Nicotiana tabacum]
  misc_feature (1)..(246): NCBI GI NO: 13940165 NR Description: BAX inhibitor 1 [Hordeum vulgare subsp. vulgare]
  misc_feature (1)..(247): NCBI GI NO: 12229685 NR Description: Bax inhibitor-1 (BI-1) (OsBI-1)
  misc_feature (17)..(247): NCBI GI NO: 15236582 NR Description: Bax inhibitor-1 (BI1) family
  misc_feature (10)..(154): NCBI GI NO: 27526517 NR Description: putative BAX inhibitor 1
  misc_feature (86)..(230): NCBI GI NO: 7485137 NR Description: hypothetical protein - Arabidopsis thaliana
MDSFSSFFDSQPGSRSWSYDSLKNLHQISPSVQNHLKRVYLTLCYALVASAFGAYLHVLWNIGGILTTIACCGTMIWLLSCPPYEQQKRLSLLFMSAVLEGASVGPLIKVAVDFDPSILITAFVGTAIAFICFSGAAMLARRREYLYLGGLLSSGLSMLMWLQFASSIFGGSASIFKFELYFGLLIFVGYMVVDTQEIIEKAHLGDMDYVKHALTLFTDFVAVFVRVLIIMLKNSADKEEKKKKRRN

SEQ ID NO: 19323 - protein, 173 aa, Zea mays subsp. mays
  peptide (1)..(173): Ceres Seq. ID no. 13599458
  misc_feature (1)..(161): Pfam Name: Pfam Description:  Uncharacterised protein family UPF0005
  misc_feature (1)..(171): NCBI GI NO: 17981376 NR Description: bax inhibitor-like protein [Brassica oleracea]
  misc_feature (1)..(173): NCBI GI NO: 14719274 NR Description: Bax inhibitor 1 [Brassica napus]
  misc_feature (1)..(173): NCBI GI NO: 15238017 NR Description: Bax inhibitor-1 (BI-1), putative
  misc_feature (1)..(173): NCBI GI NO: 21593125 NR Description: Bax inhibitor-1 like [Arabidopsis thaliana]
  misc_feature (1)..(173): NCBI GI NO: 14719276 NR Description: Bax inhibitor 1 [Nicotiana tabacum]
  misc_feature (1)..(172): NCBI GI NO: 13940165 NR Description: BAX inhibitor 1 [Hordeum vulgare subsp. vulgare]
  misc_feature (1)..(173): NCBI GI NO: 12229685 NR Description: Bax inhibitor-1 (BI-1) (OsBI-1)
  misc_feature (1)..(173): NCBI GI NO: 15236582 NR Description: Bax inhibitor-1 (BI1) family
  misc_feature (1)..(80): NCBI GI NO: 27526517 NR Description: putative BAX inhibitor 1
  misc_feature (12)..(156): NCBI GI NO: 7485137 NR Description: hypothetical protein - Arabidopsis thaliana
MIWLLSCPPYEQQKRLSLLFMSAVLEGASVGPLIKVAVDFDPSILITAFVGTAIAFICFSGAAMLARRREYLYLGGLLSSGLSMLMWLQFASSIFGGSASIFKFELYFGLLIFVGYMVVDTQEIIEKAHLGDMDYVKHALTLFTDFVAVFVRVLIIMLKNSADKEEKKKKRRN

SEQ ID NO: 19324 - protein, 153 aa, Zea mays subsp. mays
  peptide (1)..(153): Ceres Seq. ID no. 13599459
  misc_feature (1)..(141): Pfam Name: Pfam Description:  Uncharacterised protein family UPF0005
  misc_feature (1)..(151): NCBI GI NO: 17981376 NR Description: bax inhibitor-like protein [Brassica oleracea]
  misc_feature (1)..(153): NCBI GI NO: 14719274 NR Description: Bax inhibitor 1 [Brassica napus]
  misc_feature (1)..(153): NCBI GI NO: 15238017 NR Description: Bax inhibitor-1 (BI-1), putative
  misc_feature (1)..(153): NCBI GI NO: 21593125 NR Description: Bax inhibitor-1 like [Arabidopsis thaliana]
  misc_feature (1)..(153): NCBI GI NO: 14719276 NR Description: Bax inhibitor 1 [Nicotiana tabacum]
  misc_feature (1)..(152): NCBI GI NO: 13940165 NR Description: BAX inhibitor 1 [Hordeum vulgare subsp. vulgare]
  misc_feature (1)..(153): NCBI GI NO: 12229685 NR Description: Bax inhibitor-1 (BI-1) (OsBI-1)
  misc_feature (1)..(153): NCBI GI NO: 15236582 NR Description: Bax inhibitor-1 (BI1) family
  misc_feature (1)..(60): NCBI GI NO: 27526517 NR Description: putative BAX inhibitor 1
  misc_feature (1)..(136): NCBI GI NO: 7485137 NR Description: hypothetical protein - Arabidopsis thaliana
MSAVLEGASVGPLIKVAVDFDPSILITAFVGTAIAFICFSGAAMLARRREYLYLGGLLSSGLSMLMWLQFASSIFGGSASIFKFELYFGLLIFVGYMVVDTQEIIEKAHLGDMDYVKHALTLFTDFVAVFVRVLIIMLKNSADKEEKKKKRRN

SEQ ID NO: 19325 - DNA, 1355 bp, Zea mays subsp. mays
  misc_feature (1)..(1355): Ceres Seq. ID no. 13599254
agaacatcctaatcgaaaaagtgtatgctttggcctttaataatataaaaagaaaaaaagaaaaaaaaactggtatcgagagcgagaccgctgggaactaactaagccctaagattctcaactgccgattcgtcattgacacaaatctcagatcttatttggcgctaatggagttttccttacaagacgacgactttggcggcgatttctccgcttctaacgccaccagagctgcttcaggcagcaaaagaagtttcggtgatcttgaagacgatgaggatgacatcttcggatccaaaaaggttcgtacgaaagctgaggaagctgcccctggtgttgcaactggcatgatcctgtcactccgtgagagtcttcagaactgtaaagatgatcttgcttcatctcagaatgagcttgaatcagcaaaagcagagattctcaaatggaaatcagcgtttcagaacgagtctttcatacctgctggaaaatctcctgagcctagatttttgattgactacatccaaaatctaaaatcttctgagagatctttgaaagaacagttggaaattgcaaagagaaaagaagcttcgtacattgtacaatatgcaaaacgggaacaggaaatggcagagttgaagtctgctgttcgtgatttgaaatctcagctcaagccggcgtcaatgcaagcgaggaggctgttactggatccagctattcatgaagaattttcacgtttgaagaatctagttgaggaaaaagacaagaaggtcaaggaactacaggatagtcttacagcatttacttttacccctctgagtttaaagggtaagatgcttatggaaaagtgcaaaaccctgcaagaggaaaacgaggagattggacaccaagctgctgaaggaaagattcatgaactagcaatgaagctgtcgatgcagaagtctcagaacgcagaacttagaaagcaatttgaaggactgtacaaacacatggaagaactaactaacgatgttgaaagatcaaacgaaacggtgataatactgcaagataaattggaagagaaagacaaggagctagagagagtaaagaaagggatggaggttgttgtgtctgatgtggctgaaaagaaagatgatggtgaagataaagatccaaaatactcggctctccaaacgatgttcacttctatacaatctgagagataattgcaattgtattcattcacgctcttatattgttcaaagagttttctgataaatgcatgaaaacattagtttccattaggaggctttgtaccctttatttttccgatttttcattgatagcccgaaggcaaataagatgcacacaatccagcc

SEQ ID NO: 19326 - protein, 344 aa, Zea mays subsp. mays
  peptide (1)..(344): Ceres Seq. ID no. 15222549
  misc_feature (22)..(335): Pfam Name: Pfam Description:  Myosin tail
  misc_feature (1)..(329): NCBI GI NO: 15232439 NR Description: FKBP12 interacting protein (FIP37)
  misc_feature (87)..(324): NCBI GI NO: 38648992 NR Description: Unknown (protein for MGC:75954)
  misc_feature (90)..(307): NCBI GI NO: 10334526 NR Description: WTAP protein [Homo sapiens]
  misc_feature (90)..(307): NCBI GI NO: 21361159 NR Description: Wilms' tumour 1-associating protein isoform 1
  misc_feature (90)..(307): NCBI GI NO: 11322455 NR Description: WTAP protein [Mus musculus]
  misc_feature (79)..(307): NCBI GI NO: 33416867 NR Description: Unknown (protein for MGC:66202) [Danio rerio]
  misc_feature (105)..(307): NCBI GI NO: 24653459 NR Description: female lethal d CG6315-PA
  misc_feature (105)..(307): NCBI GI NO: 5420159 NR Description: FL(2)D protein [Drosophila melanogaster]
  misc_feature (128)..(307): NCBI GI NO: 5441313 NR Description: FL(2)D-s protein [Drosophila melanogaster]
  misc_feature (128)..(307): NCBI GI NO: 24653461 NR Description: female lethal d CG6315-PB
MEFSLQDDDFGGDFSASNATRAASGSKRSFGDLEDDEDDIFGSKKVRTKAEEAAPGVATGMILSLRESLQNCKDDLASSQNELESAKAEILKWKSAFQNESFIPAGKSPEPRFLIDYIQNLKSSERSLKEQLEIAKRKEASYIVQYAKREQEMAELKSAVRDLKSQLKPASMQARRLLLDPAIHEEFSRLKNLVEEKDKKVKELQDSLTAFTFTPLSLKGKMLMEKCKTLQEENEEIGHQAAEGKIHELAMKLSMQKSQNAELRKQFEGLYKHMEELTNDVERSNETVIILQDKLEEKDKELERVKKGMEVVVSDVAEKKDDGEDKDPKYSALQTMFTSIQSER

SEQ ID NO: 19327 - protein, 284 aa, Zea mays subsp. mays
  peptide (1)..(284): Ceres Seq. ID no. 15222550
  misc_feature (1)..(275): Pfam Name: Pfam Description:  Myosin tail
  misc_feature (1)..(269): NCBI GI NO: 15232439 NR Description: FKBP12 interacting protein (FIP37)
  misc_feature (27)..(264): NCBI GI NO: 38648992 NR Description: Unknown (protein for MGC:75954)
  misc_feature (30)..(247): NCBI GI NO: 10334526 NR Description: WTAP protein [Homo sapiens]
  misc_feature (30)..(247): NCBI GI NO: 21361159 NR Description: Wilms' tumour 1-associating protein isoform 1
  misc_feature (30)..(247): NCBI GI NO: 11322455 NR Description: WTAP protein [Mus musculus]
  misc_feature (19)..(247): NCBI GI NO: 33416867 NR Description: Unknown (protein for MGC:66202) [Danio rerio]
  misc_feature (45)..(247): NCBI GI NO: 24653459 NR Description: female lethal d CG6315-PA
  misc_feature (45)..(247): NCBI GI NO: 5420159 NR Description: FL(2)D protein [Drosophila melanogaster]
  misc_feature (68)..(247): NCBI GI NO: 5441313 NR Description: FL(2)D-s protein [Drosophila melanogaster]
  misc_feature (68)..(247): NCBI GI NO: 24653461 NR Description: female lethal d CG6315-PB
MILSLRESLQNCKDDLASSQNELESAKAEILKWKSAFQNESFIPAGKSPEPRFLIDYIQNLKSSERSLKEQLEIAKRKEASYIVQYAKREQEMAELKSAVRDLKSQLKPASMQARRLLLDPAIHEEFSRLKNLVEEKDKKVKELQDSLTAFTFTPLSLKGKMLMEKCKTLQEENEEIGHQAAEGKIHELAMKLSMQKSQNAELRKQFEGLYKHMEELTNDVERSNETVIILQDKLEEKDKELERVKKGMEVVVSDVAEKKDDGEDKDPKYSALQTMFTSIQSER

SEQ ID NO: 19328 - protein, 192 aa, Zea mays subsp. mays
  peptide (1)..(192): Ceres Seq. ID no. 15222551
  misc_feature (1)..(183): Pfam Name: Pfam Description:  Myosin tail
  misc_feature (1)..(177): NCBI GI NO: 15232439 NR Description: FKBP12 interacting protein (FIP37)
  misc_feature (1)..(172): NCBI GI NO: 38648992 NR Description: Unknown (protein for MGC:75954)
  misc_feature (1)..(155): NCBI GI NO: 10334526 NR Description: WTAP protein [Homo sapiens]
  misc_feature (1)..(155): NCBI GI NO: 11322455 NR Description: WTAP protein [Mus musculus]
  misc_feature (1)..(155): NCBI GI NO: 21361159 NR Description: Wilms' tumour 1-associating protein isoform 1
  misc_feature (1)..(155): NCBI GI NO: 33416867 NR Description: Unknown (protein for MGC:66202) [Danio rerio]
  misc_feature (1)..(155): NCBI GI NO: 24653459 NR Description: female lethal d CG6315-PA
  misc_feature (1)..(155): NCBI GI NO: 5420159 NR Description: FL(2)D protein [Drosophila melanogaster]
  misc_feature (1)..(155): NCBI GI NO: 5441313 NR Description: FL(2)D-s protein [Drosophila melanogaster]
  misc_feature (1)..(155): NCBI GI NO: 24653461 NR Description: female lethal d CG6315-PB
MAELKSAVRDLKSQLKPASMQARRLLLDPAIHEEFSRLKNLVEEKDKKVKELQDSLTAFTFTPLSLKGKMLMEKCKTLQEENEEIGHQAAEGKIHELAMKLSMQKSQNAELRKQFEGLYKHMEELTNDVERSNETVIILQDKLEEKDKELERVKKGMEVVVSDVAEKKDDGEDKDPKYSALQTMFTSIQSER

SEQ ID NO: 19329 - DNA, 1129 bp, Zea mays subsp. mays
  misc_feature (1)..(1129): Ceres Seq. ID no. 12635496
aaacacaaagactcaccagctccacgagcagaggagccgacacccaacccagcccggccaggagagagacaacatgcgttcatctcgggacctccggctcgccgtgctcctcctcctcttctcggcgtccgtcctcctcccggtagccagagcccagcaggaaaccgaggaggaggaggagttcagctactcgctggacgcggagaatgggcctgcgcactggggcgacatcaaggaggagtggtccgcatgcggcaagggcaacatgcagtcgcccatcgacctcgccagcccgcgcgtctccctcgtgcgcggcctcggctacctcaaccactcctaccaccctgccaacgccaccatcgtcaaccgcggccacgacatcatgctcaagttcgagggcgacgccgggagcgtctccatcggcggcacgccctacttcctccggcagctgcactggcactcccccaccgagcacagcgtcaacggccgccggtacgacatggagctccacatgttccacgagagcgctcagggcaaggccgccgtgatcggcgtcttctatgagattggtgcccatgacgccttcctgcacaagctggagccatacctggagatgatagcggatcgcaaggacagagaggagaagatgggcatgatggatcccaggggcgccagaggaaaggccagcgtgtactatcgctacgtgggctccctcaccaccccaccctgcgcggaaggggtcatctggaccatcgtcaagagggtgcgcactgtgtcgaggcaccagctggagcttctcagggaggccgttcacgacgacatggagaagaacgcgaggccccgtcaggaggtgaacagcagagatatcagcatgttccgaccttttgagcaaaatagacattgattactagtgttgatcctctggctaattagtctggtgcttcagctattttttatgtacatggttatatcatttctgtacgcagtagtgattttccatccactttgataacttgtatacggttactgaataataatggaacacgaccagttcatgtccatgcatatcttcatgtttccatgttgggatctgccagatcgtcgaaatgaaaaaaactggcaaggattt

SEQ ID NO: 19330 - protein, 300 aa, Zea mays subsp. mays
  peptide (1)..(300): Ceres Seq. ID no. 12635497
  misc_feature (70)..(292): Pfam Name: Pfam Description:  Eukaryotic-type carbonic anhydrase
  misc_feature (32)..(294): NCBI GI NO: 37806288 NR Description: putative dioscorin
  misc_feature (34)..(294): NCBI GI NO: 34904986 NR Description: putative carbonic anhydrase precursor
  misc_feature (24)..(294): NCBI GI NO: 15223122 NR Description: storage protein, putative; protein id: At1g08080.1
  misc_feature (56)..(294): NCBI GI NO: 25291473 NR Description: probable carbonic anhydrase
  misc_feature (52)..(294): NCBI GI NO: 15223097 NR Description: carbonic anhydrase, putative; protein id:At1g08065
  misc_feature (24)..(294): NCBI GI NO: 25407021 NR Description: protein T6D22.16 [imported] - Arabidopsis thaliana
  misc_feature (25)..(295): NCBI GI NO: 29468280 NR Description: nectarin III
  misc_feature (48)..(294): NCBI GI NO: 15233471 NR Description: carbonic anhydrase -like protein
  misc_feature (56)..(257): NCBI GI NO: 30683808 NR Description: carbonic anhydrase -related [Arabidopsis thaliana]
  misc_feature (25)..(292): NCBI GI NO: 1364059 NR Description: dioscorin class A precursor - Dioscorea cayenensis
NTKTHQLHEQRSRHPTQPGQERDNMRSSRDLRLAVLLLLFSASVLLPVARAQQETEEEEEFSYSLDAENGPAHWGDIKEEWSACGKGNMQSPIDLASPRVSLVRGLGYLNHSYHPANATIVNRGHDIMLKFEGDAGSVSIGGTPYFLRQLHWHSPTEHSVNGRRYDMELHMFHESAQGKAAVIGVFYEIGAHDAFLHKLEPYLEMIADRKDREEKMGMMDPRGARGKASVYYRYVGSLTTPPCAEGVIWTIVKRVRTVSRHQLELLREAVHDDMEKNARPRQEVNSRDISMFRPFEQNRH

SEQ ID NO: 19331 - protein, 276 aa, Zea mays subsp. mays
  peptide (1)..(276): Ceres Seq. ID no. 12635498
  misc_feature (46)..(268): Pfam Name: Pfam Description:  Eukaryotic-type carbonic anhydrase
  misc_feature (8)..(270): NCBI GI NO: 37806288 NR Description: putative dioscorin
  misc_feature (10)..(270): NCBI GI NO: 34904986 NR Description: putative carbonic anhydrase precursor
  misc_feature (1)..(270): NCBI GI NO: 15223122 NR Description: storage protein, putative; protein id: At1g08080.1
  misc_feature (32)..(270): NCBI GI NO: 25291473 NR Description: probable carbonic anhydrase
  misc_feature (28)..(270): NCBI GI NO: 15223097 NR Description: carbonic anhydrase, putative; protein id:At1g08065
  misc_feature (1)..(270): NCBI GI NO: 25407021 NR Description: protein T6D22.16 [imported] - Arabidopsis thaliana
  misc_feature (1)..(271): NCBI GI NO: 29468280 NR Description: nectarin III
  misc_feature (24)..(270): NCBI GI NO: 15233471 NR Description: carbonic anhydrase -like protein
  misc_feature (32)..(233): NCBI GI NO: 30683808 NR Description: carbonic anhydrase -related [Arabidopsis thaliana]
  misc_feature (1)..(268): NCBI GI NO: 1364059 NR Description: dioscorin class A precursor - Dioscorea cayenensis
MRSSRDLRLAVLLLLFSASVLLPVARAQQETEEEEEFSYSLDAENGPAHWGDIKEEWSACGKGNMQSPIDLASPRVSLVRGLGYLNHSYHPANATIVNRGHDIMLKFEGDAGSVSIGGTPYFLRQLHWHSPTEHSVNGRRYDMELHMFHESAQGKAAVIGVFYEIGAHDAFLHKLEPYLEMIADRKDREEKMGMMDPRGARGKASVYYRYVGSLTTPPCAEGVIWTIVKRVRTVSRHQLELLREAVHDDMEKNARPRQEVNSRDISMFRPFEQNRH

SEQ ID NO: 19332 - protein, 212 aa, Zea mays subsp. mays
  peptide (1)..(212): Ceres Seq. ID no. 12635499
  misc_feature (1)..(204): Pfam Name: Pfam Description:  Eukaryotic-type carbonic anhydrase
  misc_feature (1)..(206): NCBI GI NO: 37806288 NR Description: putative dioscorin
  misc_feature (1)..(206): NCBI GI NO: 34904986 NR Description: putative carbonic anhydrase precursor
  misc_feature (1)..(206): NCBI GI NO: 15223122 NR Description: storage protein, putative; protein id: At1g08080.1
  misc_feature (1)..(206): NCBI GI NO: 25291473 NR Description: probable carbonic anhydrase
  misc_feature (1)..(206): NCBI GI NO: 15223097 NR Description: carbonic anhydrase, putative; protein id:At1g08065
  misc_feature (1)..(206): NCBI GI NO: 25407021 NR Description: protein T6D22.16 [imported] - Arabidopsis thaliana
  misc_feature (1)..(207): NCBI GI NO: 29468280 NR Description: nectarin III
  misc_feature (1)..(206): NCBI GI NO: 15233471 NR Description: carbonic anhydrase -like protein
  misc_feature (1)..(169): NCBI GI NO: 30683808 NR Description: carbonic anhydrase -related [Arabidopsis thaliana]
  misc_feature (1)..(204): NCBI GI NO: 1364059 NR Description: dioscorin class A precursor - Dioscorea cayenensis
MQSPIDLASPRVSLVRGLGYLNHSYHPANATIVNRGHDIMLKFEGDAGSVSIGGTPYFLRQLHWHSPTEHSVNGRRYDMELHMFHESAQGKAAVIGVFYEIGAHDAFLHKLEPYLEMIADRKDREEKMGMMDPRGARGKASVYYRYVGSLTTPPCAEGVIWTIVKRVRTVSRHQLELLREAVHDDMEKNARPRQEVNSRDISMFRPFEQNRH

SEQ ID NO: 19333 - DNA, 995 bp, Zea mays subsp. mays
  misc_feature (1)..(995): Ceres Seq. ID no. 12635077
acaacagcaaagcatccagcatcgccaacttccaaaatcaacctacgttgtacacttttcgagccctatccagtttttgtttctatacacttcttgcgaagacatggcttctcgtcaggatcaggctagctaccacgccggggaggccaaggcccgcgccgaggagaagacggggtacgtcgtgggcgcggcgcaggacaaggcgagggaggccaaggacacggcgtccgacgccgcgggccgcgccatgggcaggggcggcgacgccaaggaggcgaccaaggagaaggcgtacgaggccaaggacgcggcgtcggacgccactggccgcgccatggacaagggccgcggcgccgcggaggccaccaaggagaagggctacgaggccaaggacaacgcggccgacaccgcgcagcagaccgggagctacatcgcccagacggccgaggccgccaagcagaaggcggccggcgccgcccagtacaccatcgacacggcccgtgccggcaccgagcagaccgggagctacatcgggcagacggccgaggccgccaagcagaaggccggcgccgcagcgcagtatgccatggacaccgccgtggccggcaaggacaagaccggcagcctcctcgtacaggcaggggagacggtgaagggcgcggcggtgggggcgaaggacgcggtgatgaacacgatcggaatgggcggcggcaccaacggcagcaccgacgtcaccgccaaggacaccagcacgtacaagcccgggaccagggattactaatcgtgccattgtcaaggcgaccctgatgtatctttctaagctgtagtttaatttctacgtggccatctgccgccactttggtttctaaattagctcacctcgtggaggttgtaacttgtcaggacctagacaaatgcccaatgaggcatcctgactcctccctcccatacttgtttccgtgtttcagaatctaataaagttggaatcctagtgc

SEQ ID NO: 19334 - protein, 259 aa, Zea mays subsp. mays
  peptide (1)..(259): Ceres Seq. ID no. 12635078
  misc_feature (154)..(226): Pfam Name: Pfam Description:  Late embryogenesis abundant protein
  misc_feature (35)..(259): NCBI GI NO: 1076757 NR Description: WSI18 protein - rice
  misc_feature (35)..(259): NCBI GI NO: 34910364 NR Description: WSI18 protein
  misc_feature (35)..(259): NCBI GI NO: 7387829 NR Description: Late embryogenesis abundant protein, group 3 (LEA)
  misc_feature (35)..(251): NCBI GI NO: 25989705 NR Description: LEA1 protein [Triticum aestivum]
  misc_feature (35)..(251): NCBI GI NO: 7387828 NR Description: Late embryogenesis abundant protein, group 3
  misc_feature (35)..(251): NCBI GI NO: 126081 NR Description: ABA-inducible protein PHV A1
  misc_feature (35)..(251): NCBI GI NO: 25989707 NR Description: LEA3 protein [Triticum aestivum]
  misc_feature (35)..(208): NCBI GI NO: 7489493 NR Description: LEA protein - rice
  misc_feature (35)..(208): NCBI GI NO: 4105441 NR Description: group 3 LEA protein [Oryza sativa]
  misc_feature (35)..(208): NCBI GI NO: 7489569 NR Description: protein LEA type 1 - rice
QQQSIQHRQLPKSTYVVHFSSPIQFLFLYTSCEDMASRQDQASYHAGEAKARAEEKTGYVVGAAQDKAREAKDTASDAAGRAMGRGGDAKEATKEKAYEAKDAASDATGRAMDKGRGAAEATKEKGYEAKDNAADTAQQTGSYIAQTAEAAKQKAAGAAQYTIDTARAGTEQTGSYIGQTAEAAKQKAGAAAQYAMDTAVAGKDKTGSLLVQAGETVKGAAVGAKDAVMNTIGMGGGTNGSTDVTAKDTSTYKPGTRDY

SEQ ID NO: 19335 - protein, 225 aa, Zea mays subsp. mays
  peptide (1)..(225): Ceres Seq. ID no. 12635079
  misc_feature (120)..(192): Pfam Name: Pfam Description:  Late embryogenesis abundant protein
  misc_feature (1)..(225): NCBI GI NO: 1076757 NR Description: WSI18 protein - rice
  misc_feature (1)..(225): NCBI GI NO: 34910364 NR Description: WSI18 protein
  misc_feature (1)..(225): NCBI GI NO: 7387829 NR Description: Late embryogenesis abundant protein, group 3 (LEA)
  misc_feature (1)..(217): NCBI GI NO: 25989705 NR Description: LEA1 protein [Triticum aestivum]
  misc_feature (1)..(217): NCBI GI NO: 7387828 NR Description: Late embryogenesis abundant protein, group 3
  misc_feature (1)..(217): NCBI GI NO: 126081 NR Description: ABA-inducible protein PHV A1
  misc_feature (1)..(217): NCBI GI NO: 25989707 NR Description: LEA3 protein [Triticum aestivum]
  misc_feature (1)..(174): NCBI GI NO: 7489493 NR Description: LEA protein - rice
  misc_feature (1)..(174): NCBI GI NO: 4105441 NR Description: group 3 LEA protein [Oryza sativa]
  misc_feature (1)..(174): NCBI GI NO: 7489569 NR Description: protein LEA type 1 - rice
MASRQDQASYHAGEAKARAEEKTGYVVGAAQDKAREAKDTASDAAGRAMGRGGDAKEATKEKAYEAKDAASDATGRAMDKGRGAAEATKEKGYEAKDNAADTAQQTGSYIAQTAEAAKQKAAGAAQYTIDTARAGTEQTGSYIGQTAEAAKQKAGAAAQYAMDTAVAGKDKTGSLLVQAGETVKGAAVGAKDAVMNTIGMGGGTNGSTDVTAKDTSTYKPGTRDY

SEQ ID NO: 19336 - protein, 216 aa, Zea mays subsp. mays
  peptide (1)..(216): Ceres Seq. ID no. 12635080
  misc_feature (46)..(199): Pfam Name: Pfam Description:  Extensin-like region
  misc_feature (47)..(216): NCBI GI NO: 29247944 NR Description: GLP_26_54603_52153 [Giardia lamblia ATCC 50803]
  misc_feature (43)..(206): NCBI GI NO: 25989119 NR Description: unknown [Streptomyces aureofaciens]
  misc_feature (69)..(209): NCBI GI NO: 11095327 NR Description: unknown [Paracoccus pantotrophus]
  misc_feature (55)..(216): NCBI GI NO: 7949115 NR Description: Ser/Arg-related nuclear matrix protein
  misc_feature (49)..(216): NCBI GI NO: 228938 NR Description: Hyp-rich glycoprotein
  misc_feature (63)..(216): NCBI GI NO: 5032119 NR Description: Ser/Arg-related nuclear matrix protein
  misc_feature (63)..(216): NCBI GI NO: 23274133 NR Description: Similar to serine/arginine repetitive matrix 1
  misc_feature (42)..(216): NCBI GI NO: 25143299 NR Description: pre-mRNA splicing SR protein related RSR-1 (68
  misc_feature (39)..(216): NCBI GI NO: 5821145 NR Description: RNA binding protein [Homo sapiens]
  misc_feature (46)..(193): NCBI GI NO: 7507924 NR Description: hypothetical protein T18H9
NSKASSIANFQNQPTLYTFRALSSFCFYTLLAKTWLLVRIRLATTPGRPRPAPRRRRGTSWARRRTRRGRPRTRRPTPRAAPWAGAATPRRRPRRRRTRPRTRRRTPLAAPWTRAAAPRRPPRRRATRPRTTRPTPRSRPGATSPRRPRPPSRRRPAPPSTPSTRPVPAPSRPGATSGRRPRPPSRRPAPQRSMPWTPPWPARTRPAASSYRQGRR

SEQ ID NO: 19337 - DNA, 761 bp, Zea mays subsp. mays
  misc_feature (1)..(761): Ceres Seq. ID no. 12635509
aggtagaaagcgaaactctctctccagcttcagaggcttcagctatggcggccgagaatccttcaaacggtgtagacgtcgacacgagtctcgcttccgattcaaacgataaccgcaaagccagtgatttgaccaatcatgactcttccatggcattgacagtcccttccaccgccgtttgtctcggccgtttcgccggagatgcagcaggcggcgccgtcatggggtctatattcggctatggttctggattgtttaagaaaaaagggtttaagggatcatttgcggatgcgggtcagtctgcaaagaattttgcgattttatctggagtgcacagtttggttgtttgccttctgaagaaactgcgagggaaagatgatgccattaacgttggaattgctggatgctgcactggccttgctcttagttacccaggtgcaccacaagcaatgctacaaagctgtgtcacttttggtgccttttctttcatcctcgaaggactcaacaagaggcaaacagctttggctcactctgtctcctcgagacatgatcaaaccagaagtctgaaagatgatttaccactctccttggctctcccaatccatgaagagatcaaaggagctttctcatccttctgcaaatctttaacaaaacccaagaagctcgcgttccctagctcacgttgatcgaagttttttttgtatcctactacttccttttgtagatgttaaaagaacagatgaaaacaagaatcatgtttc

SEQ ID NO: 19338 - protein, 227 aa, Zea mays subsp. mays
  peptide (1)..(227): Ceres Seq. ID no. 12635510
  misc_feature (53)..(171): Pfam Name: Pfam Description:  Tim17/Tim22/Tim23 family
  misc_feature (15)..(227): NCBI GI NO: 15240525 NR Description: putative protein; protein id: At5g55510.1
  misc_feature (15)..(227): NCBI GI NO: 9758183 NR Description: contains similarity to unknownprotein~gene_id:MTE17
  misc_feature (15)..(220): NCBI GI NO: 18416798 NR Description: putative protein; protein id: At4g26670
  misc_feature (15)..(220): NCBI GI NO: 7485327 NR Description: hypothetical protein F10M23
  misc_feature (59)..(219): NCBI GI NO: 37533490 NR Description: unknown protein
  misc_feature (58)..(219): NCBI GI NO: 24414272 NR Description: Unknown protein
  misc_feature (2)..(172): NCBI GI NO: 18398755 NR Description: expressed protein; protein id: At3g10110
  misc_feature (87)..(165): NCBI GI NO: 40740491 NR Description: hypothetical protein AN8059.2
  misc_feature (48)..(165): NCBI GI NO: 13447155 NR Description: TIM22 [Neurospora crassa]
VESETLSPASEASAMAAENPSNGVDVDTSLASDSNDNRKASDLTNHDSSMALTVPSTAVCLGRFAGDAAGGAVMGSIFGYGSGLFKKKGFKGSFADAGQSAKNFAILSGVHSLVVCLLKKLRGKDDAINVGIAGCCTGLALSYPGAPQAMLQSCVTFGAFSFILEGLNKRQTALAHSVSSRHDQTRSLKDDLPLSLALPIHEEIKGAFSSFCKSLTKPKKLAFPSSR

SEQ ID NO: 19339 - protein, 213 aa, Zea mays subsp. mays
  peptide (1)..(213): Ceres Seq. ID no. 12635511
  misc_feature (39)..(157): Pfam Name: Pfam Description:  Tim17/Tim22/Tim23 family
  misc_feature (1)..(213): NCBI GI NO: 15240525 NR Description: putative protein; protein id: At5g55510.1
  misc_feature (1)..(213): NCBI GI NO: 9758183 NR Description: contains similarity to unknownprotein~gene_id:MTE17
  misc_feature (1)..(206): NCBI GI NO: 18416798 NR Description: putative protein; protein id: At4g26670
  misc_feature (1)..(206): NCBI GI NO: 7485327 NR Description: hypothetical protein F10M23
  misc_feature (45)..(205): NCBI GI NO: 37533490 NR Description: unknown protein
  misc_feature (44)..(205): NCBI GI NO: 24414272 NR Description: Unknown protein
  misc_feature (1)..(158): NCBI GI NO: 18398755 NR Description: expressed protein; protein id: At3g10110
  misc_feature (73)..(151): NCBI GI NO: 40740491 NR Description: hypothetical protein AN8059.2
  misc_feature (34)..(151): NCBI GI NO: 13447155 NR Description: TIM22 [Neurospora crassa]
MAAENPSNGVDVDTSLASDSNDNRKASDLTNHDSSMALTVPSTAVCLGRFAGDAAGGAVMGSIFGYGSGLFKKKGFKGSFADAGQSAKNFAILSGVHSLVVCLLKKLRGKDDAINVGIAGCCTGLALSYPGAPQAMLQSCVTFGAFSFILEGLNKRQTALAHSVSSRHDQTRSLKDDLPLSLALPIHEEIKGAFSSFCKSLTKPKKLAFPSSR

SEQ ID NO: 19340 - protein, 178 aa, Zea mays subsp. mays
  peptide (1)..(178): Ceres Seq. ID no. 12635512
  misc_feature (4)..(122): Pfam Name: Pfam Description:  Tim17/Tim22/Tim23 family
  misc_feature (1)..(178): NCBI GI NO: 15240525 NR Description: putative protein; protein id: At5g55510.1
  misc_feature (1)..(178): NCBI GI NO: 9758183 NR Description: contains similarity to unknownprotein~gene_id:MTE17
  misc_feature (1)..(171): NCBI GI NO: 18416798 NR Description: putative protein; protein id: At4g26670
  misc_feature (1)..(171): NCBI GI NO: 7485327 NR Description: hypothetical protein F10M23
  misc_feature (10)..(170): NCBI GI NO: 37533490 NR Description: unknown protein
  misc_feature (9)..(170): NCBI GI NO: 24414272 NR Description: Unknown protein
  misc_feature (1)..(123): NCBI GI NO: 18398755 NR Description: expressed protein; protein id: At3g10110
  misc_feature (38)..(116): NCBI GI NO: 40740491 NR Description: hypothetical protein AN8059.2
  misc_feature (1)..(116): NCBI GI NO: 13447155 NR Description: TIM22 [Neurospora crassa]
MALTVPSTAVCLGRFAGDAAGGAVMGSIFGYGSGLFKKKGFKGSFADAGQSAKNFAILSGVHSLVVCLLKKLRGKDDAINVGIAGCCTGLALSYPGAPQAMLQSCVTFGAFSFILEGLNKRQTALAHSVSSRHDQTRSLKDDLPLSLALPIHEEIKGAFSSFCKSLTKPKKLAFPSSR

SEQ ID NO: 19341 - DNA, 976 bp, Zea mays subsp. mays
  misc_feature (1)..(976): Ceres Seq. ID no. 12635513
aacactaccactttgagtcttgaagaaggtcaacaacttcgagaataatggcttctctttgtgcttcttctgccatcgccgctatttcttctccaggtttcttgggagggaagaaactgaggctgaacaagaagttgaatgttccaactgtttctaggtccggtacgtcggtgcgcgctgtcgcagcggatccagatagaccaatttggttccctggaagcacacctccagagtggcttgacggtagcctccctggtgacttcgggtttgatcctcttggtctttcatctgacccggatagtctaaagtggaacgcacaagcagagctagtccactgccggtgggcaatgctcggcgccgccgggatttttatcccggagtttctaaccaagataggaatcctcaacacgccgtcgtggtacacggcgggagagcaagagtatttcaccgacaaaaccacactcttcgtcgttgagctcatcttaataggatgggccgagggacgtagatgggctgatatcattaagccaggtagtgtcaacactgacccaatcttcccaaacaacaaactgacggggacagacgttggatacccgggtgggttatggtttgacccgttgggttggggatccggtagcccggctaaaatcaaggagctgaggactaaggagataaaaaatggaaggttggctatgttggcagtgatgggtgcatggttccaacacatatacactgggaatggtcctattgataacctttttgcacatcttgctgatcctggccacgccactatcttcgctgctttcacacccaagtgagacgtcaaaaacgtcgaaaaaggatgggcttgtgtgatcatgtttgtacaaatattgtttttgaacttaaaactattatgtacttatataaactgtggtcgaatgcaaattagagtaacactgctcttttcttgactaaatgcgcatatctttctttt

SEQ ID NO: 19342 - protein, 256 aa, Zea mays subsp. mays
  peptide (1)..(256): Ceres Seq. ID no. 12635514
  misc_feature (59)..(227): Pfam Name: Pfam Description:  Chlorophyll A-B binding protein
  misc_feature (2)..(256): NCBI GI NO: 15233120 NR Description: light-harvesting chlorophyll a/b binding protein
  misc_feature (2)..(256): NCBI GI NO: 11277627 NR Description: PS I antenna protein Lhca2
  misc_feature (1)..(256): NCBI GI NO: 115766 NR Description: Chlorophyll A-B binding protein
  misc_feature (1)..(256): NCBI GI NO: 115765 NR Description: Chlorophyll A-B binding protein 7
  misc_feature (1)..(256): NCBI GI NO: 2129879 NR Description: chlorophyll a/b-binding protein type II precursor
  misc_feature (1)..(256): NCBI GI NO: 34393511 NR Description: putative photosystem I antenna protein
  misc_feature (1)..(256): NCBI GI NO: 1076724 NR Description: LHCI-680, photosystem I antenna protein - barley
  misc_feature (1)..(256): NCBI GI NO: 7443233 NR Description: chlorophyll a/b-binding protein type II
  misc_feature (1)..(256): NCBI GI NO: 18376587 NR Description: putative chlorophyll A-B binding protein of LHCItype II precursor
  misc_feature (1)..(256): NCBI GI NO: 99486 NR Description: chlorophyll a/b-binding protein
MASLCASSAIAAISSPGFLGGKKLRLNKKLNVPTVSRSGTSVRAVAADPDRPIWFPGSTPPEWLDGSLPGDFGFDPLGLSSDPDSLKWNAQAELVHCRWAMLGAAGIFIPEFLTKIGILNTPSWYTAGEQEYFTDKTTLFVVELILIGWAEGRRWADIIKPGSVNTDPIFPNNKLTGTDVGYPGGLWFDPLGWGSGSPAKIKELRTKEIKNGRLAMLAVMGAWFQHIYTGNGPIDNLFAHLADPGHATIFAAFTPK

SEQ ID NO: 19343 - protein, 156 aa, Zea mays subsp. mays
  peptide (1)..(156): Ceres Seq. ID no. 12635515
  misc_feature (1)..(127): Pfam Name: Pfam Description:  Chlorophyll A-B binding protein
  misc_feature (1)..(156): NCBI GI NO: 15233120 NR Description: light-harvesting chlorophyll a/b binding protein
  misc_feature (1)..(156): NCBI GI NO: 11277627 NR Description: PS I antenna protein Lhca2
  misc_feature (1)..(156): NCBI GI NO: 115766 NR Description: Chlorophyll A-B binding protein
  misc_feature (1)..(156): NCBI GI NO: 115765 NR Description: Chlorophyll A-B binding protein 7
  misc_feature (1)..(156): NCBI GI NO: 2129879 NR Description: chlorophyll a/b-binding protein type II precursor
  misc_feature (1)..(156): NCBI GI NO: 34393511 NR Description: putative photosystem I antenna protein
  misc_feature (1)..(156): NCBI GI NO: 1076724 NR Description: LHCI-680, photosystem I antenna protein - barley
  misc_feature (1)..(156): NCBI GI NO: 7443233 NR Description: chlorophyll a/b-binding protein type II
  misc_feature (1)..(156): NCBI GI NO: 18376587 NR Description: putative chlorophyll A-B binding protein of LHCItype II precursor
  misc_feature (1)..(156): NCBI GI NO: 99486 NR Description: chlorophyll a/b-binding protein
MLGAAGIFIPEFLTKIGILNTPSWYTAGEQEYFTDKTTLFVVELILIGWAEGRRWADIIKPGSVNTDPIFPNNKLTGTDVGYPGGLWFDPLGWGSGSPAKIKELRTKEIKNGRLAMLAVMGAWFQHIYTGNGPIDNLFAHLADPGHATIFAAFTPK

SEQ ID NO: 19344 - DNA, 678 bp, Zea mays subsp. mays
  misc_feature (1)..(678): Ceres Seq. ID no. 12635516
aagctaatcttctcacaatctctctccaaaaagacctgaaaaaaaacatcacaagtttgatcaagaaaaccaagaaagatgccgaaagacaggaagattggaatcgccatggacttctcggagagcagcaagaacgcactgagatgggctatcgacaacttagctgataaaggagacacgttttacatcatccatgcgttaccaacatctgaagctggaccacgtaactccctctggctcaaatccggttctcctctcataccattggtggagtttagggaaccagagactatggagaaatacggtgtccaaatcgatataccagttcttgatatgctcgacactggttcgaggcagaaagagattcatgtagtgacgaaactatactggggagatgcaagagagaagttggttgatgctgttaaatctctcaaacttgattctattgtcatgggaagcagaggactcagtgcccttcaaaggataataatgggaagcgtgagcagctttgtgattcaacacgccccttgcccggtcaccgttgtcaaggactaaataaaaggctgttatctcatgtgttcgatcaaaaataattatcgcaatttatgcctttaataaaaagaacttctttctttcttggttgtatttgtatttgaaatcataaatatattaagttcc

SEQ ID NO: 19345 - protein, 158 aa, Zea mays subsp. mays
  peptide (1)..(158): Ceres Seq. ID no. 12635517
  misc_feature (4)..(157): Pfam Name: Pfam Description:  Universal stress protein family
  misc_feature (1)..(158): NCBI GI NO: 30693971 NR Description: expressed protein [Arabidopsis thaliana]
  misc_feature (3)..(158): NCBI GI NO: 11602751 NR Description: ENOD18 protein [Vicia faba]
  misc_feature (1)..(158): NCBI GI NO: 11602747 NR Description: early nodulin ENOD18 [Vicia faba]
  misc_feature (1)..(158): NCBI GI NO: 11602749 NR Description: early nodulin ENOD18 [Vicia faba]
  misc_feature (1)..(157): NCBI GI NO: 30678807 NR Description: expressed protein [Arabidopsis thaliana]
  misc_feature (4)..(157): NCBI GI NO: 20160561 NR Description: P0414E03.3
  misc_feature (1)..(98): NCBI GI NO: 21555070 NR Description: unknown [Arabidopsis thaliana]
  misc_feature (1)..(135): NCBI GI NO: 18396497 NR Description: expressed protein; protein id: At3g03270
  misc_feature (5)..(157): NCBI GI NO: 18401345 NR Description: expressed protein; protein id: At3g17020
  misc_feature (5)..(158): NCBI GI NO: 15528707 NR Description: P0583G08.8
MPKDRKIGIAMDFSESSKNALRWAIDNLADKGDTFYIIHALPTSEAGPRNSLWLKSGSPLIPLVEFREPETMEKYGVQIDIPVLDMLDTGSRQKEIHVVTKLYWGDAREKLVDAVKSLKLDSIVMGSRGLSALQRIIMGSVSSFVIQHAPCPVTVVKD

SEQ ID NO: 19346 - protein, 148 aa, Zea mays subsp. mays
  peptide (1)..(148): Ceres Seq. ID no. 12635518
  misc_feature (1)..(147): Pfam Name: Pfam Description:  Universal stress protein family
  misc_feature (1)..(148): NCBI GI NO: 30693971 NR Description: expressed protein [Arabidopsis thaliana]
  misc_feature (1)..(148): NCBI GI NO: 11602751 NR Description: ENOD18 protein [Vicia faba]
  misc_feature (1)..(148): NCBI GI NO: 11602747 NR Description: early nodulin ENOD18 [Vicia faba]
  misc_feature (1)..(148): NCBI GI NO: 11602749 NR Description: early nodulin ENOD18 [Vicia faba]
  misc_feature (1)..(147): NCBI GI NO: 30678807 NR Description: expressed protein [Arabidopsis thaliana]
  misc_feature (1)..(147): NCBI GI NO: 20160561 NR Description: P0414E03.3
  misc_feature (1)..(88): NCBI GI NO: 21555070 NR Description: unknown [Arabidopsis thaliana]
  misc_feature (1)..(125): NCBI GI NO: 18396497 NR Description: expressed protein; protein id: At3g03270
  misc_feature (1)..(147): NCBI GI NO: 18401345 NR Description: expressed protein; protein id: At3g17020
  misc_feature (1)..(148): NCBI GI NO: 15528707 NR Description: P0583G08.8
MDFSESSKNALRWAIDNLADKGDTFYIIHALPTSEAGPRNSLWLKSGSPLIPLVEFREPETMEKYGVQIDIPVLDMLDTGSRQKEIHVVTKLYWGDAREKLVDAVKSLKLDSIVMGSRGLSALQRIIMGSVSSFVIQHAPCPVTVVKD

SEQ ID NO: 19347 - protein, 87 aa, Zea mays subsp. mays
  peptide (1)..(87): Ceres Seq. ID no. 12635519
  misc_feature (1)..(86): Pfam Name: Pfam Description:  Universal stress protein family
  misc_feature (1)..(87): NCBI GI NO: 30693971 NR Description: expressed protein [Arabidopsis thaliana]
  misc_feature (1)..(87): NCBI GI NO: 11602751 NR Description: ENOD18 protein [Vicia faba]
  misc_feature (1)..(87): NCBI GI NO: 11602747 NR Description: early nodulin ENOD18 [Vicia faba]
  misc_feature (1)..(87): NCBI GI NO: 11602749 NR Description: early nodulin ENOD18 [Vicia faba]
  misc_feature (1)..(86): NCBI GI NO: 30678807 NR Description: expressed protein [Arabidopsis thaliana]
  misc_feature (1)..(86): NCBI GI NO: 20160561 NR Description: P0414E03.3
  misc_feature (1)..(27): NCBI GI NO: 21555070 NR Description: unknown [Arabidopsis thaliana]
  misc_feature (1)..(64): NCBI GI NO: 18396497 NR Description: expressed protein; protein id: At3g03270
  misc_feature (1)..(86): NCBI GI NO: 18401345 NR Description: expressed protein; protein id: At3g17020
  misc_feature (1)..(87): NCBI GI NO: 15528707 NR Description: P0583G08.8
MEKYGVQIDIPVLDMLDTGSRQKEIHVVTKLYWGDAREKLVDAVKSLKLDSIVMGSRGLSALQRIIMGSVSSFVIQHAPCPVTVVKD

SEQ ID NO: 19348 - DNA, 1078 bp, Zea mays subsp. mays
  misc_feature (1)..(1078): Ceres Seq. ID no. 14301982
gctgtcttgtccctccttatccctatctctctcccactcctcttcctctgcaatggcttcttcaatagtaacctcaagcttcaagcccttagccatggcagactcttcctcttccaccatcttctcccacccttcactctccaccatctcccctcgctgctccttcctcactaacctcccgctctcgttctcccgcgtctccctatctctcaaagccaaaaccaacctaaagaagtcgcctttcgtctccttcgttgctcagacttctgattgggagggggaagaaggtggggacgtgagcgcttccgtcgccgttgaggagaacgagccagaggcgacgttttccgaagaggaaggagatgtgagcgaaggaggtgacttcccggagccaccggaagaagcgaagctcttcgtcggaaacttggcgtacgacgttgatagccaagccttggctatgctctttgagcaagctggtaccgttgaaatcgctgaggttatctacaacagagagacagaccagagtcgtgggtttggatttgtgacaatgagtacggtggaggaagccgagactgctgttgagaagttcaaccgttatgatttgaacggacggcttctgacagtaaacaaggcagcaccaagaggatcacgtccagaacgccaacctcgggtatacgaacctgcattcagagtctatgttggaaacctaccatgggatgtggacaacggtcgtctagaacaagttttcagcgagcatggcaaagttgtggaagctcgtgtggtctacgaccgtgagacaggtcgttcacgtgggttcggttttgtgacaatgtctaacgagactgaactcaatgacgctatcgctgctcttgatggacagaacatggaaggtagagcaatcagagtgaatgtcgcggaggaacgtccaaggcgtggattttaaggattgagattttctcttgtgcctctctttatctctttccattttgtttagacgagattcttacactctttggtgatttttttttttgttctgtctgaactcttgcttcttctatagcacatcattgccttcagtagc

SEQ ID NO: 19349 - protein, 312 aa, Zea mays subsp. mays
  peptide (1)..(312): Ceres Seq. ID no. 14301983
  misc_feature (136)..(207): Pfam Name: a.k.a. RRM, RBD, or RNP domain Pfam Description: RNA recognition motif.
  misc_feature (7)..(312): NCBI GI NO: 1076305 NR Description: RNA-binding protein cp31 precursor
  misc_feature (17)..(312): NCBI GI NO: 681908 NR Description: cp31 [Arabidopsis thaliana]
  misc_feature (18)..(310): NCBI GI NO: 15240641 NR Description: 31 kDa ribonucleoprotein, chloroplast
  misc_feature (2)..(312): NCBI GI NO: 475719 NR Description: RNA-binding protein 2
  misc_feature (2)..(312): NCBI GI NO: 15233980 NR Description: 31 kDa ribonucleoprotein, chloroplast
  misc_feature (2)..(312): NCBI GI NO: 15294254 NR Description: AT4g24770/F22K18_30 [Arabidopsis thaliana]
  misc_feature (92)..(312): NCBI GI NO: 99684 NR Description: DNA-binding protein - Arabidopsis thaliana
  misc_feature (92)..(312): NCBI GI NO: 629557 NR Description: RNA-binding protein RNP-D precursor
  misc_feature (19)..(310): NCBI GI NO: 19032260 NR Description: RNA-binding protein precursor [Persea americana]
  misc_feature (18)..(312): NCBI GI NO: 1076251 NR Description: RNA-binding protein - common ice plant
LSCPSLSLSLSHSSSSAMASSIVTSSFKPLAMADSSSSTIFSHPSLSTISPRCSFLTNLPLSFSRVSLSLKAKTNLKKSPFVSFVAQTSDWEGEEGGDVSASVAVEENEPEATFSEEEGDVSEGGDFPEPPEEAKLFVGNLAYDVDSQALAMLFEQAGTVEIAEVIYNRETDQSRGFGFVTMSTVEEAETAVEKFNRYDLNGRLLTVNKAAPRGSRPERQPRVYEPAFRVYVGNLPWDVDNGRLEQVFSEHGKVVEARVVYDRETGRSRGFGFVTMSNETELNDAIAALDGQNMEGRAIRVNVAEERPRRGF

SEQ ID NO: 19350 - protein, 295 aa, Zea mays subsp. mays
  peptide (1)..(295): Ceres Seq. ID no. 14301984
  misc_feature (119)..(190): Pfam Name: a.k.a. RRM, RBD, or RNP domain Pfam Description: RNA recognition motif.
  misc_feature (1)..(295): NCBI GI NO: 1076305 NR Description: RNA-binding protein cp31 precursor
  misc_feature (1)..(295): NCBI GI NO: 681908 NR Description: cp31 [Arabidopsis thaliana]
  misc_feature (1)..(293): NCBI GI NO: 15240641 NR Description: 31 kDa ribonucleoprotein, chloroplast
  misc_feature (1)..(295): NCBI GI NO: 475719 NR Description: RNA-binding protein 2
  misc_feature (1)..(295): NCBI GI NO: 15233980 NR Description: 31 kDa ribonucleoprotein, chloroplast
  misc_feature (1)..(295): NCBI GI NO: 15294254 NR Description: AT4g24770/F22K18_30 [Arabidopsis thaliana]
  misc_feature (75)..(295): NCBI GI NO: 99684 NR Description: DNA-binding protein - Arabidopsis thaliana
  misc_feature (75)..(295): NCBI GI NO: 629557 NR Description: RNA-binding protein RNP-D precursor
  misc_feature (2)..(293): NCBI GI NO: 19032260 NR Description: RNA-binding protein precursor [Persea americana]
  misc_feature (1)..(295): NCBI GI NO: 1076251 NR Description: RNA-binding protein - common ice plant
MASSIVTSSFKPLAMADSSSSTIFSHPSLSTISPRCSFLTNLPLSFSRVSLSLKAKTNLKKSPFVSFVAQTSDWEGEEGGDVSASVAVEENEPEATFSEEEGDVSEGGDFPEPPEEAKLFVGNLAYDVDSQALAMLFEQAGTVEIAEVIYNRETDQSRGFGFVTMSTVEEAETAVEKFNRYDLNGRLLTVNKAAPRGSRPERQPRVYEPAFRVYVGNLPWDVDNGRLEQVFSEHGKVVEARVVYDRETGRSRGFGFVTMSNETELNDAIAALDGQNMEGRAIRVNVAEERPRRGF

SEQ ID NO: 19351 - protein, 281 aa, Zea mays subsp. mays
  peptide (1)..(281): Ceres Seq. ID no. 14301985
  misc_feature (105)..(176): Pfam Name: a.k.a. RRM, RBD, or RNP domain Pfam Description: RNA recognition motif.
  misc_feature (1)..(281): NCBI GI NO: 1076305 NR Description: RNA-binding protein cp31 precursor
  misc_feature (1)..(281): NCBI GI NO: 681908 NR Description: cp31 [Arabidopsis thaliana]
  misc_feature (1)..(279): NCBI GI NO: 15240641 NR Description: 31 kDa ribonucleoprotein, chloroplast
  misc_feature (1)..(281): NCBI GI NO: 475719 NR Description: RNA-binding protein 2
  misc_feature (1)..(281): NCBI GI NO: 15233980 NR Description: 31 kDa ribonucleoprotein, chloroplast
  misc_feature (1)..(281): NCBI GI NO: 15294254 NR Description: AT4g24770/F22K18_30 [Arabidopsis thaliana]
  misc_feature (61)..(281): NCBI GI NO: 99684 NR Description: DNA-binding protein - Arabidopsis thaliana
  misc_feature (61)..(281): NCBI GI NO: 629557 NR Description: RNA-binding protein RNP-D precursor
  misc_feature (1)..(279): NCBI GI NO: 19032260 NR Description: RNA-binding protein precursor [Persea americana]
  misc_feature (1)..(281): NCBI GI NO: 1076251 NR Description: RNA-binding protein - common ice plant
MADSSSSTIFSHPSLSTISPRCSFLTNLPLSFSRVSLSLKAKTNLKKSPFVSFVAQTSDWEGEEGGDVSASVAVEENEPEATFSEEEGDVSEGGDFPEPPEEAKLFVGNLAYDVDSQALAMLFEQAGTVEIAEVIYNRETDQSRGFGFVTMSTVEEAETAVEKFNRYDLNGRLLTVNKAAPRGSRPERQPRVYEPAFRVYVGNLPWDVDNGRLEQVFSEHGKVVEARVVYDRETGRSRGFGFVTMSNETELNDAIAALDGQNMEGRAIRVNVAEERPRRGF

SEQ ID NO: 19352 - DNA, 737 bp, Zea mays subsp. mays
  misc_feature (1)..(737): Ceres Seq. ID no. 13599262
aggatggctcgataccttgcaaacaaatgttccattgcttcacgtattgactgctattcagatatgagtagctccatttttggtgagaagctgcgtgaacaagttgaggagaggctagatttctacgataagggtgttgcaccccgcaagaaccttgatgtgatgaaagctgctattgatggcttgacaaacacagaggatgatgacggcaaagagaatggtgacgcatctgtgaagaaaagcaagaagtccaaagctgaggctaacagtgacgcgatggacgttgagaatgccgcaacagaagctgaaactggaaccgagaagaagaagaaaaagaagcacaagcttgaggagccgcaggatgtggagatgcaagccaatggcgatgatgagacccctaagaagaagaaaaagaagaaccgcgacgccgagtctgttgatcctaagacgggcaccgaggggaaatccaagaaaaagaagaagaaatccaaggctgatgacgacgagtagtagattagtacctaagtacctagcagcgagtgttcaagtcgattgaggatgaaattttttgtaccgactgtttatgtgtgtactgtttgagcctctttgagcccttgacgaggtctgtaatgtagcttcatggactgaagcggcgtatctgtaatacatttgatgttgcagtatgtcgtttcttggggatggcttagctttcctatataaatggaatggcattgttg

SEQ ID NO: 19353 - protein, 169 aa, Zea mays subsp. mays
  peptide (1)..(169): Ceres Seq. ID no. 13599263
  misc_feature (1)..(164): NCBI GI NO: 34899158 NR Description: putative nucleolar protein
  misc_feature (1)..(144): NCBI GI NO: 3860319 NR Description: nucleolar protein [Cicer arietinum]
  misc_feature (1)..(163): NCBI GI NO: 15223458 NR Description: nucleolar protein Nop56, putative
  misc_feature (1)..(144): NCBI GI NO: 11994428 NR Description: nucleolar protein [Arabidopsis thaliana]
  misc_feature (1)..(168): NCBI GI NO: 14799394 NR Description: XNop56 protein [Xenopus laevis]
  misc_feature (1)..(167): NCBI GI NO: 12805509 NR Description: Nol5a protein [Mus musculus]
  misc_feature (1)..(167): NCBI GI NO: 23956150 NR Description: nucleolar protein 5A; 56kDa with KKE/D repeat
  misc_feature (1)..(167): NCBI GI NO: 12844818 NR Description: unnamed protein product [Mus musculus]
  misc_feature (1)..(167): NCBI GI NO: 26346733 NR Description: unnamed protein product [Mus musculus]
  misc_feature (1)..(167): NCBI GI NO: 30923357 NR Description: Nucleolar protein Nop56 (Nucleolar protein 5A)
RMARYLANKCSIASRIDCYSDMSSSIFGEKLREQVEERLDFYDKGVAPRKNLDVMKAAIDGLTNTEDDDGKENGDASVKKSKKSKAEANSDAMDVENAATEAETGTEKKKKKKHKLEEPQDVEMQANGDDETPKKKKKKNRDAESVDPKTGTEGKSKKKKKKSKADDDE

SEQ ID NO: 19354 - protein, 168 aa, Zea mays subsp. mays
  peptide (1)..(168): Ceres Seq. ID no. 13599264
  misc_feature (1)..(163): NCBI GI NO: 34899158 NR Description: putative nucleolar protein
  misc_feature (1)..(143): NCBI GI NO: 3860319 NR Description: nucleolar protein [Cicer arietinum]
  misc_feature (1)..(162): NCBI GI NO: 15223458 NR Description: nucleolar protein Nop56, putative
  misc_feature (1)..(143): NCBI GI NO: 11994428 NR Description: nucleolar protein [Arabidopsis thaliana]
  misc_feature (1)..(167): NCBI GI NO: 14799394 NR Description: XNop56 protein [Xenopus laevis]
  misc_feature (1)..(166): NCBI GI NO: 12805509 NR Description: Nol5a protein [Mus musculus]
  misc_feature (1)..(166): NCBI GI NO: 23956150 NR Description: nucleolar protein 5A; 56kDa with KKE/D repeat
  misc_feature (1)..(166): NCBI GI NO: 12844818 NR Description: unnamed protein product [Mus musculus]
  misc_feature (1)..(166): NCBI GI NO: 30923357 NR Description: Nucleolar protein Nop56 (Nucleolar protein 5A)
  misc_feature (1)..(166): NCBI GI NO: 26346733 NR Description: unnamed protein product [Mus musculus]
MARYLANKCSIASRIDCYSDMSSSIFGEKLREQVEERLDFYDKGVAPRKNLDVMKAAIDGLTNTEDDDGKENGDASVKKSKKSKAEANSDAMDVENAATEAETGTEKKKKKKHKLEEPQDVEMQANGDDETPKKKKKKNRDAESVDPKTGTEGKSKKKKKKSKADDDE

SEQ ID NO: 19355 - protein, 148 aa, Zea mays subsp. mays
  peptide (1)..(148): Ceres Seq. ID no. 13599265
  misc_feature (1)..(143): NCBI GI NO: 34899158 NR Description: putative nucleolar protein
  misc_feature (1)..(123): NCBI GI NO: 3860319 NR Description: nucleolar protein [Cicer arietinum]
  misc_feature (1)..(142): NCBI GI NO: 15223458 NR Description: nucleolar protein Nop56, putative
  misc_feature (1)..(123): NCBI GI NO: 11994428 NR Description: nucleolar protein [Arabidopsis thaliana]
  misc_feature (1)..(147): NCBI GI NO: 14799394 NR Description: XNop56 protein [Xenopus laevis]
  misc_feature (1)..(146): NCBI GI NO: 12805509 NR Description: Nol5a protein [Mus musculus]
  misc_feature (1)..(146): NCBI GI NO: 23956150 NR Description: nucleolar protein 5A; 56kDa with KKE/D repeat
  misc_feature (1)..(146): NCBI GI NO: 12844818 NR Description: unnamed protein product [Mus musculus]
  misc_feature (1)..(146): NCBI GI NO: 30923357 NR Description: Nucleolar protein Nop56 (Nucleolar protein 5A)
  misc_feature (1)..(146): NCBI GI NO: 26346733 NR Description: unnamed protein product [Mus musculus]
MSSSIFGEKLREQVEERLDFYDKGVAPRKNLDVMKAAIDGLTNTEDDDGKENGDASVKKSKKSKAEANSDAMDVENAATEAETGTEKKKKKKHKLEEPQDVEMQANGDDETPKKKKKKNRDAESVDPKTGTEGKSKKKKKKSKADDDE

SEQ ID NO: 19356 - DNA, 877 bp, Zea mays subsp. mays
  misc_feature (1)..(877): Ceres Seq. ID no. 12635572
gtttcttcttcttcttcccttggctcgccgtctcaccgatcgaatcattttctctgtttgttcgtttactcgcgcgcttcgaagctctgattttgacagagaaaaagaagtaagagatgggctcacgacagggaccaccgaagcatcagaacaaattcgcatgggtacccaacgccggcgtgaagatcaacgaaaccgaagtgggcgggaggttccgaccgctgtcggagataaccggagtttgccatcgctgtcgggagcagatcgcttggaagcgaaaatacggcaaatacaaaaagctaaccgaacccgccaaatgtcagaagtgtttaaagcgtaatgttcgtcaagcatatcacaagttatgcactggttgtgccaaagagcagaaagtgtgtgcaaagtgttactcttcttctgagcaaatcatgggaagggatatatatgaagtagaacctgaacagaagctgctcgatgagactatcaagaatgctagggaaagagatcgaaggacacttttgcgtgctatgaacaaagatagcaacccaaagaagtcagatgaagaagcaacgaggagcgatagcagcaaggttggtgatgtgtttccatcaacatcccttgaagaatatgcaaacaagtctggaagagttagcgggattgttggtcatggccatgtcgttgacgatgaagaagatgatgatgatgttgctagtgaacctgaactagatgaggaccacagtggtgatgatgatgacgaactgcaaaagtaatcgtagtttcggttgtagtagttctgtcaattttgataggcttgtgagattttgcaaaactcgttatgcttttaatgttttgataaagttttactttgttacctgct

SEQ ID NO: 19357 - protein, 217 aa, Zea mays subsp. mays
  peptide (1)..(217): Ceres Seq. ID no. 12635573
  misc_feature (1)..(217): NCBI GI NO: 15232864 NR Description: unknown protein; protein id: At3g02220.1
  misc_feature (1)..(217): NCBI GI NO: 26453098 NR Description: unknown protein [Arabidopsis thaliana]
  misc_feature (9)..(175): NCBI GI NO: 34909774 NR Description: P0512C01.29
  misc_feature (3)..(214): NCBI GI NO: 24642765 NR Description: CG8675-PA [Drosophila melanogaster]
  misc_feature (3)..(156): NCBI GI NO: 34862080 NR Description: similar to RIKEN cDNA 1110059E24
  misc_feature (3)..(156): NCBI GI NO: 13384816 NR Description: RIKEN cDNA 1110059E24 [Mus musculus]
  misc_feature (7)..(161): NCBI GI NO: 34869598 NR Description: similar to RIKEN cDNA 1110059E24
  misc_feature (3)..(105): NCBI GI NO: 16552651 NR Description: unnamed protein product [Homo sapiens]
MGSRQGPPKHQNKFAWVPNAGVKINETEVGGRFRPLSEITGVCHRCREQIAWKRKYGKYKKLTEPAKCQKCLKRNVRQAYHKLCTGCAKEQKVCAKCYSSSEQIMGRDIYEVEPEQKLLDETIKNARERDRRTLLRAMNKDSNPKKSDEEATRSDSSKVGDVFPSTSLEEYANKSGRVSGIVGHGHVVDDEEDDDDVASEPELDEDHSGDDDDELQK

SEQ ID NO: 19358 - protein, 113 aa, Zea mays subsp. mays
  peptide (1)..(113): Ceres Seq. ID no. 12635574
  misc_feature (1)..(113): NCBI GI NO: 15232864 NR Description: unknown protein; protein id: At3g02220.1
  misc_feature (1)..(113): NCBI GI NO: 26453098 NR Description: unknown protein [Arabidopsis thaliana]
  misc_feature (1)..(71): NCBI GI NO: 34909774 NR Description: P0512C01.29
  misc_feature (1)..(110): NCBI GI NO: 24642765 NR Description: CG8675-PA [Drosophila melanogaster]
  misc_feature (1)..(52): NCBI GI NO: 34862080 NR Description: similar to RIKEN cDNA 1110059E24
  misc_feature (1)..(52): NCBI GI NO: 13384816 NR Description: RIKEN cDNA 1110059E24 [Mus musculus]
  misc_feature (1)..(57): NCBI GI NO: 34869598 NR Description: similar to RIKEN cDNA 1110059E24
MGRDIYEVEPEQKLLDETIKNARERDRRTLLRAMNKDSNPKKSDEEATRSDSSKVGDVFPSTSLEEYANKSGRVSGIVGHGHVVDDEEDDDDVASEPELDEDHSGDDDDELQK

SEQ ID NO: 19359 - protein, 112 aa, Zea mays subsp. mays
  peptide (1)..(112): Ceres Seq. ID no. 12635575
FLLLLPLARRLTDRIIFSVCSFTRALRSSDFDREKEVRDGLTTGTTEASEQIRMGTQRRREDQRNRSGREVPTAVGDNRSLPSLSGADRLEAKIRQIQKANRTRQMSEVFKA

SEQ ID NO: 19360 - DNA, 1140 bp, Zea mays subsp. mays
  misc_feature (1)..(1140): Ceres Seq. ID no. 13599496
aataagcatttcacgcttcaccaatggcttctctcatgctcaacggggccatcaccttccccaagggattaggcttccccgcttccaatctacacgccagaccaagtcctccgctgagtctcgtctcaaacacagccacgcggagactctccgtggcgacaagatgcagcagcagcagcagcgtgtcggcgtcaaggccatctgcgcagcctaggttcatccagcacaagaaagaggcctactggttctacaggttcctgtccatcgtgtacgaccacatcatcaatcccggccactggacggaggatatgagggacgacgctctcgagcctgcggatctgagccatccggacatgcgagttgtcgacgtcggaggcggaacgggtttcaccacgctgggaatcgtcaagacggtgaaggctaagaacgtgacgattctggaccagtcgccgcatcagctggcaaaggcgaagcagaaggagccgttgaaggagtgcaagatcgtggaaggagatgcggaggatctcccttttcctactgattatgctgacagatacgtctctgctggaagcattgagtactggcccgacccgcagaggggtataagggaagcgtacagagttctcaagatcggtgggaaagcatgtctcattggccctgtccacccgacgttttggctttcacgcttctttgcagatgtgtggatgcttttccccaaggaggaggagtacattgagtggttcaagaatgctggtttcaaggacgttcagcttaagaggattggccccaagtggtaccgtggtgttcgcaggcacggacttatcatgggatgctctgttactggtgtcaaacctgcctctggagactctcctctccagcttggaccaaaggaagaggacgtggagaagcctgtaaacaatcctttctccttcttgggacgcttcctcttgggtaccctagcggctgcctggtttgtgttaatcccaatctacatgtggatcaaggatcagatcgttcccaaagaccaacccatctgataacaacttgtgatttgtaatacactcctatgttagacgcttttttttttgtcctcgtgactatgttgagcccttttcaaaaatatatctatcactctattcc

SEQ ID NO: 19361 - protein, 337 aa, Zea mays subsp. mays
  peptide (1)..(337): Ceres Seq. ID no. 13599497
  misc_feature (66)..(256): Pfam Name: Pfam Description:  ubiE/COQ5 methyltransferase family
  misc_feature (1)..(337): NCBI GI NO: 15229430 NR Description: chloroplast inner envelope membrane protein
  misc_feature (1)..(337): NCBI GI NO: 15005009 NR Description: APG1 [Arabidopsis thaliana]
  misc_feature (1)..(337): NCBI GI NO: 21553996 NR Description: putative chloroplast inner envelope protein
  misc_feature (1)..(337): NCBI GI NO: 7489166 NR Description: membrane protein
  misc_feature (1)..(337): NCBI GI NO: 124429 NR Description: 37 KD INNER ENVELOPE MEMBRANE PROTEIN
  misc_feature (1)..(337): NCBI GI NO: 34393472 NR Description: putative 37kDa chloroplast inner envelope membranepolypeptide precursor
  misc_feature (20)..(334): NCBI GI NO: 37265798 NR Description: MPBQ/MSBQ methyltransferase
  misc_feature (1)..(185): NCBI GI NO: 25458195 NR Description: membrane protein, 37K, chloroplast inner envelope
  misc_feature (66)..(259): NCBI GI NO: 11498123 NR Description: chloroplast inner envelope membrane protein
  misc_feature (66)..(249): NCBI GI NO: 15790980 NR Description: membrane protein; Hmp [Halobacterium sp. NRC-1]
MASLMLNGAITFPKGLGFPASNLHARPSPPLSLVSNTATRRLSVATRCSSSSSVSASRPSAQPRFIQHKKEAYWFYRFLSIVYDHIINPGHWTEDMRDDALEPADLSHPDMRVVDVGGGTGFTTLGIVKTVKAKNVTILDQSPHQLAKAKQKEPLKECKIVEGDAEDLPFPTDYADRYVSAGSIEYWPDPQRGIREAYRVLKIGGKACLIGPVHPTFWLSRFFADVWMLFPKEEEYIEWFKNAGFKDVQLKRIGPKWYRGVRRHGLIMGCSVTGVKPASGDSPLQLGPKEEDVEKPVNNPFSFLGRFLLGTLAAAWFVLIPIYMWIKDQIVPKDQPI

SEQ ID NO: 19362 - protein, 333 aa, Zea mays subsp. mays
  peptide (1)..(333): Ceres Seq. ID no. 13599498
  misc_feature (62)..(252): Pfam Name: Pfam Description:  ubiE/COQ5 methyltransferase family
  misc_feature (1)..(333): NCBI GI NO: 15229430 NR Description: chloroplast inner envelope membrane protein
  misc_feature (1)..(333): NCBI GI NO: 15005009 NR Description: APG1 [Arabidopsis thaliana]
  misc_feature (1)..(333): NCBI GI NO: 21553996 NR Description: putative chloroplast inner envelope protein
  misc_feature (1)..(333): NCBI GI NO: 7489166 NR Description: membrane protein
  misc_feature (1)..(333): NCBI GI NO: 124429 NR Description: 37 KD INNER ENVELOPE MEMBRANE PROTEIN
  misc_feature (1)..(333): NCBI GI NO: 34393472 NR Description: putative 37kDa chloroplast inner envelope membranepolypeptide precursor
  misc_feature (16)..(330): NCBI GI NO: 37265798 NR Description: MPBQ/MSBQ methyltransferase
  misc_feature (1)..(181): NCBI GI NO: 25458195 NR Description: membrane protein, 37K, chloroplast inner envelope
  misc_feature (62)..(255): NCBI GI NO: 11498123 NR Description: chloroplast inner envelope membrane protein
  misc_feature (62)..(245): NCBI GI NO: 15790980 NR Description: membrane protein; Hmp [Halobacterium sp. NRC-1]
MLNGAITFPKGLGFPASNLHARPSPPLSLVSNTATRRLSVATRCSSSSSVSASRPSAQPRFIQHKKEAYWFYRFLSIVYDHIINPGHWTEDMRDDALEPADLSHPDMRVVDVGGGTGFTTLGIVKTVKAKNVTILDQSPHQLAKAKQKEPLKECKIVEGDAEDLPFPTDYADRYVSAGSIEYWPDPQRGIREAYRVLKIGGKACLIGPVHPTFWLSRFFADVWMLFPKEEEYIEWFKNAGFKDVQLKRIGPKWYRGVRRHGLIMGCSVTGVKPASGDSPLQLGPKEEDVEKPVNNPFSFLGRFLLGTLAAAWFVLIPIYMWIKDQIVPKDQPI

SEQ ID NO: 19363 - protein, 242 aa, Zea mays subsp. mays
  peptide (1)..(242): Ceres Seq. ID no. 13599499
  misc_feature (1)..(161): Pfam Name: Pfam Description:  ubiE/COQ5 methyltransferase family
  misc_feature (1)..(242): NCBI GI NO: 15229430 NR Description: chloroplast inner envelope membrane protein
  misc_feature (1)..(242): NCBI GI NO: 15005009 NR Description: APG1 [Arabidopsis thaliana]
  misc_feature (1)..(242): NCBI GI NO: 21553996 NR Description: putative chloroplast inner envelope protein
  misc_feature (1)..(242): NCBI GI NO: 7489166 NR Description: membrane protein
  misc_feature (1)..(242): NCBI GI NO: 124429 NR Description: 37 KD INNER ENVELOPE MEMBRANE PROTEIN
  misc_feature (1)..(242): NCBI GI NO: 34393472 NR Description: putative 37kDa chloroplast inner envelope membranepolypeptide precursor
  misc_feature (1)..(239): NCBI GI NO: 37265798 NR Description: MPBQ/MSBQ methyltransferase
  misc_feature (1)..(90): NCBI GI NO: 25458195 NR Description: membrane protein, 37K, chloroplast inner envelope
  misc_feature (1)..(164): NCBI GI NO: 11498123 NR Description: chloroplast inner envelope membrane protein
  misc_feature (1)..(154): NCBI GI NO: 15790980 NR Description: membrane protein; Hmp [Halobacterium sp. NRC-1]
MRDDALEPADLSHPDMRVVDVGGGTGFTTLGIVKTVKAKNVTILDQSPHQLAKAKQKEPLKECKIVEGDAEDLPFPTDYADRYVSAGSIEYWPDPQRGIREAYRVLKIGGKACLIGPVHPTFWLSRFFADVWMLFPKEEEYIEWFKNAGFKDVQLKRIGPKWYRGVRRHGLIMGCSVTGVKPASGDSPLQLGPKEEDVEKPVNNPFSFLGRFLLGTLAAAWFVLIPIYMWIKDQIVPKDQPI

SEQ ID NO: 19364 - DNA, 721 bp, Zea mays subsp. mays
  misc_feature (1)..(721): Ceres Seq. ID no. 13599500
atatacatatattaacattttcatacacctaaaaatatatccaaacccatttgatctaatagtaaatacataatttatttggtgaagctagaagaatgggtgcatttgattatatatctagcttttgttcatatacatactctaatgccaaaaccaagcgtaagccattgcagacagtggaaatcaaggtcaaaatggactgtgacggctgtgaaagaaaacttagaaacgtggttcgtcgcatgaaaggcgtgaaaacggtggaggtgaaccggaaacagagccggctaacggtgaacggtcacgtggacccaaacaaggtgttgaagagagtgaagagcacagggaagaaggcagagttttggccttacatacctcagcatatggtctattaccctttcgcgcctggcatgtacgacaaacgtgcgcctgcaggccacatccgcaaccctacacaagcgtttccagccgcaaacgcacctggtgaaaactacgtttccctcttcagcgacgacaacgtccacgccgcttgttccatcatgtgaaatatgtaagaagcagaatataatataataatctatattttcttctttgtgtacacatctacttttgcaagttgcaactattctcataatacagaaaaggtcatgtataaactatgtaataaattatagagacatattttcacaaaaaaaaaaaaaaaaaagcttatcgataccgt

SEQ ID NO: 19365 - protein, 149 aa, Zea mays subsp. mays
  peptide (1)..(149): Ceres Seq. ID no. 13599501
  misc_feature (29)..(89): Pfam Name: Pfam Description:  Heavy-metal-associated domain
  misc_feature (1)..(149): NCBI GI NO: 15237967 NR Description: copper chaperone (CCH)-related
  misc_feature (1)..(149): NCBI GI NO: 15223925 NR Description: copper chaperone (CCH)-related
  misc_feature (1)..(149): NCBI GI NO: 32442810 NR Description: putative farnesylated protein
  misc_feature (1)..(149): NCBI GI NO: 15219990 NR Description: copper chaperone (CCH)-related
  misc_feature (1)..(149): NCBI GI NO: 28866019 NR Description: farnesylated protein 3
  misc_feature (1)..(149): NCBI GI NO: 28866017 NR Description: farnesylated protein 2
  misc_feature (1)..(149): NCBI GI NO: 34914538 NR Description: OSJNBa0094H06.16
  misc_feature (2)..(149): NCBI GI NO: 15235984 NR Description: copper chaperone (CCH)-related
  misc_feature (1)..(149): NCBI GI NO: 38346843 NR Description: OSJNBa0091C12.3
  misc_feature (1)..(149): NCBI GI NO: 23304411 NR Description: farnesylated protein 1
MGAFDYISSFCSYTYSNAKTKRKPLQTVEIKVKMDCDGCERKLRNVVRRMKGVKTVEVNRKQSRLTVNGHVDPNKVLKRVKSTGKKAEFWPYIPQHMVYYPFAPGMYDKRAPAGHIRNPTQAFPAANAPGENYVSLFSDDNVHAACSIM

SEQ ID NO: 19366 - protein, 116 aa, Zea mays subsp. mays
  peptide (1)..(116): Ceres Seq. ID no. 13599502
  misc_feature (1)..(56): Pfam Name: Pfam Description:  Heavy-metal-associated domain
  misc_feature (1)..(116): NCBI GI NO: 15237967 NR Description: copper chaperone (CCH)-related
  misc_feature (1)..(116): NCBI GI NO: 15223925 NR Description: copper chaperone (CCH)-related
  misc_feature (1)..(116): NCBI GI NO: 32442810 NR Description: putative farnesylated protein
  misc_feature (1)..(116): NCBI GI NO: 15219990 NR Description: copper chaperone (CCH)-related
  misc_feature (1)..(116): NCBI GI NO: 28866019 NR Description: farnesylated protein 3
  misc_feature (1)..(116): NCBI GI NO: 28866017 NR Description: farnesylated protein 2
  misc_feature (1)..(116): NCBI GI NO: 34914538 NR Description: OSJNBa0094H06.16
  misc_feature (1)..(116): NCBI GI NO: 15235984 NR Description: copper chaperone (CCH)-related
  misc_feature (1)..(116): NCBI GI NO: 38346843 NR Description: OSJNBa0091C12.3
  misc_feature (1)..(116): NCBI GI NO: 23304411 NR Description: farnesylated protein 1
MDCDGCERKLRNVVRRMKGVKTVEVNRKQSRLTVNGHVDPNKVLKRVKSTGKKAEFWPYIPQHMVYYPFAPGMYDKRAPAGHIRNPTQAFPAANAPGENYVSLFSDDNVHAACSIM

SEQ ID NO: 19367 - protein, 100 aa, Zea mays subsp. mays
  peptide (1)..(100): Ceres Seq. ID no. 13599503
  misc_feature (1)..(100): NCBI GI NO: 15237967 NR Description: copper chaperone (CCH)-related
  misc_feature (1)..(100): NCBI GI NO: 15223925 NR Description: copper chaperone (CCH)-related
  misc_feature (1)..(100): NCBI GI NO: 32442810 NR Description: putative farnesylated protein
  misc_feature (1)..(100): NCBI GI NO: 15219990 NR Description: copper chaperone (CCH)-related
  misc_feature (1)..(100): NCBI GI NO: 28866019 NR Description: farnesylated protein 3
  misc_feature (1)..(100): NCBI GI NO: 28866017 NR Description: farnesylated protein 2
  misc_feature (1)..(100): NCBI GI NO: 34914538 NR Description: OSJNBa0094H06.16
  misc_feature (1)..(100): NCBI GI NO: 15235984 NR Description: copper chaperone (CCH)-related
  misc_feature (1)..(100): NCBI GI NO: 38346843 NR Description: OSJNBa0091C12.3
  misc_feature (1)..(100): NCBI GI NO: 23304411 NR Description: farnesylated protein 1
MKGVKTVEVNRKQSRLTVNGHVDPNKVLKRVKSTGKKAEFWPYIPQHMVYYPFAPGMYDKRAPAGHIRNPTQAFPAANAPGENYVSLFSDDNVHAACSIM

SEQ ID NO: 19368 - DNA, 1329 bp, Zea mays subsp. mays
  misc_feature (1)..(1329): Ceres Seq. ID no. 13623086
aatcaaacacaaacaaaacccaaagaagatctaagttcatcatgtctacgaccggacaaatcattcgatgcaaagctgccgtttgctgggaagctggaaagccactagtgatggaggaagtggaggttgctccaccgcagaagcatgaagtccgtatcaagattctcttcacttctctctgtcacaccgatgtttacttctgggaagctaagggacaaacgcctttgtttccacgtatcttcggacatgaagctggagggattgtggagagtgttggagaaggagtgactgatctccaaccaggagaccacgtcctccccatcttcaccggagaatgcggagactgccctcactgccactctgaggagtccaacatgtgcgaccttctcaggatcaacaccgagagaggagggatgatacacgacggcgaatcgagattctccatcaacggcaaaccgatctaccatttccttgggacctcaacgttcagcgagtacaccgtggttcactctggtcaagtcgctaagatcaaccctgaagctcctcttgacaaagtctgcatcgtcagctgtggcttgtccactgggctgggagctactttgaatgttgctaaacccaagaaaggtcagagcgttgctatctttggtcttggtgctgttgggttggctgctgcggaaggtgctaggattgctggtgctggtaggatcattggtgttgatcttaaccccaagagattcgaggaagctaagaagttcggtgtgacggagtttgtgaaccctaaggaacatgacaagccagttcagcaagtcatcgctgagatgactaacggcggtgtggacaggagtgtggagtgcactggaagcattcaagccatgattcaagcctttgaatgtgttcacgatggctggggtgttgcggtgctggttggtgtgccgagcaaagacgacgctttcaagactcatccgatgaacctcctgaacgagaggacactcaagggtactttctttggcaactacaaacccaaaaccgacattcccggggtggtcgaaaagtacatgaacaaggagctggagcttgagaagttcatcactcacacagtgccgttctctgagatcaacaaggcctttgattacatgttgttggagagagtatccgttgcatcatcaccatgggtgcttgaagaaactacatttctcctttaccaataaatgtctacttcgagtgtttttagtagacaaactcttattgcttttgtgttttttaagttcctactctattttaccatatcgttgtaatagttttcattctatcaaggttttaatataaact

SEQ ID NO: 19369 - protein, 401 aa, Zea mays subsp. mays
  peptide (1)..(401): Ceres Seq. ID no. 13623087
  misc_feature (14)..(379): NCBI GI NO: 6684350 NR Description: alcohol dehydrogenase [Brassica oleracea]
  misc_feature (14)..(379): NCBI GI NO: 2570176 NR Description: alcohol dehydrogenase [Arabis gemmifera]
  misc_feature (14)..(379): NCBI GI NO: 6684341 NR Description: alcohol dehydrogenase [Aubrieta deltoidea]
  misc_feature (14)..(379): NCBI GI NO: 6684342 NR Description: alcohol dehydrogenase [Arabis alpina]
  misc_feature (14)..(379): NCBI GI NO: 6684374 NR Description: alcohol dehydrogenase [Barbarea vulgaris]
  misc_feature (14)..(379): NCBI GI NO: 6684351 NR Description: alcohol dehydrogenase [Capsella rubella]
  misc_feature (14)..(379): NCBI GI NO: 6684367 NR Description: alcohol dehydrogenase [Arabis pauciflora]
  misc_feature (14)..(379): NCBI GI NO: 6684359 NR Description: alcohol dehydrogenase [Arabis hirsuta]
  misc_feature (14)..(379): NCBI GI NO: 2570186 NR Description: alcohol dehydrogenase [Arabis gemmifera]
  misc_feature (14)..(379): NCBI GI NO: 6684369 NR Description: alcohol dehydrogenase
SNTNKTQRRSKFIMSTTGQIIRCKAAVCWEAGKPLVMEEVEVAPPQKHEVRIKILFTSLCHTDVYFWEAKGQTPLFPRIFGHEAGGIVESVGEGVTDLQPGDHVLPIFTGECGDCPHCHSEESNMCDLLRINTERGGMIHDGESRFSINGKPIYHFLGTSTFSEYTVVHSGQVAKINPEAPLDKVCIVSCGLSTGLGATLNVAKPKKGQSVAIFGLGAVGLAAAEGARIAGAGRIIGVDLNPKRFEEAKKFGVTEFVNPKEHDKPVQQVIAEMTNGGVDRSVECTGSIQAMIQAFECVHDGWGVAVLVGVPSKDDAFKTHPMNLLNERTLKGTFFGNYKPKTDIPGVVEKYMNKELELEKFITHTVPFSEINKAFDYMLLERVSVASSPWVLEETTFLLYQ

SEQ ID NO: 19370 - protein, 388 aa, Zea mays subsp. mays
  peptide (1)..(388): Ceres Seq. ID no. 13623088
  misc_feature (1)..(366): NCBI GI NO: 6684350 NR Description: alcohol dehydrogenase [Brassica oleracea]
  misc_feature (1)..(366): NCBI GI NO: 2570176 NR Description: alcohol dehydrogenase [Arabis gemmifera]
  misc_feature (1)..(366): NCBI GI NO: 6684341 NR Description: alcohol dehydrogenase [Aubrieta deltoidea]
  misc_feature (1)..(366): NCBI GI NO: 6684342 NR Description: alcohol dehydrogenase [Arabis alpina]
  misc_feature (1)..(366): NCBI GI NO: 6684374 NR Description: alcohol dehydrogenase [Barbarea vulgaris]
  misc_feature (1)..(366): NCBI GI NO: 6684351 NR Description: alcohol dehydrogenase [Capsella rubella]
  misc_feature (1)..(366): NCBI GI NO: 6684359 NR Description: alcohol dehydrogenase [Arabis hirsuta]
  misc_feature (1)..(366): NCBI GI NO: 6684367 NR Description: alcohol dehydrogenase [Arabis pauciflora]
  misc_feature (1)..(366): NCBI GI NO: 2570186 NR Description: alcohol dehydrogenase [Arabis gemmifera]
  misc_feature (1)..(366): NCBI GI NO: 6684369 NR Description: alcohol dehydrogenase
MSTTGQIIRCKAAVCWEAGKPLVMEEVEVAPPQKHEVRIKILFTSLCHTDVYFWEAKGQTPLFPRIFGHEAGGIVESVGEGVTDLQPGDHVLPIFTGECGDCPHCHSEESNMCDLLRINTERGGMIHDGESRFSINGKPIYHFLGTSTFSEYTVVHSGQVAKINPEAPLDKVCIVSCGLSTGLGATLNVAKPKKGQSVAIFGLGAVGLAAAEGARIAGAGRIIGVDLNPKRFEEAKKFGVTEFVNPKEHDKPVQQVIAEMTNGGVDRSVECTGSIQAMIQAFECVHDGWGVAVLVGVPSKDDAFKTHPMNLLNERTLKGTFFGNYKPKTDIPGVVEKYMNKELELEKFITHTVPFSEINKAFDYMLLERVSVASSPWVLEETTFLLYQ

SEQ ID NO: 19371 - protein, 365 aa, Zea mays subsp. mays
  peptide (1)..(365): Ceres Seq. ID no. 13623089
  misc_feature (1)..(343): NCBI GI NO: 6684350 NR Description: alcohol dehydrogenase [Brassica oleracea]
  misc_feature (1)..(343): NCBI GI NO: 2570176 NR Description: alcohol dehydrogenase [Arabis gemmifera]
  misc_feature (1)..(343): NCBI GI NO: 6684341 NR Description: alcohol dehydrogenase [Aubrieta deltoidea]
  misc_feature (1)..(343): NCBI GI NO: 6684342 NR Description: alcohol dehydrogenase [Arabis alpina]
  misc_feature (1)..(343): NCBI GI NO: 6684374 NR Description: alcohol dehydrogenase [Barbarea vulgaris]
  misc_feature (1)..(343): NCBI GI NO: 6684351 NR Description: alcohol dehydrogenase [Capsella rubella]
  misc_feature (1)..(343): NCBI GI NO: 6684367 NR Description: alcohol dehydrogenase [Arabis pauciflora]
  misc_feature (1)..(343): NCBI GI NO: 6684359 NR Description: alcohol dehydrogenase [Arabis hirsuta]
  misc_feature (1)..(343): NCBI GI NO: 2570186 NR Description: alcohol dehydrogenase [Arabis gemmifera]
  misc_feature (1)..(343): NCBI GI NO: 6684369 NR Description: alcohol dehydrogenase
MEEVEVAPPQKHEVRIKILFTSLCHTDVYFWEAKGQTPLFPRIFGHEAGGIVESVGEGVTDLQPGDHVLPIFTGECGDCPHCHSEESNMCDLLRINTERGGMIHDGESRFSINGKPIYHFLGTSTFSEYTVVHSGQVAKINPEAPLDKVCIVSCGLSTGLGATLNVAKPKKGQSVAIFGLGAVGLAAAEGARIAGAGRIIGVDLNPKRFEEAKKFGVTEFVNPKEHDKPVQQVIAEMTNGGVDRSVECTGSIQAMIQAFECVHDGWGVAVLVGVPSKDDAFKTHPMNLLNERTLKGTFFGNYKPKTDIPGVVEKYMNKELELEKFITHTVPFSEINKAFDYMLLERVSVASSPWVLEETTFLLYQ

SEQ ID NO: 19372 - DNA, 873 bp, Zea mays subsp. mays
  misc_feature (1)..(873): Ceres Seq. ID no. 13586970
atcctaatcgaaaatcgcagaaaagctttgtgatggtcctctttcaaatgctgcaaatttgtggagcctgagatttactatggagataaattcaattgcaactgctcctggcagttcttccttgagcaaggagaacctgagctctctgcttgatctatttagcactgtactctccaagttgtctgtaactgaggctgagagactgtggcatatggccatgaagttgttttcccatgataaggtctgtttcgagaagctggtgaagtgtgcgatgctatcattaagtctggcaggtggcagtgattcaggagcatcagtttcttctgctatcgttggatggtatttgcaaagagatggtgtgaagcatgctaggaagatgtataagagattgcttgctttacctcggccaagcctcaagttcatgcaatactgcatagcgctggaggcgaaccttgcatcgctcggagacaacggcgccctcaaagatgctcggcggctatatgattcagcgctcgacctgtatccccaggaaagagaagtgtggcggagctactacgacctggagctgaagatgggaacatcggagtctgccaacgccgtgtactcgcgctctcgtaaggtgctgggtgactccactgccttgactgctccccggggctaggtcgcagcatgcaatgtattccaagatgcaatgtgatttttttgtttggatctgtgttttccaatcctctctgagtctgggtcagcaagcaattaagctgatgcatcgaaattttggctctaaatgggagacctacaatgtgctgctggggaacactgtatatcttgttcaaaaaacaagagtactgcagctgctggtggctgtctcctttg

SEQ ID NO: 19373 - protein, 193 aa, Zea mays subsp. mays
  peptide (1)..(193): Ceres Seq. ID no. 13586971
  misc_feature (1)..(191): NCBI GI NO: 40363761 NR Description: putative hepatocellular carcinoma-associatedantigen 66
  misc_feature (1)..(185): NCBI GI NO: 15234413 NR Description: expressed protein [Arabidopsis thaliana]
MEINSIATAPGSSSLSKENLSSLLDLFSTVLSKLSVTEAERLWHMAMKLFSHDKVCFEKLVKCAMLSLSLAGGSDSGASVSSAIVGWYLQRDGVKHARKMYKRLLALPRPSLKFMQYCIALEANLASLGDNGALKDARRLYDSALDLYPQEREVWRSYYDLELKMGTSESANAVYSRSRKVLGDSTALTAPRG

SEQ ID NO: 19374 - protein, 149 aa, Zea mays subsp. mays
  peptide (1)..(149): Ceres Seq. ID no. 13586972
  misc_feature (1)..(147): NCBI GI NO: 40363761 NR Description: putative hepatocellular carcinoma-associatedantigen 66
  misc_feature (1)..(141): NCBI GI NO: 15234413 NR Description: expressed protein [Arabidopsis thaliana]
MAMKLFSHDKVCFEKLVKCAMLSLSLAGGSDSGASVSSAIVGWYLQRDGVKHARKMYKRLLALPRPSLKFMQYCIALEANLASLGDNGALKDARRLYDSALDLYPQEREVWRSYYDLELKMGTSESANAVYSRSRKVLGDSTALTAPRG

SEQ ID NO: 19375 - protein, 147 aa, Zea mays subsp. mays
  peptide (1)..(147): Ceres Seq. ID no. 13586973
  misc_feature (1)..(145): NCBI GI NO: 40363761 NR Description: putative hepatocellular carcinoma-associatedantigen 66
  misc_feature (1)..(139): NCBI GI NO: 15234413 NR Description: expressed protein [Arabidopsis thaliana]
MKLFSHDKVCFEKLVKCAMLSLSLAGGSDSGASVSSAIVGWYLQRDGVKHARKMYKRLLALPRPSLKFMQYCIALEANLASLGDNGALKDARRLYDSALDLYPQEREVWRSYYDLELKMGTSESANAVYSRSRKVLGDSTALTAPRG

SEQ ID NO: 19376 - DNA, 1409 bp, Zea mays subsp. mays
  misc_feature (1)..(1409): Ceres Seq. ID no. 15226685
ataggtatagccaaccgtccaacccattgctactccacaccgatgcgatgctcccatcgccgccggcgacctcgccggcgcggctgcacaagctggtgacctcgcagcaggacccgctcctcgcgctggagctcgtcaacgtcacctccccgactaccacgccgcaccctgccacgctccactctctcctgctccgcctcgcccgccgccgcgaccacctaccccacgcgctcgcgctcctccgccgcctcccgtccccgccgtccccgcgcctccttctcccgcttctcctcgcggcgctccgtctccgccggccgcctcagctctttctctccaccttcaactccctcttcgtctcggggccaagccccctgccgctccacccccatctcctcctccgcctcctcggcgttctatcctccaccccatcccacttcccgtccgcgcttcacctccttcgcctcgtctcttcgcggctacctctccccgctccgctcgtcctcgcctcccacaacctgctaatcgacgccgcggcacgatccggccacgtcgccgtgtcactctcgctcttccaccgcctccgctcactccatgtatcccccgacgccgacacctaccgcattcttacccaatcactctgccgcaaggcccaggtccgcaccgcggctacactgctcgacgaaatgctgcacaggggcatccctgccgatccgctggcgtacaccaccgtgctgaacgctctctgccgcaagaagcagctccgagaggcataccgcctgctctgtctcatgcgaggccgtggagtctcccctgacattgtgcattacaacacggtcatcgttggcatgtgccgcgagggccggccactggatgcctgcaaggttgttgttgatatgatggacaatggatgtacaccgaatgcagtgacatatggcacagtggtgaatgggctgtgcgtaagcggattatacgataaggcggaggcctacctggtggacatggttggtaaagggcttgtgccacatttctcggtgtttcattcagttatcaggggttgctgtacagttgggaaagtagaagaggctgcacaaattatgagtcggatgcttgatcttggagtggttccgcatgttgagagctggagttcagtgatcaggtgcgtttgtaaggatgaggattgtattgaggcagaattgttgcagattgtgggaaggcagcgtggttcaaacatgatctctgacagagtaccttaagtgatttcacttgacatatgcaaaacaaactattgagctttaatctctgttggatgtaaaggaacaattctgcaagaagatagcagtagatgtggcaaaaactggacagcatgaacaattttcttgctgaagtgcctctagtggagtattaggagc

SEQ ID NO: 19377 - protein, 416 aa, Zea mays subsp. mays
  peptide (1)..(416): Ceres Seq. ID no. 15226686
  misc_feature (273)..(307): Pfam Name: Pfam Description:  PPR repeat
  misc_feature (18)..(398): NCBI GI NO: 7486352 NR Description: hypothetical protein F3D13
  misc_feature (169)..(404): NCBI GI NO: 15218325 NR Description: pentatricopeptide (PPR) repeat-containing protein
  misc_feature (172)..(400): NCBI GI NO: 38567720 NR Description: B1358B12.18
  misc_feature (167)..(392): NCBI GI NO: 38567720 NR Description: B1358B12.18
  misc_feature (164)..(416): NCBI GI NO: 15237375 NR Description: pentatricopeptide (PPR) repeat-containing protein
  misc_feature (21)..(407): NCBI GI NO: 34911020 NR Description: OJ1125_C04.15
  misc_feature (169)..(389): NCBI GI NO: 34910106 NR Description: B1100D10.28
  misc_feature (18)..(334): NCBI GI NO: 15234170 NR Description: pentatricopeptide (PPR) repeat-containing protein
  misc_feature (169)..(399): NCBI GI NO: 38567720 NR Description: B1358B12.18
  misc_feature (167)..(395): NCBI GI NO: 15218325 NR Description: pentatricopeptide (PPR) repeat-containing protein
RYSQPSNPLLLHTDAMLPSPPATSPARLHKLVTSQQDPLLALELVNVTSPTTTPHPATLHSLLLRLARRRDHLPHALALLRRLPSPPSPRLLLPLLLAALRLRRPPQLFLSTFNSLFVSGPSPLPLHPHLLLRLLGVLSSTPSHFPSALHLLRLVSSRLPLPAPLVLASHNLLIDAAARSGHVAVSLSLFHRLRSLHVSPDADTYRILTQSLCRKAQVRTAATLLDEMLHRGIPADPLAYTTVLNALCRKKQLREAYRLLCLMRGRGVSPDIVHYNTVIVGMCREGRPLDACKVVVDMMDNGCTPNAVTYGTVVNGLCVSGLYDKAEAYLVDMVGKGLVPHFSVFHSVIRGCCTVGKVEEAAQIMSRMLDLGVVPHVESWSSVIRCVCKDEDCIEAELLQIVGRQRGSNMISDRVP

SEQ ID NO: 19378 - protein, 401 aa, Zea mays subsp. mays
  peptide (1)..(401): Ceres Seq. ID no. 15226687
  misc_feature (258)..(292): Pfam Name: Pfam Description:  PPR repeat
  misc_feature (3)..(383): NCBI GI NO: 7486352 NR Description: hypothetical protein F3D13
  misc_feature (154)..(389): NCBI GI NO: 15218325 NR Description: pentatricopeptide (PPR) repeat-containing protein
  misc_feature (157)..(385): NCBI GI NO: 38567720 NR Description: B1358B12.18
  misc_feature (152)..(377): NCBI GI NO: 38567720 NR Description: B1358B12.18
  misc_feature (149)..(401): NCBI GI NO: 15237375 NR Description: pentatricopeptide (PPR) repeat-containing protein
  misc_feature (6)..(392): NCBI GI NO: 34911020 NR Description: OJ1125_C04.15
  misc_feature (154)..(374): NCBI GI NO: 34910106 NR Description: B1100D10.28
  misc_feature (3)..(319): NCBI GI NO: 15234170 NR Description: pentatricopeptide (PPR) repeat-containing protein
  misc_feature (154)..(384): NCBI GI NO: 38567720 NR Description: B1358B12.18
  misc_feature (152)..(380): NCBI GI NO: 15218325 NR Description: pentatricopeptide (PPR) repeat-containing protein
MLPSPPATSPARLHKLVTSQQDPLLALELVNVTSPTTTPHPATLHSLLLRLARRRDHLPHALALLRRLPSPPSPRLLLPLLLAALRLRRPPQLFLSTFNSLFVSGPSPLPLHPHLLLRLLGVLSSTPSHFPSALHLLRLVSSRLPLPAPLVLASHNLLIDAAARSGHVAVSLSLFHRLRSLHVSPDADTYRILTQSLCRKAQVRTAATLLDEMLHRGIPADPLAYTTVLNALCRKKQLREAYRLLCLMRGRGVSPDIVHYNTVIVGMCREGRPLDACKVVVDMMDNGCTPNAVTYGTVVNGLCVSGLYDKAEAYLVDMVGKGLVPHFSVFHSVIRGCCTVGKVEEAAQIMSRMLDLGVVPHVESWSSVIRCVCKDEDCIEAELLQIVGRQRGSNMISDRVP

SEQ ID NO: 19379 - DNA, 881 bp, Zea mays subsp. mays
  misc_feature (1)..(881): Ceres Seq. ID no. 12590014
atcctaatcaaaaaaaccagaggtggttggtgcatcagcacacagcgcagcagcaaagataattgattgcaagcagttcatcaaacattatgatgagcatgctctgcggactccttcaaacccattcctgctctgtgtgaggtgctccattgaactgcttgatcacccaaaagattacacgacacctccagaagaacttgtacttctaccagcaagtgctaccctaggtgacctgaaagtacaggcttcaaaggctttccaagaaacgtacctgatgttccaaagcttccagactgaacagctccctgactttccaaacttcagtgatacaacccccgtgaagcatgtgcttggatcaggccagttgcttcgagtaaggggacgttgcactggggattacaggagaattgtacagttcaggatggagaggggtttggagaactggacggtggactgctcatgtggggccaaggatgatgatggggaacggatgctagcttgtgacatatgtggagtctggcagcataccaggtgctcgggaataagtgattttgaggaagtccctgaaaatttcatctgcagaaagtgtgctagtccacgcaagggagacggacgtgggggtggaggtagcaacggtggtggaacaatggaggttactgcgtctgggaggtgcaaggatgaaattggagcatcagttggtggagcaggcaagtatgggcgcatggcaacagttggatgactgtacataatgtagtgaaacgtaaatagtgagatggagagtagtaaggtgcacctaaaggcttttgtggaccttgagtggtgttaaatggatcttgtcgctgaccactgatgtgatgttaatctgttctccttgcagttgc

SEQ ID NO: 19380 - protein, 154 aa, Zea mays subsp. mays
  peptide (1)..(154): Ceres Seq. ID no. 12590015
  misc_feature (60)..(108): Pfam Name: Pfam Description:  PHD-finger
  misc_feature (1)..(154): NCBI GI NO: 34907348 NR Description: putative male sterility 1 protein
  misc_feature (1)..(105): NCBI GI NO: 18398841 NR Description: expressed protein; protein id: At1g33420
  misc_feature (1)..(105): NCBI GI NO: 15226359 NR Description: hypothetical protein; protein id: At2g01810.1
  misc_feature (1)..(105): NCBI GI NO: 15218943 NR Description: PHD-finger protein, putative; protein id:At1g66170
  misc_feature (1)..(105): NCBI GI NO: 31442870 NR Description: male meiotic MMD1 [Arabidopsis thaliana]
  misc_feature (1)..(105): NCBI GI NO: 18071367 NR Description: putative collagen
  misc_feature (57)..(107): NCBI GI NO: 8778206 NR Description: F6N18.18 [Arabidopsis thaliana]
  misc_feature (59)..(105): NCBI GI NO: 15242181 NR Description: putative protein; protein id: At5g22260.1
  misc_feature (59)..(105): NCBI GI NO: 15554513 NR Description: male sterility 1 protein [Arabidopsis thaliana]
  misc_feature (57)..(107): NCBI GI NO: 15223306 NR Description: hypothetical protein; protein id: At1g32800.1
MFQSFQTEQLPDFPNFSDTTPVKHVLGSGQLLRVRGRCTGDYRRIVQFRMERGLENWTVDCSCGAKDDDGERMLACDICGVWQHTRCSGISDFEEVPENFICRKCASPRKGDGRGGGGSNGGGTMEVTASGRCKDEIGASVGGAGKYGRMATVG

SEQ ID NO: 19381 - protein, 105 aa, Zea mays subsp. mays
  peptide (1)..(105): Ceres Seq. ID no. 12590016
  misc_feature (11)..(59): Pfam Name: Pfam Description:  PHD-finger
  misc_feature (1)..(105): NCBI GI NO: 34907348 NR Description: putative male sterility 1 protein
  misc_feature (1)..(56): NCBI GI NO: 18398841 NR Description: expressed protein; protein id: At1g33420
  misc_feature (1)..(56): NCBI GI NO: 15226359 NR Description: hypothetical protein; protein id: At2g01810.1
  misc_feature (1)..(56): NCBI GI NO: 15218943 NR Description: PHD-finger protein, putative; protein id:At1g66170
  misc_feature (1)..(56): NCBI GI NO: 31442870 NR Description: male meiotic MMD1 [Arabidopsis thaliana]
  misc_feature (1)..(56): NCBI GI NO: 18071367 NR Description: putative collagen
  misc_feature (8)..(58): NCBI GI NO: 8778206 NR Description: F6N18.18 [Arabidopsis thaliana]
  misc_feature (10)..(56): NCBI GI NO: 15242181 NR Description: putative protein; protein id: At5g22260.1
  misc_feature (10)..(56): NCBI GI NO: 15554513 NR Description: male sterility 1 protein [Arabidopsis thaliana]
  misc_feature (8)..(58): NCBI GI NO: 15223306 NR Description: hypothetical protein; protein id: At1g32800.1
MERGLENWTVDCSCGAKDDDGERMLACDICGVWQHTRCSGISDFEEVPENFICRKCASPRKGDGRGGGGSNGGGTMEVTASGRCKDEIGASVGGAGKYGRMATVG

SEQ ID NO: 19382 - protein, 82 aa, Zea mays subsp. mays
  peptide (1)..(82): Ceres Seq. ID no. 12590017
  misc_feature (1)..(36): Pfam Name: Pfam Description:  PHD-finger
  misc_feature (1)..(82): NCBI GI NO: 34907348 NR Description: putative male sterility 1 protein
  misc_feature (1)..(33): NCBI GI NO: 18398841 NR Description: expressed protein; protein id: At1g33420
  misc_feature (1)..(33): NCBI GI NO: 15226359 NR Description: hypothetical protein; protein id: At2g01810.1
  misc_feature (1)..(33): NCBI GI NO: 15218943 NR Description: PHD-finger protein, putative; protein id:At1g66170
  misc_feature (1)..(33): NCBI GI NO: 31442870 NR Description: male meiotic MMD1 [Arabidopsis thaliana]
  misc_feature (1)..(33): NCBI GI NO: 18071367 NR Description: putative collagen
  misc_feature (1)..(35): NCBI GI NO: 8778206 NR Description: F6N18.18 [Arabidopsis thaliana]
  misc_feature (1)..(33): NCBI GI NO: 15242181 NR Description: putative protein; protein id: At5g22260.1
  misc_feature (1)..(33): NCBI GI NO: 15554513 NR Description: male sterility 1 protein [Arabidopsis thaliana]
  misc_feature (1)..(35): NCBI GI NO: 15223306 NR Description: hypothetical protein; protein id: At1g32800.1
MLACDICGVWQHTRCSGISDFEEVPENFICRKCASPRKGDGRGGGGSNGGGTMEVTASGRCKDEIGASVGGAGKYGRMATVG

SEQ ID NO: 19383 - DNA, 902 bp, Zea mays subsp. mays
  misc_feature (1)..(902): Ceres Seq. ID no. 13587149
aacctactcacaaagcaaccagacaacacatacatctctcatctctctattctctctcactgtaaacttcaaataatgatgggataccaaacaaacgctaatttctccatgttgtacgaccaagaccaccctcataattatgattatgatgacctctcttcatcaacttctgttgattgcactctctcccttggaacaccatctactcgtctcgacaaacaccgtagattttcttctgccaattctaacaacatctccggcgacttcttctttcacggaggaagcgcaaaaacgacgtcttacaaaaagagcggtagtgagcacaacctgcctcgccgttgtgctagctgcgacacttcttctactcctctatggagaaacggaccaaaagggcctaagtcgttatgcaatgcgtgtggaatcagattcaagaaggaagagaagcgtgcagctgccagaaactcaataacgtccggtggtggttcatcagtggcagaagttccggcagagaacccgtacaacggaggtggaaactattacactcatcatcaccatgcttcctcgtcaccgtcgtgggctcatcagaacacacaaagagttcagtatttctcgccggcaccggagatggaatatccgttcgttgatgacgtcacggctgcctcgtttatgtcttggaattaacgtcacggaaaccactggccttctccaccatttttgacgagatgaatgaagaaacgttacctatggaaggtcttgtcatagattctcacccaaagtaaatcagtcctggtcaaattcattataaagtttctttttatttatttatttcttacatcgacactatctccttgtgttttctttttatgtctttttgaaagatatatatacgtactgtagtgttt

SEQ ID NO: 19384 - protein, 226 aa, Zea mays subsp. mays
  peptide (1)..(226): Ceres Seq. ID no. 13587150
  misc_feature (27)..(226): NCBI GI NO: 15224164 NR Description: GATA zinc finger protein [Arabidopsis thaliana]
  misc_feature (35)..(225): NCBI GI NO: 15234463 NR Description: GATA zinc finger protein [Arabidopsis thaliana]
  misc_feature (105)..(216): NCBI GI NO: 21555178 NR Description: transcription factor-like protein
  misc_feature (31)..(115): NCBI GI NO: 21555178 NR Description: transcription factor-like protein
  misc_feature (105)..(216): NCBI GI NO: 7488381 NR Description: transcription factor homolog F18B3
  misc_feature (105)..(216): NCBI GI NO: 18409199 NR Description: GATA zinc finger protein [Arabidopsis thaliana]
  misc_feature (31)..(115): NCBI GI NO: 7488381 NR Description: transcription factor homolog F18B3
  misc_feature (31)..(115): NCBI GI NO: 18409199 NR Description: GATA zinc finger protein [Arabidopsis thaliana]
  misc_feature (48)..(165): NCBI GI NO: 34912080 NR Description: P0671D01.19
  misc_feature (94)..(133): NCBI GI NO: 5091599 NR Description: 10A19I.2 [Oryza sativa]
NLLTKQPDNTYISHLSILSHCKLQIMMGYQTNANFSMLYDQDHPHNYDYDDLSSSTSVDCTLSLGTPSTRLDKHRRFSSANSNNISGDFFFHGGSAKTTSYKKSGSEHNLPRRCASCDTSSTPLWRNGPKGPKSLCNACGIRFKKEEKRAAARNSITSGGGSSVAEVPAENPYNGGGNYYTHHHHASSSPSWAHQNTQRVQYFSPAPEMEYPFVDDVTAASFMSWN

SEQ ID NO: 19385 - protein, 201 aa, Zea mays subsp. mays
  peptide (1)..(201): Ceres Seq. ID no. 13587151
  misc_feature (2)..(201): NCBI GI NO: 15224164 NR Description: GATA zinc finger protein [Arabidopsis thaliana]
  misc_feature (10)..(200): NCBI GI NO: 15234463 NR Description: GATA zinc finger protein [Arabidopsis thaliana]
  misc_feature (80)..(191): NCBI GI NO: 21555178 NR Description: transcription factor-like protein
  misc_feature (6)..(90): NCBI GI NO: 21555178 NR Description: transcription factor-like protein
  misc_feature (80)..(191): NCBI GI NO: 7488381 NR Description: transcription factor homolog F18B3
  misc_feature (80)..(191): NCBI GI NO: 18409199 NR Description: GATA zinc finger protein [Arabidopsis thaliana]
  misc_feature (6)..(90): NCBI GI NO: 7488381 NR Description: transcription factor homolog F18B3
  misc_feature (6)..(90): NCBI GI NO: 18409199 NR Description: GATA zinc finger protein [Arabidopsis thaliana]
  misc_feature (23)..(140): NCBI GI NO: 34912080 NR Description: P0671D01.19
  misc_feature (69)..(108): NCBI GI NO: 5091599 NR Description: 10A19I.2 [Oryza sativa]
MMGYQTNANFSMLYDQDHPHNYDYDDLSSSTSVDCTLSLGTPSTRLDKHRRFSSANSNNISGDFFFHGGSAKTTSYKKSGSEHNLPRRCASCDTSSTPLWRNGPKGPKSLCNACGIRFKKEEKRAAARNSITSGGGSSVAEVPAENPYNGGGNYYTHHHHASSSPSWAHQNTQRVQYFSPAPEMEYPFVDDVTAASFMSWN

SEQ ID NO: 19386 - protein, 200 aa, Zea mays subsp. mays
  peptide (1)..(200): Ceres Seq. ID no. 13587152
  misc_feature (1)..(200): NCBI GI NO: 15224164 NR Description: GATA zinc finger protein [Arabidopsis thaliana]
  misc_feature (9)..(199): NCBI GI NO: 15234463 NR Description: GATA zinc finger protein [Arabidopsis thaliana]
  misc_feature (79)..(190): NCBI GI NO: 21555178 NR Description: transcription factor-like protein
  misc_feature (5)..(89): NCBI GI NO: 21555178 NR Description: transcription factor-like protein
  misc_feature (79)..(190): NCBI GI NO: 7488381 NR Description: transcription factor homolog F18B3
  misc_feature (79)..(190): NCBI GI NO: 18409199 NR Description: GATA zinc finger protein [Arabidopsis thaliana]
  misc_feature (5)..(89): NCBI GI NO: 7488381 NR Description: transcription factor homolog F18B3
  misc_feature (5)..(89): NCBI GI NO: 18409199 NR Description: GATA zinc finger protein [Arabidopsis thaliana]
  misc_feature (22)..(139): NCBI GI NO: 34912080 NR Description: P0671D01.19
  misc_feature (68)..(107): NCBI GI NO: 5091599 NR Description: 10A19I.2 [Oryza sativa]
MGYQTNANFSMLYDQDHPHNYDYDDLSSSTSVDCTLSLGTPSTRLDKHRRFSSANSNNISGDFFFHGGSAKTTSYKKSGSEHNLPRRCASCDTSSTPLWRNGPKGPKSLCNACGIRFKKEEKRAAARNSITSGGGSSVAEVPAENPYNGGGNYYTHHHHASSSPSWAHQNTQRVQYFSPAPEMEYPFVDDVTAASFMSWN

SEQ ID NO: 19387 - DNA, 718 bp, Zea mays subsp. mays
  misc_feature (1)..(718): Ceres Seq. ID no. 12635807
ataacccacagagaacccaagaaaccttctcaaatcctctaaagaaaagaaatggcctccacagctatctcaagcgtcatcgtcggaacatccttcctccgccgtcaaacatctcccatcagcctccgttccctccccttagccaacactcagaccctcttcggcctcaagtcaggaaccgcacgtggtggacgcgtcacagccatggctacatacaaggtcaagttcatcactcccgaaggagagcaagaggttgagtgcgacgacgacgtttacgtcctcgacgctgctgaggaagccgggatcgacttgccttactcttgccgtgccggttcttgctcgagctgtgcaggtaaagttgtgtctggttttgttgaccagtctgaccagagtttcctcgatgatgaccagattgctgcagggtttgttctcacctgtgcggcttatcctacttctgatgttaccattgagacccacagagaagatgacattgtttaagacaaaagctccattaacatgctgcttttgatggtttcataatcattcatgtctttacattttgggttgagtttgttgttactttagtataatctatattgttgtctgttgtaattgttcttggtttggaccatcttttggttagatcaatggataactgtttcaaacttatggtaatgcaatttctgaagaacttttgatgagaaaaaaaaaaaaaaaa

SEQ ID NO: 19388 - protein, 148 aa, Zea mays subsp. mays; identical to SEQ ID NO: 10978
  peptide (1)..(148): Ceres Seq. ID no. 12635808
  misc_feature (60)..(135): Pfam Name: Pfam Description:  2Fe-2S iron-sulfur cluster binding domain
  misc_feature (1)..(148): NCBI GI NO: 15219837 NR Description: ferrodoxin precursor; protein id: At1g60950
  misc_feature (1)..(148): NCBI GI NO: 15220256 NR Description: ferredoxin precusor isolog; protein id:At1g10960
  misc_feature (1)..(118): NCBI GI NO: 16604416 NR Description: At1g10960/T19D16_12 [Arabidopsis thaliana]
  misc_feature (53)..(148): NCBI GI NO: 81707 NR Description: ferredoxin [2Fe-2S] A, leaf - radish
  misc_feature (53)..(148): NCBI GI NO: 947124 NR Description: ferredoxin component a1
  misc_feature (53)..(148): NCBI GI NO: 119959 NR Description: FERREDOXIN, LEAF L-A
  misc_feature (53)..(148): NCBI GI NO: 119980 NR Description: FERREDOXIN
  misc_feature (1)..(147): NCBI GI NO: 3023743 NR Description: Ferredoxin I, chloroplast precursor
  misc_feature (53)..(147): NCBI GI NO: 364015 NR Description: ferredoxin LFdA
  misc_feature (1)..(147): NCBI GI NO: 119931 NR Description: Ferredoxin I, chloroplast precursor

SEQ ID NO: 19389 - protein, 97 aa, Zea mays subsp. mays; identical to SEQ ID NO: 10979
  peptide (1)..(97): Ceres Seq. ID no. 12635809
  misc_feature (9)..(84): Pfam Name: Pfam Description:  2Fe-2S iron-sulfur cluster binding domain
  misc_feature (1)..(97): NCBI GI NO: 15219837 NR Description: ferrodoxin precursor; protein id: At1g60950
  misc_feature (1)..(97): NCBI GI NO: 15220256 NR Description: ferredoxin precusor isolog; protein id:At1g10960
  misc_feature (1)..(67): NCBI GI NO: 16604416 NR Description: At1g10960/T19D16_12 [Arabidopsis thaliana]
  misc_feature (2)..(97): NCBI GI NO: 81707 NR Description: ferredoxin [2Fe-2S] A, leaf - radish
  misc_feature (2)..(97): NCBI GI NO: 947124 NR Description: ferredoxin component a1
  misc_feature (2)..(97): NCBI GI NO: 119959 NR Description: FERREDOXIN, LEAF L-A
  misc_feature (2)..(97): NCBI GI NO: 119980 NR Description: FERREDOXIN
  misc_feature (1)..(96): NCBI GI NO: 3023743 NR Description: Ferredoxin I, chloroplast precursor
  misc_feature (2)..(96): NCBI GI NO: 364015 NR Description: ferredoxin LFdA
  misc_feature (1)..(96): NCBI GI NO: 119931 NR Description: Ferredoxin I, chloroplast precursor

SEQ ID NO: 19390 - protein, 84 aa, Zea mays subsp. mays; identical to SEQ ID NO: 10980
  peptide (1)..(84): Ceres Seq. ID no. 12635810

SEQ ID NO: 19391 - DNA, 1020 bp, Zea mays subsp. mays
  misc_feature (1)..(1020): Ceres Seq. ID no. 13599278
gtacagatgcttctccctcctcctcctctagaaacttctcccatggcggcttcttctgctctctcctcaccagcgcttctctccaacaaccgctctcctccgtcatgcggctccgtcagacgctcgatctcctcctccccggtgctcatcgctactcccagatcgtctcgtttgagcttcacaatacctgagaggagaagcctcgtcgtgaaatcaaccgtcggcgaggtctcctttcgcgaaccggcaacatcgggagataaggagggaatcgaatcgctgaaactcaaattactgagggtggtttcgggtttgaacagaggacttgtggcgagtgtagatgatctacaaagtgctgaggccgctgctaaattacttgaagccgctggtgggcctgtggatctaaccaatgatcttgacaaactccaagggaaatggaggctgctgtatagcagcgccttctcttctcgctctttaggtggtagccgtcctggtctacccactggtcgcttgattcccgtcactcttggccaggtgtttcagaggattgatgtgtttagcaaagatttcgataacattgccgaagtggagttaggagctccttggccgtttcctcctctggaagccactgcaacactggcacacaaattcgaactcttaggtacttgcaagatcaagatcacatttgagaaaacaactgtgaagacatcgggaaacttagcgcagattcctccgtttgagatcccgaggcttcccgatagtttcaggccaccgtctaaccctggaactggagattttgaagtcacctatgttgatgagaacatgcgcataactcgtggggatagaggtgaacttagggtctttgtcattgcttaagtcaaaaggaggtttgacatgtaaagatcaagtactttctgcttgttgcagcagccttatgacccctatgagttttgtacacatcgtttgaacgttgattatagatgtattttataatgaagtgaatgtcagttatgcttagtg

SEQ ID NO: 19392 - protein, 291 aa, Zea mays subsp. mays
  peptide (1)..(291): Ceres Seq. ID no. 13599279
  misc_feature (94)..(289): Pfam Name: Pfam Description:  PAP_fibrillin
  misc_feature (15)..(291): NCBI GI NO: 18403751 NR Description: plastid-lipid associated protein PAP/fibrillinfamily
  misc_feature (15)..(291): NCBI GI NO: 21592536 NR Description: unknown [Arabidopsis thaliana]
  misc_feature (95)..(287): NCBI GI NO: 22297962 NR Description: fibrillin [Thermosynechococcus elongatus BP-1]
  misc_feature (95)..(291): NCBI GI NO: 16329838 NR Description: fibrillin [Synechocystis sp. PCC 6803]
  misc_feature (95)..(291): NCBI GI NO: 17231810 NR Description: fibrillin [Nostoc sp. PCC 7120]
  misc_feature (95)..(291): NCBI GI NO: 5020103 NR Description: fibrillin [Nostoc sp. PCC 8009]
  misc_feature (95)..(291): NCBI GI NO: 23126201 NR Description: hypothetical protein [Nostoc punctiforme]
  misc_feature (95)..(289): NCBI GI NO: 23041005 NR Description: hypothetical protein
VQMLLPPPPLETSPMAASSALSSPALLSNNRSPPSCGSVRRSISSSPVLIATPRSSRLSFTIPERRSLVVKSTVGEVSFREPATSGDKEGIESLKLKLLRVVSGLNRGLVASVDDLQSAEAAAKLLEAAGGPVDLTNDLDKLQGKWRLLYSSAFSSRSLGGSRPGLPTGRLIPVTLGQVFQRIDVFSKDFDNIAEVELGAPWPFPPLEATATLAHKFELLGTCKIKITFEKTTVKTSGNLAQIPPFEIPRLPDSFRPPSNPGTGDFEVTYVDENMRITRGDRGELRVFVIA

SEQ ID NO: 19393 - protein, 289 aa, Zea mays subsp. mays
  peptide (1)..(289): Ceres Seq. ID no. 13599280
  misc_feature (92)..(287): Pfam Name: Pfam Description:  PAP_fibrillin
  misc_feature (13)..(289): NCBI GI NO: 18403751 NR Description: plastid-lipid associated protein PAP/fibrillinfamily
  misc_feature (13)..(289): NCBI GI NO: 21592536 NR Description: unknown [Arabidopsis thaliana]
  misc_feature (93)..(285): NCBI GI NO: 22297962 NR Description: fibrillin [Thermosynechococcus elongatus BP-1]
  misc_feature (93)..(289): NCBI GI NO: 16329838 NR Description: fibrillin [Synechocystis sp. PCC 6803]
  misc_feature (93)..(289): NCBI GI NO: 17231810 NR Description: fibrillin [Nostoc sp. PCC 7120]
  misc_feature (93)..(289): NCBI GI NO: 5020103 NR Description: fibrillin [Nostoc sp. PCC 8009]
  misc_feature (93)..(289): NCBI GI NO: 23126201 NR Description: hypothetical protein [Nostoc punctiforme]
  misc_feature (93)..(287): NCBI GI NO: 23041005 NR Description: hypothetical protein
MLLPPPPLETSPMAASSALSSPALLSNNRSPPSCGSVRRSISSSPVLIATPRSSRLSFTIPERRSLVVKSTVGEVSFREPATSGDKEGIESLKLKLLRVVSGLNRGLVASVDDLQSAEAAAKLLEAAGGPVDLTNDLDKLQGKWRLLYSSAFSSRSLGGSRPGLPTGRLIPVTLGQVFQRIDVFSKDFDNIAEVELGAPWPFPPLEATATLAHKFELLGTCKIKITFEKTTVKTSGNLAQIPPFEIPRLPDSFRPPSNPGTGDFEVTYVDENMRITRGDRGELRVFVIA

SEQ ID NO: 19394 - protein, 277 aa, Zea mays subsp. mays
  peptide (1)..(277): Ceres Seq. ID no. 13599281
  misc_feature (80)..(275): Pfam Name: Pfam Description:  PAP_fibrillin
  misc_feature (1)..(277): NCBI GI NO: 18403751 NR Description: plastid-lipid associated protein PAP/fibrillinfamily
  misc_feature (1)..(277): NCBI GI NO: 21592536 NR Description: unknown [Arabidopsis thaliana]
  misc_feature (81)..(273): NCBI GI NO: 22297962 NR Description: fibrillin [Thermosynechococcus elongatus BP-1]
  misc_feature (81)..(277): NCBI GI NO: 16329838 NR Description: fibrillin [Synechocystis sp. PCC 6803]
  misc_feature (81)..(277): NCBI GI NO: 17231810 NR Description: fibrillin [Nostoc sp. PCC 7120]
  misc_feature (81)..(277): NCBI GI NO: 5020103 NR Description: fibrillin [Nostoc sp. PCC 8009]
  misc_feature (81)..(277): NCBI GI NO: 23126201 NR Description: hypothetical protein [Nostoc punctiforme]
  misc_feature (81)..(275): NCBI GI NO: 23041005 NR Description: hypothetical protein
MAASSALSSPALLSNNRSPPSCGSVRRSISSSPVLIATPRSSRLSFTIPERRSLVVKSTVGEVSFREPATSGDKEGIESLKLKLLRVVSGLNRGLVASVDDLQSAEAAAKLLEAAGGPVDLTNDLDKLQGKWRLLYSSAFSSRSLGGSRPGLPTGRLIPVTLGQVFQRIDVFSKDFDNIAEVELGAPWPFPPLEATATLAHKFELLGTCKIKITFEKTTVKTSGNLAQIPPFEIPRLPDSFRPPSNPGTGDFEVTYVDENMRITRGDRGELRVFVIA

SEQ ID NO: 19395 - DNA, 842 bp, Zea mays subsp. mays
  misc_feature (1)..(842): Ceres Seq. ID no. 13599510
atatcaagctactgagttctgactatccaacttaaaattatattatcttttcgacttcagattctcctctatttcactcaaacactaaagcttcagaaaatggcaatggcgtcgtttaacatgcagtcagtcttcgccggtggactgaccactcgcaagatcaacacgaacaagctttgctttgccggaaacttccataatctcaagaggaattgtcccgtgggagtgagatgtatggctgagggagaaccaatgaaagatgagtctgcaccttcgacctcggcgtctcagcctttgcccaagtcatcgtcgccaccaccacctcctcctactaaacctaaggtgagcacaaagtttagcgacttgctagcgttcagcggtccagcaccggaaagaataaacggtcgtttagctatggttggattcgtggctgcgttggcggttgaactttccaagggtgaaaacgttttagctcagatctccgacggtggtgtctcgtggttcctcggtacggcggcgatcttgacgcttgcgtcgcttgtgccccttttcaagggcataacagccgagtccaagtccaaaggttttatgacgtcagacgctgagctttggaatgggcgttttgcgatgcttggtttgttcgcgctggcgttcactgagtttgtcaagggtgggactctcgtttgagaaagaagagattgtgtattgcaaaatttgcccctgaatcctgtatagtattctggcttgttttaggcctactctgtgtcttttacatatggattagtgacatttgaaactttgggttaaaacactttgagtttagttaaagcagtggtaatggt

SEQ ID NO: 19396 - protein, 195 aa, Zea mays subsp. mays
  peptide (1)..(195): Ceres Seq. ID no. 13599511
  misc_feature (1)..(195): NCBI GI NO: 38123375 NR Description: ELIP [Brassica rapa subsp. pekinensis]
  misc_feature (1)..(195): NCBI GI NO: 15228866 NR Description: early light-induced protein [Arabidopsis thaliana]
  misc_feature (1)..(195): NCBI GI NO: 21618071 NR Description: light-induced protein-like protein
  misc_feature (1)..(195): NCBI GI NO: 18414282 NR Description: expressed protein [Arabidopsis thaliana]
  misc_feature (1)..(195): NCBI GI NO: 7488128 NR Description: probable light induced protein - Arabidopsisthaliana
  misc_feature (8)..(195): NCBI GI NO: 25315849 NR Description: early light-inducable protein
  misc_feature (1)..(192): NCBI GI NO: 28194659 NR Description: putative early light induced protein
  misc_feature (1)..(195): NCBI GI NO: 7447856 NR Description: early light-inducible protein precursor - soybean
  misc_feature (58)..(195): NCBI GI NO: 16930757 NR Description: early light-induced protein-like protein
  misc_feature (1)..(195): NCBI GI NO: 33520417 NR Description: early light inducible protein [Trifolium pratense]
MAMASFNMQSVFAGGLTTRKINTNKLCFAGNFHNLKRNCPVGVRCMAEGEPMKDESAPSTSASQPLPKSSSPPPPPPTKPKVSTKFSDLLAFSGPAPERINGRLAMVGFVAALAVELSKGENVLAQISDGGVSWFLGTAAILTLASLVPLFKGITAESKSKGFMTSDAELWNGRFAMLGLFALAFTEFVKGGTLV

SEQ ID NO: 19397 - protein, 193 aa, Zea mays subsp. mays
  peptide (1)..(193): Ceres Seq. ID no. 13599512
  misc_feature (1)..(193): NCBI GI NO: 38123375 NR Description: ELIP [Brassica rapa subsp. pekinensis]
  misc_feature (1)..(193): NCBI GI NO: 15228866 NR Description: early light-induced protein [Arabidopsis thaliana]
  misc_feature (1)..(193): NCBI GI NO: 21618071 NR Description: light-induced protein-like protein
  misc_feature (1)..(193): NCBI GI NO: 18414282 NR Description: expressed protein [Arabidopsis thaliana]
  misc_feature (1)..(193): NCBI GI NO: 7488128 NR Description: probable light induced protein - Arabidopsisthaliana
  misc_feature (6)..(193): NCBI GI NO: 25315849 NR Description: early light-inducable protein
  misc_feature (1)..(190): NCBI GI NO: 28194659 NR Description: putative early light induced protein
  misc_feature (1)..(193): NCBI GI NO: 7447856 NR Description: early light-inducible protein precursor - soybean
  misc_feature (56)..(193): NCBI GI NO: 16930757 NR Description: early light-induced protein-like protein
  misc_feature (1)..(193): NCBI GI NO: 33520417 NR Description: early light inducible protein [Trifolium pratense]
MASFNMQSVFAGGLTTRKINTNKLCFAGNFHNLKRNCPVGVRCMAEGEPMKDESAPSTSASQPLPKSSSPPPPPPTKPKVSTKFSDLLAFSGPAPERINGRLAMVGFVAALAVELSKGENVLAQISDGGVSWFLGTAAILTLASLVPLFKGITAESKSKGFMTSDAELWNGRFAMLGLFALAFTEFVKGGTLV

SEQ ID NO: 19398 - protein, 188 aa, Zea mays subsp. mays
  peptide (1)..(188): Ceres Seq. ID no. 13599513
  misc_feature (1)..(188): NCBI GI NO: 38123375 NR Description: ELIP [Brassica rapa subsp. pekinensis]
  misc_feature (1)..(188): NCBI GI NO: 15228866 NR Description: early light-induced protein [Arabidopsis thaliana]
  misc_feature (1)..(188): NCBI GI NO: 21618071 NR Description: light-induced protein-like protein
  misc_feature (1)..(188): NCBI GI NO: 18414282 NR Description: expressed protein [Arabidopsis thaliana]
  misc_feature (1)..(188): NCBI GI NO: 7488128 NR Description: probable light induced protein - Arabidopsisthaliana
  misc_feature (1)..(188): NCBI GI NO: 25315849 NR Description: early light-inducable protein
  misc_feature (1)..(185): NCBI GI NO: 28194659 NR Description: putative early light induced protein
  misc_feature (1)..(188): NCBI GI NO: 7447856 NR Description: early light-inducible protein precursor - soybean
  misc_feature (51)..(188): NCBI GI NO: 16930757 NR Description: early light-induced protein-like protein
  misc_feature (1)..(188): NCBI GI NO: 33520417 NR Description: early light inducible protein [Trifolium pratense]
MQSVFAGGLTTRKINTNKLCFAGNFHNLKRNCPVGVRCMAEGEPMKDESAPSTSASQPLPKSSSPPPPPPTKPKVSTKFSDLLAFSGPAPERINGRLAMVGFVAALAVELSKGENVLAQISDGGVSWFLGTAAILTLASLVPLFKGITAESKSKGFMTSDAELWNGRFAMLGLFALAFTEFVKGGTLV

SEQ ID NO: 19399 - DNA, 877 bp, Zea mays subsp. mays
  misc_feature (1)..(877): Ceres Seq. ID no. 12635132
aataccaacggtttcattcatatctgactcagtgttcctgattctccagcgaccaagacaagactatcttcgcagtccaggagatgttaggaagctccttagcttcccctttggctacattgggtcctgccaattgctttcgacactctgcaggtgattctctaacatgcactagtgttctaccattgagcctgaacttgtcatatcatggtgtggctggaggagtaaggacatctcgtggtccacgaaacaagtggatagtggtctgttcaccaacgcaagtggaaacctctggtgatgagccaaagacatgggaagaatgcaaagaagctctgtctcgttttgatttcagcgtagaggagcaagacaagatactaggaaaagcgtttggtcatatccactcgccctactggacagaagaacgagtgaaagagaatccaaaggtggaagctttgaatcacgtacttgagttccttagaagtctcggtttgtcagacgaggatcttcacaaagtgctgaagaagttcccggaagtactcggttgcagcttagaagaagagatgaaacccaacattgggatcttggaaaatcaatgggggattacgggtaagtcgctgcgaagtctgttgctccggaacccgaaagtgttggggtacaatgtggattgtaaaggagattgtattgctcagtgcactcggtgttgggttcggttttagtctttctttccctagttcgtttgtttgtctctagtctctccatcttatggtttcattacagctactgaaataaactagcctcgatggttgaaggaccaatgtgaatgcttgtactttagatgaatcacacattaatttttatttgatgaattagaatgttt

SEQ ID NO: 19400 - protein, 210 aa, Zea mays subsp. mays
  peptide (1)..(210): Ceres Seq. ID no. 12635133
  misc_feature (128)..(194): Pfam Name: Pfam Description:  mTERF
  misc_feature (1)..(210): NCBI GI NO: 30681137 NR Description: expressed protein [Arabidopsis thaliana]
  misc_feature (1)..(210): NCBI GI NO: 25372638 NR Description: hypothetical protein AT4g09620
  misc_feature (1)..(210): NCBI GI NO: 15810253 NR Description: unknown protein [Arabidopsis thaliana]
  misc_feature (46)..(210): NCBI GI NO: 28376711 NR Description: unknown protein
MLGSSLASPLATLGPANCFRHSAGDSLTCTSVLPLSLNLSYHGVAGGVRTSRGPRNKWIVVCSPTQVETSGDEPKTWEECKEALSRFDFSVEEQDKILGKAFGHIHSPYWTEERVKENPKVEALNHVLEFLRSLGLSDEDLHKVLKKFPEVLGCSLEEEMKPNIGILENQWGITGKSLRSLLLRNPKVLGYNVDCKGDCIAQCTRCWVRF

SEQ ID NO: 19401 - DNA, 753 bp, Zea mays subsp. mays
  misc_feature (1)..(753): Ceres Seq. ID no. 13599514
cttcttcctctccgcattccatcagtgtttgtttttgggtgaaactgacaaagagtgcgagaaaaatgagcggagccgggaagaaagtggcggatgtggcgttcaaagcgtcgaggacaatagattgggaagggatggcaaaggtccttgtcaccgatgaggctcgaagagagttctctaacctccgtcgcgctttcgacgaggtcaacactcagctccaaaccaagttcagccaggagcctgaacccattgattgggatttttacagaaagggtattggctctggcattgttgacatgtacaaggaagcttacgacagcgttgagattcccaagtacgtggacaatgttacccctgaatacaagccaaagtttgatgctttgttggtggaactgaaagaagcagaacagaaatctctcaaggagtctgaacggctagagaaagaaattattgatgtccaggagataagcaaaaagctcagcaccatgactgcagatgagtactttgagaagcaccccgaactcaagaagaagtttgatgacgagatccggaacgactactggggatactgattcatcatatttcttgtatctccggtctggaaatgaaactctctcttctctttttcttttgatgtgattttgtgagtgtcaaccataacataataaggaccactccatttacttaagcagtgtgttgagatattcattggagatccaatgagacaatgacgataaaaacccatttggttcc

SEQ ID NO: 19402 - protein, 189 aa, Zea mays subsp. mays
  peptide (1)..(189): Ceres Seq. ID no. 13599515
  misc_feature (22)..(189): NCBI GI NO: 15231176 NR Description: expressed protein [Arabidopsis thaliana]
  misc_feature (45)..(189): NCBI GI NO: 17939851 NR Description: mitochondrial F0 ATP synthase D chain
  misc_feature (22)..(189): NCBI GI NO: 32352148 NR Description: hypothetical protein
SSSPHSISVCFWVKLTKSARKMSGAGKKVADVAFKASRTIDWEGMAKVLVTDEARREFSNLRRAFDEVNTQLQTKFSQEPEPIDWDFYRKGIGSGIVDMYKEAYDSVEIPKYVDNVTPEYKPKFDALLVELKEAEQKSLKESERLEKEIIDVQEISKKLSTMTADEYFEKHPELKKKFDDEIRNDYWGY

SEQ ID NO: 19403 - protein, 168 aa, Zea mays subsp. mays
  peptide (1)..(168): Ceres Seq. ID no. 13599516
  misc_feature (1)..(168): NCBI GI NO: 15231176 NR Description: expressed protein [Arabidopsis thaliana]
  misc_feature (24)..(168): NCBI GI NO: 17939851 NR Description: mitochondrial F0 ATP synthase D chain
  misc_feature (1)..(168): NCBI GI NO: 32352148 NR Description: hypothetical protein
MSGAGKKVADVAFKASRTIDWEGMAKVLVTDEARREFSNLRRAFDEVNTQLQTKFSQEPEPIDWDFYRKGIGSGIVDMYKEAYDSVEIPKYVDNVTPEYKPKFDALLVELKEAEQKSLKESERLEKEIIDVQEISKKLSTMTADEYFEKHPELKKKFDDEIRNDYWGY

SEQ ID NO: 19404 - protein, 145 aa, Zea mays subsp. mays
  peptide (1)..(145): Ceres Seq. ID no. 13599517
  misc_feature (1)..(145): NCBI GI NO: 15231176 NR Description: expressed protein [Arabidopsis thaliana]
  misc_feature (1)..(145): NCBI GI NO: 17939851 NR Description: mitochondrial F0 ATP synthase D chain
  misc_feature (1)..(145): NCBI GI NO: 32352148 NR Description: hypothetical protein
MAKVLVTDEARREFSNLRRAFDEVNTQLQTKFSQEPEPIDWDFYRKGIGSGIVDMYKEAYDSVEIPKYVDNVTPEYKPKFDALLVELKEAEQKSLKESERLEKEIIDVQEISKKLSTMTADEYFEKHPELKKKFDDEIRNDYWGY

SEQ ID NO: 19405 - DNA, 743 bp, Zea mays subsp. mays
  misc_feature (1)..(743): Ceres Seq. ID no. 12635134
accatcttcccacttccctttgagaaagaaaacagaacaaagaaaaagaaagaaagcaaacagaaacaaatggcactgagaatgtgggcttcctctacagcaaacgctctcaagctctcttcttctgcatccagatctcatctccttccagctttctccatctccagatgcttctcctcagtgttggaaggacttaagtatgcaaattcacatgagtgggtgaaacatgaaggctcagtggctactattggcatcagtgaccatgcccaggatcatttaggagaagttgtgtttgtggagctgcctgaagaaaaaagttcagtgaccaaagaaaaaaactttggagcagtggagagtgtgaaggcaacaagtgagattatatctccaatctctggtgaagtcatcgaggttaacacaaagctcgctgattcacctggcttgattaactcaagcccttacgaagatggttggatgataaaggtgaaaccaagcaaccccgcagagctggaatccttgatgggtccaaaggaatacaccaagttctgcgaagaggaagatgctgctcactagggtttcttcgtctttcccagtatgtcctaaacaaaaagcaaaacaagagagaacccatgctaaatgtttcaatcttttcactacttctcaatgtttcctacctctgtatcaaatttgtatctctgtaatactgttttggttaaaaatcattcgatgagtctcaagagagcttt

SEQ ID NO: 19406 - protein, 189 aa, Zea mays subsp. mays
  peptide (1)..(189): Ceres Seq. ID no. 12635135
  misc_feature (65)..(185): Pfam Name: Pfam Description:  Glycine cleavage H-protein
  misc_feature (24)..(189): NCBI GI NO: 15223217 NR Description: glycine cleavage system H protein precursor
  misc_feature (24)..(189): NCBI GI NO: 15226973 NR Description: glycine decarboxylase complex H-protein
  misc_feature (24)..(189): NCBI GI NO: 121080 NR Description: Glycine cleavage system H protein
  misc_feature (24)..(189): NCBI GI NO: 2147453 NR Description: glycine cleavage system protein H precursor
  misc_feature (24)..(189): NCBI GI NO: 2499417 NR Description: Glycine cleavage system H protein
  misc_feature (24)..(189): NCBI GI NO: 2887286 NR Description: H protein [Flaveria anomala]
  misc_feature (24)..(189): NCBI GI NO: 1346118 NR Description: Glycine cleavage system H protein
  misc_feature (24)..(189): NCBI GI NO: 3688309 NR Description: H-Protein precursor [Flaveria pringlei]
  misc_feature (25)..(189): NCBI GI NO: 2119600 NR Description: glycine cleavage system protein H precursor
  misc_feature (24)..(188): NCBI GI NO: 1362140 NR Description: H-protein precursor - Flaveria trinervia
TIFPLPFEKENRTKKKKESKQKQMALRMWASSTANALKLSSSASRSHLLPAFSISRCFSSVLEGLKYANSHEWVKHEGSVATIGISDHAQDHLGEVVFVELPEEKSSVTKEKNFGAVESVKATSEIISPISGEVIEVNTKLADSPGLINSSPYEDGWMIKVKPSNPAELESLMGPKEYTKFCEEEDAAH

SEQ ID NO: 19407 - protein, 166 aa, Zea mays subsp. mays
  peptide (1)..(166): Ceres Seq. ID no. 12635136
  misc_feature (42)..(162): Pfam Name: Pfam Description:  Glycine cleavage H-protein
  misc_feature (1)..(166): NCBI GI NO: 15223217 NR Description: glycine cleavage system H protein precursor
  misc_feature (1)..(166): NCBI GI NO: 15226973 NR Description: glycine decarboxylase complex H-protein
  misc_feature (1)..(166): NCBI GI NO: 121080 NR Description: Glycine cleavage system H protein
  misc_feature (1)..(166): NCBI GI NO: 2147453 NR Description: glycine cleavage system protein H precursor
  misc_feature (1)..(166): NCBI GI NO: 2499417 NR Description: Glycine cleavage system H protein
  misc_feature (1)..(166): NCBI GI NO: 2887286 NR Description: H protein [Flaveria anomala]
  misc_feature (1)..(166): NCBI GI NO: 1346118 NR Description: Glycine cleavage system H protein
  misc_feature (1)..(166): NCBI GI NO: 3688309 NR Description: H-Protein precursor [Flaveria pringlei]
  misc_feature (2)..(166): NCBI GI NO: 2119600 NR Description: glycine cleavage system protein H precursor
  misc_feature (1)..(165): NCBI GI NO: 1362140 NR Description: H-protein precursor - Flaveria trinervia
MALRMWASSTANALKLSSSASRSHLLPAFSISRCFSSVLEGLKYANSHEWVKHEGSVATIGISDHAQDHLGEVVFVELPEEKSSVTKEKNFGAVESVKATSEIISPISGEVIEVNTKLADSPGLINSSPYEDGWMIKVKPSNPAELESLMGPKEYTKFCEEEDAAH

SEQ ID NO: 19408 - protein, 162 aa, Zea mays subsp. mays
  peptide (1)..(162): Ceres Seq. ID no. 12635137
  misc_feature (38)..(158): Pfam Name: Pfam Description:  Glycine cleavage H-protein
  misc_feature (1)..(162): NCBI GI NO: 15223217 NR Description: glycine cleavage system H protein precursor
  misc_feature (1)..(162): NCBI GI NO: 15226973 NR Description: glycine decarboxylase complex H-protein
  misc_feature (1)..(162): NCBI GI NO: 121080 NR Description: Glycine cleavage system H protein
  misc_feature (1)..(162): NCBI GI NO: 2147453 NR Description: glycine cleavage system protein H precursor
  misc_feature (1)..(162): NCBI GI NO: 2499417 NR Description: Glycine cleavage system H protein
  misc_feature (1)..(162): NCBI GI NO: 2887286 NR Description: H protein [Flaveria anomala]
  misc_feature (1)..(162): NCBI GI NO: 1346118 NR Description: Glycine cleavage system H protein
  misc_feature (1)..(162): NCBI GI NO: 3688309 NR Description: H-Protein precursor [Flaveria pringlei]
  misc_feature (1)..(162): NCBI GI NO: 2119600 NR Description: glycine cleavage system protein H precursor
  misc_feature (1)..(161): NCBI GI NO: 1362140 NR Description: H-protein precursor - Flaveria trinervia
MWASSTANALKLSSSASRSHLLPAFSISRCFSSVLEGLKYANSHEWVKHEGSVATIGISDHAQDHLGEVVFVELPEEKSSVTKEKNFGAVESVKATSEIISPISGEVIEVNTKLADSPGLINSSPYEDGWMIKVKPSNPAELESLMGPKEYTKFCEEEDAAH

SEQ ID NO: 19409 - DNA, 715 bp, Zea mays subsp. mays
  misc_feature (1)..(715): Ceres Seq. ID no. 13599518
actcacactcagattcaaatcagaaaacttgagatcaatcggagaagtaagaagaagatgggagctttcgggaagctgatcgacgcgatcctcttcttatacttcgctctgatggtgttcatcgcgccgctcttcgacgcccaaacggtgcttcctaaagaaatctacccggcgattctcaccgatctgaaccgcaactacatcgccgactttggagattacttgctcgcggaggagccgcatttcctcgtcggactcatctggcacgagctcgtactcctgtggccgctctcgatcgccaacgtctacgcgattctcgccggaaagtcgtggttcgccaccacgtgcttgctctacggagcttccgtcgtcacttccatgtctgctgtcctgggagagatgctaggttcggggaaggcatctcagaaattgctaatgatgtatgtgcctttcatgggtattgggatactggctactcttcgtggtttagtctctcgttcaaccaagagcactggatctgtcgacaagagatccgctgttaagcctaggaggaagctggcctagaagaggtggtttctcgtttgtgatagttggttctaatttatccttttctttctttatgtacctttggttgaaagcgtttcctctgaactctcttgtttgttctcagcaacaatgaaatgtttccttgatcgaaatcaaattcattgctttt

SEQ ID NO: 19410 - protein, 187 aa, Zea mays subsp. mays
  peptide (1)..(187): Ceres Seq. ID no. 15218847
  misc_feature (20)..(187): NCBI GI NO: 18390494 NR Description: expressed protein [Arabidopsis thaliana]
  misc_feature (20)..(187): NCBI GI NO: 18402955 NR Description: expressed protein [Arabidopsis thaliana]
  misc_feature (20)..(187): NCBI GI NO: 15220447 NR Description: hypothetical protein [Arabidopsis thaliana]
  misc_feature (20)..(183): NCBI GI NO: 28411943 NR Description: OSJNBa0027N13.35
  misc_feature (20)..(183): NCBI GI NO: 28411944 NR Description: OSJNBa0027N13.37
  misc_feature (21)..(135): NCBI GI NO: 2135212 NR Description: gene MAC30 protein - human (fragment)
  misc_feature (20)..(135): NCBI GI NO: 19526880 NR Description: RIKEN cDNA 1810014L12 [Mus musculus]
  misc_feature (20)..(135): NCBI GI NO: 27688749 NR Description: similar to RIKEN cDNA 1810014L12
THTQIQIRKLEINRRSKKKMGAFGKLIDAILFLYFALMVFIAPLFDAQTVLPKEIYPAILTDLNRNYIADFGDYLLAEEPHFLVGLIWHELVLLWPLSIANVYAILAGKSWFATTCLLYGASVVTSMSAVLGEMLGSGKASQKLLMMYVPFMGIGILATLRGLVSRSTKSTGSVDKRSAVKPRRKLA

SEQ ID NO: 19411 - protein, 168 aa, Zea mays subsp. mays
  peptide (1)..(168): Ceres Seq. ID no. 15218848
  misc_feature (1)..(168): NCBI GI NO: 18390494 NR Description: expressed protein [Arabidopsis thaliana]
  misc_feature (1)..(168): NCBI GI NO: 18402955 NR Description: expressed protein [Arabidopsis thaliana]
  misc_feature (1)..(168): NCBI GI NO: 15220447 NR Description: hypothetical protein [Arabidopsis thaliana]
  misc_feature (1)..(164): NCBI GI NO: 28411943 NR Description: OSJNBa0027N13.35
  misc_feature (1)..(164): NCBI GI NO: 28411944 NR Description: OSJNBa0027N13.37
  misc_feature (2)..(116): NCBI GI NO: 2135212 NR Description: gene MAC30 protein - human (fragment)
  misc_feature (1)..(116): NCBI GI NO: 19526880 NR Description: RIKEN cDNA 1810014L12 [Mus musculus]
  misc_feature (1)..(116): NCBI GI NO: 27688749 NR Description: similar to RIKEN cDNA 1810014L12
MGAFGKLIDAILFLYFALMVFIAPLFDAQTVLPKEIYPAILTDLNRNYIADFGDYLLAEEPHFLVGLIWHELVLLWPLSIANVYAILAGKSWFATTCLLYGASVVTSMSAVLGEMLGSGKASQKLLMMYVPFMGIGILATLRGLVSRSTKSTGSVDKRSAVKPRRKLA

SEQ ID NO: 19412 - protein, 150 aa, Zea mays subsp. mays
  peptide (1)..(150): Ceres Seq. ID no. 15218849
  misc_feature (1)..(150): NCBI GI NO: 18390494 NR Description: expressed protein [Arabidopsis thaliana]
  misc_feature (1)..(150): NCBI GI NO: 18402955 NR Description: expressed protein [Arabidopsis thaliana]
  misc_feature (1)..(150): NCBI GI NO: 15220447 NR Description: hypothetical protein [Arabidopsis thaliana]
  misc_feature (1)..(146): NCBI GI NO: 28411943 NR Description: OSJNBa0027N13.35
  misc_feature (1)..(146): NCBI GI NO: 28411944 NR Description: OSJNBa0027N13.37
  misc_feature (1)..(98): NCBI GI NO: 2135212 NR Description: gene MAC30 protein - human (fragment)
  misc_feature (1)..(98): NCBI GI NO: 19526880 NR Description: RIKEN cDNA 1810014L12 [Mus musculus]
  misc_feature (1)..(98): NCBI GI NO: 27688749 NR Description: similar to RIKEN cDNA 1810014L12
MVFIAPLFDAQTVLPKEIYPAILTDLNRNYIADFGDYLLAEEPHFLVGLIWHELVLLWPLSIANVYAILAGKSWFATTCLLYGASVVTSMSAVLGEMLGSGKASQKLLMMYVPFMGIGILATLRGLVSRSTKSTGSVDKRSAVKPRRKLA

SEQ ID NO: 19413 - DNA, 796 bp, Zea mays subsp. mays
  misc_feature (1)..(796): Ceres Seq. ID no. 12635141
cacgctcgcccctcctatcccgtcatctctttcctcccccctcggcgcagcaacagagagatggcggcgctggcgacggcgacggcggtccacgggagccaggcggcgggcgcgctggccgtcgccgcgcagaggctgctggtcctcctcgctctcgcgatggaagctgtaaacaatggagccgatatcttcactgaagaccagcaagaaattatcaagcaatttggcagaatcaaatccgagactgtgcctgagaacaaggatgcagggtctgatgacgatgacgacgatgatgaagatgaggatgatgaaactggtgatgctgatgatgatgatgccgatgctggggaagacttctcaggtgaagaaggcgaggacgatgacgaggacgacgaccctgaggcgaatggcgacgacgctggtgcggggagcgacgatgatgatggtgatgacgatgatgatgatggtgaagatggcgaggatgacgacgatgatgatgaggacgaggatgaggaggacgaggaagatgaggaccagccgccggccaagaagaagaaatgatctgccttcctgctgtcagtgtttcagtccgttagtttgtctgctgtctagatgatgattgagcgggtctggtacacaccgacctatgtagcttctgtgtcgtggtggtttggtgtctcatagggtagaacattgaacttctaatgttgtttcctgcgttgtgcaagtagtcttaacatttcggtgttgatgtgctgtgtttattggagctgtgataccattcaatctaattctt

SEQ ID NO: 19414 - protein, 186 aa, Zea mays subsp. mays
  peptide (1)..(186): Ceres Seq. ID no. 12635142
  misc_feature (57)..(185): Pfam Name: Pfam Description:  Mpp10 protein
  misc_feature (39)..(186): NCBI GI NO: 18397066 NR Description: expressed protein; protein id: At2g11910
  misc_feature (72)..(178): NCBI GI NO: 35210492 NR Description: aspartic acid-rich protein aspolin1
  misc_feature (72)..(178): NCBI GI NO: 35210494 NR Description: aspartic acid-rich protein aspolin2
  misc_feature (85)..(178): NCBI GI NO: 35210494 NR Description: aspartic acid-rich protein aspolin2
  misc_feature (81)..(178): NCBI GI NO: 33284873 NR Description: SI:bZ1G18
  misc_feature (85)..(178): NCBI GI NO: 35210492 NR Description: aspartic acid-rich protein aspolin1
  misc_feature (85)..(178): NCBI GI NO: 35210494 NR Description: aspartic acid-rich protein aspolin2
  misc_feature (85)..(178): NCBI GI NO: 35210494 NR Description: aspartic acid-rich protein aspolin2
  misc_feature (85)..(178): NCBI GI NO: 35210494 NR Description: aspartic acid-rich protein aspolin2
  misc_feature (85)..(178): NCBI GI NO: 35210494 NR Description: aspartic acid-rich protein aspolin2
HARPSYPVISFLPPRRSNREMAALATATAVHGSQAAGALAVAAQRLLVLLALAMEAVNNGADIFTEDQQEIIKQFGRIKSETVPENKDAGSDDDDDDDEDEDDETGDADDDDADAGEDFSGEEGEDDDEDDDPEANGDDAGAGSDDDDGDDDDDDGEDGEDDDDDDEDEDEEDEEDEDQPPAKKKK

SEQ ID NO: 19415 - protein, 166 aa, Zea mays subsp. mays
  peptide (1)..(166): Ceres Seq. ID no. 12635143
  misc_feature (37)..(165): Pfam Name: Pfam Description:  Mpp10 protein
  misc_feature (19)..(166): NCBI GI NO: 18397066 NR Description: expressed protein; protein id: At2g11910
  misc_feature (52)..(158): NCBI GI NO: 35210492 NR Description: aspartic acid-rich protein aspolin1
  misc_feature (52)..(158): NCBI GI NO: 35210494 NR Description: aspartic acid-rich protein aspolin2
  misc_feature (65)..(158): NCBI GI NO: 35210494 NR Description: aspartic acid-rich protein aspolin2
  misc_feature (61)..(158): NCBI GI NO: 33284873 NR Description: SI:bZ1G18
  misc_feature (65)..(158): NCBI GI NO: 35210492 NR Description: aspartic acid-rich protein aspolin1
  misc_feature (65)..(158): NCBI GI NO: 35210492 NR Description: aspartic acid-rich protein aspolin1
  misc_feature (65)..(158): NCBI GI NO: 35210494 NR Description: aspartic acid-rich protein aspolin2
  misc_feature (65)..(158): NCBI GI NO: 35210494 NR Description: aspartic acid-rich protein aspolin2
  misc_feature (65)..(158): NCBI GI NO: 35210494 NR Description: aspartic acid-rich protein aspolin2
MAALATATAVHGSQAAGALAVAAQRLLVLLALAMEAVNNGADIFTEDQQEIIKQFGRIKSETVPENKDAGSDDDDDDDEDEDDETGDADDDDADAGEDFSGEEGEDDDEDDDPEANGDDAGAGSDDDDGDDDDDDGEDGEDDDDDDEDEDEEDEEDEDQPPAKKKK

SEQ ID NO: 19416 - protein, 146 aa, Zea mays subsp. mays
  peptide (1)..(146): Ceres Seq. ID no. 12635144
MEPISSLKTSKKLSSNLAESNPRLCLRTRMQGLMTMTTMMKMRMMKLVMLMMMMPMLGKTSQVKKARTMTRTTTLRRMATTLVRGATMMMVMTMMMMVKMARMTTMMMRTRMRRTRKMRTSRRPRRRNDLPSCCQCFSPLVCLLSR

SEQ ID NO: 19417 - DNA, 750 bp, Zea mays subsp. mays
  misc_feature (1)..(750): Ceres Seq. ID no. 13587164
ggcttcattcataaggggagatcattacaaacttgagaccaactcatcttgagtcggcctcgtcacccctgggtcattacatcacagtacactacactgctactcacactacactacgatactaactaacactaccttattctactactactactattgttacctatactaatatttacaccaacggcgttatgtcgctggccatgccgtcgccgccgtcgccctcgccgccatcgcccttgctgctgtcatcgcccttgccgtcgcccttgctactgtcgtcgtcgtcgcccttgctatctccgtcgccatcaccctcgccatcttcgccgtcaccatcgccgccgcccttgccgtcgtcgttgttgccgctgccgtcgtcctcgtcgccgttgcttttgccgctgctccactcctcagagttggaggagtcttccacctagggttgaaaacggtttcggaatttttcggtttttcggataccgttttcgattttttccgaccagattcaacaataacggtatttttcggaatcgaaatcggttatcggaattttataccggaatcggtatcgaaatcggtacagccttttaccgaccgtttccttcgattaccgaatttaatcggaatttaccgattttaaatttcgaaattttccgaagatactaaaaaacaaaagtatttcaaaaataaaaaataaagtaggcagtcaggcccacacttaagtcaggcctagctattcagaaaaat

SEQ ID NO: 19418 - protein, 83 aa, Zea mays subsp. mays
  peptide (1)..(83): Ceres Seq. ID no. 13587165
  misc_feature (6)..(67): Pfam Name: Pfam Description:  Extensin-like region
  misc_feature (6)..(67): NCBI GI NO: 37651399 NR Description: unknown
  misc_feature (6)..(77): NCBI GI NO: 20138131 NR Description: Vegetative cell wall protein gp1 precursor
  misc_feature (6)..(82): NCBI GI NO: 1076211 NR Description: hypothetical protein VSP-3 - Chlamydomonasreinhardtii
  misc_feature (6)..(67): NCBI GI NO: 28912428 NR Description: serine-proline rich repeat protein
  misc_feature (2)..(78): NCBI GI NO: 30387315 NR Description: unknown [Choristoneura fumiferana MNPV]
  misc_feature (1)..(62): NCBI GI NO: 16331063 NR Description: unknown protein [Synechocystis sp. PCC 6803]
  misc_feature (6)..(78): NCBI GI NO: 37651399 NR Description: unknown
  misc_feature (6)..(71): NCBI GI NO: 1076211 NR Description: hypothetical protein VSP-3 - Chlamydomonasreinhardtii
  misc_feature (4)..(67): NCBI GI NO: 1076211 NR Description: hypothetical protein VSP-3 - Chlamydomonasreinhardtii
  misc_feature (6)..(72): NCBI GI NO: 20138131 NR Description: Vegetative cell wall protein gp1 precursor
MSLAMPSPPSPSPPSPLLLSSPLPSPLLLSSSSPLLSPSPSPSPSSPSPSPPPLPSSLLPLPSSSSPLLLPLLHSSELEESST

SEQ ID NO: 19419 - protein, 79 aa, Zea mays subsp. mays
  peptide (1)..(79): Ceres Seq. ID no. 13587166
  misc_feature (2)..(63): Pfam Name: Pfam Description:  Extensin-like region
  misc_feature (2)..(63): NCBI GI NO: 37651399 NR Description: unknown
  misc_feature (2)..(73): NCBI GI NO: 20138131 NR Description: Vegetative cell wall protein gp1 precursor
  misc_feature (2)..(78): NCBI GI NO: 1076211 NR Description: hypothetical protein VSP-3 - Chlamydomonasreinhardtii
  misc_feature (2)..(63): NCBI GI NO: 28912428 NR Description: serine-proline rich repeat protein
  misc_feature (1)..(74): NCBI GI NO: 30387315 NR Description: unknown [Choristoneura fumiferana MNPV]
  misc_feature (1)..(58): NCBI GI NO: 16331063 NR Description: unknown protein [Synechocystis sp. PCC 6803]
  misc_feature (2)..(74): NCBI GI NO: 37651399 NR Description: unknown
  misc_feature (2)..(67): NCBI GI NO: 1076211 NR Description: hypothetical protein VSP-3 - Chlamydomonasreinhardtii
  misc_feature (1)..(63): NCBI GI NO: 1076211 NR Description: hypothetical protein VSP-3 - Chlamydomonasreinhardtii
  misc_feature (2)..(68): NCBI GI NO: 20138131 NR Description: Vegetative cell wall protein gp1 precursor
MPSPPSPSPPSPLLLSSPLPSPLLLSSSSPLLSPSPSPSPSSPSPSPPPLPSSLLPLPSSSSPLLLPLLHSSELEESST

SEQ ID NO: 19420 - DNA, 1113 bp, Zea mays subsp. mays
  misc_feature (1)..(1113): Ceres Seq. ID no. 12589816
acacaccagtaccactgcacaaaagcacactctgttcggcttgccttgtcctttttccttgccatatggctaccaagatggtcctgtgtcgctttgtagccctcgcggctgtcgcctgcctcctccgccctggcgcgcccgtcgagctccaccgcaagctctccgggtggtccgacgacgcgggcgcgacgtggtacggcgcagccaccggcgctgggagcgacggtggtgcatgcgggtaccagaacgccgtcgaccagccgccgttctcgtccatgatcgccgccggcagtccatccatcttccagaacggcaagggctgcggcgcctgctatcaggtgaaatgcaccgggcacgcgtcgtgctccggcagcccggtgaccgtggtcctcaccgacgagtgccccggcggcgcgtgcctggacgagcccgtgcacttcgacctgagcggcacggcgttcggagccatggcgaaggacggccaggcggaccagctccgcggcgccggacacctcaagatccagtacactcgggtgccgtgcaactggcgagggctggacatcgcgttcaaggtggacgccggctcgaacccgaactacttcgcggtgctcatcgagtacgagtccggggacggcgagctggagtccgtggagctcatgcagcgcggcggcggcggcgggggggcgtgggcgccgatgcagcagtcgtggggcgcggtgtggcggtacaactccggcgacaccctgcaggcgcccttctccgtccgcctcacctccggctccggcaggacggtcgtcgccagcaacgtcatccccgcggggtggacgcccggcgccacgtaccgctcggtcgtcaacttcgacaactaacgaggacggacggacggaccgaaataacggcacgcccgcccgcccgcccgccggccggccgccgggatggccgtgaaaggcgtggcgctatagcttttagtttatgattcgagctgtgcgcgggtgcctactatgccgacgacgctactgtactgttgcgtgcgtgacatgtgcaaatccgcgcagtcaccgtgtaccgccgggaatggcgtgtgtttctttgaataaaataaaggctggaccg

SEQ ID NO: 19421 - protein, 324 aa, Zea mays subsp. mays
  peptide (1)..(324): Ceres Seq. ID no. 12589817
  misc_feature (58)..(242): Pfam Name: Pfam Description:  HlyD family secretion protein
  misc_feature (21)..(316): NCBI GI NO: 23335597 NR Description: hypothetical protein
HTSTTAQKHTLFGLPCPFSLPYGYQDGPVSLCSPRGCRLPPPPWRARRAPPQALRVVRRRGRDVVRRSHRRWERRWCMRVPERRRPAAVLVHDRRRQSIHLPERQGLRRLLSGEMHRARVVLRQPGDRGPHRRVPRRRVPGRARALRPERHGVRSHGEGRPGGPAPRRRTPQDPVHSGAVQLARAGHRVQGGRRLEPELLRGAHRVRVRGRRAGVRGAHAARRRRRGGVGADAAVVGRGVAVQLRRHPAGALLRPPHLRLRQDGRRQQRHPRGVDARRHVPLGRQLRQLTRTDGRTEITARPPARPPAGRRDGRERRGAIAFSL

SEQ ID NO: 19422 - protein, 288 aa, Zea mays subsp. mays
  peptide (1)..(288): Ceres Seq. ID no. 12589818
  misc_feature (187)..(271): Pfam Name: Pfam Description:  Pollen allergen
  misc_feature (25)..(286): NCBI GI NO: 21666630 NR Description: beta-expansin [Oryza sativa]
  misc_feature (25)..(288): NCBI GI NO: 16303233 NR Description: beta-expansin [Oryza sativa]
  misc_feature (28)..(288): NCBI GI NO: 16517017 NR Description: beta-expansin [Oryza sativa]
  misc_feature (55)..(286): NCBI GI NO: 16303229 NR Description: beta-expansin 5 [Oryza sativa]
  misc_feature (55)..(286): NCBI GI NO: 8118428 NR Description: beta-expansin [Oryza sativa]
  misc_feature (54)..(286): NCBI GI NO: 16517013 NR Description: beta-expansin [Oryza sativa]
  misc_feature (56)..(286): NCBI GI NO: 34101047 NR Description: beta-expansin 1 precursor [Hordeum vulgare]
  misc_feature (54)..(286): NCBI GI NO: 1076486 NR Description: cim1 protein - soybean
  misc_feature (55)..(286): NCBI GI NO: 14193767 NR Description: beta-expansin 4 [Zea mays]
  misc_feature (55)..(286): NCBI GI NO: 40363749 NR Description: putative beta-expansin [Triticum aestivum]
TPVPLHKSTLCSACLVLFPCHMATKMVLCRFVALAAVACLLRPGAPVELHRKLSGWSDDAGATWYGAATGAGSDGGACGYQNAVDQPPFSSMIAAGSPSIFQNGKGCGACYQVKCTGHASCSGSPVTVVLTDECPGGACLDEPVHFDLSGTAFGAMAKDGQADQLRGAGHLKIQYTRVPCNWRGLDIAFKVDAGSNPNYFAVLIEYESGDGELESVELMQRGGGGGGAWAPMQQSWGAVWRYNSGDTLQAPFSVRLTSGSGRTVVASNVIPAGWTPGATYRSVVNFDN

SEQ ID NO: 19423 - protein, 267 aa, Zea mays subsp. mays
  peptide (1)..(267): Ceres Seq. ID no. 12589819
  misc_feature (166)..(250): Pfam Name: Pfam Description:  Pollen allergen
  misc_feature (4)..(265): NCBI GI NO: 21666630 NR Description: beta-expansin [Oryza sativa]
  misc_feature (4)..(267): NCBI GI NO: 16303233 NR Description: beta-expansin [Oryza sativa]
  misc_feature (7)..(267): NCBI GI NO: 16517017 NR Description: beta-expansin [Oryza sativa]
  misc_feature (34)..(265): NCBI GI NO: 16303229 NR Description: beta-expansin 5 [Oryza sativa]
  misc_feature (34)..(265): NCBI GI NO: 8118428 NR Description: beta-expansin [Oryza sativa]
  misc_feature (33)..(265): NCBI GI NO: 16517013 NR Description: beta-expansin [Oryza sativa]
  misc_feature (35)..(265): NCBI GI NO: 34101047 NR Description: beta-expansin 1 precursor [Hordeum vulgare]
  misc_feature (33)..(265): NCBI GI NO: 1076486 NR Description: cim1 protein - soybean
  misc_feature (34)..(265): NCBI GI NO: 14193767 NR Description: beta-expansin 4 [Zea mays]
  misc_feature (34)..(265): NCBI GI NO: 40363749 NR Description: putative beta-expansin [Triticum aestivum]
MATKMVLCRFVALAAVACLLRPGAPVELHRKLSGWSDDAGATWYGAATGAGSDGGACGYQNAVDQPPFSSMIAAGSPSIFQNGKGCGACYQVKCTGHASCSGSPVTVVLTDECPGGACLDEPVHFDLSGTAFGAMAKDGQADQLRGAGHLKIQYTRVPCNWRGLDIAFKVDAGSNPNYFAVLIEYESGDGELESVELMQRGGGGGGAWAPMQQSWGAVWRYNSGDTLQAPFSVRLTSGSGRTVVASNVIPAGWTPGATYRSVVNFDN

SEQ ID NO: 19424 - DNA, 1625 bp, Zea mays subsp. mays
  misc_feature (1)..(1625): Ceres Seq. ID no. 15227139
gcagatggccaacgcaattcaccagtagtagtagttgtagcggcataactagctatggctaccaccatggcggctaacgacccgacgagcatccgcgtggttagccgccggctggtgaaggcctccgacgcttccatccagcctcatgtcatgtccctctccaacctcgacctctacgtctgcgactcacagctcggcacgctgtgcgtctaccccaacgccggcggcggcttcagcgcgcgcatccccagcctgttcgagtccctcttgccgtccttgctcaactacctctacccattcgccggccgcctcgtcaccaacccaagctccggcctccccgaactccactgccataaccaaggcgcagagctcgtggtcggcgaggtcggcgtcgccctggggagcctcaactacggcgcgaccaaggattccttcaagaagatggtgctcccgttccccagggacgtccttctgtcggtgcagctgctctccttcgcgtgcgggggcttctccgtcatgtggtggatcaaccacctcgtcggcgacggccacgtgggcgccacgatcgtcaggacgtggtcccagctcgcgcggaccggggacatcggcggtgcgcccccgctcaactacgaccgctccgtgttccgcccgcgcagcccgccgtcgtacagcgactccgtcgcggccaccttcacaacgttcgacgagaagcgcctgcccaacgccctcacggcggaggccagcttcgtggaccgcgtctactacgtggaggcgagcgacatcgccgcgctgcgcgacacggcggcggcggccaccacggcccagcgcccgacccgcgtcgaggcgctgtccgcctacctgtggaaggcgctcgccgacgtcgtggccgcgtgcccccggagcaacaaggagcgctgccgcatgggttggtgggtcagcgcgcggcgccgtgtcacggcgcctaagctcgtcgctttgatgcccggctacctggggaacgtgacgacctacgccctgggcgacgcgccggcggaggagatcgtgcggaagcctctggcggaggtggcggccatggtgcgggacgccatcacgtcggtggactacgacgagtacctccaggagatggtggactgggtggaggtgcacaagacggaaggcctgatggaggcggccgtcatcggagtcggcgcgcccacgctgaaccagtcggtgatgaccacgttcccgctcgacaccgacttcggcttcggccaggctactctggcaaccacggtctctgactatggcaggctttgctcggctttcctttcggtcggagcgcggccgggaggcgacggctcctggctcgtcaccgcctacatatggccgcagctggcggcggcgctggagtccgacggcatcttcaagcttctcacggcggagtacctcggtctagctatgtgagcaactgaacggaacacagttagctcgacggatcgatcatatatgtgttttctttcttttgattcgaatcgatgcatgatgtgcttcctttgtttttctgtcagcttttgtacctgtacgccagcagatgagactctggtctttgggatattatatatctgctaaataaagatgagctcgac

SEQ ID NO: 19425 - protein, 462 aa, Zea mays subsp. mays
  peptide (1)..(462): Ceres Seq. ID no. 15227140
  misc_feature (13)..(261): Pfam Name: Pfam Description:  Transferase family
  misc_feature (13)..(261): NCBI GI NO: 34903004 NR Description: unnamed protein product
  misc_feature (239)..(460): NCBI GI NO: 34903004 NR Description: unnamed protein product
  misc_feature (137)..(436): NCBI GI NO: 34393204 NR Description: anthranilate N-hydroxycinnamoyl/ benzoyltransferase-like
  misc_feature (2)..(31): NCBI GI NO: 34393204 NR Description: anthranilate N-hydroxycinnamoyl/ benzoyltransferase-like
  misc_feature (103)..(123): NCBI GI NO: 34393204 NR Description: anthranilate N-hydroxycinnamoyl/ benzoyltransferase-like
  misc_feature (20)..(460): NCBI GI NO: 15222365 NR Description: anthranilate N-hydroxycinnamoyl/benzoyltransferase
  misc_feature (153)..(343): NCBI GI NO: 34905186 NR Description: P0498E12.11
  misc_feature (12)..(458): NCBI GI NO: 38567901 NR Description: OSJNBa0060N03.21
  misc_feature (29)..(458): NCBI GI NO: 32488821 NR Description: OSJNBa0085I10.1
  misc_feature (6)..(436): NCBI GI NO: 15223333 NR Description: acyltransferase family [Arabidopsis thaliana]
MATTMAANDPTSIRVVSRRLVKASDASIQPHVMSLSNLDLYVCDSQLGTLCVYPNAGGGFSARIPSLFESLLPSLLNYLYPFAGRLVTNPSSGLPELHCHNQGAELVVGEVGVALGSLNYGATKDSFKKMVLPFPRDVLLSVQLLSFACGGFSVMWWINHLVGDGHVGATIVRTWSQLARTGDIGGAPPLNYDRSVFRPRSPPSYSDSVAATFTTFDEKRLPNALTAEASFVDRVYYVEASDIAALRDTAAAATTAQRPTRVEALSAYLWKALADVVAACPRSNKERCRMGWWVSARRRVTAPKLVALMPGYLGNVTTYALGDAPAEEIVRKPLAEVAAMVRDAITSVDYDEYLQEMVDWVEVHKTEGLMEAAVIGVGAPTLNQSVMTTFPLDTDFGFGQATLATTVSDYGRLCSAFLSVGARPGGDGSWLVTAYIWPQLAAALESDGIFKLLTAEYLGLAM

SEQ ID NO: 19426 - protein, 458 aa, Zea mays subsp. mays
  peptide (1)..(458): Ceres Seq. ID no. 15227141
  misc_feature (9)..(257): Pfam Name: Pfam Description:  Transferase family
  misc_feature (9)..(257): NCBI GI NO: 34903004 NR Description: unnamed protein product
  misc_feature (235)..(456): NCBI GI NO: 34903004 NR Description: unnamed protein product
  misc_feature (133)..(432): NCBI GI NO: 34393204 NR Description: anthranilate N-hydroxycinnamoyl/ benzoyltransferase-like
  misc_feature (1)..(27): NCBI GI NO: 34393204 NR Description: anthranilate N-hydroxycinnamoyl/ benzoyltransferase-like
  misc_feature (99)..(119): NCBI GI NO: 34393204 NR Description: anthranilate N-hydroxycinnamoyl/ benzoyltransferase-like
  misc_feature (16)..(456): NCBI GI NO: 15222365 NR Description: anthranilate N-hydroxycinnamoyl/benzoyltransferase
  misc_feature (149)..(339): NCBI GI NO: 34905186 NR Description: P0498E12.11
  misc_feature (8)..(454): NCBI GI NO: 38567901 NR Description: OSJNBa0060N03.21
  misc_feature (25)..(454): NCBI GI NO: 32488821 NR Description: OSJNBa0085I10.1
  misc_feature (2)..(432): NCBI GI NO: 15223333 NR Description: acyltransferase family [Arabidopsis thaliana]
MAANDPTSIRVVSRRLVKASDASIQPHVMSLSNLDLYVCDSQLGTLCVYPNAGGGFSARIPSLFESLLPSLLNYLYPFAGRLVTNPSSGLPELHCHNQGAELVVGEVGVALGSLNYGATKDSFKKMVLPFPRDVLLSVQLLSFACGGFSVMWWINHLVGDGHVGATIVRTWSQLARTGDIGGAPPLNYDRSVFRPRSPPSYSDSVAATFTTFDEKRLPNALTAEASFVDRVYYVEASDIAALRDTAAAATTAQRPTRVEALSAYLWKALADVVAACPRSNKERCRMGWWVSARRRVTAPKLVALMPGYLGNVTTYALGDAPAEEIVRKPLAEVAAMVRDAITSVDYDEYLQEMVDWVEVHKTEGLMEAAVIGVGAPTLNQSVMTTFPLDTDFGFGQATLATTVSDYGRLCSAFLSVGARPGGDGSWLVTAYIWPQLAAALESDGIFKLLTAEYLGLAM

SEQ ID NO: 19427 - protein, 430 aa, Zea mays subsp. mays
  peptide (1)..(430): Ceres Seq. ID no. 15227142
  misc_feature (1)..(229): Pfam Name: Pfam Description:  Transferase family
  misc_feature (1)..(229): NCBI GI NO: 34903004 NR Description: unnamed protein product
  misc_feature (207)..(428): NCBI GI NO: 34903004 NR Description: unnamed protein product
  misc_feature (105)..(404): NCBI GI NO: 34393204 NR Description: anthranilate N-hydroxycinnamoyl/ benzoyltransferase-like
  misc_feature (71)..(91): NCBI GI NO: 34393204 NR Description: anthranilate N-hydroxycinnamoyl/ benzoyltransferase-like
  misc_feature (1)..(428): NCBI GI NO: 15222365 NR Description: anthranilate N-hydroxycinnamoyl/benzoyltransferase
  misc_feature (121)..(311): NCBI GI NO: 34905186 NR Description: P0498E12.11
  misc_feature (1)..(426): NCBI GI NO: 38567901 NR Description: OSJNBa0060N03.21
  misc_feature (1)..(426): NCBI GI NO: 32488821 NR Description: OSJNBa0085I10.1
  misc_feature (1)..(404): NCBI GI NO: 15223333 NR Description: acyltransferase family [Arabidopsis thaliana]
  misc_feature (1)..(426): NCBI GI NO: 15219263 NR Description: acetyl-CoA:benzylalcohol acetyltranferase
MSLSNLDLYVCDSQLGTLCVYPNAGGGFSARIPSLFESLLPSLLNYLYPFAGRLVTNPSSGLPELHCHNQGAELVVGEVGVALGSLNYGATKDSFKKMVLPFPRDVLLSVQLLSFACGGFSVMWWINHLVGDGHVGATIVRTWSQLARTGDIGGAPPLNYDRSVFRPRSPPSYSDSVAATFTTFDEKRLPNALTAEASFVDRVYYVEASDIAALRDTAAAATTAQRPTRVEALSAYLWKALADVVAACPRSNKERCRMGWWVSARRRVTAPKLVALMPGYLGNVTTYALGDAPAEEIVRKPLAEVAAMVRDAITSVDYDEYLQEMVDWVEVHKTEGLMEAAVIGVGAPTLNQSVMTTFPLDTDFGFGQATLATTVSDYGRLCSAFLSVGARPGGDGSWLVTAYIWPQLAAALESDGIFKLLTAEYLGLAM

SEQ ID NO: 19428 - DNA, 664 bp, Zea mays subsp. mays
  misc_feature (1)..(664): Ceres Seq. ID no. 12635152
agattgaaagacccatgtctctgttcccgatcttaaccgcctcgtttctcttcctcttctgcgttccgttcaccaccgcagctgcagacggcgatttgccgacggcgtacaccctcctccaaagctacaacttccccgtcgggattctccccaaaggagtcttgtcgtacgatctggacgaacccacggggaagttccacgcgtatttcgacaagtcgtgtagcttcgccctccaaggctcttaccagttggattacaaatcgaccatctccggcgtcatatcggagaacaagctcacgaagctcaccggcgtgaaggtgaaagttctcttcttgtggctcaacatcgtggaggttatcagggacggagacgagctcgagttctccgtcgggatcacgtcggcgaacttcgcgatcgaggagttttacgagtcgccgcggtgtgggtgcgggttcgattgcaatggattgaagtcgaaaacagataatttgcaaatgatgggactttcttacaaaacctgaactctttggatgcttttttttgttcttgctccaatcattggacaagttctttgtttcaacaattggtttattgttcatctcttcttaggatcgttctatcaatcaacgtatgtattgtacttacaatcaataaaagtacatcg

SEQ ID NO: 19429 - protein, 172 aa, Zea mays subsp. mays
  peptide (1)..(172): Ceres Seq. ID no. 12635153
  misc_feature (15)..(153): Pfam Name: Pfam Description:  Protein of unknown function, DUF538
  misc_feature (5)..(160): NCBI GI NO: 18379014 NR Description: Expressed protein; protein id: At1g02816
  misc_feature (5)..(164): NCBI GI NO: 18411923 NR Description: coded for by A
  misc_feature (5)..(164): NCBI GI NO: 21554037 NR Description: unknown [Arabidopsis thaliana]
  misc_feature (15)..(156): NCBI GI NO: 15235335 NR Description: putative protein; protein id: At4g02360.1
  misc_feature (16)..(153): NCBI GI NO: 18379012 NR Description: Expressed protein; protein id: At1g02813
  misc_feature (16)..(153): NCBI GI NO: 21553750 NR Description: unknown [Arabidopsis thaliana]
  misc_feature (10)..(147): NCBI GI NO: 34912320 NR Description: P0451D05.23
  misc_feature (4)..(155): NCBI GI NO: 28273408 NR Description: unknown protein
  misc_feature (5)..(147): NCBI GI NO: 18420052 NR Description: unknown protein; protein id: At5g19860.1
  misc_feature (7)..(159): NCBI GI NO: 18417957 NR Description: putative protein; protein id: At5g16380
IERPMSLFPILTASFLFLFCVPFTTAAADGDLPTAYTLLQSYNFPVGILPKGVLSYDLDEPTGKFHAYFDKSCSFALQGSYQLDYKSTISGVISENKLTKLTGVKVKVLFLWLNIVEVIRDGDELEFSVGITSANFAIEEFYESPRCGCGFDCNGLKSKTDNLQMMGLSYKT

SEQ ID NO: 19430 - protein, 168 aa, Zea mays subsp. mays
  peptide (1)..(168): Ceres Seq. ID no. 12635154
  misc_feature (11)..(149): Pfam Name: Pfam Description:  Protein of unknown function, DUF538
  misc_feature (1)..(156): NCBI GI NO: 18379014 NR Description: Expressed protein; protein id: At1g02816
  misc_feature (1)..(160): NCBI GI NO: 18411923 NR Description: coded for by A
  misc_feature (1)..(160): NCBI GI NO: 21554037 NR Description: unknown [Arabidopsis thaliana]
  misc_feature (11)..(152): NCBI GI NO: 15235335 NR Description: putative protein; protein id: At4g02360.1
  misc_feature (12)..(149): NCBI GI NO: 18379012 NR Description: Expressed protein; protein id: At1g02813
  misc_feature (12)..(149): NCBI GI NO: 21553750 NR Description: unknown [Arabidopsis thaliana]
  misc_feature (6)..(143): NCBI GI NO: 34912320 NR Description: P0451D05.23
  misc_feature (1)..(151): NCBI GI NO: 28273408 NR Description: unknown protein
  misc_feature (1)..(143): NCBI GI NO: 18420052 NR Description: unknown protein; protein id: At5g19860.1
  misc_feature (3)..(155): NCBI GI NO: 18417957 NR Description: putative protein; protein id: At5g16380
MSLFPILTASFLFLFCVPFTTAAADGDLPTAYTLLQSYNFPVGILPKGVLSYDLDEPTGKFHAYFDKSCSFALQGSYQLDYKSTISGVISENKLTKLTGVKVKVLFLWLNIVEVIRDGDELEFSVGITSANFAIEEFYESPRCGCGFDCNGLKSKTDNLQMMGLSYKT

SEQ ID NO: 19431 - DNA, 765 bp, Zea mays subsp. mays
  misc_feature (1)..(765): Ceres Seq. ID no. 13623021
agaaagccgacgaaaaggcagagaaaagacgcacaccgaagaaaaacacaaagacttcatcatcatcatctcctccttctttcgcctcagcaagaagctaatctgattcagccatggctaatgcggcgtcaggaatggcagtccacgatgactgcaagctcaagtttcttgaattgaaggccaagaggacataccgtttcatcgtctacaagattgaggagcagcagaagcaagtggtcgttgagaaactcggcgagcctggtcaatcccatgatgactttgcagctagtcttcctgctgatgaatgccgatacgccattttcgattttgatttcgtcactgctgagaattgccaaaagagcaagatcttcttcgttgcatggtctccggacacggcaagagtgagaagcaagatgatctacgcgagctctaaggacaggttcaagagagagctagacgggattcaagtagagcttcaagcaaccgacccaaccgagatggatctcgacgttttcaaaagccgagccaattgaggaaccggttgaattgaacttctttcatctactattgccgagtgatatgcttttacttaaggtttgctgtgacggcaccaaccaaaaaacagcttcatttttatctgtctttggtctctgtctttattttattttggtccttacagtgttgtcttaaaacttaagaggtctggctcgtgctctaccctaaaccctctatcaaaaaatgaatcctattagcacattttgtctt

SEQ ID NO: 19432 - protein, 139 aa, Zea mays subsp. mays
  peptide (1)..(139): Ceres Seq. ID no. 13623022
  misc_feature (12)..(139): Pfam Name: Pfam Description:  Cofilin/tropomyosin-type actin-binding protein
  misc_feature (1)..(139): NCBI GI NO: 30697295 NR Description: actin depolymerizing factor 3 - like protein
  misc_feature (1)..(139): NCBI GI NO: 15231309 NR Description: actin depolymerizing factor 1 (ADF1)
  misc_feature (1)..(139): NCBI GI NO: 30697300 NR Description: actin depolymerizing factor 4 - like protein
  misc_feature (1)..(139): NCBI GI NO: 4185511 NR Description: actin depolymerizing factor 4
  misc_feature (1)..(139): NCBI GI NO: 17366768 NR Description: Actin-depolymerizing factor 1 (ADF 1)
  misc_feature (1)..(138): NCBI GI NO: 17366765 NR Description: Actin-depolymerizing factor 2 (ADF 2)
  misc_feature (1)..(139): NCBI GI NO: 18408116 NR Description: actin depolymerizing factor 2 (ADF2)
  misc_feature (8)..(139): NCBI GI NO: 30697303 NR Description: actin depolymerizing factor 4 - like protein
  misc_feature (8)..(139): NCBI GI NO: 11276987 NR Description: actin depolymerizing factor 2
  misc_feature (1)..(139): NCBI GI NO: 38564721 NR Description: putative actin-depolymerizing factor 2
MANAASGMAVHDDCKLKFLELKAKRTYRFIVYKIEEQQKQVVVEKLGEPGQSHDDFAASLPADECRYAIFDFDFVTAENCQKSKIFFVAWSPDTARVRSKMIYASSKDRFKRELDGIQVELQATDPTEMDLDVFKSRAN

SEQ ID NO: 19433 - protein, 132 aa, Zea mays subsp. mays
  peptide (1)..(132): Ceres Seq. ID no. 13623023
  misc_feature (5)..(132): Pfam Name: Pfam Description:  Cofilin/tropomyosin-type actin-binding protein
  misc_feature (1)..(132): NCBI GI NO: 30697295 NR Description: actin depolymerizing factor 3 - like protein
  misc_feature (1)..(132): NCBI GI NO: 15231309 NR Description: actin depolymerizing factor 1 (ADF1)
  misc_feature (1)..(132): NCBI GI NO: 30697300 NR Description: actin depolymerizing factor 4 - like protein
  misc_feature (1)..(132): NCBI GI NO: 4185511 NR Description: actin depolymerizing factor 4
  misc_feature (1)..(132): NCBI GI NO: 17366768 NR Description: Actin-depolymerizing factor 1 (ADF 1)
  misc_feature (1)..(131): NCBI GI NO: 17366765 NR Description: Actin-depolymerizing factor 2 (ADF 2)
  misc_feature (1)..(132): NCBI GI NO: 18408116 NR Description: actin depolymerizing factor 2 (ADF2)
  misc_feature (1)..(132): NCBI GI NO: 30697303 NR Description: actin depolymerizing factor 4 - like protein
  misc_feature (1)..(132): NCBI GI NO: 11276987 NR Description: actin depolymerizing factor 2
  misc_feature (1)..(132): NCBI GI NO: 38564721 NR Description: putative actin-depolymerizing factor 2
MAVHDDCKLKFLELKAKRTYRFIVYKIEEQQKQVVVEKLGEPGQSHDDFAASLPADECRYAIFDFDFVTAENCQKSKIFFVAWSPDTARVRSKMIYASSKDRFKRELDGIQVELQATDPTEMDLDVFKSRAN

SEQ ID NO: 19434 - DNA, 1152 bp, Zea mays subsp. mays
  misc_feature (1)..(1152): Ceres Seq. ID no. 13587174
aaattcccacgttgctctcccgtcttccctcctcccctccccaaacccccaccccaacgcccagatctaccctccccatttacagctttctctccggccctgcgccccagggcaccgcgccgcccgaaaccgtcggcgccggcgcgatgcgcgtgccatgctgctcgttatgcaacgtcagatatgacgaggaggagcggacgccgctgctcctccactgcggccatggattctgccgcgcgtgcctctcccgcatgctagcggcagcccccggagccacgctgccgtgcccgcgatgtcgccatccgaccgccgtaggcaactcagtctctgcgctgcggaagaacttccccattctatcgctcctctccgcatccccctcatccccgtctttcctccactccgactcggggtcatcctccgacggctccgaagatgaggatgacttcttcgcacggcccactcgccgccccgcgcccgcgcccgccgccgcgtcgcccggatgcagctccttcgacctcgcctcgcacccggacctcaagctcgcccgtcgcatcgggagcggcccgcctgggcccgccgggcaggacgtgtgggtcggcacgctgtctcgtggcggcggcggggtcaagcggtgcaagcaccaggtggcagtgaagagggtgccccaaaccgcgggggatgggctcgaggttgttcaagaggaggtggagcggctgaggcgtgcctccacatggtgtcggaacgtgtgcaccttccatggtgctgtgagggtcggcggccacctctgtttcgtgatggatcattatgtcgggtctgtgcaggcggagatgcggcagaatggtggacgcctcacgctggagcagattctcaggtgtggcattgcatcaaaatgtcggtacttagtaatattgtgcggctattctttctgctgctgtcttaccaataatcgctgcaaacatattacattgcaacatagctgctctcttttattattactcagtagtcagcaagaagcatgcctagctagaaccttcactaaatgtggcaaattgtgtacgtgtagtgtatgatagcttgctttgtgacatgtaaagtggttgccttgttaatggcgttatgcagtttgaactttgatttcattggttctgc

SEQ ID NO: 19435 - protein, 356 aa, Zea mays subsp. mays
  peptide (1)..(356): Ceres Seq. ID no. 13587175
  misc_feature (54)..(99): Pfam Name: RING finger Pfam Description: Zinc finger, C3HC4 type
  misc_feature (47)..(293): NCBI GI NO: 15240646 NR Description: ankyrin-repeat containing protein
  misc_feature (179)..(294): NCBI GI NO: 22329080 NR Description: protein kinase family [Arabidopsis thaliana]
IPTLLSRLPSSPPQTPTPTPRSTLPIYSFLSGPAPQGTAPPETVGAGAMRVPCCSLCNVRYDEEERTPLLLHCGHGFCRACLSRMLAAAPGATLPCPRCRHPTAVGNSVSALRKNFPILSLLSASPSSPSFLHSDSGSSSDGSEDEDDFFARPTRRPAPAPAAASPGCSSFDLASHPDLKLARRIGSGPPGPAGQDVWVGTLSRGGGGVKRCKHQVAVKRVPQTAGDGLEVVQEEVERLRRASTWCRNVCTFHGAVRVGGHLCFVMDHYVGSVQAEMRQNGGRLTLEQILRCGIASKCRYLVILCGYSFCCCLTNNRCKHITLQHSCSLLLLLSSQQEACLARTFTKCGKLCTCSV

SEQ ID NO: 19436 - protein, 308 aa, Zea mays subsp. mays
  peptide (1)..(308): Ceres Seq. ID no. 13587176
  misc_feature (6)..(51): Pfam Name: RING finger Pfam Description: Zinc finger, C3HC4 type
  misc_feature (1)..(245): NCBI GI NO: 15240646 NR Description: ankyrin-repeat containing protein
  misc_feature (131)..(246): NCBI GI NO: 22329080 NR Description: protein kinase family [Arabidopsis thaliana]
MRVPCCSLCNVRYDEEERTPLLLHCGHGFCRACLSRMLAAAPGATLPCPRCRHPTAVGNSVSALRKNFPILSLLSASPSSPSFLHSDSGSSSDGSEDEDDFFARPTRRPAPAPAAASPGCSSFDLASHPDLKLARRIGSGPPGPAGQDVWVGTLSRGGGGVKRCKHQVAVKRVPQTAGDGLEVVQEEVERLRRASTWCRNVCTFHGAVRVGGHLCFVMDHYVGSVQAEMRQNGGRLTLEQILRCGIASKCRYLVILCGYSFCCCLTNNRCKHITLQHSCSLLLLLSSQQEACLARTFTKCGKLCTCSV

SEQ ID NO: 19437 - protein, 272 aa, Zea mays subsp. mays
  peptide (1)..(272): Ceres Seq. ID no. 13587177
  misc_feature (1)..(209): NCBI GI NO: 15240646 NR Description: ankyrin-repeat containing protein
  misc_feature (95)..(210): NCBI GI NO: 22329080 NR Description: protein kinase family [Arabidopsis thaliana]
MLAAAPGATLPCPRCRHPTAVGNSVSALRKNFPILSLLSASPSSPSFLHSDSGSSSDGSEDEDDFFARPTRRPAPAPAAASPGCSSFDLASHPDLKLARRIGSGPPGPAGQDVWVGTLSRGGGGVKRCKHQVAVKRVPQTAGDGLEVVQEEVERLRRASTWCRNVCTFHGAVRVGGHLCFVMDHYVGSVQAEMRQNGGRLTLEQILRCGIASKCRYLVILCGYSFCCCLTNNRCKHITLQHSCSLLLLLSSQQEACLARTFTKCGKLCTCSV

SEQ ID NO: 19438 - DNA, 879 bp, Zea mays subsp. mays
  misc_feature (1)..(879): Ceres Seq. ID no. 12635608
actacaccagtcggcatggaggaggagctgacgctggtgggatactggtcgagcccgttcgcgctgcgcgcgcgcttcgccctcaacctcaagggcctcccctacgcgtacgtggaggaggtgggcctcttcgacggcaagagcccgctcctcctcgcctccaaccccgtgcacaagagggtgccggtgctcatccacaacggcaagcccgtccccgagtcgcagctcatcgtgcagtacgtcgaagaggctttcccggccagctccccgcgcttcctccctcccgacccgcacgagcgcgccgtcgctcgcttctgggcctcctacgtcgacggcgagctgctcagcgcgtggctgcccgtctacggcggacgcaccggcgaggagagggcagaggcggcggggcgggtcggcgccgccctggagacgctggagcgagcgttcggggagtgctccaaggggaagggcttcttcggcggggacacggtggggctcgtggacgtcgtgctcggcggcttcgtcgggtggctgcagacgtccgaggccatgtgcggcgtgaggctgctcgacgccgccgcgacgccgctgctggcggcctgggcggagcggtttcgcgcgctcgacggcgtcaaggaggtgatgccggatgcgcagaggctgctcgagtacaacctgatgaggcgagctcgcctcgggctgccgctgacccagccgccgccgccacagcatcaatagaatcagggctggctaatacaccacgtgcaaatagcctgtaccaataactgagcacgtatacctaccctgtgtatgtatttctaccttctgtaatgcactttctctaccgtaaaacgtgaaatttagtgaataccttttgcccct

SEQ ID NO: 19439 - protein, 259 aa, Zea mays subsp. mays
  peptide (1)..(259): Ceres Seq. ID no. 12635609
  misc_feature (142)..(211): NCBI GI NO: 15430719 NR Description: putative glutathione S-transferase OsGSTU11
  misc_feature (70)..(191): NCBI GI NO: 729206 NR Description: PROBABLE GLUTATHIONE S-TRANSFERASE
  misc_feature (43)..(247): NCBI GI NO: 25989121 NR Description: putative PHA synthase [Streptomyces aureofaciens]
YTSRHGGGADAGGILVEPVRAARALRPQPQGPPLRVRGGGGPLRRQEPAPPRLQPRAQEGAGAHPQRQARPRVAAHRAVRRRGFPGQLPALPPSRPARARRRSLLGLLRRRRAAQRVAARLRRTHRRGEGRGGGAGRRRPGDAGASVRGVLQGEGLLRRGHGGARGRRARRLRRVAADVRGHVRREAARRRRDAAAGGLGGAVSRARRRQGGDAGCAEAARVQPDEASSPRAAADPAAAATASIESGLANTPRANSLYQ

SEQ ID NO: 19440 - protein, 244 aa, Zea mays subsp. mays
  peptide (1)..(244): Ceres Seq. ID no. 12635610
  misc_feature (8)..(238): NCBI GI NO: 11385495 NR Description: glutathione S-transferase GST 22 [Zea mays]
  misc_feature (7)..(234): NCBI GI NO: 11385525 NR Description: glutathione S-transferase GST 37 [Zea mays]
  misc_feature (5)..(230): NCBI GI NO: 37536250 NR Description: putative glutathione S-transferase
  misc_feature (5)..(230): NCBI GI NO: 37536280 NR Description: putative glutathione S-transferase
  misc_feature (9)..(223): NCBI GI NO: 37536360 NR Description: putative glutathione S-transferase
  misc_feature (7)..(231): NCBI GI NO: 37536340 NR Description: putative glutathione S-transferase
  misc_feature (5)..(229): NCBI GI NO: 33304612 NR Description: tau class GST protein 3
  misc_feature (9)..(223): NCBI GI NO: 20067421 NR Description: glutathione transferase [Triticum aestivum]
  misc_feature (2)..(230): NCBI GI NO: 11385505 NR Description: glutathione S-transferase GST 27 [Zea mays]
  misc_feature (5)..(239): NCBI GI NO: 2982262 NR Description: probable glutathione S-transferase [Picea mariana]
TTPVGMEEELTLVGYWSSPFALRARFALNLKGLPYAYVEEVGLFDGKSPLLLASNPVHKRVPVLIHNGKPVPESQLIVQYVEEAFPASSPRFLPPDPHERAVARFWASYVDGELLSAWLPVYGGRTGEERAEAAGRVGAALETLERAFGECSKGKGFFGGDTVGLVDVVLGGFVGWLQTSEAMCGVRLLDAAATPLLAAWAERFRALDGVKEVMPDAQRLLEYNLMRRARLGLPLTQPPPPQHQ

SEQ ID NO: 19441 - protein, 239 aa, Zea mays subsp. mays
  peptide (1)..(239): Ceres Seq. ID no. 12635611
  misc_feature (3)..(233): NCBI GI NO: 11385495 NR Description: glutathione S-transferase GST 22 [Zea mays]
  misc_feature (2)..(229): NCBI GI NO: 11385525 NR Description: glutathione S-transferase GST 37 [Zea mays]
  misc_feature (1)..(225): NCBI GI NO: 37536250 NR Description: putative glutathione S-transferase
  misc_feature (1)..(225): NCBI GI NO: 37536280 NR Description: putative glutathione S-transferase
  misc_feature (4)..(218): NCBI GI NO: 37536360 NR Description: putative glutathione S-transferase
  misc_feature (2)..(226): NCBI GI NO: 37536340 NR Description: putative glutathione S-transferase
  misc_feature (1)..(224): NCBI GI NO: 33304612 NR Description: tau class GST protein 3
  misc_feature (4)..(218): NCBI GI NO: 20067421 NR Description: glutathione transferase [Triticum aestivum]
  misc_feature (1)..(225): NCBI GI NO: 11385505 NR Description: glutathione S-transferase GST 27 [Zea mays]
  misc_feature (1)..(234): NCBI GI NO: 2982262 NR Description: probable glutathione S-transferase [Picea mariana]
MEEELTLVGYWSSPFALRARFALNLKGLPYAYVEEVGLFDGKSPLLLASNPVHKRVPVLIHNGKPVPESQLIVQYVEEAFPASSPRFLPPDPHERAVARFWASYVDGELLSAWLPVYGGRTGEERAEAAGRVGAALETLERAFGECSKGKGFFGGDTVGLVDVVLGGFVGWLQTSEAMCGVRLLDAAATPLLAAWAERFRALDGVKEVMPDAQRLLEYNLMRRARLGLPLTQPPPPQHQ

SEQ ID NO: 19442 - DNA, 718 bp, Zea mays subsp. mays
  misc_feature (1)..(718): Ceres Seq. ID no. 15225557
gattcttcattcttccttccccttctctctcactacctactcctagcaacaacaatgagcttcttcatcgaagattctggtctcatcgtcacacaacttctctaccaaatggctgtcttaatcaccctcttgagatggatctttacttggatcttacgctaccgatccagatctacctcctcctcttcttcatctactcctccgatctcgtcacaaaccatcaaagagagcctcgccgtgacgacgttccgcgacgccgcggatcggtctccggaactgatcagcgacacttgcgcggtgtgtcttggagatttggaagacggagatgaggtcagagagctcagaaactgcagccacgtgttccaccgagagtgtatcgacaggtggctggactacgagtgctgtggcggagatgataacgacggcgaggaagataaccaccgcacgtgtcctctttgtagaactccgcttcttgctgctaatacgtcgtcgtgtgcggattggccggttaagaacgaacctagctgggccgttgagcggcttctctacctcttcggagatgatcttcttgtctgactttttattttatttttctttcgatatttatttgattttagtggagattgaaatttgttggtcgagttttgtaaattgggaatttaaagggtagaatagcatttatatataatatttcaattttaaacatattttctttgtg

SEQ ID NO: 19443 - protein, 191 aa, Zea mays subsp. mays
  peptide (1)..(191): Ceres Seq. ID no. 15225558
  misc_feature (98)..(153): Pfam Name: RING finger Pfam Description: Zinc finger, C3HC4 type
  misc_feature (19)..(191): NCBI GI NO: 18420336 NR Description: zinc finger
  misc_feature (19)..(190): NCBI GI NO: 15229284 NR Description: zinc finger
  misc_feature (69)..(174): NCBI GI NO: 32488512 NR Description: OSJNBa0011J08.19
  misc_feature (49)..(158): NCBI GI NO: 15233117 NR Description: BRH1 RING finger protein [Arabidopsis thaliana]
  misc_feature (28)..(162): NCBI GI NO: 23451086 NR Description: RING-H2 protein [Medicago sativa]
  misc_feature (57)..(158): NCBI GI NO: 18411282 NR Description: zinc finger
  misc_feature (68)..(159): NCBI GI NO: 15238072 NR Description: RING-H2 zinc finger protein, putative
  misc_feature (68)..(159): NCBI GI NO: 21554155 NR Description: RING zinc finger protein-like
  misc_feature (66)..(158): NCBI GI NO: 15222553 NR Description: RING-H2 finger protein, putative
  misc_feature (59)..(168): NCBI GI NO: 15233350 NR Description: RING-H2 finger protein RHA1b
DSSFFLPLLSHYLLLATTMSFFIEDSGLIVTQLLYQMAVLITLLRWIFTWILRYRSRSTSSSSSSTPPISSQTIKESLAVTTFRDAADRSPELISDTCAVCLGDLEDGDEVRELRNCSHVFHRECIDRWLDYECCGGDDNDGEEDNHRTCPLCRTPLLAANTSSCADWPVKNEPSWAVERLLYLFGDDLLV

SEQ ID NO: 19444 - protein, 173 aa, Zea mays subsp. mays; identical to SEQ ID NO: 11585
  peptide (1)..(173): Ceres Seq. ID no. 15225559
  misc_feature (80)..(135): Pfam Name: RING finger Pfam Description: Zinc finger, C3HC4 type
  misc_feature (1)..(173): NCBI GI NO: 18420336 NR Description: zinc finger
  misc_feature (1)..(172): NCBI GI NO: 15229284 NR Description: zinc finger
  misc_feature (51)..(156): NCBI GI NO: 32488512 NR Description: OSJNBa0011J08.19
  misc_feature (31)..(140): NCBI GI NO: 15233117 NR Description: BRH1 RING finger protein [Arabidopsis thaliana]
  misc_feature (10)..(144): NCBI GI NO: 23451086 NR Description: RING-H2 protein [Medicago sativa]
  misc_feature (39)..(140): NCBI GI NO: 18411282 NR Description: zinc finger
  misc_feature (50)..(141): NCBI GI NO: 15238072 NR Description: RING-H2 zinc finger protein, putative
  misc_feature (50)..(141): NCBI GI NO: 21554155 NR Description: RING zinc finger protein-like
  misc_feature (48)..(140): NCBI GI NO: 15222553 NR Description: RING-H2 finger protein, putative
  misc_feature (41)..(150): NCBI GI NO: 15233350 NR Description: RING-H2 finger protein RHA1b

SEQ ID NO: 19445 - protein, 155 aa, Zea mays subsp. mays; identical to SEQ ID NO: 11586
  peptide (1)..(155): Ceres Seq. ID no. 15225560
  misc_feature (62)..(117): Pfam Name: RING finger Pfam Description: Zinc finger, C3HC4 type
  misc_feature (1)..(155): NCBI GI NO: 18420336 NR Description: zinc finger
  misc_feature (1)..(154): NCBI GI NO: 15229284 NR Description: zinc finger
  misc_feature (33)..(138): NCBI GI NO: 32488512 NR Description: OSJNBa0011J08.19
  misc_feature (13)..(122): NCBI GI NO: 15233117 NR Description: BRH1 RING finger protein [Arabidopsis thaliana]
  misc_feature (1)..(126): NCBI GI NO: 23451086 NR Description: RING-H2 protein [Medicago sativa]
  misc_feature (21)..(122): NCBI GI NO: 18411282 NR Description: zinc finger
  misc_feature (32)..(123): NCBI GI NO: 15238072 NR Description: RING-H2 zinc finger protein, putative
  misc_feature (32)..(123): NCBI GI NO: 21554155 NR Description: RING zinc finger protein-like
  misc_feature (30)..(122): NCBI GI NO: 15222553 NR Description: RING-H2 finger protein, putative
  misc_feature (23)..(132): NCBI GI NO: 15233350 NR Description: RING-H2 finger protein RHA1b

SEQ ID NO: 19446 - DNA, 797 bp, Zea mays subsp. mays
  misc_feature (1)..(797): Ceres Seq. ID no. 12635162
aatgctctaaacttctctacatcttctctctctaaagccatcatcttggttttggtgtgtgccttgctgtctattttggtgcttcccctagataagtgaccttaagactaatcatcatgagaatgtttctaggtgtcttgcttctcttggccttgaccacatcttcaagtgctatttactgtctctgcaaagatgggataggagacaaccagcttcaaacatcgatagactatgcttgtggaaccttagcagattgtaacccaatccatgacaagggtgcttgttatcaaccaaacaccataaaaaaccactgcgattgggctgttaacagctacttccagaaagcagctcaggcccctggaagctgtaatttctctggaactgccactaccagtcaaaacccaccttcaaatttggttactggatgtatatatccttcaagcgctagctctgcagggtcgcctccttcaactacaccaccaacgggaacaactccaacaacaaacggaaccggaggctttactccatttccgggaactccacctgcgtttggtccaactggaaccggaggctttagcccaagcaaagctgcttcaagtttggtcatttcctctgttttcacgctctgtttctcatcactagcgcttctgatgtaaggttcgtgtagagacaaaagacatccacatgggtccgtcttttgattcccttttgggtagaaaaggaagcttcagtggtcattgtggtttatatttctgttttttcccatttatgtgaaagatgctctaattagaatcttg

SEQ ID NO: 19447 - protein, 179 aa, Zea mays subsp. mays
  peptide (1)..(179): Ceres Seq. ID no. 12635163
  misc_feature (1)..(178): NCBI GI NO: 30683485 NR Description: expressed protein [Arabidopsis thaliana]
  misc_feature (12)..(179): NCBI GI NO: 8778409 NR Description: F16A14.5 [Arabidopsis thaliana]
  misc_feature (1)..(173): NCBI GI NO: 22325443 NR Description: similar to glycosyl hydrolase family 17
  misc_feature (8)..(174): NCBI GI NO: 30697478 NR Description: glycosyl hydrolase family 17
  misc_feature (1)..(149): NCBI GI NO: 18394637 NR Description: glycosyl hydrolase family 17; protein id:At1g18650
  misc_feature (8)..(179): NCBI GI NO: 21592859 NR Description: unknown [Arabidopsis thaliana]
  misc_feature (8)..(179): NCBI GI NO: 15241485 NR Description: glycosyl hydrolase family 17; protein id:At5g08000
  misc_feature (1)..(153): NCBI GI NO: 18409239 NR Description: unknown protein; protein id: At1g69295
  misc_feature (1)..(153): NCBI GI NO: 21553768 NR Description: unknown [Arabidopsis thaliana]
  misc_feature (1)..(153): NCBI GI NO: 25404810 NR Description: unknown protein, 45065-49536
MRMFLGVLLLLALTTSSSAIYCLCKDGIGDNQLQTSIDYACGTLADCNPIHDKGACYQPNTIKNHCDWAVNSYFQKAAQAPGSCNFSGTATTSQNPPSNLVTGCIYPSSASSAGSPPSTTPPTGTTPTTNGTGGFTPFPGTPPAFGPTGTGGFSPSKAASSLVISSVFTLCFSSLALLM

SEQ ID NO: 19448 - protein, 177 aa, Zea mays subsp. mays
  peptide (1)..(177): Ceres Seq. ID no. 12635164
  misc_feature (1)..(176): NCBI GI NO: 30683485 NR Description: expressed protein [Arabidopsis thaliana]
  misc_feature (10)..(177): NCBI GI NO: 8778409 NR Description: F16A14.5 [Arabidopsis thaliana]
  misc_feature (1)..(171): NCBI GI NO: 22325443 NR Description: similar to glycosyl hydrolase family 17
  misc_feature (6)..(172): NCBI GI NO: 30697478 NR Description: glycosyl hydrolase family 17
  misc_feature (1)..(147): NCBI GI NO: 18394637 NR Description: glycosyl hydrolase family 17; protein id:At1g18650
  misc_feature (6)..(177): NCBI GI NO: 21592859 NR Description: unknown [Arabidopsis thaliana]
  misc_feature (6)..(177): NCBI GI NO: 15241485 NR Description: glycosyl hydrolase family 17; protein id:At5g08000
  misc_feature (1)..(151): NCBI GI NO: 18409239 NR Description: unknown protein; protein id: At1g69295
  misc_feature (1)..(151): NCBI GI NO: 21553768 NR Description: unknown [Arabidopsis thaliana]
  misc_feature (1)..(151): NCBI GI NO: 25404810 NR Description: unknown protein, 45065-49536
MFLGVLLLLALTTSSSAIYCLCKDGIGDNQLQTSIDYACGTLADCNPIHDKGACYQPNTIKNHCDWAVNSYFQKAAQAPGSCNFSGTATTSQNPPSNLVTGCIYPSSASSAGSPPSTTPPTGTTPTTNGTGGFTPFPGTPPAFGPTGTGGFSPSKAASSLVISSVFTLCFSSLALLM

SEQ ID NO: 19449 - DNA, 675 bp, Zea mays subsp. mays
  misc_feature (1)..(675): Ceres Seq. ID no. 13599519
ccaattccgatcacaagctccaatcaaaccaatccagagtaccatcggctatcaatcagcaggaggaagaaaccgctgctcgaccggggaagaaccaagaggctcggcgaagatgcaggcggcgaaggagaaggtgaaggacggcgtgagcgcggtgaaggccaaggccaagatcacgcaggccaaggcgtcggagaaggcggaggcggccacggcgaggtcgcacgcggagcgggagctggcgcacgagcgcggcaaggccaaggtggccgcggccaagatggagctgcaccaggacaaggcgctccaccgggaggaggccatggagcaccgcatccacaagcacggcggcggccacggccgccaccaccacaagcacggcgtcggcatcgtggccgcgcccccgccggcgaccggtgccggggcttaccaccctcctcctgccgccggtggccactactactgatcagctacgcagctggatcgccagctagatgggcacatgcgtcgcgtttgtgtgatgtgttctcgatagctaataagtctgtactttgtgatgtttatgtttgacttacccacgcgtggtttttcattttgcacttggcttggatatgagagctgtacttgatatttatgcacatatgaatgcatgcgaccttgttggcttgtcccgcg

SEQ ID NO: 19450 - protein, 189 aa, Zea mays subsp. mays
  peptide (1)..(189): Ceres Seq. ID no. 15218850
  misc_feature (52)..(140): Pfam Name: DUF390 Pfam Description: Protein of unknown function
  misc_feature (21)..(109): NCBI GI NO: 30348579 NR Description: hypothetical protein [Saimiriine herpesvirus 2]
  misc_feature (36)..(109): NCBI GI NO: 30526291 NR Description: latency associated nuclear antigen
  misc_feature (36)..(109): NCBI GI NO: 30348579 NR Description: hypothetical protein [Saimiriine herpesvirus 2]
  misc_feature (13)..(109): NCBI GI NO: 30526291 NR Description: latency associated nuclear antigen
  misc_feature (21)..(109): NCBI GI NO: 30526291 NR Description: latency associated nuclear antigen
  misc_feature (21)..(109): NCBI GI NO: 30348579 NR Description: hypothetical protein [Saimiriine herpesvirus 2]
  misc_feature (30)..(142): NCBI GI NO: 10954052 NR Description: ovarian fibroin-like substance-3 [Cyprinus carpio]
  misc_feature (36)..(107): NCBI GI NO: 30526291 NR Description: latency associated nuclear antigen
  misc_feature (29)..(114): NCBI GI NO: 10954052 NR Description: ovarian fibroin-like substance-3 [Cyprinus carpio]
  misc_feature (36)..(107): NCBI GI NO: 30348579 NR Description: hypothetical protein [Saimiriine herpesvirus 2]
PIPITSSNQTNPEYHRLSISRRKKPLLDRGRTKRLGEDAGGEGEGEGRRERGEGQGQDHAGQGVGEGGGGHGEVARGAGAGARARQGQGGRGQDGAAPGQGAPPGGGHGAPHPQARRRPRPPPPQARRRHRGRAPAGDRCRGLPPSSCRRWPLLLISYAAGSPARWAHASRLCDVFSIANKSVLCDVYV

SEQ ID NO: 19451 - protein, 154 aa, Zea mays subsp. mays
  peptide (1)..(154): Ceres Seq. ID no. 15218851
  misc_feature (38)..(110): Pfam Name: LEA Pfam Description: Late embryogenesis abundant
  misc_feature (38)..(154): NCBI GI NO: 34897842 NR Description: P0514G12.41
  misc_feature (38)..(133): NCBI GI NO: 18652404 NR Description: unknown [Hordeum vulgare]
  misc_feature (38)..(100): NCBI GI NO: 18652403 NR Description: unknown [Hordeum vulgare]
  misc_feature (38)..(146): NCBI GI NO: 15223243 NR Description: late-embryogenesis abundant protein -related
  misc_feature (38)..(149): NCBI GI NO: 4102692 NR Description: late-embryogenesis abundant protein [Glycine max]
  misc_feature (38)..(122): NCBI GI NO: 4836407 NR Description: seed maturation protein PM29 [Glycine max]
  misc_feature (38)..(141): NCBI GI NO: 38346714 NR Description: OSJNBa0086O06.12
  misc_feature (38)..(116): NCBI GI NO: 15226951 NR Description: late embryogenesis abundant proteins -related
  misc_feature (40)..(136): NCBI GI NO: 7446478 NR Description: hypothetical protein - Douglas fir
QFRSQAPIKPIQSTIGYQSAGGRNRCSTGEEPRGSAKMQAAKEKVKDGVSAVKAKAKITQAKASEKAEAATARSHAERELAHERGKAKVAAAKMELHQDKALHREEAMEHRIHKHGGGHGRHHHKHGVGIVAAPPPATGAGAYHPPPAAGGHYY

SEQ ID NO: 19452 - protein, 117 aa, Zea mays subsp. mays
  peptide (1)..(117): Ceres Seq. ID no. 15218852
  misc_feature (1)..(73): Pfam Name: LEA Pfam Description: Late embryogenesis abundant
  misc_feature (1)..(117): NCBI GI NO: 34897842 NR Description: P0514G12.41
  misc_feature (1)..(96): NCBI GI NO: 18652404 NR Description: unknown [Hordeum vulgare]
  misc_feature (1)..(63): NCBI GI NO: 18652403 NR Description: unknown [Hordeum vulgare]
  misc_feature (1)..(109): NCBI GI NO: 15223243 NR Description: late-embryogenesis abundant protein -related
  misc_feature (1)..(112): NCBI GI NO: 4102692 NR Description: late-embryogenesis abundant protein [Glycine max]
  misc_feature (1)..(85): NCBI GI NO: 4836407 NR Description: seed maturation protein PM29 [Glycine max]
  misc_feature (1)..(104): NCBI GI NO: 38346714 NR Description: OSJNBa0086O06.12
  misc_feature (1)..(79): NCBI GI NO: 15226951 NR Description: late embryogenesis abundant proteins -related
  misc_feature (3)..(99): NCBI GI NO: 7446478 NR Description: hypothetical protein - Douglas fir
MQAAKEKVKDGVSAVKAKAKITQAKASEKAEAATARSHAERELAHERGKAKVAAAKMELHQDKALHREEAMEHRIHKHGGGHGRHHHKHGVGIVAAPPPATGAGAYHPPPAAGGHYY

SEQ ID NO: 19453 - DNA, 1220 bp, Zea mays subsp. mays
  misc_feature (1)..(1220): Ceres Seq. ID no. 13599293
acacaccgatcgcgaaactgcttcctagcttcgttccggttccggagcgccagagagagaaagaaagggaaaagaagcgcctttgcccaccgcgcgatcgatcgatccggggtccggcggcctgccatggtgaagctggcgacggccagggaggcgcggctgtacgggccggcgctggcggcgaggcggtgggagtacatcaacgcggggacatacgtgttcgcggcgctgctcctggtcctggcggcggcgctgtccatgtccgtgtccgcggccaggctggggctcgccgtaggcgccgtggcgctggcggccgtggcggccgtcaacgcacacgacctcgccgcgcacctggctggcgtcgactgccgcgtgggactggcgaggtacgatgcccagctcgggctcgtggagttcctcgtgccggccgtgcacgcagccgggtgcgcgctcgccgccgccggcctggcgctgctggcctccccccactcccactcccagtcccagcagcggcacgcggcgaccatgctgctcgtcgcggcgctgctgtgggtgctgggctccgtgctcaactcctgccaggtgtacgagcgcgccgacggccgcgcgcagctgctgcagtcgggcgtgcaggtgcctcagctgctggggagccttctgttcctggtcgccgcggcgctgaaccgcccccgcagcggcggcgagccggcgtggctgtgcctggtcgggagcgtgctgtggctggcggcagcgctgctcaacgtgctgaaggtgttcgccatgcaccagagcgacgcgctgcggctggagaagctccgcggcggcgcgcaggagtggctcagccgcgaccgcgagggccgcgtgccgctcaactgggaggaggccgccaggagacgggcgctgcccaccgagctccggtgatcatcgcccgcgccaggcgccacccatcatttcccgtgccgtaaaatgaggggaaaagggtagataaataaattgtttcagcgccacccttttgggccgttgcttgggctcaatggaggcccgaagccccggattgtagggcccattagctgctggagcttatcgcattccatttcctatgtccgagtcccttgcggctcctttggaaggaaaaggaatgagagaattaagagatggattgaagagggttggaaggattaaatttctttacaawaaarwaaaaaaaagctggagggggg

SEQ ID NO: 19454 - protein, 320 aa, Zea mays subsp. mays
  peptide (1)..(320): Ceres Seq. ID no. 15222553
  misc_feature (91)..(179): Pfam Name: Pfam Description:  Sperm histone P2
  misc_feature (24)..(320): NCBI GI NO: 29247944 NR Description: GLP_26_54603_52153 [Giardia lamblia ATCC 50803]
  misc_feature (30)..(280): NCBI GI NO: 25989121 NR Description: putative PHA synthase [Streptomyces aureofaciens]
  misc_feature (7)..(316): NCBI GI NO: 22957039 NR Description: hypothetical protein [Rhodobacter sphaeroides]
  misc_feature (18)..(313): NCBI GI NO: 23106243 NR Description: hypothetical protein [Azotobacter vinelandii]
  misc_feature (33)..(315): NCBI GI NO: 23106243 NR Description: hypothetical protein [Azotobacter vinelandii]
  misc_feature (8)..(206): NCBI GI NO: 29830954 NR Description: putative GntR-family transcriptional regulator
  misc_feature (65)..(287): NCBI GI NO: 79833 NR Description: hypothetical 119
  misc_feature (31)..(235): NCBI GI NO: 22960369 NR Description: hypothetical protein [Rhodobacter sphaeroides]
  misc_feature (22)..(290): NCBI GI NO: 23105951 NR Description: hypothetical protein [Azotobacter vinelandii]
  misc_feature (9)..(313): NCBI GI NO: 97774 NR Description: probable endoglucanase - Ruminococcus flavefaciens
TPIAKLLPSFVPVPERQREKEREKKRLCPPRDRSIRGPAACHGEAGDGQGGAAVRAGAGGEAVGVHQRGDIRVRGAAPGPGGGAVHVRVRGQAGARRRRRGAGGRGGRQRTRPRRAPGWRRLPRGTGEVRCPARARGVPRAGRARSRVRARRRRPGAAGLPPLPLPVPAAARGDHAARRGAAVGAGLRAQLLPGVRARRRPRAAAAVGRAGASAAGEPSVPGRRGAEPPPQRRRAGVAVPGRERAVAGGSAAQRAEGVRHAPERRAAAGEAPRRRAGVAQPRPRGPRAAQLGGGRQETGAAHRAPVIIARARRHPSFPVP

SEQ ID NO: 19455 - protein, 306 aa, Zea mays subsp. mays
  peptide (1)..(306): Ceres Seq. ID no. 15222554
  misc_feature (43)..(306): NCBI GI NO: 15237898 NR Description: expressed protein [Arabidopsis thaliana]
  misc_feature (68)..(162): NCBI GI NO: 34394289 NR Description: hypothetical protein
  misc_feature (100)..(166): NCBI GI NO: 34905164 NR Description: P0700D12.27
THRSRNCFLASFRFRSARERKKGKRSAFAHRAIDRSGVRRPAMVKLATAREARLYGPALAARRWEYINAGTYVFAALLLVLAAALSMSVSAARLGLAVGAVALAAVAAVNAHDLAAHLAGVDCRVGLARYDAQLGLVEFLVPAVHAAGCALAAAGLALLASPHSHSQSQQRHAATMLLVAALLWVLGSVLNSCQVYERADGRAQLLQSGVQVPQLLGSLLFLVAAALNRPRSGGEPAWLCLVGSVLWLAAALLNVLKVFAMHQSDALRLEKLRGGAQEWLSRDREGRVPLNWEEAARRRALPTELR

SEQ ID NO: 19456 - protein, 264 aa, Zea mays subsp. mays
  peptide (1)..(264): Ceres Seq. ID no. 15222555
  misc_feature (1)..(264): NCBI GI NO: 15237898 NR Description: expressed protein [Arabidopsis thaliana]
  misc_feature (26)..(120): NCBI GI NO: 34394289 NR Description: hypothetical protein
  misc_feature (58)..(124): NCBI GI NO: 34905164 NR Description: P0700D12.27
MVKLATAREARLYGPALAARRWEYINAGTYVFAALLLVLAAALSMSVSAARLGLAVGAVALAAVAAVNAHDLAAHLAGVDCRVGLARYDAQLGLVEFLVPAVHAAGCALAAAGLALLASPHSHSQSQQRHAATMLLVAALLWVLGSVLNSCQVYERADGRAQLLQSGVQVPQLLGSLLFLVAAALNRPRSGGEPAWLCLVGSVLWLAAALLNVLKVFAMHQSDALRLEKLRGGAQEWLSRDREGRVPLNWEEAARRRALPTELR

SEQ ID NO: 19457 - DNA, 1180 bp, Zea mays subsp. mays
  misc_feature (1)..(1180): Ceres Seq. ID no. 12635167
atgtcccaacgaaagcattagcagagaagatgatgacgacgagcttctcttctcatcctcctcctcctcctacatcatcaacttccagatccctactcctcttcccttcatctcacctcaaactccctcctcgtcttctcttacatggccgctctacactctcctgctccgccgccggcaccaacaacggacctcctcccgccggcgactctgttccaaataacttctgtatcattgagggatcagagacggtccaagacttcgtgcagatgcagcttcaggagatacaagacaacattaggagcagacgcaacaagatctttctcctcatggaggaagtcaggaggctacgcgttcagcaacggatcaagagtgttaaatccatcagcgaggatgagaacactgtcctcgaggcgacggagatgcctgagatcccttcttccattccttttctccctaacgtgacgccaaagactttgaaacaactctacttgaccagtgtggctttgatctctggaatcattttctttggtggtttgattgcgcctaagcttgagcttaaggtaggactaggtggaacctcgtatgaagatttcataaggagcttgcatttacccttgcaattaagccaagtagatcccattgtggcatcattttctgggggagcggttggtgttatttcaaccttgatgctaattgaagttaacaatgttaaacaacaagagaagaagaggtgcaagtactgccttgggactggatacttgccatgcgctaaatgttctgctagtggtgtgtgcttaagcattgatccaataaaacgaactagagcttcgagcctgcttttgcaagctccgacaacggaaaggtgtctgaactgttccggcgcaggaaaggtgatgtgtccgacatgtctatgcactgggatggtcacagctagtgagcacgacccacgatttgaccctttcgactagaaaacgatctcagtttacttttcgaattaagggtttttgtatgtacatttgttcttcaaaagcctaagccaagactctgtactgaagaaagccatataaatgtttacatagtcaagaaaaataggatttatagctttttgccaaagcatagttacatagtgaagttcagaaatcccttgacacattatttgataaagcgaatttctttc

SEQ ID NO: 19458 - protein, 322 aa, Zea mays subsp. mays
  peptide (1)..(322): Ceres Seq. ID no. 12635168
  misc_feature (26)..(322): NCBI GI NO: 22326624 NR Description: putative protein; protein id: At5g06130
  misc_feature (26)..(322): NCBI GI NO: 8978349 NR Description: gene_id:K16F4
  misc_feature (65)..(322): NCBI GI NO: 30681288 NR Description: expressed protein [Arabidopsis thaliana]
  misc_feature (17)..(322): NCBI GI NO: 15240312 NR Description: putative protein; protein id: At5g61670
VPTKALAEKMMTTSFSSHPPPPPTSSTSRSLLLFPSSHLKLPPRLLLHGRSTLSCSAAGTNNGPPPAGDSVPNNFCIIEGSETVQDFVQMQLQEIQDNIRSRRNKIFLLMEEVRRLRVQQRIKSVKSISEDENTVLEATEMPEIPSSIPFLPNVTPKTLKQLYLTSVALISGIIFFGGLIAPKLELKVGLGGTSYEDFIRSLHLPLQLSQVDPIVASFSGGAVGVISTLMLIEVNNVKQQEKKRCKYCLGTGYLPCAKCSASGVCLSIDPIKRTRASSLLLQAPTTERCLNCSGAGKVMCPTCLCTGMVTASEHDPRFDPFD

SEQ ID NO: 19459 - protein, 313 aa, Zea mays subsp. mays
  peptide (1)..(313): Ceres Seq. ID no. 12635169
  misc_feature (17)..(313): NCBI GI NO: 22326624 NR Description: putative protein; protein id: At5g06130
  misc_feature (17)..(313): NCBI GI NO: 8978349 NR Description: gene_id:K16F4
  misc_feature (56)..(313): NCBI GI NO: 30681288 NR Description: expressed protein [Arabidopsis thaliana]
  misc_feature (8)..(313): NCBI GI NO: 15240312 NR Description: putative protein; protein id: At5g61670
MMTTSFSSHPPPPPTSSTSRSLLLFPSSHLKLPPRLLLHGRSTLSCSAAGTNNGPPPAGDSVPNNFCIIEGSETVQDFVQMQLQEIQDNIRSRRNKIFLLMEEVRRLRVQQRIKSVKSISEDENTVLEATEMPEIPSSIPFLPNVTPKTLKQLYLTSVALISGIIFFGGLIAPKLELKVGLGGTSYEDFIRSLHLPLQLSQVDPIVASFSGGAVGVISTLMLIEVNNVKQQEKKRCKYCLGTGYLPCAKCSASGVCLSIDPIKRTRASSLLLQAPTTERCLNCSGAGKVMCPTCLCTGMVTASEHDPRFDPFD

SEQ ID NO: 19460 - protein, 312 aa, Zea mays subsp. mays
  peptide (1)..(312): Ceres Seq. ID no. 12635170
  misc_feature (16)..(312): NCBI GI NO: 22326624 NR Description: putative protein; protein id: At5g06130
  misc_feature (16)..(312): NCBI GI NO: 8978349 NR Description: gene_id:K16F4
  misc_feature (55)..(312): NCBI GI NO: 30681288 NR Description: expressed protein [Arabidopsis thaliana]
  misc_feature (7)..(312): NCBI GI NO: 15240312 NR Description: putative protein; protein id: At5g61670
MTTSFSSHPPPPPTSSTSRSLLLFPSSHLKLPPRLLLHGRSTLSCSAAGTNNGPPPAGDSVPNNFCIIEGSETVQDFVQMQLQEIQDNIRSRRNKIFLLMEEVRRLRVQQRIKSVKSISEDENTVLEATEMPEIPSSIPFLPNVTPKTLKQLYLTSVALISGIIFFGGLIAPKLELKVGLGGTSYEDFIRSLHLPLQLSQVDPIVASFSGGAVGVISTLMLIEVNNVKQQEKKRCKYCLGTGYLPCAKCSASGVCLSIDPIKRTRASSLLLQAPTTERCLNCSGAGKVMCPTCLCTGMVTASEHDPRFDPFD

SEQ ID NO: 19461 - DNA, 1324 bp, Zea mays subsp. mays
  misc_feature (1)..(1324): Ceres Seq. ID no. 15227018
aacaacctttcacctcgagatattttcttgaaaggaaacaaaaaaaaaatgggtctgcatccaatcgccgacgctgacgagagcaaccccttcggctctctctccgccgatgagttctacgcgaagcattccgtcacccattcctccgccttcaccaccaaccctcgcggcctcaagatcttcacacaatggtggtctccactccctccaactactcccgtcggtatcgtcgccgtcgttcacggcttcaccggcgaatccagctggttcctccagctcacgtccatcctcttcgctaaatccggttacatcacctgcgcgatcgatcaccaagggcatggattctccgatggcctcgtggctcatatccctgacatcaatcccgtcgtggatgactgtatctccttcttcgacgacttccgtaaccgtaaccgccaggagacgccggatttgccgtgttttctctactccgagtccttaggcggagccatcgcgctctacatctcgctccggcagagaggtgtatgggacggactcatcctcaacggagccatgtgtggaatcagcgcgaagttcaaaccgccgtggccgttggagcatttgctcttcgtcgtggcgaaccttatccccacctggcgcgtcatccccactcgcggatcgattcccgatgtttccttcaaggagccgtggaagaggaagctcgcgattgctagtcctaggaggacggtggcgaggccgcgcgccgcgacggcgtacgagctgatccgtgtatgtaacgagcttcaggggaggttcgaggaggtggaggtgccgcttctgatagtgcatggaggaggagacgttgtttgcgaccaagcgtgcgtagaggagcttcatcggagagcaagcagtggggataagacgatcaagatctatccggggatgtggcatcagatggttggtgaatcggaggaggacgttgatttggtgtacggtgacatcctgacatggctcaagacccgatcggaaagggccgctgagaggaaacgggagttgcgcgttggcggcggagctttagagtctttttgactctttgggtattgagttgtagcccaataggccagtgccatctggaagcaactatttatgggttatgcttaattgtttcgtagcacatggtttacagttaaaccgtcgacaaaaaaagagtttacagttaaaccaatgaatattccaatatactttttgggcaataaattattaaaaactatttttgtaaaattaaattttaagattctgtatcaatttgagaaaacaagaaaaactaaccattaatgatggatcc

SEQ ID NO: 19462 - protein, 355 aa, Zea mays subsp. mays
  peptide (1)..(355): Ceres Seq. ID no. 15227019
  misc_feature (107)..(323): Pfam Name: Pfam Description:  alpha/beta hydrolase fold
  misc_feature (17)..(351): NCBI GI NO: 15239709 NR Description: esterase/lipase/thioesterase family
  misc_feature (17)..(336): NCBI GI NO: 15242179 NR Description: esterase/lipase/thioesterase family
  misc_feature (20)..(344): NCBI GI NO: 34894634 NR Description: P0028G04.16
  misc_feature (24)..(334): NCBI GI NO: 34899776 NR Description: putative lysophospholipase isolog
  misc_feature (27)..(334): NCBI GI NO: 15220284 NR Description: hydrolase, alpha/beta fold family
  misc_feature (45)..(346): NCBI GI NO: 30687879 NR Description: hydrolase, alpha/beta fold family
  misc_feature (50)..(346): NCBI GI NO: 7487947 NR Description: lysophospholipase homolog F12L6
  misc_feature (44)..(346): NCBI GI NO: 7487948 NR Description: lysophospholipase homolog F12L6
  misc_feature (44)..(346): NCBI GI NO: 30687883 NR Description: esterase/lipase/thioesterase family
  misc_feature (42)..(339): NCBI GI NO: 30695682 NR Description: esterase/lipase/thioesterase family
NNLSPRDIFLKGNKKKMGLHPIADADESNPFGSLSADEFYAKHSVTHSSAFTTNPRGLKIFTQWWSPLPPTTPVGIVAVVHGFTGESSWFLQLTSILFAKSGYITCAIDHQGHGFSDGLVAHIPDINPVVDDCISFFDDFRNRNRQETPDLPCFLYSESLGGAIALYISLRQRGVWDGLILNGAMCGISAKFKPPWPLEHLLFVVANLIPTWRVIPTRGSIPDVSFKEPWKRKLAIASPRRTVARPRAATAYELIRVCNELQGRFEEVEVPLLIVHGGGDVVCDQACVEELHRRASSGDKTIKIYPGMWHQMVGESEEDVDLVYGDILTWLKTRSERAAERKRELRVGGGALESF

SEQ ID NO: 19463 - protein, 339 aa, Zea mays subsp. mays
  peptide (1)..(339): Ceres Seq. ID no. 15227020
  misc_feature (91)..(307): Pfam Name: Pfam Description:  alpha/beta hydrolase fold
  misc_feature (1)..(335): NCBI GI NO: 15239709 NR Description: esterase/lipase/thioesterase family
  misc_feature (1)..(320): NCBI GI NO: 15242179 NR Description: esterase/lipase/thioesterase family
  misc_feature (4)..(328): NCBI GI NO: 34894634 NR Description: P0028G04.16
  misc_feature (8)..(318): NCBI GI NO: 34899776 NR Description: putative lysophospholipase isolog
  misc_feature (11)..(318): NCBI GI NO: 15220284 NR Description: hydrolase, alpha/beta fold family
  misc_feature (29)..(330): NCBI GI NO: 30687879 NR Description: hydrolase, alpha/beta fold family
  misc_feature (34)..(330): NCBI GI NO: 7487947 NR Description: lysophospholipase homolog F12L6
  misc_feature (28)..(330): NCBI GI NO: 7487948 NR Description: lysophospholipase homolog F12L6
  misc_feature (28)..(330): NCBI GI NO: 30687883 NR Description: esterase/lipase/thioesterase family
  misc_feature (26)..(323): NCBI GI NO: 30695682 NR Description: esterase/lipase/thioesterase family
MGLHPIADADESNPFGSLSADEFYAKHSVTHSSAFTTNPRGLKIFTQWWSPLPPTTPVGIVAVVHGFTGESSWFLQLTSILFAKSGYITCAIDHQGHGFSDGLVAHIPDINPVVDDCISFFDDFRNRNRQETPDLPCFLYSESLGGAIALYISLRQRGVWDGLILNGAMCGISAKFKPPWPLEHLLFVVANLIPTWRVIPTRGSIPDVSFKEPWKRKLAIASPRRTVARPRAATAYELIRVCNELQGRFEEVEVPLLIVHGGGDVVCDQACVEELHRRASSGDKTIKIYPGMWHQMVGESEEDVDLVYGDILTWLKTRSERAAERKRELRVGGGALESF

SEQ ID NO: 19464 - DNA, 1243 bp, Zea mays subsp. mays
  misc_feature (1)..(1243): Ceres Seq. ID no. 13599524
agaagaccactatattctgcctctccgttctgttcttgccgtgttctatttttccgctctgctgtacatggcgtcggttgcaggcgaggggaggagccgggtgctggtgataggcggcacgggctacataggccgcttcatcgtcgccgccagcgcacgcgagggccaccccaccgccgtcctcgtccgcgacgccgcgcccgccgacccagccaaggccgccgtcctccagggattccgggatgccggcgtcaccatcgtcaagggtgatatgtatgatcatgagagcctggtgacagccattaaatcagcagatgttgtgatctcggccgtgggttatcaacagctaccggatcaaactctcattatctcggcaattaaggaagttgggcatgtaaagagattcttcccatcagagtatggtaatgatgtggatcgtaaccatgcagttgaacctgcaaagacagtattcggtgggaaagctcatataaggcgtgccattgaggctgaggggattccctacacatatgtctcttccaacttctttgctggtcgtttcttgcgaagccttgcgcagattggggtcacggagcctccaaccgagaaggttctcattatgggtgatggaaatgtaaaaggaatctttgcggcggaggaagacgtgggaacctacactattaaagctgtagatgatccaaggaccctgaacaaaatcctatatctgaggccaccaagtaacactttgtcccataatgagcttgtctcactctgggagaagaaacttggtaagacacttgagagggtgtacctcccagaggacgaactcctgaagaagattcgagagtcatcagcgccgctgaatgtagcactggcaatcagccactctgtctggttgaagggggaccacactaactttgagatcgacccatcatttggagttgaagccactcagctttaccctgatgtgccttacattaccgtggatgaatacctaaataggttcctttaaactcctaaatcctatcgtcgccaatattcatatactttgaataaatgttggaggttatgtatttttactagaatggcacgtgaattacgtaatcagagtgtgagacctcaatcatgtgaggaatgcatcttgcattcccttgagcttagaatatataaactgaggttgtataaatttggaaattttagcttgatggaacatgataccgtatgtaacagcccgggggtttacgcc

SEQ ID NO: 19465 - protein, 335 aa, Zea mays subsp. mays
  peptide (1)..(335): Ceres Seq. ID no. 13599525
  misc_feature (31)..(335): Pfam Name: Pfam Description:  Isoflavone reductase
  misc_feature (31)..(335): NCBI GI NO: 3243234 NR Description: isoflavone reductase related protein
  misc_feature (26)..(335): NCBI GI NO: 6573171 NR Description: isoflavone reductase homolog 2 [Glycine max]
  misc_feature (31)..(335): NCBI GI NO: 10764491 NR Description: allergenic isoflavone reductase-like protein Bet v6
  misc_feature (31)..(327): NCBI GI NO: 4731376 NR Description: isoflavone reductase homolog Bet v 6.0101
  misc_feature (31)..(327): NCBI GI NO: 7484603 NR Description: 2'-hydroxyisoflavone reductase (EC 1
  misc_feature (31)..(335): NCBI GI NO: 7578895 NR Description: phenylcoumaran benzylic ether reductase homolog Fi1
  misc_feature (31)..(335): NCBI GI NO: 7578897 NR Description: phenylcoumaran benzylic ether reductase homolog Fi2
  misc_feature (31)..(335): NCBI GI NO: 15234993 NR Description: isoflavone reductase, putative
  misc_feature (31)..(335): NCBI GI NO: 19310585 NR Description: putative NAD
  misc_feature (30)..(335): NCBI GI NO: 1708422 NR Description: ISOFLAVONE REDUCTASE HOMOLOG (CP100)
EDHYILPLRSVLAVFYFSALLYMASVAGEGRSRVLVIGGTGYIGRFIVAASAREGHPTAVLVRDAAPADPAKAAVLQGFRDAGVTIVKGDMYDHESLVTAIKSADVVISAVGYQQLPDQTLIISAIKEVGHVKRFFPSEYGNDVDRNHAVEPAKTVFGGKAHIRRAIEAEGIPYTYVSSNFFAGRFLRSLAQIGVTEPPTEKVLIMGDGNVKGIFAAEEDVGTYTIKAVDDPRTLNKILYLRPPSNTLSHNELVSLWEKKLGKTLERVYLPEDELLKKIRESSAPLNVALAISHSVWLKGDHTNFEIDPSFGVEATQLYPDVPYITVDEYLNRFL

SEQ ID NO: 19466 - protein, 313 aa, Zea mays subsp. mays
  peptide (1)..(313): Ceres Seq. ID no. 13599526
  misc_feature (9)..(313): Pfam Name: Pfam Description:  Isoflavone reductase
  misc_feature (9)..(313): NCBI GI NO: 3243234 NR Description: isoflavone reductase related protein
  misc_feature (4)..(313): NCBI GI NO: 6573171 NR Description: isoflavone reductase homolog 2 [Glycine max]
  misc_feature (9)..(313): NCBI GI NO: 10764491 NR Description: allergenic isoflavone reductase-like protein Bet v6
  misc_feature (9)..(305): NCBI GI NO: 4731376 NR Description: isoflavone reductase homolog Bet v 6.0101
  misc_feature (9)..(305): NCBI GI NO: 7484603 NR Description: 2'-hydroxyisoflavone reductase (EC 1
  misc_feature (9)..(313): NCBI GI NO: 7578895 NR Description: phenylcoumaran benzylic ether reductase homolog Fi1
  misc_feature (9)..(313): NCBI GI NO: 7578897 NR Description: phenylcoumaran benzylic ether reductase homolog Fi2
  misc_feature (9)..(313): NCBI GI NO: 15234993 NR Description: isoflavone reductase, putative
  misc_feature (9)..(313): NCBI GI NO: 19310585 NR Description: putative NAD
  misc_feature (8)..(313): NCBI GI NO: 1708422 NR Description: ISOFLAVONE REDUCTASE HOMOLOG (CP100)
MASVAGEGRSRVLVIGGTGYIGRFIVAASAREGHPTAVLVRDAAPADPAKAAVLQGFRDAGVTIVKGDMYDHESLVTAIKSADVVISAVGYQQLPDQTLIISAIKEVGHVKRFFPSEYGNDVDRNHAVEPAKTVFGGKAHIRRAIEAEGIPYTYVSSNFFAGRFLRSLAQIGVTEPPTEKVLIMGDGNVKGIFAAEEDVGTYTIKAVDDPRTLNKILYLRPPSNTLSHNELVSLWEKKLGKTLERVYLPEDELLKKIRESSAPLNVALAISHSVWLKGDHTNFEIDPSFGVEATQLYPDVPYITVDEYLNRFL

SEQ ID NO: 19467 - protein, 245 aa, Zea mays subsp. mays
  peptide (1)..(245): Ceres Seq. ID no. 13599527
  misc_feature (1)..(245): Pfam Name: Pfam Description:  Isoflavone reductase
  misc_feature (1)..(245): NCBI GI NO: 3243234 NR Description: isoflavone reductase related protein
  misc_feature (1)..(245): NCBI GI NO: 6573171 NR Description: isoflavone reductase homolog 2 [Glycine max]
  misc_feature (1)..(245): NCBI GI NO: 10764491 NR Description: allergenic isoflavone reductase-like protein Bet v6
  misc_feature (1)..(237): NCBI GI NO: 4731376 NR Description: isoflavone reductase homolog Bet v 6.0101
  misc_feature (1)..(237): NCBI GI NO: 7484603 NR Description: 2'-hydroxyisoflavone reductase (EC 1
  misc_feature (1)..(245): NCBI GI NO: 7578895 NR Description: phenylcoumaran benzylic ether reductase homolog Fi1
  misc_feature (1)..(245): NCBI GI NO: 7578897 NR Description: phenylcoumaran benzylic ether reductase homolog Fi2
  misc_feature (1)..(245): NCBI GI NO: 15234993 NR Description: isoflavone reductase, putative
  misc_feature (1)..(245): NCBI GI NO: 19310585 NR Description: putative NAD
  misc_feature (1)..(245): NCBI GI NO: 1708422 NR Description: ISOFLAVONE REDUCTASE HOMOLOG (CP100)
MYDHESLVTAIKSADVVISAVGYQQLPDQTLIISAIKEVGHVKRFFPSEYGNDVDRNHAVEPAKTVFGGKAHIRRAIEAEGIPYTYVSSNFFAGRFLRSLAQIGVTEPPTEKVLIMGDGNVKGIFAAEEDVGTYTIKAVDDPRTLNKILYLRPPSNTLSHNELVSLWEKKLGKTLERVYLPEDELLKKIRESSAPLNVALAISHSVWLKGDHTNFEIDPSFGVEATQLYPDVPYITVDEYLNRFL

SEQ ID NO: 19468 - DNA, 1096 bp, Zea mays subsp. mays
  misc_feature (1)..(1096): Ceres Seq. ID no. 12635175
atcgcatcccttgtaaatttttatctcagaaacgtgcagcagagaaaatacaaaatgggactctgccgctttctcttcttcgtcgttgttgtgctgcttttctcctcatcttcctcagttgacgcctgcgaccgatgtcctcaccactctaaggctgcttttttctcctccgcatccgccctatcctccggagcttgttcttatggttccatggctacggctttcttcgccggtcacatcgccgccgccgttccttccatctacaaagacggcgctggctgcggtgcttgctttcaggtcagatgccacaaccccactctttgcagcaccaaaggaaccacggtgatggtcaccgacctcaacatgagcaaccaaaccgatctcgtcctcagcagcagagccttcagggccatggccaaaccggttgtcggggctgacacagatcttctcagacaaggcatcgtcgacgttgaataccacagagttccttgcgattacggaaacaagaagatgttgaatgttagagttgaagaatcaagcaaaaaaccatactacttggctataaagctcttgtaccaaggaggccaaaccgaagtcgtagccatcgacattgctcaggctggttcctccaactggagttacatgacacgaagccacggcgccgtatgggtcactgacaatgtacccaccggacctcttcagttcaggttcgtggtgacagctggctacgacggaaaaatgctctggtctaagaaggttcttcctgccaactgggaagccggcaagacctacgacgccggcgttcagatcaccgacattgctcaggaaggttgtgatccatgcgacgatcacatctggaactgatttacttactctccttttttctttctttcttttcttagaagcatatgtataaataatcaagcatattcattattaagtgagtttgtaccagaactattactaaacaagagaactaagaaagatttttaaaagggtgatggacatatgtatgtgcaaaggaggtctacacatgaccaccattctttctaccgataaccaagttatatgacattacttctttcttttatgtttc

SEQ ID NO: 19469 - protein, 287 aa, Zea mays subsp. mays
  peptide (1)..(287): Ceres Seq. ID no. 12635176
  misc_feature (172)..(255): Pfam Name: Pfam Description:  Pollen allergen
  misc_feature (24)..(287): NCBI GI NO: 15233841 NR Description: putative pollen allergen; protein id: At4g38400
  misc_feature (24)..(287): NCBI GI NO: 15231303 NR Description: putative protein; protein id: At3g45970
  misc_feature (24)..(287): NCBI GI NO: 21555265 NR Description: Expansin-like 1 precursor
  misc_feature (24)..(287): NCBI GI NO: 20138389 NR Description: Expansin-like 3 precursor
  misc_feature (71)..(287): NCBI GI NO: 30692657 NR Description: expansin protein family (EXPL3)
  misc_feature (26)..(286): NCBI GI NO: 33111959 NR Description: expansin-like protein [Quercus robur]
  misc_feature (25)..(286): NCBI GI NO: 37536544 NR Description: putative pollen allergen
  misc_feature (25)..(286): NCBI GI NO: 21654743 NR Description: expansin-like protein 1 [Oryza sativa]
  misc_feature (25)..(286): NCBI GI NO: 20502989 NR Description: Putative pollen allergen
  misc_feature (24)..(281): NCBI GI NO: 30038051 NR Description: beta expansin EXPB2.1 [Mirabilis jalapa]
IASLVNFYLRNVQQRKYKMGLCRFLFFVVVVLLFSSSSSVDACDRCPHHSKAAFFSSASALSSGACSYGSMATAFFAGHIAAAVPSIYKDGAGCGACFQVRCHNPTLCSTKGTTVMVTDLNMSNQTDLVLSSRAFRAMAKPVVGADTDLLRQGIVDVEYHRVPCDYGNKKMLNVRVEESSKKPYYLAIKLLYQGGQTEVVAIDIAQAGSSNWSYMTRSHGAVWVTDNVPTGPLQFRFVVTAGYDGKMLWSKKVLPANWEAGKTYDAGVQITDIAQEGCDPCDDHIWN

SEQ ID NO: 19470 - protein, 269 aa, Zea mays subsp. mays
  peptide (1)..(269): Ceres Seq. ID no. 12635177
  misc_feature (154)..(237): Pfam Name: Pfam Description:  Pollen allergen
  misc_feature (6)..(269): NCBI GI NO: 15233841 NR Description: putative pollen allergen; protein id: At4g38400
  misc_feature (6)..(269): NCBI GI NO: 15231303 NR Description: putative protein; protein id: At3g45970
  misc_feature (6)..(269): NCBI GI NO: 21555265 NR Description: Expansin-like 1 precursor
  misc_feature (6)..(269): NCBI GI NO: 20138389 NR Description: Expansin-like 3 precursor
  misc_feature (53)..(269): NCBI GI NO: 30692657 NR Description: expansin protein family (EXPL3)
  misc_feature (8)..(268): NCBI GI NO: 33111959 NR Description: expansin-like protein [Quercus robur]
  misc_feature (7)..(268): NCBI GI NO: 37536544 NR Description: putative pollen allergen
  misc_feature (7)..(268): NCBI GI NO: 21654743 NR Description: expansin-like protein 1 [Oryza sativa]
  misc_feature (7)..(268): NCBI GI NO: 20502989 NR Description: Putative pollen allergen
  misc_feature (6)..(263): NCBI GI NO: 30038051 NR Description: beta expansin EXPB2.1 [Mirabilis jalapa]
MGLCRFLFFVVVVLLFSSSSSVDACDRCPHHSKAAFFSSASALSSGACSYGSMATAFFAGHIAAAVPSIYKDGAGCGACFQVRCHNPTLCSTKGTTVMVTDLNMSNQTDLVLSSRAFRAMAKPVVGADTDLLRQGIVDVEYHRVPCDYGNKKMLNVRVEESSKKPYYLAIKLLYQGGQTEVVAIDIAQAGSSNWSYMTRSHGAVWVTDNVPTGPLQFRFVVTAGYDGKMLWSKKVLPANWEAGKTYDAGVQITDIAQEGCDPCDDHIWN

SEQ ID NO: 19471 - protein, 217 aa, Zea mays subsp. mays
  peptide (1)..(217): Ceres Seq. ID no. 12635178
  misc_feature (102)..(185): Pfam Name: Pfam Description:  Pollen allergen
  misc_feature (1)..(217): NCBI GI NO: 15233841 NR Description: putative pollen allergen; protein id: At4g38400
  misc_feature (1)..(217): NCBI GI NO: 15231303 NR Description: putative protein; protein id: At3g45970
  misc_feature (1)..(217): NCBI GI NO: 21555265 NR Description: Expansin-like 1 precursor
  misc_feature (1)..(217): NCBI GI NO: 20138389 NR Description: Expansin-like 3 precursor
  misc_feature (1)..(217): NCBI GI NO: 30692657 NR Description: expansin protein family (EXPL3)
  misc_feature (1)..(216): NCBI GI NO: 33111959 NR Description: expansin-like protein [Quercus robur]
  misc_feature (1)..(216): NCBI GI NO: 37536544 NR Description: putative pollen allergen
  misc_feature (1)..(216): NCBI GI NO: 21654743 NR Description: expansin-like protein 1 [Oryza sativa]
  misc_feature (1)..(216): NCBI GI NO: 20502989 NR Description: Putative pollen allergen
  misc_feature (1)..(211): NCBI GI NO: 30038051 NR Description: beta expansin EXPB2.1 [Mirabilis jalapa]
MATAFFAGHIAAAVPSIYKDGAGCGACFQVRCHNPTLCSTKGTTVMVTDLNMSNQTDLVLSSRAFRAMAKPVVGADTDLLRQGIVDVEYHRVPCDYGNKKMLNVRVEESSKKPYYLAIKLLYQGGQTEVVAIDIAQAGSSNWSYMTRSHGAVWVTDNVPTGPLQFRFVVTAGYDGKMLWSKKVLPANWEAGKTYDAGVQITDIAQEGCDPCDDHIWN

SEQ ID NO: 19472 - DNA, 904 bp, Zea mays subsp. mays
  misc_feature (1)..(904): Ceres Seq. ID no. 12638221
agagaaaaatctggagacgaaaccctagctagctagcccgcttccccggcgccggagccggagccggagccaggccgggatgggcgccgaggaggacgctgccgcccgccgcgagcgcctcaaggcccttcgcgccgccaaggagctcctctccacccccgacgcccccgcccccgcgcccgacgcggaccagcagaatggtgaacatgggatgacagaagaacaggtggtccaaccagaattgccaggtcctgtggatgcacccgaggatgcttccagggagaacgttagccccactaaggaatctgatgaggttgaagacaatggggaggtaccactgaagttcaggaactaccttcctcatgatgagcggctccgaggtggcaaggtggctccgctgtctcttcccaagtttgaagatccgatagctgctgatgctgctgaaccaaagcagctggagaacccctttgggaacatcgccccaaagaacccgaactgggacctgaaacgagatgtgcagaagaggattgacaagctggagaagcgcactcagaaagctctggcggagattgcattggagcagcaaaaggagaaagaggcgctggaggagggaggcgatgcagctcaagagtgacgtggtactggtgctggtccaaatgtttgtgtagaactgaggaagcagctatacgaggtcaaacagtgatgtgtttgtaatgcacggtgtggactgaagactaatgtaaggaaattgtagtcgtgtgtttgtaatgcacggtgtggatgatgctttcagttcagtatccagaattttttagttctactgatggttagtgtcttggtgattactgaattaactatgattcatctcgcgaatctgaagggtatatatagccatggagttgtc

SEQ ID NO: 19473 - protein, 184 aa, Zea mays subsp. mays
  peptide (1)..(184): Ceres Seq. ID no. 12638222
  misc_feature (68)..(183): NCBI GI NO: 18397111 NR Description: expressed protein; protein id: At3g05070
  misc_feature (67)..(184): NCBI GI NO: 21389497 NR Description: hypothetical protein MGC23918 [Homo sapiens]
  misc_feature (67)..(184): NCBI GI NO: 21756313 NR Description: unnamed protein product [Homo sapiens]
  misc_feature (67)..(181): NCBI GI NO: 20072383 NR Description: Similar to RIKEN cDNA 2700094L05 gene
  misc_feature (67)..(173): NCBI GI NO: 34866382 NR Description: similar to hypothetical protein MGC23918
  misc_feature (67)..(181): NCBI GI NO: 20874062 NR Description: similar to hypothetical protein MGC23918
  misc_feature (67)..(181): NCBI GI NO: 33469009 NR Description: RIKEN cDNA 2700094L05 [Mus musculus]
  misc_feature (67)..(170): NCBI GI NO: 24651238 NR Description: CG15525-PA [Drosophila melanogaster]
  misc_feature (67)..(170): NCBI GI NO: 21430888 NR Description: SD23244p [Drosophila melanogaster]
  misc_feature (59)..(182): NCBI GI NO: 39581407 NR Description: Hypothetical protein CBG22501
MGAEEDAAARRERLKALRAAKELLSTPDAPAPAPDADQQNGEHGMTEEQVVQPELPGPVDAPEDASRENVSPTKESDEVEDNGEVPLKFRNYLPHDERLRGGKVAPLSLPKFEDPIAADAAEPKQLENPFGNIAPKNPNWDLKRDVQKRIDKLEKRTQKALAEIALEQQKEKEALEEGGDAAQE

SEQ ID NO: 19474 - protein, 140 aa, Zea mays subsp. mays
  peptide (1)..(140): Ceres Seq. ID no. 12638223
  misc_feature (24)..(139): NCBI GI NO: 18397111 NR Description: expressed protein; protein id: At3g05070
  misc_feature (23)..(140): NCBI GI NO: 21389497 NR Description: hypothetical protein MGC23918 [Homo sapiens]
  misc_feature (23)..(140): NCBI GI NO: 21756313 NR Description: unnamed protein product [Homo sapiens]
  misc_feature (23)..(137): NCBI GI NO: 20072383 NR Description: Similar to RIKEN cDNA 2700094L05 gene
  misc_feature (23)..(129): NCBI GI NO: 34866382 NR Description: similar to hypothetical protein MGC23918
  misc_feature (23)..(137): NCBI GI NO: 20874062 NR Description: similar to hypothetical protein MGC23918
  misc_feature (23)..(137): NCBI GI NO: 33469009 NR Description: RIKEN cDNA 2700094L05 [Mus musculus]
  misc_feature (23)..(126): NCBI GI NO: 24651238 NR Description: CG15525-PA [Drosophila melanogaster]
  misc_feature (23)..(126): NCBI GI NO: 21430888 NR Description: SD23244p [Drosophila melanogaster]
  misc_feature (15)..(138): NCBI GI NO: 39581407 NR Description: Hypothetical protein CBG22501
MTEEQVVQPELPGPVDAPEDASRENVSPTKESDEVEDNGEVPLKFRNYLPHDERLRGGKVAPLSLPKFEDPIAADAAEPKQLENPFGNIAPKNPNWDLKRDVQKRIDKLEKRTQKALAEIALEQQKEKEALEEGGDAAQE

SEQ ID NO: 19475 - DNA, 887 bp, Zea mays subsp. mays
  misc_feature (1)..(887): Ceres Seq. ID no. 12635796
atcatctgcttaaaatcccccatcgcttcggacattagcttaaagtctttctccttcacctaccattctctctctctctctctcccctttcgtacctctcgacagagagagtgaaatgacttggtccgtcttcagatccataaactctccaactctcgacctctccgccgcacttcgctccacccgcagccctttgttcgccgccggtgcaggctgcgctaccctcgctggtgtttctctcttccgaatgtcttccagatctcctcctttcgcttctctcagtgtctcagcttctgcttctgagaagaaggaagttgtggcgacagagaaagcaccagctgctttgggaccatactctcaggccatcaaagccaacaatctcgttttcgtttccggtgttcttggtcttatacctgagactggaaagtttgtttcggacaacgttgaagatcagactgagcagatactcaagaacatgggggagatactgaaagctagtggtgttgattactcctccgtggtgaagacaacgatcatgcttgctgacttaggtgacttcaagaaagtgaacgagatttacgccaaatacttcccagctccttcaccagcgcgatcgacatatcaagtcgcagctttgccactaaacgccaagattgagattgaatgtattgcagcactctagagcaccatcaaatctcatccaggaagagttttagattcggaaaatgtcagaacaaataagaggggcttatcatatcaaccattaggttggttgtaaaacccatacccctatcaagaataagtgattctattttaggaccagcatgttgtgttgacttgatatttattgagtacaatattaaatttgaaaccaaaaaaaaaaaaaa

SEQ ID NO: 19476 - protein, 188 aa, Zea mays subsp. mays
  peptide (1)..(188): Ceres Seq. ID no. 12635797
  misc_feature (70)..(188): Pfam Name: Pfam Description:  Endoribonuclease L-PSP
  misc_feature (1)..(188): NCBI GI NO: 15231137 NR Description: translational inhibitor protein, putative
  misc_feature (45)..(188): NCBI GI NO: 9294558 NR Description: contains similarity to protein translationinhibitor~gene_id:MQC12
  misc_feature (11)..(188): NCBI GI NO: 29420485 NR Description: translation-inhibitor protein [Gentiana triflora]
  misc_feature (1)..(188): NCBI GI NO: 23617012 NR Description: putative translational inhibitor protein
  misc_feature (65)..(186): NCBI GI NO: 5032215 NR Description: translational inhibitor protein p14.5
  misc_feature (65)..(186): NCBI GI NO: 30584193 NR Description: Homo sapiens translational inhibitor protein p14.5
  misc_feature (65)..(186): NCBI GI NO: 39579795 NR Description: Hypothetical protein CBG24261
  misc_feature (57)..(188): NCBI GI NO: 1708292 NR Description: HEAT-RESPONSIVE PROTEIN 12
  misc_feature (65)..(188): NCBI GI NO: 40807498 NR Description: heat-responsive protein 12 [Mus musculus]
  misc_feature (65)..(186): NCBI GI NO: 25148891 NR Description: YjgF family precursor [Caenorhabditis elegans]
MTWSVFRSINSPTLDLSAALRSTRSPLFAAGAGCATLAGVSLFRMSSRSPPFASLSVSASASEKKEVVATEKAPAALGPYSQAIKANNLVFVSGVLGLIPETGKFVSDNVEDQTEQILKNMGEILKASGVDYSSVVKTTIMLADLGDFKKVNEIYAKYFPAPSPARSTYQVAALPLNAKIEIECIAAL

SEQ ID NO: 19477 - protein, 144 aa, Zea mays subsp. mays
  peptide (1)..(144): Ceres Seq. ID no. 12635798
  misc_feature (26)..(144): Pfam Name: Pfam Description:  Endoribonuclease L-PSP
  misc_feature (1)..(144): NCBI GI NO: 15231137 NR Description: translational inhibitor protein, putative
  misc_feature (1)..(144): NCBI GI NO: 9294558 NR Description: contains similarity to protein translationinhibitor~gene_id:MQC12
  misc_feature (1)..(144): NCBI GI NO: 29420485 NR Description: translation-inhibitor protein [Gentiana triflora]
  misc_feature (1)..(144): NCBI GI NO: 23617012 NR Description: putative translational inhibitor protein
  misc_feature (21)..(142): NCBI GI NO: 5032215 NR Description: translational inhibitor protein p14.5
  misc_feature (21)..(142): NCBI GI NO: 30584193 NR Description: Homo sapiens translational inhibitor protein p14.5
  misc_feature (21)..(142): NCBI GI NO: 39579795 NR Description: Hypothetical protein CBG24261
  misc_feature (13)..(144): NCBI GI NO: 1708292 NR Description: HEAT-RESPONSIVE PROTEIN 12
  misc_feature (21)..(144): NCBI GI NO: 40807498 NR Description: heat-responsive protein 12 [Mus musculus]
  misc_feature (21)..(142): NCBI GI NO: 25148891 NR Description: YjgF family precursor [Caenorhabditis elegans]
MSSRSPPFASLSVSASASEKKEVVATEKAPAALGPYSQAIKANNLVFVSGVLGLIPETGKFVSDNVEDQTEQILKNMGEILKASGVDYSSVVKTTIMLADLGDFKKVNEIYAKYFPAPSPARSTYQVAALPLNAKIEIECIAAL

SEQ ID NO: 19478 - DNA, 818 bp, Zea mays subsp. mays
  misc_feature (1)..(818): Ceres Seq. ID no. 12635635
acaaagcgattgcggcggagagagagaggaagatcggggatttatctttttctcgatactgtagtaacttttgatctatggaagcggtagacaatccagaagaaaccatcccaggcaactcttcaagattagctgggaatccaaactggggaacagcaactgttgttgggatatttgctggaatgttatatggaggcagcaaagaggcttctgcttctgtgagcaaggatgcagaggtgatgttgaagatgggtagtacacaggacaagcgagagcaacacagattgatgcgagatgctatggagaaacgattcacccgggtcactcgtggctccctcattggagggatgcgtctcgggatgttcaccgcttcatacttcagtctacagaactttttagctgagacgcgaggagtgcatgatgttttcaatttcgtgggagctggttcagctactgctgccgtatttggcttaatcatgccggggtctcttgcttggcgtgcgcggaatgtgatgctcggttcagttcttggagctacagtctgcttccctcttggttggttacaactgaagctcatggagaaggcaaacgaaggcaacaaacaagacacgagccacattggcgaggtcacaagtggtgttggtgctgctattgagagactcgaacaacagttaagaaaataagaaagggaacgttcacagtttttttttgtatgctaaattttcaagccgatggagaataagataacgaacataaacactgttcttttgttgtttcgtacaattttgtgagtatacaatatgaaaacgttgatggtt

SEQ ID NO: 19479 - protein, 201 aa, Zea mays subsp. mays
  peptide (1)..(201): Ceres Seq. ID no. 12635636
  misc_feature (1)..(201): NCBI GI NO: 15242587 NR Description: putative protein; protein id: At5g63000.1
  misc_feature (1)..(186): NCBI GI NO: 9758300 NR Description: contains similarity to unknownprotein~dbj|BAA89593
  misc_feature (8)..(201): NCBI GI NO: 34903198 NR Description: unnamed protein product
MEAVDNPEETIPGNSSRLAGNPNWGTATVVGIFAGMLYGGSKEASASVSKDAEVMLKMGSTQDKREQHRLMRDAMEKRFTRVTRGSLIGGMRLGMFTASYFSLQNFLAETRGVHDVFNFVGAGSATAAVFGLIMPGSLAWRARNVMLGSVLGATVCFPLGWLQLKLMEKANEGNKQDTSHIGEVTSGVGAAIERLEQQLRK

SEQ ID NO: 19480 - protein, 166 aa, Zea mays subsp. mays
  peptide (1)..(166): Ceres Seq. ID no. 12635637
  misc_feature (1)..(166): NCBI GI NO: 15242587 NR Description: putative protein; protein id: At5g63000.1
  misc_feature (1)..(151): NCBI GI NO: 9758300 NR Description: contains similarity to unknownprotein~dbj|BAA89593
  misc_feature (1)..(166): NCBI GI NO: 34903198 NR Description: unnamed protein product
MLYGGSKEASASVSKDAEVMLKMGSTQDKREQHRLMRDAMEKRFTRVTRGSLIGGMRLGMFTASYFSLQNFLAETRGVHDVFNFVGAGSATAAVFGLIMPGSLAWRARNVMLGSVLGATVCFPLGWLQLKLMEKANEGNKQDTSHIGEVTSGVGAAIERLEQQLRK

SEQ ID NO: 19481 - protein, 147 aa, Zea mays subsp. mays
  peptide (1)..(147): Ceres Seq. ID no. 12635638
  misc_feature (1)..(147): NCBI GI NO: 15242587 NR Description: putative protein; protein id: At5g63000.1
  misc_feature (1)..(132): NCBI GI NO: 9758300 NR Description: contains similarity to unknownprotein~dbj|BAA89593
  misc_feature (1)..(147): NCBI GI NO: 34903198 NR Description: unnamed protein product
MLKMGSTQDKREQHRLMRDAMEKRFTRVTRGSLIGGMRLGMFTASYFSLQNFLAETRGVHDVFNFVGAGSATAAVFGLIMPGSLAWRARNVMLGSVLGATVCFPLGWLQLKLMEKANEGNKQDTSHIGEVTSGVGAAIERLEQQLRK

SEQ ID NO: 19482 - DNA, 1104 bp, Zea mays subsp. mays
  misc_feature (1)..(1104): Ceres Seq. ID no. 15225561
cttcctgtacctgtcctcaaggtcgcccccgcgctgcccatccccctccccctcctccttcctcggcagctcgtggcgctccagtccacagaggagaggacacgacacgacgaggggccgggcagcaagctctgctcagtccgttccgcgggccggtcggtcggcgatggcgcggcacgcgggcacggcgctcctggacctggtggcggggcaggtggacccgggcgcgccggggttctggcgcgacttcctggtcggcatgctcaagccggcggcggccacggccgtggtggccatggccgtcgggctcagcttctcgcagcgcctggggctcgagggcgagatgctctacgccatcgcacgcgccttcctccagctctccgccatcggcttcgtcctccagttcatcttcgcccagaagaacgcgctctggatcctcctcgcctacctcttcatggtgacggtcgccgggtacacggcggggcagcgcgccaggcaggtgccgcgcgggaagcgcatcgcctgcgtctccatcctcgtcggcaccgccgtcaccatgctcctgctcgtcctcctcgacgtcttccccttcaccccgcgctacatcatccccgtcgccggcatgatggtcggcaacgccatgaccgtcaccggcgtcaccatgaagaagctccgggaggacgtcaagatccagaggaacctggtggagacggcgctggcgctgggcgcgacgccgcggcaggcgacgctgcagcaggtgaagcggtcgctggtcatcgcgctgtccccggtgatcgacagcgccaagacggtggggctcatcgcgctgccgggcgccatgacggggctcatcatgggcggcgcgtcgccgctggaggccatccagctgcagatcgtcgtcatgaacatgctcatgggcgcctccaccgtcagcagcatcctctccacctacctctgctggccggccttcttcaccaaggccttccagctcgacgacagggtctttgcagactaagatacatgctggattgtaatgtaaccgagtcccagttgtttgagccttttgaggtagaaacagagctaagagctgtggctttcggtgcc

SEQ ID NO: 19483 - protein, 368 aa, Zea mays subsp. mays
  peptide (1)..(368): Ceres Seq. ID no. 15225562
  misc_feature (67)..(286): Pfam Name: Pfam Description:  HlyD family secretion protein
  misc_feature (23)..(113): NCBI GI NO: 124178 NR Description: IMMEDIATE-EARLY PROTEIN IE180
  misc_feature (74)..(337): NCBI GI NO: 31194331 NR Description: ENSANGP00000015546 [Anopheles gambiae]
  misc_feature (31)..(305): NCBI GI NO: 23008548 NR Description: COG1530: Ribonucleases G and E
LPVPVLKVAPALPIPLPLLLPRQLVALQSTEERTRHDEGPGSKLCSVRSAGRSVGDGAARGHGAPGPGGGAGGPGRAGVLARLPGRHAQAGGGHGRGGHGRRAQLLAAPGARGRDALRHRTRLPPALRHRLRPPVHLRPEERALDPPRLPLHGDGRRVHGGAARQAGAAREAHRLRLHPRRHRRHHAPARPPRRLPLHPALHHPRRRHDGRQRHDRHRRHHEEAPGGRQDPEEPGGDGAGAGRDAAAGDAAAGEAVAGHRAVPGDRQRQDGGAHRAAGRHDGAHHGRRVAAGGHPAADRRHEHAHGRLHRQQHPLHLPLLAGLLHQGLPARRQGLCRLRYMLDCNVTESQLFEPFEVETELRAVAFGA

SEQ ID NO: 19484 - protein, 337 aa, Zea mays subsp. mays
  peptide (1)..(337): Ceres Seq. ID no. 15225563
  misc_feature (80)..(325): Pfam Name: UPF0014 Pfam Description: Uncharacterised protein family
  misc_feature (63)..(336): NCBI GI NO: 8099122 NR Description: similar to an Arabidopsis thialiana chromosome BACgenomic sequence
  misc_feature (83)..(336): NCBI GI NO: 15228120 NR Description: expressed protein [Arabidopsis thaliana]
  misc_feature (93)..(330): NCBI GI NO: 20806838 NR Description: predicted permease
  misc_feature (85)..(330): NCBI GI NO: 22536854 NR Description: membrane protein, putative
  misc_feature (85)..(330): NCBI GI NO: 25010719 NR Description: Unknown [Streptococcus agalactiae NEM316]
  misc_feature (91)..(330): NCBI GI NO: 24111874 NR Description: putative metal resistance protein
  misc_feature (91)..(330): NCBI GI NO: 15800228 NR Description: putative metal resistance protein
  misc_feature (91)..(330): NCBI GI NO: 33347459 NR Description: putative metal resistance protein
  misc_feature (91)..(330): NCBI GI NO: 16759481 NR Description: putative membrane protein
  misc_feature (91)..(330): NCBI GI NO: 29142747 NR Description: putative membrane protein
FLYLSSRSPPRCPSPSPSSFLGSSWRSSPQRRGHDTTRGRAASSAQSVPRAGRSAMARHAGTALLDLVAGQVDPGAPGFWRDFLVGMLKPAAATAVVAMAVGLSFSQRLGLEGEMLYAIARAFLQLSAIGFVLQFIFAQKNALWILLAYLFMVTVAGYTAGQRARQVPRGKRIACVSILVGTAVTMLLLVLLDVFPFTPRYIIPVAGMMVGNAMTVTGVTMKKLREDVKIQRNLVETALALGATPRQATLQQVKRSLVIALSPVIDSAKTVGLIALPGAMTGLIMGGASPLEAIQLQIVVMNMLMGASTVSSILSTYLCWPAFFTKAFQLDDRVFAD

SEQ ID NO: 19485 - protein, 282 aa, Zea mays subsp. mays
  peptide (1)..(282): Ceres Seq. ID no. 15225564
  misc_feature (25)..(270): Pfam Name: UPF0014 Pfam Description: Uncharacterised protein family
  misc_feature (8)..(281): NCBI GI NO: 8099122 NR Description: similar to an Arabidopsis thialiana chromosome BACgenomic sequence
  misc_feature (28)..(281): NCBI GI NO: 15228120 NR Description: expressed protein [Arabidopsis thaliana]
  misc_feature (38)..(275): NCBI GI NO: 20806838 NR Description: predicted permease
  misc_feature (30)..(275): NCBI GI NO: 22536854 NR Description: membrane protein, putative
  misc_feature (30)..(275): NCBI GI NO: 25010719 NR Description: Unknown [Streptococcus agalactiae NEM316]
  misc_feature (36)..(275): NCBI GI NO: 24111874 NR Description: putative metal resistance protein
  misc_feature (36)..(275): NCBI GI NO: 15800228 NR Description: putative metal resistance protein
  misc_feature (36)..(275): NCBI GI NO: 33347459 NR Description: putative metal resistance protein
  misc_feature (36)..(275): NCBI GI NO: 16759481 NR Description: putative membrane protein
  misc_feature (36)..(275): NCBI GI NO: 29142747 NR Description: putative membrane protein
MARHAGTALLDLVAGQVDPGAPGFWRDFLVGMLKPAAATAVVAMAVGLSFSQRLGLEGEMLYAIARAFLQLSAIGFVLQFIFAQKNALWILLAYLFMVTVAGYTAGQRARQVPRGKRIACVSILVGTAVTMLLLVLLDVFPFTPRYIIPVAGMMVGNAMTVTGVTMKKLREDVKIQRNLVETALALGATPRQATLQQVKRSLVIALSPVIDSAKTVGLIALPGAMTGLIMGGASPLEAIQLQIVVMNMLMGASTVSSILSTYLCWPAFFTKAFQLDDRVFAD

SEQ ID NO: 19486 - DNA, 1531 bp, Zea mays subsp. mays
  misc_feature (1)..(1531): Ceres Seq. ID no. 13587063
atcgcattcacgtccaaccgttcgcttgcgccctccgcaacaacgcaacgcatcgtgacgccgccgctttttgcttttccgactgctgtttccgccttttgagtaggcgttgggcgagcttcggtttcgacggacgtagccgtcaccgcctcaccggcccggccatgggcgccgccgccgcctgttctcttcgcctctgccacacgtcaccatccgctgcgacggtagggccgcgatgactccggcggttcgggtggggaaccctcgcgatcccggtccgggcgccgcggtggtggaggacgaggaggaggcggcggtcgcgtggcgggagctgcgcggcaaggccgcggaggtcgcggctgcgggcgaggaaagggcggtcctggcccgccgcatcgaggccgcgctccaggtaaggagggaggcgctgcggcaggcggaggagctggacgagttgacgcggatggtggacctccagcaagcgcgtttggaggcggccgtcgtcggcaggaggcgggcgctcgaggccgtggagcgggggaagaagcggctgcaggagcagatcgaccgggtgctgccgctgtcgaggtccctcaccgccgcgcaccatcgagtgcaggaagcgaaggaggcgttatccggagacaaattcagactcaaggatctgcagaggctgcttcggacgaggcagcagcgcatggttagccaggttgctggtttgtaccctgtgagagtcttccatgatcttccaagacatgcagaaaacccctgtgccgatactaatggggagcatgtgacacttccagaggaaaacagaacattttcaggtggagatggaacacatttacccaccattatcaaatctccagaagcacgtggctggacattttttggttgggacattatgaagcataaaatgaagcaaaaaagttacaggaacaaggtgctacagaggtccgcagctgttctgggatatgcagcgcatgcagtcttgttcatagcttgctatctagatattcccctccgatatcccttgcgctttggagggtcccgatcttatgtgagtgatcgcttgccttcagctgatacagcatcatcggctgctttagcaagtaccaggaacaccgaatcagaactaacagaataccctcttttcctggaatgccaagacgatgactccactagtgcctcctatgccatttatttattgcacaaggatacggagcagcttctgaactatgttggagctgagagttgtggaaggcacgtgtttggtaacctacgagaacttcttaggatcgtgcagtctgataagtttgtgtacagatgatggttccaatccatgtggttttggagtgcttatgctgtagatgtattatagagatgtaagtaggtgtttttcttttctcttcttattctttcgtgtgattcattccctctttccctgcgctaggttttttatatgtgcaggaaataggcaattgtgtttttctagagaaatgaaatgtactcacacgtatggcttttttcg

SEQ ID NO: 19487 - protein, 364 aa, Zea mays subsp. mays
  peptide (1)..(364): Ceres Seq. ID no. 13587064
  misc_feature (43)..(362): NCBI GI NO: 30685426 NR Description: expressed protein [Arabidopsis thaliana]
  misc_feature (236)..(327): NCBI GI NO: 20197059 NR Description: hypothetical protein [Arabidopsis thaliana]
  misc_feature (236)..(327): NCBI GI NO: 7486092 NR Description: hypothetical protein At2g32760
MTPAVRVGNPRDPGPGAAVVEDEEEAAVAWRELRGKAAEVAAAGEERAVLARRIEAALQVRREALRQAEELDELTRMVDLQQARLEAAVVGRRRALEAVERGKKRLQEQIDRVLPLSRSLTAAHHRVQEAKEALSGDKFRLKDLQRLLRTRQQRMVSQVAGLYPVRVFHDLPRHAENPCADTNGEHVTLPEENRTFSGGDGTHLPTIIKSPEARGWTFFGWDIMKHKMKQKSYRNKVLQRSAAVLGYAAHAVLFIACYLDIPLRYPLRFGGSRSYVSDRLPSADTASSAALASTRNTESELTEYPLFLECQDDDSTSASYAIYLLHKDTEQLLNYVGAESCGRHVFGNLRELLRIVQSDKFVYR

SEQ ID NO: 19488 - protein, 288 aa, Zea mays subsp. mays
  peptide (1)..(288): Ceres Seq. ID no. 13587065
  misc_feature (1)..(286): NCBI GI NO: 30685426 NR Description: expressed protein [Arabidopsis thaliana]
  misc_feature (160)..(251): NCBI GI NO: 20197059 NR Description: hypothetical protein [Arabidopsis thaliana]
  misc_feature (160)..(251): NCBI GI NO: 7486092 NR Description: hypothetical protein At2g32760
MVDLQQARLEAAVVGRRRALEAVERGKKRLQEQIDRVLPLSRSLTAAHHRVQEAKEALSGDKFRLKDLQRLLRTRQQRMVSQVAGLYPVRVFHDLPRHAENPCADTNGEHVTLPEENRTFSGGDGTHLPTIIKSPEARGWTFFGWDIMKHKMKQKSYRNKVLQRSAAVLGYAAHAVLFIACYLDIPLRYPLRFGGSRSYVSDRLPSADTASSAALASTRNTESELTEYPLFLECQDDDSTSASYAIYLLHKDTEQLLNYVGAESCGRHVFGNLRELLRIVQSDKFVYR

SEQ ID NO: 19489 - protein, 210 aa, Zea mays subsp. mays
  peptide (1)..(210): Ceres Seq. ID no. 13587066
  misc_feature (1)..(208): NCBI GI NO: 30685426 NR Description: expressed protein [Arabidopsis thaliana]
  misc_feature (82)..(173): NCBI GI NO: 20197059 NR Description: hypothetical protein [Arabidopsis thaliana]
  misc_feature (82)..(173): NCBI GI NO: 7486092 NR Description: hypothetical protein At2g32760
MVSQVAGLYPVRVFHDLPRHAENPCADTNGEHVTLPEENRTFSGGDGTHLPTIIKSPEARGWTFFGWDIMKHKMKQKSYRNKVLQRSAAVLGYAAHAVLFIACYLDIPLRYPLRFGGSRSYVSDRLPSADTASSAALASTRNTESELTEYPLFLECQDDDSTSASYAIYLLHKDTEQLLNYVGAESCGRHVFGNLRELLRIVQSDKFVYR

SEQ ID NO: 19490 - DNA, 948 bp, Zea mays subsp. mays
  misc_feature (1)..(948): Ceres Seq. ID no. 12635639
aacctttattttgtttctgccaaacacttctcttcctctctccaatggcttcctccttatccttcgtctcatcctctcacctcactctccgcactccttccctcaccctacgcaaactctctccccctagaacctccgtttcgttctccgtcaaggcccagtccgtcgcactctcccaagacgatctcaagaaactcgcggcggagaaagccgtggaggcgatcaaaccggggatggtcctcggcctcggaaccggatccaccgccgccttcgccgtcgaccaaatcggaaaactcctctcctccggcgagctccacgacatcgtcggcatcccgacctcaaaacgcaccgaggagcaggccagatccctagggatccccctcgtggccctggacacgcatcctcggatcgacctggccatcgacggagcggacgaggtggatccgaatctggacctggtcaaggggcgaggaggcgcgctcctgagggagaagatggtggaggccgtggccgagagatttatcgtcgttgcggatgatacgaagctagtgaaggggctgggagggagtggtttagcgatgcctgtggaggttgttcagttctgctggaagtttaatttggtgaggctgagggatttgtttaaggagtttgggtgcgatgcgaagctgagggttggtgagggtggggaggcgtatgtgacggataatagtaattatattattgatttgtattttaaggagccgttgaaggatgggttcgctgcggggagggagattgggaagttggagggggttgtggagcatggtttgtttttggggatggctacttcggtgattattgctgggaagaatggtgttgaggttatgaacaagtgaggtttttttaaaagtttgatgtttttcttctttgtctcctctgtaataatattaccaattgagttattgtaat

SEQ ID NO: 19491 - protein, 290 aa, Zea mays subsp. mays
  peptide (1)..(290): Ceres Seq. ID no. 12635640
  misc_feature (107)..(286): Pfam Name: phosphoriboisomerase A Pfam Description: Ribose 5-phosphate isomerase A
  misc_feature (17)..(290): NCBI GI NO: 15229349 NR Description: putative ribose 5-phosphate isomerase
  misc_feature (17)..(290): NCBI GI NO: 21594002 NR Description: putative ribose 5-phosphate isomerase
  misc_feature (37)..(290): NCBI GI NO: 34393835 NR Description: putative ribose-5-phosphate isomerase
  misc_feature (45)..(290): NCBI GI NO: 34393836 NR Description: putative ribose-5-phosphate isomerase
  misc_feature (12)..(290): NCBI GI NO: 18654317 NR Description: ribose-5-phosphate isomerase [Spinacia oleracea]
  misc_feature (53)..(290): NCBI GI NO: 15226223 NR Description: putative ribose 5-phosphate isomerase
  misc_feature (57)..(290): NCBI GI NO: 21592672 NR Description: putative ribose 5-phosphate isomerase
  misc_feature (57)..(290): NCBI GI NO: 15223936 NR Description: putative ribose 5-phosphate isomerase
  misc_feature (57)..(290): NCBI GI NO: 13430836 NR Description: putative ribose 5-phosphate isomerase
  misc_feature (57)..(290): NCBI GI NO: 38347196 NR Description: OSJNBa0023J03.8
PLFCFCQTLLFLSPMASSLSFVSSSHLTLRTPSLTLRKLSPPRTSVSFSVKAQSVALSQDDLKKLAAEKAVEAIKPGMVLGLGTGSTAAFAVDQIGKLLSSGELHDIVGIPTSKRTEEQARSLGIPLVALDTHPRIDLAIDGADEVDPNLDLVKGRGGALLREKMVEAVAERFIVVADDTKLVKGLGGSGLAMPVEVVQFCWKFNLVRLRDLFKEFGCDAKLRVGEGGEAYVTDNSNYIIDLYFKEPLKDGFAAGREIGKLEGVVEHGLFLGMATSVIIAGKNGVEVMNK

SEQ ID NO: 19492 - protein, 276 aa, Zea mays subsp. mays
  peptide (1)..(276): Ceres Seq. ID no. 12635641
  misc_feature (93)..(272): Pfam Name: phosphoriboisomerase A Pfam Description: Ribose 5-phosphate isomerase A
  misc_feature (3)..(276): NCBI GI NO: 15229349 NR Description: putative ribose 5-phosphate isomerase
  misc_feature (3)..(276): NCBI GI NO: 21594002 NR Description: putative ribose 5-phosphate isomerase
  misc_feature (23)..(276): NCBI GI NO: 34393835 NR Description: putative ribose-5-phosphate isomerase
  misc_feature (31)..(276): NCBI GI NO: 34393836 NR Description: putative ribose-5-phosphate isomerase
  misc_feature (1)..(276): NCBI GI NO: 18654317 NR Description: ribose-5-phosphate isomerase [Spinacia oleracea]
  misc_feature (39)..(276): NCBI GI NO: 15226223 NR Description: putative ribose 5-phosphate isomerase
  misc_feature (43)..(276): NCBI GI NO: 21592672 NR Description: putative ribose 5-phosphate isomerase
  misc_feature (43)..(276): NCBI GI NO: 15223936 NR Description: putative ribose 5-phosphate isomerase
  misc_feature (43)..(276): NCBI GI NO: 13430836 NR Description: putative ribose 5-phosphate isomerase
  misc_feature (43)..(276): NCBI GI NO: 38347196 NR Description: OSJNBa0023J03.8
MASSLSFVSSSHLTLRTPSLTLRKLSPPRTSVSFSVKAQSVALSQDDLKKLAAEKAVEAIKPGMVLGLGTGSTAAFAVDQIGKLLSSGELHDIVGIPTSKRTEEQARSLGIPLVALDTHPRIDLAIDGADEVDPNLDLVKGRGGALLREKMVEAVAERFIVVADDTKLVKGLGGSGLAMPVEVVQFCWKFNLVRLRDLFKEFGCDAKLRVGEGGEAYVTDNSNYIIDLYFKEPLKDGFAAGREIGKLEGVVEHGLFLGMATSVIIAGKNGVEVMNK

SEQ ID NO: 19493 - protein, 213 aa, Zea mays subsp. mays
  peptide (1)..(213): Ceres Seq. ID no. 12635642
  misc_feature (30)..(209): Pfam Name: phosphoriboisomerase A Pfam Description: Ribose 5-phosphate isomerase A
  misc_feature (1)..(213): NCBI GI NO: 15229349 NR Description: putative ribose 5-phosphate isomerase
  misc_feature (1)..(213): NCBI GI NO: 21594002 NR Description: putative ribose 5-phosphate isomerase
  misc_feature (1)..(213): NCBI GI NO: 34393835 NR Description: putative ribose-5-phosphate isomerase
  misc_feature (1)..(213): NCBI GI NO: 34393836 NR Description: putative ribose-5-phosphate isomerase
  misc_feature (1)..(213): NCBI GI NO: 18654317 NR Description: ribose-5-phosphate isomerase [Spinacia oleracea]
  misc_feature (1)..(213): NCBI GI NO: 15226223 NR Description: putative ribose 5-phosphate isomerase
  misc_feature (1)..(213): NCBI GI NO: 21592672 NR Description: putative ribose 5-phosphate isomerase
  misc_feature (1)..(213): NCBI GI NO: 15223936 NR Description: putative ribose 5-phosphate isomerase
  misc_feature (1)..(213): NCBI GI NO: 13430836 NR Description: putative ribose 5-phosphate isomerase
  misc_feature (1)..(213): NCBI GI NO: 38347196 NR Description: OSJNBa0023J03.8
MVLGLGTGSTAAFAVDQIGKLLSSGELHDIVGIPTSKRTEEQARSLGIPLVALDTHPRIDLAIDGADEVDPNLDLVKGRGGALLREKMVEAVAERFIVVADDTKLVKGLGGSGLAMPVEVVQFCWKFNLVRLRDLFKEFGCDAKLRVGEGGEAYVTDNSNYIIDLYFKEPLKDGFAAGREIGKLEGVVEHGLFLGMATSVIIAGKNGVEVMNK

SEQ ID NO: 19494 - DNA, 1109 bp, Zea mays subsp. mays
  misc_feature (1)..(1109): Ceres Seq. ID no. 12635180
aaaaacaaaaaaaactagaactatctgagagacactctgtggccatggcagcttctctccaatccgccgccacattcctccactccgcaaaaatctccaccgctccttctcgcggcagtgctcacctccgttcgactcagaccgtcggcaaatcattcggcctagagacttcttctgcacgcctcacttgttcctaccaatctgatatcaaggacttcgccggaaaatgctccgacgctgttaaaatcgccggattcgctcttgcaacctctgctctcgtcgtctcgggagcaagtgcagagggtgctccgaagagactcacatatgacgagatacagagcaagacatacatggaagtcaaaggaaccggaactgccaaccagtgtccaactattgacggtggctctgagactttctccttcaaacccggtaagtacgctggcaagaagttctgcttcgagcctacttccttcaccgtcaaagccgagagtgttagcaagaacgcacctcctgagtttcagaacaccaagctcatgacccgtctcacctacacccttgacgaaatcgaaggccccttcgaggtttcttcagacggaagcgtgaacttcaaggaagaagacggaatcgactacgctgcagtcactgttcagcttccaggaggcgagcgtgtgccgttcctcttcacagtcaagcagcttgacgcctcgggcaaaccagacaacttcactggcaaattcttggtcccgtcgtaccgtggctcgtccttcttggacccaaagggtcgtggtggatccacaggatatgacaacgccgttgcattgccagctggaggcagaggagacgaagaggagctttcgaaggagaacgtgaagaacacggcagcttcggtgggagagatcactctgaaagtgaccaagagcaaaccggagacaggagaagtgatcggagtgttcgagagtcttcagccgtctgatactgacttgggtgccaaggtaccaaaggatgtgaagatccaaggggtgtggtatggacaacttgagtgatcatgttattatatcaaaacattttcttctgttcattgtatttgatgataatgagaacatcttttc

SEQ ID NO: 19495 - protein, 346 aa, Zea mays subsp. mays
  peptide (1)..(346): Ceres Seq. ID no. 12635181
  misc_feature (110)..(346): Pfam Name: Pfam Description:  Manganese-stabilising protein / photosystem II polypeptide
  misc_feature (15)..(346): NCBI GI NO: 15240013 NR Description: photosystem II oxygen-evolving complex 33
  misc_feature (15)..(346): NCBI GI NO: 21593220 NR Description: 33 kDa polypeptide of oxygen-evolving complex
  misc_feature (15)..(346): NCBI GI NO: 13926291 NR Description: AT5g66570/K1F13_25 [Arabidopsis thaliana]
  misc_feature (15)..(346): NCBI GI NO: 15912247 NR Description: AT5g66570/K1F13_25 [Arabidopsis thaliana]
  misc_feature (15)..(346): NCBI GI NO: 22530906 NR Description: 33 kDa polypeptide of oxygen-evolving complex
  misc_feature (15)..(346): NCBI GI NO: 15451006 NR Description: 33 kDa polypeptide of oxygen-evolving complex
  misc_feature (15)..(346): NCBI GI NO: 99745 NR Description: photosystem II oxygen-evolving complex protein 1precursor
  misc_feature (15)..(346): NCBI GI NO: 15230324 NR Description: photosystem II oxygen-evolving complex 33
  misc_feature (15)..(346): NCBI GI NO: 30013657 NR Description: oxygen evolving complex 33 kDa photosystem II
  misc_feature (15)..(346): NCBI GI NO: 11134054 NR Description: Oxygen-evolving enhancer protein 1
KQKKLELSERHSVAMAASLQSAATFLHSAKISTAPSRGSAHLRSTQTVGKSFGLETSSARLTCSYQSDIKDFAGKCSDAVKIAGFALATSALVVSGASAEGAPKRLTYDEIQSKTYMEVKGTGTANQCPTIDGGSETFSFKPGKYAGKKFCFEPTSFTVKAESVSKNAPPEFQNTKLMTRLTYTLDEIEGPFEVSSDGSVNFKEEDGIDYAAVTVQLPGGERVPFLFTVKQLDASGKPDNFTGKFLVPSYRGSSFLDPKGRGGSTGYDNAVALPAGGRGDEEELSKENVKNTAASVGEITLKVTKSKPETGEVIGVFESLQPSDTDLGAKVPKDVKIQGVWYGQLE

SEQ ID NO: 19496 - protein, 332 aa, Zea mays subsp. mays
  peptide (1)..(332): Ceres Seq. ID no. 12635182
  misc_feature (96)..(332): Pfam Name: Pfam Description:  Manganese-stabilising protein / photosystem II polypeptide
  misc_feature (1)..(332): NCBI GI NO: 15240013 NR Description: photosystem II oxygen-evolving complex 33
  misc_feature (1)..(332): NCBI GI NO: 21593220 NR Description: 33 kDa polypeptide of oxygen-evolving complex
  misc_feature (1)..(332): NCBI GI NO: 13926291 NR Description: AT5g66570/K1F13_25 [Arabidopsis thaliana]
  misc_feature (1)..(332): NCBI GI NO: 15912247 NR Description: AT5g66570/K1F13_25 [Arabidopsis thaliana]
  misc_feature (1)..(332): NCBI GI NO: 22530906 NR Description: 33 kDa polypeptide of oxygen-evolving complex
  misc_feature (1)..(332): NCBI GI NO: 15451006 NR Description: 33 kDa polypeptide of oxygen-evolving complex
  misc_feature (1)..(332): NCBI GI NO: 99745 NR Description: photosystem II oxygen-evolving complex protein 1precursor
  misc_feature (1)..(332): NCBI GI NO: 15230324 NR Description: photosystem II oxygen-evolving complex 33
  misc_feature (1)..(332): NCBI GI NO: 30013657 NR Description: oxygen evolving complex 33 kDa photosystem II
  misc_feature (1)..(332): NCBI GI NO: 11134054 NR Description: Oxygen-evolving enhancer protein 1
MAASLQSAATFLHSAKISTAPSRGSAHLRSTQTVGKSFGLETSSARLTCSYQSDIKDFAGKCSDAVKIAGFALATSALVVSGASAEGAPKRLTYDEIQSKTYMEVKGTGTANQCPTIDGGSETFSFKPGKYAGKKFCFEPTSFTVKAESVSKNAPPEFQNTKLMTRLTYTLDEIEGPFEVSSDGSVNFKEEDGIDYAAVTVQLPGGERVPFLFTVKQLDASGKPDNFTGKFLVPSYRGSSFLDPKGRGGSTGYDNAVALPAGGRGDEEELSKENVKNTAASVGEITLKVTKSKPETGEVIGVFESLQPSDTDLGAKVPKDVKIQGVWYGQLE

SEQ ID NO: 19497 - protein, 230 aa, Zea mays subsp. mays
  peptide (1)..(230): Ceres Seq. ID no. 12635183
  misc_feature (1)..(230): Pfam Name: Pfam Description:  Manganese-stabilising protein / photosystem II polypeptide
  misc_feature (1)..(230): NCBI GI NO: 15240013 NR Description: photosystem II oxygen-evolving complex 33
  misc_feature (1)..(230): NCBI GI NO: 21593220 NR Description: 33 kDa polypeptide of oxygen-evolving complex
  misc_feature (1)..(230): NCBI GI NO: 13926291 NR Description: AT5g66570/K1F13_25 [Arabidopsis thaliana]
  misc_feature (1)..(230): NCBI GI NO: 15912247 NR Description: AT5g66570/K1F13_25 [Arabidopsis thaliana]
  misc_feature (1)..(230): NCBI GI NO: 22530906 NR Description: 33 kDa polypeptide of oxygen-evolving complex
  misc_feature (1)..(230): NCBI GI NO: 15451006 NR Description: 33 kDa polypeptide of oxygen-evolving complex
  misc_feature (1)..(230): NCBI GI NO: 99745 NR Description: photosystem II oxygen-evolving complex protein 1precursor
  misc_feature (1)..(230): NCBI GI NO: 15230324 NR Description: photosystem II oxygen-evolving complex 33
  misc_feature (1)..(230): NCBI GI NO: 30013657 NR Description: oxygen evolving complex 33 kDa photosystem II
  misc_feature (1)..(230): NCBI GI NO: 11134054 NR Description: Oxygen-evolving enhancer protein 1
MEVKGTGTANQCPTIDGGSETFSFKPGKYAGKKFCFEPTSFTVKAESVSKNAPPEFQNTKLMTRLTYTLDEIEGPFEVSSDGSVNFKEEDGIDYAAVTVQLPGGERVPFLFTVKQLDASGKPDNFTGKFLVPSYRGSSFLDPKGRGGSTGYDNAVALPAGGRGDEEELSKENVKNTAASVGEITLKVTKSKPETGEVIGVFESLQPSDTDLGAKVPKDVKIQGVWYGQLE

SEQ ID NO: 19498 - DNA, 796 bp, Zea mays subsp. mays
  misc_feature (1)..(796): Ceres Seq. ID no. 12635789
gaacctctctgcctcttttgaccaaaaaaaacaaaagctctgtgcctctttgcagcgaaagctctatcaacaagacgatgattatctcagagaccaaccgcagagagatctgcaagtacctcttcaaagaaggagtattgtttgcgaagaaagatttcaatctcccgaagcatccgttgattgagtcagtgcccaacttgcaagtgatcaagctcatgcagagtttcaagtccaaggagtacgttagggagacattcgcgtggatgcactactattggtttctgaccaacgaagggattgagttcttgagaacttatcttaaccttccgtctgatgttgttcctgcgactttgaagaagtctgctaagcccattggtcgtcccttcggtggcccacctggtgatcgcccaagaggaccacctcgctttgatggagaccgtccaagatatggtgaccgtgatggttaccgtggagggcagcgtggtggtgatgttggaggtgaaaagggtggagctcctgctgattaccagccctcgttccaaggaggtggtggtaggcctggatttggccgtggcgcaggaggtttcagcgcagcagcaccctctggttctggtttaccttgaaagaaatttatgtaatcgttaagctatggaaagactgtttttttttttttttttttggcttcagttttgtttctgtaatacacatcgggaatctataatctatctatttctatgacttttggtctaaagaaacaaatcttatagttgaattcttgttgaaatgcacgtttctt

SEQ ID NO: 19499 - protein, 206 aa, Zea mays subsp. mays
  peptide (1)..(206): Ceres Seq. ID no. 12635790
  misc_feature (28)..(123): Pfam Name: Pfam Description:  Plectin/S10 domain
  misc_feature (26)..(206): NCBI GI NO: 15235985 NR Description: putative ribosomal protein S10
  misc_feature (26)..(206): NCBI GI NO: 15237217 NR Description: putative protein; protein id: At5g52650
  misc_feature (26)..(206): NCBI GI NO: 20139798 NR Description: 40S ribosomal protein S10-3
  misc_feature (26)..(206): NCBI GI NO: 15238099 NR Description: putative protein; protein id: At5g41520
  misc_feature (26)..(205): NCBI GI NO: 34897532 NR Description: OSJNBa0042L16.3
  misc_feature (26)..(205): NCBI GI NO: 20140213 NR Description: 40S ribosomal protein S10
  misc_feature (26)..(201): NCBI GI NO: 34905824 NR Description: putative ribosomal protein S10
  misc_feature (26)..(200): NCBI GI NO: 40642980 NR Description: ribosomal protein S10 [Crassostrea gigas]
  misc_feature (26)..(192): NCBI GI NO: 24266976 NR Description: ribosomal protein S10 [Branchiostoma belcheri]
  misc_feature (26)..(192): NCBI GI NO: 28200289 NR Description: ribosomal protein S10
TSLPLLTKKNKSSVPLCSESSINKTMIISETNRREICKYLFKEGVLFAKKDFNLPKHPLIESVPNLQVIKLMQSFKSKEYVRETFAWMHYYWFLTNEGIEFLRTYLNLPSDVVPATLKKSAKPIGRPFGGPPGDRPRGPPRFDGDRPRYGDRDGYRGGQRGGDVGGEKGGAPADYQPSFQGGGGRPGFGRGAGGFSAAAPSGSGLP

SEQ ID NO: 19500 - protein, 181 aa, Zea mays subsp. mays
  peptide (1)..(181): Ceres Seq. ID no. 12635791
  misc_feature (3)..(98): Pfam Name: Pfam Description:  Plectin/S10 domain
  misc_feature (1)..(181): NCBI GI NO: 15235985 NR Description: putative ribosomal protein S10
  misc_feature (1)..(181): NCBI GI NO: 15237217 NR Description: putative protein; protein id: At5g52650
  misc_feature (1)..(181): NCBI GI NO: 20139798 NR Description: 40S ribosomal protein S10-3
  misc_feature (1)..(181): NCBI GI NO: 15238099 NR Description: putative protein; protein id: At5g41520
  misc_feature (1)..(180): NCBI GI NO: 34897532 NR Description: OSJNBa0042L16.3
  misc_feature (1)..(180): NCBI GI NO: 20140213 NR Description: 40S ribosomal protein S10
  misc_feature (1)..(176): NCBI GI NO: 34905824 NR Description: putative ribosomal protein S10
  misc_feature (1)..(175): NCBI GI NO: 40642980 NR Description: ribosomal protein S10 [Crassostrea gigas]
  misc_feature (1)..(167): NCBI GI NO: 24266976 NR Description: ribosomal protein S10 [Branchiostoma belcheri]
  misc_feature (1)..(167): NCBI GI NO: 28200289 NR Description: ribosomal protein S10
MIISETNRREICKYLFKEGVLFAKKDFNLPKHPLIESVPNLQVIKLMQSFKSKEYVRETFAWMHYYWFLTNEGIEFLRTYLNLPSDVVPATLKKSAKPIGRPFGGPPGDRPRGPPRFDGDRPRYGDRDGYRGGQRGGDVGGEKGGAPADYQPSFQGGGGRPGFGRGAGGFSAAAPSGSGLP

SEQ ID NO: 19501 - protein, 135 aa, Zea mays subsp. mays
  peptide (1)..(135): Ceres Seq. ID no. 12635792
  misc_feature (1)..(52): Pfam Name: Pfam Description:  Plectin/S10 domain
  misc_feature (1)..(135): NCBI GI NO: 15235985 NR Description: putative ribosomal protein S10
  misc_feature (1)..(135): NCBI GI NO: 15237217 NR Description: putative protein; protein id: At5g52650
  misc_feature (1)..(135): NCBI GI NO: 20139798 NR Description: 40S ribosomal protein S10-3
  misc_feature (1)..(135): NCBI GI NO: 15238099 NR Description: putative protein; protein id: At5g41520
  misc_feature (1)..(134): NCBI GI NO: 34897532 NR Description: OSJNBa0042L16.3
  misc_feature (1)..(134): NCBI GI NO: 20140213 NR Description: 40S ribosomal protein S10
  misc_feature (1)..(130): NCBI GI NO: 34905824 NR Description: putative ribosomal protein S10
  misc_feature (1)..(129): NCBI GI NO: 40642980 NR Description: ribosomal protein S10 [Crassostrea gigas]
  misc_feature (1)..(121): NCBI GI NO: 24266976 NR Description: ribosomal protein S10 [Branchiostoma belcheri]
  misc_feature (1)..(121): NCBI GI NO: 28200289 NR Description: ribosomal protein S10
MQSFKSKEYVRETFAWMHYYWFLTNEGIEFLRTYLNLPSDVVPATLKKSAKPIGRPFGGPPGDRPRGPPRFDGDRPRYGDRDGYRGGQRGGDVGGEKGGAPADYQPSFQGGGGRPGFGRGAGGFSAAAPSGSGLP

SEQ ID NO: 19502 - DNA, 686 bp, Zea mays subsp. mays
  misc_feature (1)..(686): Ceres Seq. ID no. 13599181
atatattagagtagagagcagaaaagaagaagttaaaaaggtagatcgaatgaacagaaatggagaggaggaagtggccgagaagaagaggaggaggagggagggggtgcaggtgtccctcagaggaggctgcttggctgcttcagccactgctatagcggtaatgctgatggcaacagagaagggtgtggctgacatctatggcttgccgctccctctcaactccagctggtctttttctccctcctaccagtatgtggtgggggcatgcacggtgaccattctctactccctgttccacctctgtctaggaatttacaggctcctcactggatcacccatcacaccctcccgttcccaagcttggctttgtttcatcttcgatcagctcttcagctatttgataatgagcgctggatcagccggtattggagttacaaacctcaacaagaccggcatcaaacacactcctctccctgacttctgcaagaccctttcttatttctgcaatcacgtcgccctctccctcctcctagtcttgctctccttcatctttctcgcctcctcttccctctttaatgtccttgtgctctccactctctagtctcatggattctctattgttggtgctctatataatctaagacagactctaattattattatttatgatcacttgcattccc

SEQ ID NO: 19503 - protein, 200 aa, Zea mays subsp. mays
  peptide (1)..(200): Ceres Seq. ID no. 13599182
  misc_feature (33)..(185): Pfam Name: DUF588 Pfam Description: Domain of unknown function
  misc_feature (6)..(199): NCBI GI NO: 7715593 NR Description: F20B17.20 [Arabidopsis thaliana]
  misc_feature (17)..(84): NCBI GI NO: 15219983 NR Description: hypothetical integral membrane protein commonfamily
  misc_feature (132)..(199): NCBI GI NO: 15219983 NR Description: hypothetical integral membrane protein commonfamily
  misc_feature (31)..(198): NCBI GI NO: 15228175 NR Description: Arabidopsis hypothetical integral membrane proteincommon family
  misc_feature (21)..(130): NCBI GI NO: 34910750 NR Description: P0022F10.21
  misc_feature (25)..(193): NCBI GI NO: 15233256 NR Description: expressed integral membrane protein common family
  misc_feature (35)..(186): NCBI GI NO: 15234870 NR Description: expressed integral membrane protein common family
  misc_feature (35)..(186): NCBI GI NO: 21554768 NR Description: unknown [Arabidopsis thaliana]
  misc_feature (17)..(194): NCBI GI NO: 38344646 NR Description: OSJNBa0094P09.18
YIRVESRKEEVKKVDRMNRNGEEEVAEKKRRRREGVQVSLRGGCLAASATAIAVMLMATEKGVADIYGLPLPLNSSWSFSPSYQYVVGACTVTILYSLFHLCLGIYRLLTGSPITPSRSQAWLCFIFDQLFSYLIMSAGSAGIGVTNLNKTGIKHTPLPDFCKTLSYFCNHVALSLLLVLLSFIFLASSSLFNVLVLSTL

SEQ ID NO: 19504 - protein, 184 aa, Zea mays subsp. mays
  peptide (1)..(184): Ceres Seq. ID no. 13599183
  misc_feature (17)..(169): Pfam Name: DUF588 Pfam Description: Domain of unknown function
  misc_feature (1)..(183): NCBI GI NO: 7715593 NR Description: F20B17.20 [Arabidopsis thaliana]
  misc_feature (1)..(68): NCBI GI NO: 15219983 NR Description: hypothetical integral membrane protein commonfamily
  misc_feature (116)..(183): NCBI GI NO: 15219983 NR Description: hypothetical integral membrane protein commonfamily
  misc_feature (15)..(182): NCBI GI NO: 15228175 NR Description: Arabidopsis hypothetical integral membrane proteincommon family
  misc_feature (5)..(114): NCBI GI NO: 34910750 NR Description: P0022F10.21
  misc_feature (9)..(177): NCBI GI NO: 15233256 NR Description: expressed integral membrane protein common family
  misc_feature (19)..(170): NCBI GI NO: 15234870 NR Description: expressed integral membrane protein common family
  misc_feature (19)..(170): NCBI GI NO: 21554768 NR Description: unknown [Arabidopsis thaliana]
  misc_feature (1)..(178): NCBI GI NO: 38344646 NR Description: OSJNBa0094P09.18
MNRNGEEEVAEKKRRRREGVQVSLRGGCLAASATAIAVMLMATEKGVADIYGLPLPLNSSWSFSPSYQYVVGACTVTILYSLFHLCLGIYRLLTGSPITPSRSQAWLCFIFDQLFSYLIMSAGSAGIGVTNLNKTGIKHTPLPDFCKTLSYFCNHVALSLLLVLLSFIFLASSSLFNVLVLSTL

SEQ ID NO: 19505 - protein, 146 aa, Zea mays subsp. mays
  peptide (1)..(146): Ceres Seq. ID no. 13599184
  misc_feature (1)..(131): Pfam Name: DUF588 Pfam Description: Domain of unknown function
  misc_feature (1)..(145): NCBI GI NO: 7715593 NR Description: F20B17.20 [Arabidopsis thaliana]
  misc_feature (1)..(30): NCBI GI NO: 15219983 NR Description: hypothetical integral membrane protein commonfamily
  misc_feature (78)..(145): NCBI GI NO: 15219983 NR Description: hypothetical integral membrane protein commonfamily
  misc_feature (1)..(144): NCBI GI NO: 15228175 NR Description: Arabidopsis hypothetical integral membrane proteincommon family
  misc_feature (1)..(76): NCBI GI NO: 34910750 NR Description: P0022F10.21
  misc_feature (1)..(139): NCBI GI NO: 15233256 NR Description: expressed integral membrane protein common family
  misc_feature (1)..(132): NCBI GI NO: 15234870 NR Description: expressed integral membrane protein common family
  misc_feature (1)..(132): NCBI GI NO: 21554768 NR Description: unknown [Arabidopsis thaliana]
  misc_feature (1)..(140): NCBI GI NO: 38344646 NR Description: OSJNBa0094P09.18
MLMATEKGVADIYGLPLPLNSSWSFSPSYQYVVGACTVTILYSLFHLCLGIYRLLTGSPITPSRSQAWLCFIFDQLFSYLIMSAGSAGIGVTNLNKTGIKHTPLPDFCKTLSYFCNHVALSLLLVLLSFIFLASSSLFNVLVLSTL

SEQ ID NO: 19506 - DNA, 694 bp, Zea mays subsp. mays
  misc_feature (1)..(694): Ceres Seq. ID no. 13599185
acgaatcccctcctcacttcgcccctccccctctcctatttcttctctccgggccccgggccaaaattccatcctaagttccatcgaagagggcggcaaggggcgatccggatagcgcaagagcgaccatggcctacgtcgagagaggtgttgtgaaaggcaaacggacaatctggagactaagcataatccccgacttctttaaggctattgtgaacttcatcagaatgttcttcctcacaatgttttctatcgagaaaacagacagctataagaaaggatatggtagtggtaagaagtgggatggtggacctggtgggggaggtcctggtgggggtccatatggtggtgggggcggcggtggaggtggccctcgcggtcctcgcacactatctgacctccgatcaaacgatcagagttccctccctgcttgtggatcctgctgcggatgacatcttaacaaaagaacaacatattataatgacagaaaaacttccgtatttcatttcagcagagcaaaatcattgtgatgccgtgaagagtctagcatgtccagtatatattctgtagcttgtttctgatgtgatttgcatactgtattcatcatcgctttgccatgctgaattgtcctggatggagtcaaaatcttatccttaatactggcttcctgttgtgcaatgtgaatttactatgc

SEQ ID NO: 19507 - protein, 107 aa, Zea mays subsp. mays
  peptide (1)..(107): Ceres Seq. ID no. 13599186
  misc_feature (1)..(97): NCBI GI NO: 34902142 NR Description: hypothetical protein
  misc_feature (1)..(107): NCBI GI NO: 22328481 NR Description: glycine-rich protein [Arabidopsis thaliana]
  misc_feature (42)..(101): NCBI GI NO: 7486876 NR Description: hypothetical protein T12G13
  misc_feature (1)..(107): NCBI GI NO: 24641445 NR Description: CG1840-PA [Drosophila melanogaster]
  misc_feature (1)..(81): NCBI GI NO: 23452032 NR Description: selenoprotein SelK1 [Chlamydomonas reinhardtii]
  misc_feature (1)..(103): NCBI GI NO: 16767882 NR Description: GH03581p [Drosophila melanogaster]
  misc_feature (1)..(103): NCBI GI NO: 28571165 NR Description: Selenoprotein G CG1844-PA
MAYVERGVVKGKRTIWRLSIIPDFFKAIVNFIRMFFLTMFSIEKTDSYKKGYGSGKKWDGGPGGGGPGGGPYGGGGGGGGGPRGPRTLSDLRSNDQSSLPACGSCCG

SEQ ID NO: 19508 - protein, 95 aa, Zea mays subsp. mays
  peptide (1)..(95): Ceres Seq. ID no. 13599187
MVVVRSGMVDLVGEVLVGVHMVVGAAVEVALAVLAHYLTSDQTIRVPSLLVDPAADDILTKEQHIIMTEKLPYFISAEQNHCDAVKSLACPVYIL

SEQ ID NO: 19509 - protein, 88 aa, Zea mays subsp. mays
  peptide (1)..(88): Ceres Seq. ID no. 13599188
MVDLVGEVLVGVHMVVGAAVEVALAVLAHYLTSDQTIRVPSLLVDPAADDILTKEQHIIMTEKLPYFISAEQNHCDAVKSLACPVYIL

SEQ ID NO: 19510 - DNA, 968 bp, Zea mays subsp. mays
  misc_feature (1)..(968): Ceres Seq. ID no. 15226331
gaatcagcttctctccgataccttcttaaaaaaaaatcaaaaaaaatttcaatatgcaaagaaaaacaatggtgacgacgtcgtctcgtacaaagtctaacggccctgtgctccgttcccaatcgccgtcgggccgtttctgcggcgcttactctaatccaatcccgtcgtcgtcgtcttcctcagcgttcgcttcttctacgagctctagcttctcatctccttcctcagctttcttcagcaaccgtcacgataatcatcaccacagccaccaccgctccgcgtcaccgactcgcgtgaatctatacaaacaaccgcaaccgattgcgttttcgctagacaccagatccatctccccgacgacgacgaacagatccatctccgtcgcgaagaagcctcagcctagcaagatctcttccccgaggaggtgtatgtgctctccgacgacgcatcccggatccttccgatgcagtttgcataaaaacgtggcgaatccgcacgggcaaggaacggcgtcgtatccgacgaacagtttgaacatgcggagatccgcgatgacgaattcgctggtgaggatcggtggagttgagggagagtgggtgaggagagcgttgacgactttgataaggccttcgtcgcatcatctgagaaggagagctgcttatcagcctcgtcccagtaggctatcgatcatgtcgaaggccgccaccgagtgtaattgatatgatattttaggtttctggtttgttcttctctttaataaattaatagggctgcagatctgggaaggaaggatctgaatcgggcgagatctgcggcgattgtgggagagaatttcaaattcgaaatcgagttttgtaaaacgaagatcgaaagaagcactcaccatcatatattttttttttgttgttgggtgtagaaagatgcgaaatgcatttgtacatacttaattttactgttcttgcgtc

SEQ ID NO: 19511 - protein, 222 aa, Zea mays subsp. mays
  peptide (1)..(222): Ceres Seq. ID no. 15226332
  misc_feature (6)..(217): NCBI GI NO: 15238947 NR Description: expressed protein [Arabidopsis thaliana]
  misc_feature (6)..(217): NCBI GI NO: 15238753 NR Description: serine-rich protein [Arabidopsis thaliana]
  misc_feature (6)..(217): NCBI GI NO: 21618161 NR Description: serine-rich protein [Arabidopsis thaliana]
  misc_feature (22)..(217): NCBI GI NO: 24461857 NR Description: CTV.15 [Poncirus trifoliata]
  misc_feature (45)..(210): NCBI GI NO: 15241329 NR Description: hypothetical protein [Arabidopsis thaliana]
  misc_feature (138)..(218): NCBI GI NO: 30017516 NR Description: hypothetical protein
MQRKTMVTTSSRTKSNGPVLRSQSPSGRFCGAYSNPIPSSSSSSAFASSTSSSFSSPSSAFFSNRHDNHHHSHHRSASPTRVNLYKQPQPIAFSLDTRSISPTTTNRSISVAKKPQPSKISSPRRCMCSPTTHPGSFRCSLHKNVANPHGQGTASYPTNSLNMRRSAMTNSLVRIGGVEGEWVRRALTTLIRPSSHHLRRRAAYQPRPSRLSIMSKAATECN

SEQ ID NO: 19512 - protein, 217 aa, Zea mays subsp. mays
  peptide (1)..(217): Ceres Seq. ID no. 15226333
  misc_feature (1)..(212): NCBI GI NO: 15238947 NR Description: expressed protein [Arabidopsis thaliana]
  misc_feature (1)..(212): NCBI GI NO: 15238753 NR Description: serine-rich protein [Arabidopsis thaliana]
  misc_feature (1)..(212): NCBI GI NO: 21618161 NR Description: serine-rich protein [Arabidopsis thaliana]
  misc_feature (17)..(212): NCBI GI NO: 24461857 NR Description: CTV.15 [Poncirus trifoliata]
  misc_feature (40)..(205): NCBI GI NO: 15241329 NR Description: hypothetical protein [Arabidopsis thaliana]
  misc_feature (133)..(213): NCBI GI NO: 30017516 NR Description: hypothetical protein
MVTTSSRTKSNGPVLRSQSPSGRFCGAYSNPIPSSSSSSAFASSTSSSFSSPSSAFFSNRHDNHHHSHHRSASPTRVNLYKQPQPIAFSLDTRSISPTTTNRSISVAKKPQPSKISSPRRCMCSPTTHPGSFRCSLHKNVANPHGQGTASYPTNSLNMRRSAMTNSLVRIGGVEGEWVRRALTTLIRPSSHHLRRRAAYQPRPSRLSIMSKAATECN

SEQ ID NO: 19513 - DNA, 686 bp, Zea mays subsp. mays
  misc_feature (1)..(686): Ceres Seq. ID no. 13599195
agatctgatcatttggaagtaaaactagttgaaaggttaagaaaaaaaaaaagacagagaaagaatggcagaaacggagcaaaaggaggtagaagaaaagggatcgttgatctcaggcttgttggataaagccaaaggtttctttgccgagaagcttgctaatattccgacgccggaagccaccgtggacgacgtagacttcaaaggtgtgactcgtcaaggagttgattatcacgccaaggtctccgtcaagaacccttaccctcaggccatccctatttgccagatctcttacatcctcaagagtgacacaaggatgatagcgtctggtacaataccggatccgggttcgttgatcgcgaacgggtcgacggttctggacgtaccggtgaaggtgccttacagcatagcggtgagtttgatgaaggacatgtgtttggactgggacattgactatcaactcgacattggattgaccatcgacattcctattgttggtgacattaccattcctgtctctactcagggtgagatgaagctcccttcccttcgcgacttcttttaatcatctatataagttataatctgatttttcaataagtacgatccgtaaacgacatagacgatcgttggatgtttcagttgtggactcttgtgtttgttggttatatgtatttgttgctttg

SEQ ID NO: 19514 - protein, 166 aa, Zea mays subsp. mays
  peptide (1)..(166): Ceres Seq. ID no. 13599196
  misc_feature (17)..(166): Pfam Name: Pfam Description:  Late embryogenesis abundant protein
  misc_feature (1)..(166): NCBI GI NO: 15225930 NR Description: desiccation related protein -related
  misc_feature (1)..(166): NCBI GI NO: 21555248 NR Description: putative desiccation related protein
  misc_feature (1)..(166): NCBI GI NO: 3789986 NR Description: desiccation protein [Brassica napus]
  misc_feature (16)..(166): NCBI GI NO: 1170746 NR Description: Desiccation protectant protein Lea14 homolog
  misc_feature (1)..(164): NCBI GI NO: 34912834 NR Description: putative embryogenesis-abundant protein
  misc_feature (16)..(166): NCBI GI NO: 1170745 NR Description: Late embryogenesis abundant protein Lea14-A
  misc_feature (19)..(166): NCBI GI NO: 7489027 NR Description: late embryogenesis (Lea)-like protein - tomato
  misc_feature (16)..(166): NCBI GI NO: 4585271 NR Description: seed maturation protein PM22
  misc_feature (19)..(166): NCBI GI NO: 23507177 NR Description: LEA1-like protein [Capsicum annuum]
  misc_feature (16)..(166): NCBI GI NO: 15223413 NR Description: expressed protein [Arabidopsis thaliana]
MAETEQKEVEEKGSLISGLLDKAKGFFAEKLANIPTPEATVDDVDFKGVTRQGVDYHAKVSVKNPYPQAIPICQISYILKSDTRMIASGTIPDPGSLIANGSTVLDVPVKVPYSIAVSLMKDMCLDWDIDYQLDIGLTIDIPIVGDITIPVSTQGEMKLPSLRDFF

SEQ ID NO: 19515 - DNA, 1145 bp, Zea mays subsp. mays
  misc_feature (1)..(1145): Ceres Seq. ID no. 12635649
aggagaagtgaaacatttgttcacttgtgcagcccaggtgcatgttgtccagagataagcaggtgatggctgcgccgatggccgcggcggacggcgggcttaggcggctgttcgagaagccgctgccggagaacccgacgctgctggaggcgctctcggcgtggaaccgcaacgtgcaccaccccagcagcaagcccatcgacacggcgtccttcacggagatcttcggcgagctccacttccaggagaagcagcagcccgaccgaggcgccctcctgccgccgtcgccgtcgcccccgccgacgccgtcgcccccgccgacgccgctccctccttcccgcacgctgtcgtggctcgacatcgcggccgaggccgagaagagcaaggacgactcgtcgctggacgcgctgctgaggcccaagccagcgaccaccgtggccacggtgaagaggagcgcgagcttctgcaccaagaagggctcctccgcgtcgctgctgctctgcaccgaggggctcggctccgagagcaccgtggacgctgacgacatgttcaaggacggcgacgccgaggccgaggccgaggccgccgccgccgcgctcaagggcacggacacggcggacggcagcgacgccgaggaggcggtgaaggaggagaggcagcccaagacgttcccgccgccgataccgtccatcgggcgcggcggcaagccgtacgtgtgcttccggtcgttccgggaggacggccggttcgtgctgctggaggtggtgatccccgggaaggagctcctgcaggccacgcgcgagggcggccggctcaggctgcagttcgccaacgctgccgcaggtggtgtgggtgtcgtcgacgaggcggtgcacggaggtgacgacgatggcgacccccgtggcaagaacgcatgcatagacgacgacgaccacgatgacgagcgctaagtgatcgtcggggttcgttgatgtacttggcatactttatcacgatcgataattgtcctactactactgctacggatgatgatgatgcaatggtgaatcatgcggatgagaagcatcggctaactaattaattaatgtttctaaagtgttcttcagaaagtgatctgaaaagcgttgtgctcgtcctattcagtc

SEQ ID NO: 19516 - protein, 302 aa, Zea mays subsp. mays
  peptide (1)..(302): Ceres Seq. ID no. 12635650
  misc_feature (139)..(261): NCBI GI NO: 15242230 NR Description: unknown protein; protein id: At5g22390
  misc_feature (188)..(284): NCBI GI NO: 38346324 NR Description: OJ000126_13.6
  misc_feature (148)..(264): NCBI GI NO: 15221889 NR Description: hypothetical protein; protein id: At1g54740.1
  misc_feature (78)..(101): NCBI GI NO: 29833843 NR Description: putative proline-rich protein
MLSRDKQVMAAPMAAADGGLRRLFEKPLPENPTLLEALSAWNRNVHHPSSKPIDTASFTEIFGELHFQEKQQPDRGALLPPSPSPPPTPSPPPTPLPPSRTLSWLDIAAEAEKSKDDSSLDALLRPKPATTVATVKRSASFCTKKGSSASLLLCTEGLGSESTVDADDMFKDGDAEAEAEAAAAALKGTDTADGSDAEEAVKEERQPKTFPPPIPSIGRGGKPYVCFRSFREDGRFVLLEVVIPGKELLQATREGGRLRLQFANAAAGGVGVVDEAVHGGDDDGDPRGKNACIDDDDHDDER

SEQ ID NO: 19517 - protein, 294 aa, Zea mays subsp. mays
  peptide (1)..(294): Ceres Seq. ID no. 12635651
  misc_feature (131)..(253): NCBI GI NO: 15242230 NR Description: unknown protein; protein id: At5g22390
  misc_feature (180)..(276): NCBI GI NO: 38346324 NR Description: OJ000126_13.6
  misc_feature (140)..(256): NCBI GI NO: 15221889 NR Description: hypothetical protein; protein id: At1g54740.1
  misc_feature (70)..(93): NCBI GI NO: 29833843 NR Description: putative proline-rich protein
MAAPMAAADGGLRRLFEKPLPENPTLLEALSAWNRNVHHPSSKPIDTASFTEIFGELHFQEKQQPDRGALLPPSPSPPPTPSPPPTPLPPSRTLSWLDIAAEAEKSKDDSSLDALLRPKPATTVATVKRSASFCTKKGSSASLLLCTEGLGSESTVDADDMFKDGDAEAEAEAAAAALKGTDTADGSDAEEAVKEERQPKTFPPPIPSIGRGGKPYVCFRSFREDGRFVLLEVVIPGKELLQATREGGRLRLQFANAAAGGVGVVDEAVHGGDDDGDPRGKNACIDDDDHDDER

SEQ ID NO: 19518 - protein, 290 aa, Zea mays subsp. mays
  peptide (1)..(290): Ceres Seq. ID no. 12635652
  misc_feature (127)..(249): NCBI GI NO: 15242230 NR Description: unknown protein; protein id: At5g22390
  misc_feature (176)..(272): NCBI GI NO: 38346324 NR Description: OJ000126_13.6
  misc_feature (136)..(252): NCBI GI NO: 15221889 NR Description: hypothetical protein; protein id: At1g54740.1
  misc_feature (66)..(89): NCBI GI NO: 29833843 NR Description: putative proline-rich protein
MAAADGGLRRLFEKPLPENPTLLEALSAWNRNVHHPSSKPIDTASFTEIFGELHFQEKQQPDRGALLPPSPSPPPTPSPPPTPLPPSRTLSWLDIAAEAEKSKDDSSLDALLRPKPATTVATVKRSASFCTKKGSSASLLLCTEGLGSESTVDADDMFKDGDAEAEAEAAAAALKGTDTADGSDAEEAVKEERQPKTFPPPIPSIGRGGKPYVCFRSFREDGRFVLLEVVIPGKELLQATREGGRLRLQFANAAAGGVGVVDEAVHGGDDDGDPRGKNACIDDDDHDDER

SEQ ID NO: 19519 - DNA, 968 bp, Zea mays subsp. mays
  misc_feature (1)..(968): Ceres Seq. ID no. 13599200
agacattcttcttcgcatcggtttgttgcttagccagagctctgcttagcttcatcagagaagctcttctcccgtaagttgtttgaatctcagctccaactccagatctcactttcgccatctcttgaaaatctatttggtttttcaagaatcgcaaatggacggaagcggcggcggtggtggttctttagccacacctgttcaaaagcgggctcacgaggcgtggaggatttacaagtattacctcgacaagactacgcctcactcgacctacaggtggatcgggacgcttgtcgtctttctcatctactccttgagggttttctctattcacggtttctacatcatctcctacgccctcggcatctacctcttgaacctcctcatcggcttcttgtcccctcttgttgatcctgagctcgacctctcctctgatggtggaccttctctccctactcgaggctctgatgagttcaagccttttatccgccgtctccccgagttcaaattctggttttctatttaattatgcacttaacatgtttttttttttttttgtttatttggatggggattgaatctgtttttcaggtactccatgactaaggccttctgcattgcgtttctgatgacgttcttctccgtctttgatgttcctgtcttctggcctattctgctttgctactgggttgttctctttttcctcaccatgagacgccaaatctcccacatgatcaagcacaagtacatccccttcagcatcggtaaacagaaatatagtggccggagatcttctgcgagtagcggtcgtgctgattgattctgattattagttccaatttgtttcatgttgctctctgttagttccctccaaagtacctcttctgtaaatatgattcatttctacttcaaaaaaaaaaaaamaaaagcttatcgatatccgtcgacctsgagggggggcccggtgc

SEQ ID NO: 19520 - protein, 122 aa, Zea mays subsp. mays
  peptide (1)..(122): Ceres Seq. ID no. 15222535
  misc_feature (6)..(122): Pfam Name: Pfam Description:  Rer1 family
  misc_feature (1)..(122): NCBI GI NO: 34894094 NR Description: putative Rer1A protein (AtRer1A)
  misc_feature (2)..(120): NCBI GI NO: 35210534 NR Description: putative endoplasmatic reticulum retrieval proteinRer1B
  misc_feature (10)..(122): NCBI GI NO: 18400234 NR Description: integral membrane protein -related
  misc_feature (10)..(122): NCBI GI NO: 30682033 NR Description: integral membrane protein -related
  misc_feature (10)..(122): NCBI GI NO: 7488292 NR Description: probable integral membrane protein At2g23310
  misc_feature (1)..(122): NCBI GI NO: 11281669 NR Description: endoplasmatic reticulum retrieval protein Rer1B
  misc_feature (1)..(122): NCBI GI NO: 15226596 NR Description: AtRer1B [Arabidopsis thaliana]
  misc_feature (1)..(122): NCBI GI NO: 15234975 NR Description: AtRer1A [Arabidopsis thaliana]
  misc_feature (24)..(119): NCBI GI NO: 6226763 NR Description: RER1 PROTEIN
  misc_feature (24)..(119): NCBI GI NO: 7688699 NR Description: RER1 protein [Homo sapiens]
MDGSGGGGGSLATPVQKRAHEAWRIYKYYLDKTTPHSTYRWIGTLVVFLIYSLRVFSIHGFYIISYALGIYLLNLLIGFLSPLVDPELDLSSDGGPSLPTRGSDEFKPFIRRLPEFKFWFSI

SEQ ID NO: 19521 - protein, 73 aa, Zea mays subsp. mays
  peptide (1)..(73): Ceres Seq. ID no. 15222536
  misc_feature (1)..(59): Pfam Name: Pfam Description:  Rer1 family
  misc_feature (1)..(59): NCBI GI NO: 34894094 NR Description: putative Rer1A protein (AtRer1A)
  misc_feature (1)..(58): NCBI GI NO: 35210534 NR Description: putative endoplasmatic reticulum retrieval proteinRer1B
  misc_feature (1)..(69): NCBI GI NO: 18400234 NR Description: integral membrane protein -related
  misc_feature (1)..(69): NCBI GI NO: 30682033 NR Description: integral membrane protein -related
  misc_feature (1)..(58): NCBI GI NO: 7488292 NR Description: probable integral membrane protein At2g23310
  misc_feature (1)..(72): NCBI GI NO: 7688699 NR Description: RER1 protein [Homo sapiens]
  misc_feature (1)..(69): NCBI GI NO: 6226763 NR Description: RER1 PROTEIN
  misc_feature (1)..(63): NCBI GI NO: 13385882 NR Description: similar to S. cerevisiae RER1 [Mus musculus]
  misc_feature (1)..(62): NCBI GI NO: 29840922 NR Description: similar to GenBank Accession Number AF157324 RER1protein in Homo sapiens
  misc_feature (1)..(73): NCBI GI NO: 11281669 NR Description: endoplasmatic reticulum retrieval protein Rer1B
MTKAFCIAFLMTFFSVFDVPVFWPILLCYWVVLFFLTMRRQISHMIKHKYIPFSIGKQKYSGRRSSASSGRAD

SEQ ID NO: 19522 - protein, 63 aa, Zea mays subsp. mays
  peptide (1)..(63): Ceres Seq. ID no. 15222537
  misc_feature (1)..(49): NCBI GI NO: 34894094 NR Description: putative Rer1A protein (AtRer1A)
  misc_feature (1)..(48): NCBI GI NO: 35210534 NR Description: putative endoplasmatic reticulum retrieval proteinRer1B
  misc_feature (1)..(59): NCBI GI NO: 18400234 NR Description: integral membrane protein -related
  misc_feature (1)..(59): NCBI GI NO: 30682033 NR Description: integral membrane protein -related
  misc_feature (1)..(48): NCBI GI NO: 7488292 NR Description: probable integral membrane protein At2g23310
  misc_feature (1)..(62): NCBI GI NO: 7688699 NR Description: RER1 protein [Homo sapiens]
  misc_feature (1)..(59): NCBI GI NO: 6226763 NR Description: RER1 PROTEIN
  misc_feature (1)..(53): NCBI GI NO: 13385882 NR Description: similar to S. cerevisiae RER1 [Mus musculus]
  misc_feature (1)..(52): NCBI GI NO: 29840922 NR Description: similar to GenBank Accession Number AF157324 RER1protein in Homo sapiens
  misc_feature (1)..(63): NCBI GI NO: 11281669 NR Description: endoplasmatic reticulum retrieval protein Rer1B
MTFFSVFDVPVFWPILLCYWVVLFFLTMRRQISHMIKHKYIPFSIGKQKYSGRRSSASSGRAD

SEQ ID NO: 19523 - DNA, 674 bp, Zea mays subsp. mays
  misc_feature (1)..(674): Ceres Seq. ID no. 13586951
acatcctaatcgaaaagcacacggttgcgagtttgcgaccgcattgcatcgtgcgcggctgcagcacgaagacgaagctctggtagatggcgagcagcgcggaggagcgcttcctgaggcagctgagcgcgagcaacggcggcgacgcaggggtctacggcggccagcagctgggccacaaggagtactgcgcggagaggaggggctcccggcggtggtccaggaagcgggccgccgccgcgaggggctactgcggcgccggcggcgggtacgactacgactacgacgtgaagcagcaggcagaggccgcctctgccgccgcgaggaagcgggtgatagtggtggtggacgagacctcgggctccaagcacgccatgatgtgggcgctcacccacgtcgccagcaagggggacttcctgacgctgctccacgtcctgctgccgcactccgcctccggcggcggctgtagcaggggcgaggaggcctcctccctcgccaactcgctcggcacgctctgcaaggcgtccaggccagaggtgcgcatctgcagacacacatgcacttgcgcatctgcagacacactcgctcggcacgctcggtaccttcttttggttagctgctcgttactagtgcacattcacaccaactttggctacagctaaccttcttttggt

SEQ ID NO: 19524 - protein, 191 aa, Zea mays subsp. mays
  peptide (1)..(191): Ceres Seq. ID no. 13586952
  misc_feature (80)..(153): Pfam Name: Pfam Description:  Universal stress protein family
  misc_feature (1)..(153): NCBI GI NO: 34907308 NR Description: hypothetical protein~similar to Arabidopsisthaliana chromosome 1
  misc_feature (27)..(153): NCBI GI NO: 15219439 NR Description: expressed protein [Arabidopsis thaliana]
MASSAEERFLRQLSASNGGDAGVYGGQQLGHKEYCAERRGSRRWSRKRAAAARGYCGAGGGYDYDYDVKQQAEAASAAARKRVIVVVDETSGSKHAMMWALTHVASKGDFLTLLHVLLPHSASGGGCSRGEEASSLANSLGTLCKASRPEVRICRHTCTCASADTLARHARYLLLVSCSLLVHIHTNFGYS

SEQ ID NO: 19525 - protein, 155 aa, Zea mays subsp. mays
  peptide (1)..(155): Ceres Seq. ID no. 13586953
HPNRKAHGCEFATALHRARLQHEDEALVDGEQRGGALPEAAEREQRRRRRGLRRPAAGPQGVLRGEEGLPAVVQEAGRRREGLLRRRRRVRLRLRREAAGRGRLCRREEAGDSGGGRDLGLQARHDVGAHPRRQQGGLPDAAPRPAAALRLRRRL

SEQ ID NO: 19526 - protein, 95 aa, Zea mays subsp. mays
  peptide (1)..(95): Ceres Seq. ID no. 13586954
  misc_feature (1)..(57): Pfam Name: Pfam Description:  Universal stress protein family
  misc_feature (1)..(57): NCBI GI NO: 34907308 NR Description: hypothetical protein~similar to Arabidopsisthaliana chromosome 1
  misc_feature (1)..(57): NCBI GI NO: 15219439 NR Description: expressed protein [Arabidopsis thaliana]
MMWALTHVASKGDFLTLLHVLLPHSASGGGCSRGEEASSLANSLGTLCKASRPEVRICRHTCTCASADTLARHARYLLLVSCSLLVHIHTNFGYS

SEQ ID NO: 19527 - DNA, 894 bp, Zea mays subsp. mays
  misc_feature (1)..(894): Ceres Seq. ID no. 13599595
aaaacacaaaaccagacctcaacttcaaacagcttctgaacaactcttgaaaccaaaaacttctctaatgccggaagaaatacgagagcacggtggtcacaccgatcctaaaccttctccaccaccgccaaaacgtggcctcatcagccgcaagagacagctcgtgtttctctccttcatgattctactagctgctaaaggactcgttggtatcggagaagtagcgtttgtaatactgtcttatatatacttgtacgagttcatctccaggtttgccttcccacgcaagcaaaacgagcagaggaggagactctcaaaccctaaaaacaaactctttcaagcttacttcctcgccactgccatcatcggcctactcttcccgatttgctacatcggagatggactataccggggagacatccacggtgttagagctgcagctccacatcttttcctcctctccggtcaagccttcaccgaaccaattggtttctccgaccggtttgcaacacccattggtattctcggaccggttttctacaacgctcgtcgtatcttcgctctgttggattgggttaaagccgagttcgcagatattcagcgtccaggtggtccaataagattgtacggaggaagagctatagcgtcggttaacaccgtcatgtggttttacaatctgtttggtctcttgttgcctgtgtttcttcctcggtcttgtgagatttacttctcagccgacgacaacaaagtagattaagtaacctcccgtctactttctactttagaatctcttatgttgtgtttgtgtcagtgcttggtaaagattattgttaataaaagcgacagtttatgactgcaaaaaaaaaaaaaaaaaagcttatcgataccgtcgac

SEQ ID NO: 19528 - protein, 251 aa, Zea mays subsp. mays
  peptide (1)..(251): Ceres Seq. ID no. 13599596
  misc_feature (23)..(251): NCBI GI NO: 15237854 NR Description: expressed protein [Arabidopsis thaliana]
  misc_feature (21)..(246): NCBI GI NO: 15146256 NR Description: AT5g52420/K24M7_17 [Arabidopsis thaliana]
  misc_feature (21)..(246): NCBI GI NO: 18423389 NR Description: expressed protein [Arabidopsis thaliana]
  misc_feature (18)..(247): NCBI GI NO: 38347228 NR Description: OSJNBa0044M19.10
  misc_feature (33)..(251): NCBI GI NO: 37536624 NR Description: unknown protein
  misc_feature (46)..(247): NCBI GI NO: 15217782 NR Description: expressed protein [Arabidopsis thaliana]
KHKTRPQLQTASEQLLKPKTSLMPEEIREHGGHTDPKPSPPPPKRGLISRKRQLVFLSFMILLAAKGLVGIGEVAFVILSYIYLYEFISRFAFPRKQNEQRRRLSNPKNKLFQAYFLATAIIGLLFPICYIGDGLYRGDIHGVRAAAPHLFLLSGQAFTEPIGFSDRFATPIGILGPVFYNARRIFALLDWVKAEFADIQRPGGPIRLYGGRAIASVNTVMWFYNLFGLLLPVFLPRSCEIYFSADDNKVD

SEQ ID NO: 19529 - protein, 229 aa, Zea mays subsp. mays
  peptide (1)..(229): Ceres Seq. ID no. 13599597
  misc_feature (1)..(229): NCBI GI NO: 15237854 NR Description: expressed protein [Arabidopsis thaliana]
  misc_feature (1)..(224): NCBI GI NO: 15146256 NR Description: AT5g52420/K24M7_17 [Arabidopsis thaliana]
  misc_feature (1)..(224): NCBI GI NO: 18423389 NR Description: expressed protein [Arabidopsis thaliana]
  misc_feature (1)..(225): NCBI GI NO: 38347228 NR Description: OSJNBa0044M19.10
  misc_feature (11)..(229): NCBI GI NO: 37536624 NR Description: unknown protein
  misc_feature (24)..(225): NCBI GI NO: 15217782 NR Description: expressed protein [Arabidopsis thaliana]
MPEEIREHGGHTDPKPSPPPPKRGLISRKRQLVFLSFMILLAAKGLVGIGEVAFVILSYIYLYEFISRFAFPRKQNEQRRRLSNPKNKLFQAYFLATAIIGLLFPICYIGDGLYRGDIHGVRAAAPHLFLLSGQAFTEPIGFSDRFATPIGILGPVFYNARRIFALLDWVKAEFADIQRPGGPIRLYGGRAIASVNTVMWFYNLFGLLLPVFLPRSCEIYFSADDNKVD

SEQ ID NO: 19530 - protein, 192 aa, Zea mays subsp. mays
  peptide (1)..(192): Ceres Seq. ID no. 13599598
  misc_feature (1)..(192): NCBI GI NO: 15237854 NR Description: expressed protein [Arabidopsis thaliana]
  misc_feature (1)..(187): NCBI GI NO: 15146256 NR Description: AT5g52420/K24M7_17 [Arabidopsis thaliana]
  misc_feature (1)..(187): NCBI GI NO: 18423389 NR Description: expressed protein [Arabidopsis thaliana]
  misc_feature (1)..(188): NCBI GI NO: 38347228 NR Description: OSJNBa0044M19.10
  misc_feature (1)..(192): NCBI GI NO: 37536624 NR Description: unknown protein
  misc_feature (1)..(188): NCBI GI NO: 15217782 NR Description: expressed protein [Arabidopsis thaliana]
MILLAAKGLVGIGEVAFVILSYIYLYEFISRFAFPRKQNEQRRRLSNPKNKLFQAYFLATAIIGLLFPICYIGDGLYRGDIHGVRAAAPHLFLLSGQAFTEPIGFSDRFATPIGILGPVFYNARRIFALLDWVKAEFADIQRPGGPIRLYGGRAIASVNTVMWFYNLFGLLLPVFLPRSCEIYFSADDNKVD

SEQ ID NO: 19531 - DNA, 1164 bp, Zea mays subsp. mays
  misc_feature (1)..(1164): Ceres Seq. ID no. 15225903
gcatctccccatccgccattgcccttgactcgtgctccccgcctctcttctcccccgagaccccccccccccccctctctctgtgctcgtgctccctcttcctgctcttccttctgctcggcagccatggccagcgcgctatgcggcggcggcagcggcagcgtggcggcgccgtgcggggacttgggcgccgcggcggcgctcgcggagtctttgccgatgggcgccgggtaccgcgccaagagctccttccccgccgggagggtggcgctggcggacaggcccctgcgccggggcctccaagtggcggcggctgctggacagatgaacgggaacctgacgattggcaaggccatgaggtggtgggagaaggtgacgcaccccaatatgagggaggtcgagtccgcgcaagacctcgccgactccctgctcaacgccggcgacaagctcgtcgtcgtcgacttcttctcccccggctgcggtggctgccgcgctctccaccccaagattgcgcagttcgctgagcggaatccggacgtgctgttcctgcaagtcaactacgagaagcacaagtccatgtgctacagcctccatgtccatgtcctccctttcttcaggttctacaggggagcccagggcagggtcagcagcttcagctgcacaaatgcaaccatcaagaagttcaaggacgccctcgcaaagcactcgccggacaggtgcagcctcggcccggcgcgggggctcgaggaggcggagctcttggctctggcggcaaacagggacctggaattcacctacaacgagaagccgacgctggtgccgatcgccgaggctatccagatggaagctgcctccattggcggcccatggatgccattgcccgcggccgcgacgcagccgctcactctgggatctgagaatggctcgctgatcccctccggaagatagtaactcgagaccaggccgaacccggccatttctgtacagattttcctcttttgttgtgtgttgtattgagttcgagaggcagaatcgcaggctaaggttttagtttttgtaaacctgccgaagctctattgtgatcgtgttgctgcaaccagtcgttgctcatcatggtaatccttgctttaatgaacaatgggatgatgcctccccagatcctcc

SEQ ID NO: 19532 - protein, 315 aa, Zea mays subsp. mays
  peptide (1)..(315): Ceres Seq. ID no. 15225904
  misc_feature (135)..(237): Pfam Name: Pfam Description:  Thioredoxin
  misc_feature (43)..(315): NCBI GI NO: 34394520 NR Description: putative thioredoxin
  misc_feature (93)..(315): NCBI GI NO: 15223262 NR Description: thioredoxin family [Arabidopsis thaliana]
  misc_feature (81)..(305): NCBI GI NO: 308906 NR Description: thioredoxin
  misc_feature (112)..(271): NCBI GI NO: 15225825 NR Description: thioredoxin family [Arabidopsis thaliana]
  misc_feature (112)..(263): NCBI GI NO: 15240254 NR Description: thioredoxin family [Arabidopsis thaliana]
  misc_feature (91)..(267): NCBI GI NO: 19071639 NR Description: putative thioredoxin
  misc_feature (95)..(259): NCBI GI NO: 21554313 NR Description: thioredoxin-like protein [Arabidopsis thaliana]
  misc_feature (95)..(259): NCBI GI NO: 18417441 NR Description: thioredoxin family [Arabidopsis thaliana]
  misc_feature (120)..(236): NCBI GI NO: 21553512 NR Description: putative thioredoxin [Arabidopsis thaliana]
  misc_feature (120)..(236): NCBI GI NO: 4973258 NR Description: thioredoxin-like 2 [Arabidopsis thaliana]
ASPHPPLPLTRAPRLSSPPRPPPPPSLCARAPSSCSSFCSAAMASALCGGGSGSVAAPCGDLGAAAALAESLPMGAGYRAKSSFPAGRVALADRPLRRGLQVAAAAGQMNGNLTIGKAMRWWEKVTHPNMREVESAQDLADSLLNAGDKLVVVDFFSPGCGGCRALHPKIAQFAERNPDVLFLQVNYEKHKSMCYSLHVHVLPFFRFYRGAQGRVSSFSCTNATIKKFKDALAKHSPDRCSLGPARGLEEAELLALAANRDLEFTYNEKPTLVPIAEAIQMEAASIGGPWMPLPAAATQPLTLGSENGSLIPSGR

SEQ ID NO: 19533 - protein, 273 aa, Zea mays subsp. mays
  peptide (1)..(273): Ceres Seq. ID no. 15225905
  misc_feature (93)..(195): Pfam Name: Pfam Description:  Thioredoxin
  misc_feature (1)..(273): NCBI GI NO: 34394520 NR Description: putative thioredoxin
  misc_feature (51)..(273): NCBI GI NO: 15223262 NR Description: thioredoxin family [Arabidopsis thaliana]
  misc_feature (39)..(263): NCBI GI NO: 308906 NR Description: thioredoxin
  misc_feature (70)..(229): NCBI GI NO: 15225825 NR Description: thioredoxin family [Arabidopsis thaliana]
  misc_feature (70)..(221): NCBI GI NO: 15240254 NR Description: thioredoxin family [Arabidopsis thaliana]
  misc_feature (49)..(225): NCBI GI NO: 19071639 NR Description: putative thioredoxin
  misc_feature (53)..(217): NCBI GI NO: 21554313 NR Description: thioredoxin-like protein [Arabidopsis thaliana]
  misc_feature (53)..(217): NCBI GI NO: 18417441 NR Description: thioredoxin family [Arabidopsis thaliana]
  misc_feature (78)..(194): NCBI GI NO: 21553512 NR Description: putative thioredoxin [Arabidopsis thaliana]
  misc_feature (78)..(194): NCBI GI NO: 4973258 NR Description: thioredoxin-like 2 [Arabidopsis thaliana]
MASALCGGGSGSVAAPCGDLGAAAALAESLPMGAGYRAKSSFPAGRVALADRPLRRGLQVAAAAGQMNGNLTIGKAMRWWEKVTHPNMREVESAQDLADSLLNAGDKLVVVDFFSPGCGGCRALHPKIAQFAERNPDVLFLQVNYEKHKSMCYSLHVHVLPFFRFYRGAQGRVSSFSCTNATIKKFKDALAKHSPDRCSLGPARGLEEAELLALAANRDLEFTYNEKPTLVPIAEAIQMEAASIGGPWMPLPAAATQPLTLGSENGSLIPSGR

SEQ ID NO: 19534 - protein, 242 aa, Zea mays subsp. mays
  peptide (1)..(242): Ceres Seq. ID no. 15225906
  misc_feature (62)..(164): Pfam Name: Pfam Description:  Thioredoxin
  misc_feature (1)..(242): NCBI GI NO: 34394520 NR Description: putative thioredoxin
  misc_feature (20)..(242): NCBI GI NO: 15223262 NR Description: thioredoxin family [Arabidopsis thaliana]
  misc_feature (8)..(232): NCBI GI NO: 308906 NR Description: thioredoxin
  misc_feature (39)..(198): NCBI GI NO: 15225825 NR Description: thioredoxin family [Arabidopsis thaliana]
  misc_feature (39)..(190): NCBI GI NO: 15240254 NR Description: thioredoxin family [Arabidopsis thaliana]
  misc_feature (18)..(194): NCBI GI NO: 19071639 NR Description: putative thioredoxin
  misc_feature (22)..(186): NCBI GI NO: 21554313 NR Description: thioredoxin-like protein [Arabidopsis thaliana]
  misc_feature (22)..(186): NCBI GI NO: 18417441 NR Description: thioredoxin family [Arabidopsis thaliana]
  misc_feature (47)..(163): NCBI GI NO: 21553512 NR Description: putative thioredoxin [Arabidopsis thaliana]
  misc_feature (47)..(163): NCBI GI NO: 4973258 NR Description: thioredoxin-like 2 [Arabidopsis thaliana]
MGAGYRAKSSFPAGRVALADRPLRRGLQVAAAAGQMNGNLTIGKAMRWWEKVTHPNMREVESAQDLADSLLNAGDKLVVVDFFSPGCGGCRALHPKIAQFAERNPDVLFLQVNYEKHKSMCYSLHVHVLPFFRFYRGAQGRVSSFSCTNATIKKFKDALAKHSPDRCSLGPARGLEEAELLALAANRDLEFTYNEKPTLVPIAEAIQMEAASIGGPWMPLPAAATQPLTLGSENGSLIPSGR

SEQ ID NO: 19535 - DNA, 1074 bp, Zea mays subsp. mays
  misc_feature (1)..(1074): Ceres Seq. ID no. 13587648
aatcgaaaacagcgcaagtgttgtagtatactgaaccctcaaaaaaactaactagctagcttagctaaccccatggacatggaccccaggttcaacgtcgactggagtgccaacgagatcgagatggtgagatctctcatcgcttgtcacggcgccagcaacagcacgaacgacgacattctggatgagctccaggcaatgttcccagggaaggataagcgccaggtaactgacttgtacgttgagcttgtggtggagatgataaacagtggggcagagctgagcagcaaccagctcctgctcaactctggtggggtgcacagcaggacgatggatgggtatttagcagacgagatgaaggcgaagaggatgctgctggaggaacagcgccgtaggaaattagttgctgttcctcgacaggataaccaacaacgtgcagggaggttttggactctagaggagcacaggaatttcctgcgtggcctgcgtgtgtacgggcgcggcaattggaagaacatctccaaggacttcgtcaccactaagacgccggtgcaggtctccagccatgcacagaagtacttccggaggcaggagagcaccacaaggaagcagcgctacagcatcaacgacgtcggcctctacgatgctgagccatgggaggagcagcagcagcagcagcagaacagctcactgccggctttcactagcaccaacaataatgcttattacaacccatactgctatgcctttggtggtggccagcagcagctcgcatcatcccccttccagtgccatgccagtcaggcgagcagcagcagccagacagcagtcacctgggctgcaggaggtcagcagccaccgatttgctcttctgcagctccacccatgatggaggggggtggggctgaaatgtcatggaccacttattattagctagctactagcttcgagattttgttcctaagctgttaaatctcgttgttgaagacaacatgtatggtagtttaagtagtagtttcttcatttcaatgaactagtaacaattaatgtgttcccgaaaaaaaaaaaaaaaaa

SEQ ID NO: 19536 - protein, 286 aa, Zea mays subsp. mays
  peptide (1)..(286): Ceres Seq. ID no. 13587649
  misc_feature (124)..(170): Pfam Name: Pfam Description:  Myb-like DNA-binding domain
  misc_feature (87)..(274): NCBI GI NO: 20067661 NR Description: one repeat myb transcriptional factor [Zea mays]
  misc_feature (3)..(35): NCBI GI NO: 20067661 NR Description: one repeat myb transcriptional factor [Zea mays]
  misc_feature (11)..(276): NCBI GI NO: 15241652 NR Description: expressed protein [Arabidopsis thaliana]
  misc_feature (11)..(187): NCBI GI NO: 7446171 NR Description: probable MYB family transcription factor
  misc_feature (11)..(187): NCBI GI NO: 30687381 NR Description: MYB family transcription factor -related
  misc_feature (11)..(187): NCBI GI NO: 15239231 NR Description: hypothetical protein [Arabidopsis thaliana]
  misc_feature (117)..(207): NCBI GI NO: 18874265 NR Description: MYB-like transcription factor DVL1
  misc_feature (81)..(198): NCBI GI NO: 12406993 NR Description: MCB1 protein [Hordeum vulgare subsp. vulgare]
  misc_feature (108)..(214): NCBI GI NO: 12005328 NR Description: unknown [Hevea brasiliensis]
  misc_feature (119)..(207): NCBI GI NO: 15237776 NR Description: I-box binding factor - like protein
MDMDPRFNVDWSANEIEMVRSLIACHGASNSTNDDILDELQAMFPGKDKRQVTDLYVELVVEMINSGAELSSNQLLLNSGGVHSRTMDGYLADEMKAKRMLLEEQRRRKLVAVPRQDNQQRAGRFWTLEEHRNFLRGLRVYGRGNWKNISKDFVTTKTPVQVSSHAQKYFRRQESTTRKQRYSINDVGLYDAEPWEEQQQQQQNSSLPAFTSTNNNAYYNPYCYAFGGGQQQLASSPFQCHASQASSSSQTAVTWAAGGQQPPICSSAAPPMMEGGGAEMSWTTYY

SEQ ID NO: 19537 - protein, 284 aa, Zea mays subsp. mays
  peptide (1)..(284): Ceres Seq. ID no. 13587650
  misc_feature (122)..(168): Pfam Name: Pfam Description:  Myb-like DNA-binding domain
  misc_feature (85)..(272): NCBI GI NO: 20067661 NR Description: one repeat myb transcriptional factor [Zea mays]
  misc_feature (1)..(33): NCBI GI NO: 20067661 NR Description: one repeat myb transcriptional factor [Zea mays]
  misc_feature (9)..(274): NCBI GI NO: 15241652 NR Description: expressed protein [Arabidopsis thaliana]
  misc_feature (9)..(185): NCBI GI NO: 7446171 NR Description: probable MYB family transcription factor
  misc_feature (9)..(185): NCBI GI NO: 30687381 NR Description: MYB family transcription factor -related
  misc_feature (9)..(185): NCBI GI NO: 15239231 NR Description: hypothetical protein [Arabidopsis thaliana]
  misc_feature (115)..(205): NCBI GI NO: 18874265 NR Description: MYB-like transcription factor DVL1
  misc_feature (79)..(196): NCBI GI NO: 12406993 NR Description: MCB1 protein [Hordeum vulgare subsp. vulgare]
  misc_feature (106)..(212): NCBI GI NO: 12005328 NR Description: unknown [Hevea brasiliensis]
  misc_feature (117)..(205): NCBI GI NO: 15237776 NR Description: I-box binding factor - like protein
MDPRFNVDWSANEIEMVRSLIACHGASNSTNDDILDELQAMFPGKDKRQVTDLYVELVVEMINSGAELSSNQLLLNSGGVHSRTMDGYLADEMKAKRMLLEEQRRRKLVAVPRQDNQQRAGRFWTLEEHRNFLRGLRVYGRGNWKNISKDFVTTKTPVQVSSHAQKYFRRQESTTRKQRYSINDVGLYDAEPWEEQQQQQQNSSLPAFTSTNNNAYYNPYCYAFGGGQQQLASSPFQCHASQASSSSQTAVTWAAGGQQPPICSSAAPPMMEGGGAEMSWTTYY

SEQ ID NO: 19538 - protein, 269 aa, Zea mays subsp. mays
  peptide (1)..(269): Ceres Seq. ID no. 13587651
  misc_feature (107)..(153): Pfam Name: Pfam Description:  Myb-like DNA-binding domain
  misc_feature (70)..(257): NCBI GI NO: 20067661 NR Description: one repeat myb transcriptional factor [Zea mays]
  misc_feature (1)..(18): NCBI GI NO: 20067661 NR Description: one repeat myb transcriptional factor [Zea mays]
  misc_feature (1)..(259): NCBI GI NO: 15241652 NR Description: expressed protein [Arabidopsis thaliana]
  misc_feature (1)..(170): NCBI GI NO: 7446171 NR Description: probable MYB family transcription factor
  misc_feature (1)..(170): NCBI GI NO: 30687381 NR Description: MYB family transcription factor -related
  misc_feature (1)..(170): NCBI GI NO: 15239231 NR Description: hypothetical protein [Arabidopsis thaliana]
  misc_feature (100)..(190): NCBI GI NO: 18874265 NR Description: MYB-like transcription factor DVL1
  misc_feature (64)..(181): NCBI GI NO: 12406993 NR Description: MCB1 protein [Hordeum vulgare subsp. vulgare]
  misc_feature (91)..(197): NCBI GI NO: 12005328 NR Description: unknown [Hevea brasiliensis]
  misc_feature (102)..(190): NCBI GI NO: 15237776 NR Description: I-box binding factor - like protein
MVRSLIACHGASNSTNDDILDELQAMFPGKDKRQVTDLYVELVVEMINSGAELSSNQLLLNSGGVHSRTMDGYLADEMKAKRMLLEEQRRRKLVAVPRQDNQQRAGRFWTLEEHRNFLRGLRVYGRGNWKNISKDFVTTKTPVQVSSHAQKYFRRQESTTRKQRYSINDVGLYDAEPWEEQQQQQQNSSLPAFTSTNNNAYYNPYCYAFGGGQQQLASSPFQCHASQASSSSQTAVTWAAGGQQPPICSSAAPPMMEGGGAEMSWTTYY

SEQ ID NO: 19539 - DNA, 716 bp, Zea mays subsp. mays
  misc_feature (1)..(716): Ceres Seq. ID no. 12589775
aaataatctaacatcaccaattccatacattaaaaacctccaagcctccatctccagggcagaaacaaaacatcaacacagctaattaagagaagaacatggagaaagtgtgctgcatgtgcggcgacgtcggattttccgacaaactattccgctgcgggcactgccgcaaccgctttcaacactcctattgtagtaattactacagtgagtttgcggagccgaccgagatttgcgactggtgccagagcgacgacaaaaagctgagcagcgttgctaaacacggcggatcttcgttttcttcttcaaagaagaagaaggcttcttcctccgtaaattacgagagcggggtcacaaaccaatcggagtatccttccggtggcgggatcaagcatgacaataaccatcacgatcaagtggccaagagcgttgttgccggacctgcaggaggcggcgtgccgtcgccgaggacggccacgcgaaggtacaagcttctcaaggatgtcaggtgttagatcaatttctgaaagagagcttaataatataatatgctaaaataataataaaaatgcgcctttgagatatgattgagtggtttacaaaatattacgattatctatgtataattaattagatatagtgaatgtatatcttgttgagaagcttttcgtactaatgttgaaaaaataatgaatttatgtttgtcgtgagcttcc

SEQ ID NO: 19540 - protein, 138 aa, Zea mays subsp. mays
  peptide (1)..(138): Ceres Seq. ID no. 12589776
  misc_feature (1)..(138): NCBI GI NO: 18378917 NR Description: hypothetical protein    predicted by genefinder
  misc_feature (7)..(138): NCBI GI NO: 21553800 NR Description: unknown [Arabidopsis thaliana]
  misc_feature (3)..(138): NCBI GI NO: 15232353 NR Description: putative protein; protein id: At3g60520
  misc_feature (7)..(138): NCBI GI NO: 21554245 NR Description: unknown [Arabidopsis thaliana]
  misc_feature (4)..(98): NCBI GI NO: 21742342 NR Description: OSJNBb0034G17.21
  misc_feature (4)..(98): NCBI GI NO: 38345466 NR Description: OSJNBa0010H02.4
  misc_feature (4)..(93): NCBI GI NO: 21740708 NR Description: OSJNBa0086B14.1
MEKVCCMCGDVGFSDKLFRCGHCRNRFQHSYCSNYYSEFAEPTEICDWCQSDDKKLSSVAKHGGSSFSSSKKKKASSSVNYESGVTNQSEYPSGGGIKHDNNHHDQVAKSVVAGPAGGGVPSPRTATRRYKLLKDVRC

SEQ ID NO: 19541 - protein, 132 aa, Zea mays subsp. mays
  peptide (1)..(132): Ceres Seq. ID no. 12589777
  misc_feature (1)..(132): NCBI GI NO: 18378917 NR Description: hypothetical protein    predicted by genefinder
  misc_feature (1)..(132): NCBI GI NO: 21553800 NR Description: unknown [Arabidopsis thaliana]
  misc_feature (1)..(132): NCBI GI NO: 15232353 NR Description: putative protein; protein id: At3g60520
  misc_feature (1)..(132): NCBI GI NO: 21554245 NR Description: unknown [Arabidopsis thaliana]
  misc_feature (1)..(92): NCBI GI NO: 21742342 NR Description: OSJNBb0034G17.21
  misc_feature (1)..(92): NCBI GI NO: 38345466 NR Description: OSJNBa0010H02.4
  misc_feature (1)..(87): NCBI GI NO: 21740708 NR Description: OSJNBa0086B14.1
MCGDVGFSDKLFRCGHCRNRFQHSYCSNYYSEFAEPTEICDWCQSDDKKLSSVAKHGGSSFSSSKKKKASSSVNYESGVTNQSEYPSGGGIKHDNNHHDQVAKSVVAGPAGGGVPSPRTATRRYKLLKDVRC

SEQ ID NO: 19542 - DNA, 858 bp, Zea mays subsp. mays
  misc_feature (1)..(858): Ceres Seq. ID no. 12635657
ctgtttcgattgagaagaaagcgatcacgaggatggcgagatcaacctctattctcttcctcacgctactcctttccgcttctctggctttaatccaggcaaaggaagatttgaaggagatcactcacaaagtttacttcgatgtggaaattgacggcaaagaagctggtcgagttgttattggccttttcggcaagactgttcccaaaactgcagaaaatttcagagctctttgcactggggagaaaggtgttgggaagagcgggaagccactacactacaaggggagcaagttccatagaatcattcctagttttatgatccagggaggtgacttcacacacgggaacggtatgggtggagaatccatctacggtcagaagtttgctgatgagaacttcaagctcaagcataccggaccaggtttgctttcgatggccaactctggagaggacacaaacggttcgcagtttttcatcacgacggtgacaacaagctggttagatggaaggcatgtggtgtttgggaaagtggtacaaggaatggatgttgtctacaagattgaagctgaggggaagcaaagtggaactcctaagagcaaagttgttattgcagacagtggagagcttcctctctaaaccctaagcacttgttcttcttcatgaagagaattatggggtttttaagttgtcttgtattataaacactcccgaatgctatccatccgaacaaaagcacttcagttttttgagtttttttaataatcattttctaaatagattttgggacttttgcttgtgtttttgatgtgagatttatgtttgttcttcttcatgaagagaagcaggtttttaagct

SEQ ID NO: 19543 - protein, 211 aa, Zea mays subsp. mays
  peptide (1)..(211): Ceres Seq. ID no. 12635658
  misc_feature (11)..(211): NCBI GI NO: 11270326 NR Description: peptidylprolyl isomerase (EC 5.2.1.8) CYP5
  misc_feature (11)..(211): NCBI GI NO: 15227674 NR Description: cyclophilin; protein id: At2g29960
  misc_feature (11)..(211): NCBI GI NO: 21554007 NR Description: cyclophilin [Arabidopsis thaliana]
  misc_feature (11)..(211): NCBI GI NO: 15237739 NR Description: cyclophilin ROC7; protein id: At5g58710
  misc_feature (30)..(211): NCBI GI NO: 18410386 NR Description: cyclophilin-like protein; protein id: At3g55920
  misc_feature (32)..(209): NCBI GI NO: 5731960 NR Description: cyclophilin B [Dictyostelium discoideum]
  misc_feature (43)..(209): NCBI GI NO: 17566266 NR Description: CYcloPhilin family CYP-7 (18.4 kD) (cyp-7)
  misc_feature (43)..(209): NCBI GI NO: 863016 NR Description: cyclophilin
  misc_feature (43)..(209): NCBI GI NO: 1480465 NR Description: cyclophilin Ovcyp-2
  misc_feature (30)..(211): NCBI GI NO: 11270308 NR Description: peptidylprolyl isomerase (EC 5.2.1.8) F27K19.100
VSIEKKAITRMARSTSILFLTLLLSASLALIQAKEDLKEITHKVYFDVEIDGKEAGRVVIGLFGKTVPKTAENFRALCTGEKGVGKSGKPLHYKGSKFHRIIPSFMIQGGDFTHGNGMGGESIYGQKFADENFKLKHTGPGLLSMANSGEDTNGSQFFITTVTTSWLDGRHVVFGKVVQGMDVVYKIEAEGKQSGTPKSKVVIADSGELPL

SEQ ID NO: 19544 - protein, 201 aa, Zea mays subsp. mays
  peptide (1)..(201): Ceres Seq. ID no. 12635659
  misc_feature (1)..(201): NCBI GI NO: 11270326 NR Description: peptidylprolyl isomerase (EC 5.2.1.8) CYP5
  misc_feature (1)..(201): NCBI GI NO: 15227674 NR Description: cyclophilin; protein id: At2g29960
  misc_feature (1)..(201): NCBI GI NO: 21554007 NR Description: cyclophilin [Arabidopsis thaliana]
  misc_feature (1)..(201): NCBI GI NO: 15237739 NR Description: cyclophilin ROC7; protein id: At5g58710
  misc_feature (20)..(201): NCBI GI NO: 18410386 NR Description: cyclophilin-like protein; protein id: At3g55920
  misc_feature (22)..(199): NCBI GI NO: 5731960 NR Description: cyclophilin B [Dictyostelium discoideum]
  misc_feature (33)..(199): NCBI GI NO: 17566266 NR Description: CYcloPhilin family CYP-7 (18.4 kD) (cyp-7)
  misc_feature (33)..(199): NCBI GI NO: 863016 NR Description: cyclophilin
  misc_feature (33)..(199): NCBI GI NO: 1480465 NR Description: cyclophilin Ovcyp-2
  misc_feature (20)..(201): NCBI GI NO: 11270308 NR Description: peptidylprolyl isomerase (EC 5.2.1.8) F27K19.100
MARSTSILFLTLLLSASLALIQAKEDLKEITHKVYFDVEIDGKEAGRVVIGLFGKTVPKTAENFRALCTGEKGVGKSGKPLHYKGSKFHRIIPSFMIQGGDFTHGNGMGGESIYGQKFADENFKLKHTGPGLLSMANSGEDTNGSQFFITTVTTSWLDGRHVVFGKVVQGMDVVYKIEAEGKQSGTPKSKVVIADSGELPL

SEQ ID NO: 19545 - protein, 106 aa, Zea mays subsp. mays
  peptide (1)..(106): Ceres Seq. ID no. 12635660
  misc_feature (1)..(106): NCBI GI NO: 11270326 NR Description: peptidylprolyl isomerase (EC 5.2.1.8) CYP5
  misc_feature (1)..(106): NCBI GI NO: 15227674 NR Description: cyclophilin; protein id: At2g29960
  misc_feature (1)..(106): NCBI GI NO: 21554007 NR Description: cyclophilin [Arabidopsis thaliana]
  misc_feature (1)..(106): NCBI GI NO: 15237739 NR Description: cyclophilin ROC7; protein id: At5g58710
  misc_feature (1)..(106): NCBI GI NO: 18410386 NR Description: cyclophilin-like protein; protein id: At3g55920
  misc_feature (1)..(104): NCBI GI NO: 5731960 NR Description: cyclophilin B [Dictyostelium discoideum]
  misc_feature (1)..(104): NCBI GI NO: 17566266 NR Description: CYcloPhilin family CYP-7 (18.4 kD) (cyp-7)
  misc_feature (1)..(104): NCBI GI NO: 863016 NR Description: cyclophilin
  misc_feature (1)..(104): NCBI GI NO: 1480465 NR Description: cyclophilin Ovcyp-2
  misc_feature (1)..(106): NCBI GI NO: 11270308 NR Description: peptidylprolyl isomerase (EC 5.2.1.8) F27K19.100
MIQGGDFTHGNGMGGESIYGQKFADENFKLKHTGPGLLSMANSGEDTNGSQFFITTVTTSWLDGRHVVFGKVVQGMDVVYKIEAEGKQSGTPKSKVVIADSGELPL

SEQ ID NO: 19546 - DNA, 744 bp, Zea mays subsp. mays
  misc_feature (1)..(744): Ceres Seq. ID no. 13599587
atcgagagcagaaaacaaagatcgatccatcgagaccgaccgagagcaggattgaagttgaaaggaccgtccgtacgggttacttctccagtcagtctccggtgcgccttcttcgccgatcagcgcgactgctgcttgtacatggccacgagagcggcgctcgtcgccggccgccgtgcggccggtcaggacgggctcgcccttctctcctcgggctgcaggcgcgaaggagctcgtccgagctccccccacaagagcagcagcgccaccgagcgggagggccacggcgacgcgacggcggcgcaggtggaggcggcgctgaaccgcaagaacgcggacgtggtcgacgtcgaccgctccggctccgcgacgctggtcccggccgacgcgcggcgcggcgcgggcgacgagtgggtgcccgaccaggagacgggcgtctttgtcccggccgacgaggagtcgtccgggcccggcgacgggggcgtggccgacgtcggcggcgcgcgcgggcaagccccgtcggtgctggaccaggcggtgttcgtccgcgaggagcacatggaggacgtcgagaggcccgccgtcggcgtggacgatgccggcgccgcctgagcgcggggaccgtgtcctcgggcggcccgccgctgcgaccagcaggcagagtagctgtagcctgtagggcaagcaaagcaaggttttctttgttctagcttccggatcgatagaataatgaagtcagatctc

SEQ ID NO: 19547 - protein, 235 aa, Zea mays subsp. mays
  peptide (1)..(235): Ceres Seq. ID no. 13599588
  misc_feature (94)..(202): Pfam Name: Pfam Description:  Sperm histone P2
  misc_feature (49)..(226): NCBI GI NO: 34911576 NR Description: P0004A09.11
  misc_feature (61)..(217): NCBI GI NO: 11362193 NR Description: hypothetical protein
  misc_feature (9)..(211): NCBI GI NO: 23104656 NR Description: hypothetical protein [Azotobacter vinelandii]
REQKTKIDPSRPTESRIEVERTVRTGYFSSQSPVRLLRRSARLLLVHGHESGARRRPPCGRSGRARPSLLGLQARRSSSELPPQEQQRHRAGGPRRRDGGAGGGGAEPQERGRGRRRPLRLRDAGPGRRAARRGRRVGARPGDGRLCPGRRGVVRARRRGRGRRRRRARASPVGAGPGGVRPRGAHGGRREARRRRGRCRRRLSAGTVSSGGPPLRPAGRVAVACRASKARFSLF

SEQ ID NO: 19548 - protein, 203 aa, Zea mays subsp. mays
  peptide (1)..(203): Ceres Seq. ID no. 13599589
  misc_feature (52)..(195): NCBI GI NO: 34897930 NR Description: ESTs AU082409
  misc_feature (48)..(195): NCBI GI NO: 24413942 NR Description: contains ESTsAU082409
  misc_feature (30)..(177): NCBI GI NO: 16924103 NR Description: hypothetical protein [Oryza sativa]
IESRKQRSIHRDRPRAGLKLKGPSVRVTSPVSLRCAFFADQRDCCLYMATRAALVAGRRAAGQDGLALLSSGCRREGARPSSPHKSSSATEREGHGDATAAQVEAALNRKNADVVDVDRSGSATLVPADARRGAGDEWVPDQETGVFVPADEESSGPGDGGVADVGGARGQAPSVLDQAVFVREEHMEDVERPAVGVDDAGAA

SEQ ID NO: 19549 - protein, 156 aa, Zea mays subsp. mays
  peptide (1)..(156): Ceres Seq. ID no. 13599590
  misc_feature (5)..(148): NCBI GI NO: 34897930 NR Description: ESTs AU082409
  misc_feature (1)..(148): NCBI GI NO: 24413942 NR Description: contains ESTsAU082409
  misc_feature (1)..(130): NCBI GI NO: 16924103 NR Description: hypothetical protein [Oryza sativa]
MATRAALVAGRRAAGQDGLALLSSGCRREGARPSSPHKSSSATEREGHGDATAAQVEAALNRKNADVVDVDRSGSATLVPADARRGAGDEWVPDQETGVFVPADEESSGPGDGGVADVGGARGQAPSVLDQAVFVREEHMEDVERPAVGVDDAGAA

SEQ ID NO: 19550 - DNA, 1486 bp, Zea mays subsp. mays
  misc_feature (1)..(1486): Ceres Seq. ID no. 15225907
aggttatgtcagcctttttggtgcaaccctgaagaagtatgggtaccgatccatgtcgctggctgaaatccttgataaaactagggacaagtatcttgaacttcttctttctgactgccggaagcagctcaacgaggccttctctagggactcatatgagaggatggttataaagaaacaaaatgaatacgacgcaaacatagcggcattccaacttgaccccattgatggagtatcaaatttgccatacgtcgctccattttcctcctctgttcccaatgcttgtcgtattgtgcgttctttcatcgaggagttggtcagctacttgtcactcagtggtggcgtaaacgtctatgatgtggtgaaaagctacttggacaagttcttgattgagacgttgaatgatggttttctgaagctgatacatggtggatccctggaatttccacaggtggtgcagatcgcaggaaatatcgccgttctcgagcagtcctgtgacatgttcctttggcacgccgctcgactttgtggtgtccctaggtgcctcctcgagaagccccattctggattgagtgccagagctgtgctcaaagcctcccagaatgcggcatacaacggatcggttactttggtgaattccaagatcgacgagttcatgctgcagctgactagcatcaactggaccccggacgaagctccagagcacgccaacgactacatgaacgaggtcatcatctaccttcacgaggtggtgtcttccgggcagcaggccgtgccaagggacgcgctgttcaaggttgtatctggcgcgctgagccacatctcggactctatgacgacggtccttctcagtgaccgggtgaaaaggttcaacgcgaacgccgttgctagcatcgacgtcgatctgagggcgctggaggggttcgctgacgacacgtaccgcacggccgggtttctggacctgagaaagggaaccagtttcagagagtgtctagccgaagtaaggcagctcacaaaccttctgctgagcagccagcctgagagcttcgcgaaccctgcaaccagggagcagagctacggagccttagaccacaagaaggtggcgataatttgtgacaagttcaaggatgcccccgacagcctgttcgggagcctctcaggccggggcacggtgcagagcgcccggaagaagtccctggatgtgctgaagagaaggctaaaggattttagctagctggtgagctagatcatttagacaagctagtagcatagtacccctgttttagtgccagtcgtatccatttaaaatttcttttccgtctttctttattccctctttaatcgacttcccgtttcatgcgccgaagagaaggctgaaggattttagctggggtttgctggtgagctagatcgttaaataagctagtgctctgtttagggaagaagacaagtggttcggtgtgtaaagccatttcaaatttctttc

SEQ ID NO: 19551 - protein, 410 aa, Zea mays subsp. mays
  peptide (1)..(410): Ceres Seq. ID no. 15225908
  misc_feature (62)..(410): Pfam Name: Pfam Description:  Exocyst complex subunit Sec15-like
  misc_feature (2)..(410): NCBI GI NO: 37534338 NR Description: unknown protein
  misc_feature (2)..(410): NCBI GI NO: 34902596 NR Description: Unknown protein
  misc_feature (2)..(410): NCBI GI NO: 15228982 NR Description: hypothetical protein [Arabidopsis thaliana]
  misc_feature (2)..(410): NCBI GI NO: 34895194 NR Description: B1051E10.38
  misc_feature (28)..(410): NCBI GI NO: 18411920 NR Description: expressed protein [Arabidopsis thaliana]
  misc_feature (3)..(407): NCBI GI NO: 24418671 NR Description: Exocyst complex component Sec15A
  misc_feature (5)..(376): NCBI GI NO: 11360248 NR Description: hypothetical protein DKFZp761I2124
  misc_feature (5)..(376): NCBI GI NO: 30410710 NR Description: SEC15 (S. cerevisiae)-like [Homo sapiens]
  misc_feature (9)..(410): NCBI GI NO: 31218569 NR Description: ENSANGP00000011350 [Anopheles gambiae]
  misc_feature (3)..(407): NCBI GI NO: 28202021 NR Description: RIKEN cDNA 4833405E05; SEC15 homolog (S
GYVSLFGATLKKYGYRSMSLAEILDKTRDKYLELLLSDCRKQLNEAFSRDSYERMVIKKQNEYDANIAAFQLDPIDGVSNLPYVAPFSSSVPNACRIVRSFIEELVSYLSLSGGVNVYDVVKSYLDKFLIETLNDGFLKLIHGGSLEFPQVVQIAGNIAVLEQSCDMFLWHAARLCGVPRCLLEKPHSGLSARAVLKASQNAAYNGSVTLVNSKIDEFMLQLTSINWTPDEAPEHANDYMNEVIIYLHEVVSSGQQAVPRDALFKVVSGALSHISDSMTTVLLSDRVKRFNANAVASIDVDLRALEGFADDTYRTAGFLDLRKGTSFRECLAEVRQLTNLLLSSQPESFANPATREQSYGALDHKKVAIICDKFKDAPDSLFGSLSGRGTVQSARKKSLDVLKRRLKDFS

SEQ ID NO: 19552 - protein, 393 aa, Zea mays subsp. mays
  peptide (1)..(393): Ceres Seq. ID no. 15225909
  misc_feature (45)..(393): Pfam Name: Pfam Description:  Exocyst complex subunit Sec15-like
  misc_feature (1)..(393): NCBI GI NO: 37534338 NR Description: unknown protein
  misc_feature (1)..(393): NCBI GI NO: 34902596 NR Description: Unknown protein
  misc_feature (1)..(393): NCBI GI NO: 15228982 NR Description: hypothetical protein [Arabidopsis thaliana]
  misc_feature (1)..(393): NCBI GI NO: 34895194 NR Description: B1051E10.38
  misc_feature (11)..(393): NCBI GI NO: 18411920 NR Description: expressed protein [Arabidopsis thaliana]
  misc_feature (1)..(390): NCBI GI NO: 24418671 NR Description: Exocyst complex component Sec15A
  misc_feature (1)..(359): NCBI GI NO: 11360248 NR Description: hypothetical protein DKFZp761I2124
  misc_feature (1)..(359): NCBI GI NO: 30410710 NR Description: SEC15 (S. cerevisiae)-like [Homo sapiens]
  misc_feature (1)..(393): NCBI GI NO: 31218569 NR Description: ENSANGP00000011350 [Anopheles gambiae]
  misc_feature (1)..(390): NCBI GI NO: 28202021 NR Description: RIKEN cDNA 4833405E05; SEC15 homolog (S
MSLAEILDKTRDKYLELLLSDCRKQLNEAFSRDSYERMVIKKQNEYDANIAAFQLDPIDGVSNLPYVAPFSSSVPNACRIVRSFIEELVSYLSLSGGVNVYDVVKSYLDKFLIETLNDGFLKLIHGGSLEFPQVVQIAGNIAVLEQSCDMFLWHAARLCGVPRCLLEKPHSGLSARAVLKASQNAAYNGSVTLVNSKIDEFMLQLTSINWTPDEAPEHANDYMNEVIIYLHEVVSSGQQAVPRDALFKVVSGALSHISDSMTTVLLSDRVKRFNANAVASIDVDLRALEGFADDTYRTAGFLDLRKGTSFRECLAEVRQLTNLLLSSQPESFANPATREQSYGALDHKKVAIICDKFKDAPDSLFGSLSGRGTVQSARKKSLDVLKRRLKDFS

SEQ ID NO: 19553 - protein, 356 aa, Zea mays subsp. mays
  peptide (1)..(356): Ceres Seq. ID no. 15225910
  misc_feature (8)..(356): Pfam Name: Pfam Description:  Exocyst complex subunit Sec15-like
  misc_feature (1)..(356): NCBI GI NO: 37534338 NR Description: unknown protein
  misc_feature (1)..(356): NCBI GI NO: 34902596 NR Description: Unknown protein
  misc_feature (1)..(356): NCBI GI NO: 15228982 NR Description: hypothetical protein [Arabidopsis thaliana]
  misc_feature (1)..(356): NCBI GI NO: 34895194 NR Description: B1051E10.38
  misc_feature (1)..(356): NCBI GI NO: 18411920 NR Description: expressed protein [Arabidopsis thaliana]
  misc_feature (1)..(353): NCBI GI NO: 24418671 NR Description: Exocyst complex component Sec15A
  misc_feature (1)..(322): NCBI GI NO: 11360248 NR Description: hypothetical protein DKFZp761I2124
  misc_feature (1)..(322): NCBI GI NO: 30410710 NR Description: SEC15 (S. cerevisiae)-like [Homo sapiens]
  misc_feature (1)..(356): NCBI GI NO: 31218569 NR Description: ENSANGP00000011350 [Anopheles gambiae]
  misc_feature (1)..(353): NCBI GI NO: 28202021 NR Description: RIKEN cDNA 4833405E05; SEC15 homolog (S
MVIKKQNEYDANIAAFQLDPIDGVSNLPYVAPFSSSVPNACRIVRSFIEELVSYLSLSGGVNVYDVVKSYLDKFLIETLNDGFLKLIHGGSLEFPQVVQIAGNIAVLEQSCDMFLWHAARLCGVPRCLLEKPHSGLSARAVLKASQNAAYNGSVTLVNSKIDEFMLQLTSINWTPDEAPEHANDYMNEVIIYLHEVVSSGQQAVPRDALFKVVSGALSHISDSMTTVLLSDRVKRFNANAVASIDVDLRALEGFADDTYRTAGFLDLRKGTSFRECLAEVRQLTNLLLSSQPESFANPATREQSYGALDHKKVAIICDKFKDAPDSLFGSLSGRGTVQSARKKSLDVLKRRLKDFS

SEQ ID NO: 19554 - DNA, 1062 bp, Zea mays subsp. mays
  misc_feature (1)..(1062): Ceres Seq. ID no. 13599210
ctagaacatcctaatcgaaaatagaatatgattctgggtggtagatataaatgaaaattgcgtctggttccgacgacacctcttttaagttttggttttgtttcttttataccaccggacttttgcttttacaggttccaaaacgcatctcctccacctccgtctcctactcctcgcttcctcgtcacgcaaactttgatccaccggagcaatgaagatcaccgccttgcttgttctcaaggccgcccccgaaacctcggatcccgtgatcctcgcaaatgcttctgacgtctctcactttggctatttccagcgatctagcgtcaaggagttcgtcgtcttcgtgggccgcactgtcgctagccgaacccctccttctcagcgccagtccgtccagcacgaagagtacaaggttcacgcttacaataggaatggcctttgcgcggtgggattcatggacgatcattatcctgttcgaagtgccttttctcttctcaatcaggtcatagatgagtaccagaagagttttggtgaggcatggaggtctgctaaagaagactcctctcagccctggccttacttagccgaagctcttaccaaattccaggacccggcagaggctgataagctgttgaaaatccagagggagttggatgagaccaagattatcctccataagaccattgatagcgttctagcccgcggtgagaagctggacagcctagtggagaagagctctgatttgagcatggcatcgcagatgttctacaagcaagcaaagaaaacgaattcatgctgcactattctgtgagctgcgactctggatggatgtctttgggtatatatagtcaaccaaacttttgctgtggggcgagactgttttccattttatataatatatatttgattccgttctctcgtttgcatgcactcttgaaattccatataagactcatgtcgtgtggcgtgttatccaaatacagtttcaattgtctttgccagattatatgattgcttttgtttatgttaaaaaaaaaaaaaaaaaagcttatcgataccgtc

SEQ ID NO: 19555 - protein, 199 aa, Zea mays subsp. mays
  peptide (1)..(199): Ceres Seq. ID no. 13599211
  misc_feature (102)..(189): Pfam Name: Pfam Description:  Synaptobrevin
  misc_feature (1)..(199): NCBI GI NO: 15242933 NR Description: ATGP1 [Arabidopsis thaliana]
  misc_feature (1)..(199): NCBI GI NO: 4097579 NR Description: NTGP1 [Nicotiana tabacum]
  misc_feature (1)..(199): NCBI GI NO: 15242973 NR Description: ATGP1-related protein [Arabidopsis thaliana]
  misc_feature (1)..(183): NCBI GI NO: 34908586 NR Description: putative ATGP1
  misc_feature (1)..(198): NCBI GI NO: 19113353 NR Description: Synaptobrevin-like V snare protein
  misc_feature (1)..(199): NCBI GI NO: 6322652 NR Description: Synaptobrevin
  misc_feature (1)..(199): NCBI GI NO: 25349719 NR Description: probable snare protein
  misc_feature (1)..(199): NCBI GI NO: 5730120 NR Description: SNARE protein Ykt6; YKT6, S
  misc_feature (1)..(199): NCBI GI NO: 30585033 NR Description: Homo sapiens SNARE protein Ykt6
  misc_feature (1)..(196): NCBI GI NO: 39581395 NR Description: Hypothetical protein CBG15347
MKITALLVLKAAPETSDPVILANASDVSHFGYFQRSSVKEFVVFVGRTVASRTPPSQRQSVQHEEYKVHAYNRNGLCAVGFMDDHYPVRSAFSLLNQVIDEYQKSFGEAWRSAKEDSSQPWPYLAEALTKFQDPAEADKLLKIQRELDETKIILHKTIDSVLARGEKLDSLVEKSSDLSMASQMFYKQAKKTNSCCTIL

SEQ ID NO: 19556 - protein, 118 aa, Zea mays subsp. mays
  peptide (1)..(118): Ceres Seq. ID no. 13599212
  misc_feature (21)..(108): Pfam Name: Pfam Description:  Synaptobrevin
  misc_feature (1)..(118): NCBI GI NO: 15242933 NR Description: ATGP1 [Arabidopsis thaliana]
  misc_feature (1)..(118): NCBI GI NO: 4097579 NR Description: NTGP1 [Nicotiana tabacum]
  misc_feature (1)..(118): NCBI GI NO: 15242973 NR Description: ATGP1-related protein [Arabidopsis thaliana]
  misc_feature (1)..(102): NCBI GI NO: 34908586 NR Description: putative ATGP1
  misc_feature (1)..(117): NCBI GI NO: 19113353 NR Description: Synaptobrevin-like V snare protein
  misc_feature (1)..(118): NCBI GI NO: 6322652 NR Description: Synaptobrevin
  misc_feature (1)..(118): NCBI GI NO: 25349719 NR Description: probable snare protein
  misc_feature (1)..(118): NCBI GI NO: 5730120 NR Description: SNARE protein Ykt6; YKT6, S
  misc_feature (1)..(118): NCBI GI NO: 30585033 NR Description: Homo sapiens SNARE protein Ykt6
  misc_feature (1)..(115): NCBI GI NO: 39581395 NR Description: Hypothetical protein CBG15347
MDDHYPVRSAFSLLNQVIDEYQKSFGEAWRSAKEDSSQPWPYLAEALTKFQDPAEADKLLKIQRELDETKIILHKTIDSVLARGEKLDSLVEKSSDLSMASQMFYKQAKKTNSCCTIL

SEQ ID NO: 19557 - DNA, 856 bp, Zea mays subsp. mays
  misc_feature (1)..(856): Ceres Seq. ID no. 12635763
aaaaaccccaagcccatacatccacactgcttagtctatagactctataccatagtttcaccaccatctagctttaccagaaatggagggtcagagatcacaacgctggggttacttgaaagacaaggctatagccaccagccttgctgaagaagaaatggaaaatagcatggatggagaggaggatgatactggagatgaagacaaaaggaagagagtgatggagagagctagaggtcctaacacagaacgtgttcccttgcggctgtgcctggtcgataggtgcactgctaacttaactgaggccaagcagtattaccgcagacacaaagtctgtgaggttcatgcaaaggcatcttctgcaactgttgctggagtcaagcaacgtttttgtcaacaatgcagcaggttccatgagctagcagagtttgatgaaactaaaagaagttgcaggaggcgcttagctggacacaatgagaggaggcggaagatatctggtgacagttacggagaagggtcaggccggagagcggttagcttgacacagactcaagaaagaaacaggatagacatgaaacttcctatgactaactcaccattcaagcgaccacagatcagataaaacaacatcaacacacccaaccgctctctctcttctgtcatctacttatgttatatatctacgttctctagctatccaaataatgacatctaagtaccatgtcaagaaaagtggatcgtggtattgaatcctccaacaatatataactacaaaactctagtaccctctatgttatcatctaaaggatgcatatccaccaatgtataagacttgtcatcctcttgtattgtctaa

SEQ ID NO: 19558 - protein, 179 aa, Zea mays subsp. mays
  peptide (1)..(179): Ceres Seq. ID no. 12635764
  misc_feature (62)..(140): Pfam Name: Pfam Description:  SBP domain
  misc_feature (1)..(179): NCBI GI NO: 15232541 NR Description: squamosa promoter binding protein-like 5
  misc_feature (1)..(138): NCBI GI NO: 25456671 NR Description: squamosa promoter binding protein-like 5
  misc_feature (1)..(179): NCBI GI NO: 15219210 NR Description: transcription factor, putative
  misc_feature (10)..(179): NCBI GI NO: 25456654 NR Description: squamosa promoter binding protein 4
  misc_feature (33)..(142): NCBI GI NO: 6094239 NR Description: SQUAMOSA-PROMOTER BINDING PROTEIN 1
  misc_feature (26)..(146): NCBI GI NO: 30577628 NR Description: squamosa promoter binding like-protein
  misc_feature (6)..(140): NCBI GI NO: 18403387 NR Description: putative squamosa-promoter binding protein
  misc_feature (6)..(140): NCBI GI NO: 21618221 NR Description: putative squamosa-promoter binding protein
  misc_feature (21)..(140): NCBI GI NO: 25408313 NR Description: probable squamosa-promoter binding protein
  misc_feature (13)..(149): NCBI GI NO: 6094241 NR Description: SQUAMOSA-PROMOTER BINDING PROTEIN 2
MEGQRSQRWGYLKDKAIATSLAEEEMENSMDGEEDDTGDEDKRKRVMERARGPNTERVPLRLCLVDRCTANLTEAKQYYRRHKVCEVHAKASSATVAGVKQRFCQQCSRFHELAEFDETKRSCRRRLAGHNERRRKISGDSYGEGSGRRAVSLTQTQERNRIDMKLPMTNSPFKRPQIR

SEQ ID NO: 19559 - protein, 154 aa, Zea mays subsp. mays
  peptide (1)..(154): Ceres Seq. ID no. 12635765
  misc_feature (37)..(115): Pfam Name: Pfam Description:  SBP domain
  misc_feature (1)..(154): NCBI GI NO: 15232541 NR Description: squamosa promoter binding protein-like 5
  misc_feature (1)..(113): NCBI GI NO: 25456671 NR Description: squamosa promoter binding protein-like 5
  misc_feature (1)..(154): NCBI GI NO: 15219210 NR Description: transcription factor, putative
  misc_feature (1)..(154): NCBI GI NO: 25456654 NR Description: squamosa promoter binding protein 4
  misc_feature (8)..(117): NCBI GI NO: 6094239 NR Description: SQUAMOSA-PROMOTER BINDING PROTEIN 1
  misc_feature (1)..(121): NCBI GI NO: 30577628 NR Description: squamosa promoter binding like-protein
  misc_feature (1)..(115): NCBI GI NO: 18403387 NR Description: putative squamosa-promoter binding protein
  misc_feature (1)..(115): NCBI GI NO: 21618221 NR Description: putative squamosa-promoter binding protein
  misc_feature (1)..(115): NCBI GI NO: 25408313 NR Description: probable squamosa-promoter binding protein
  misc_feature (1)..(124): NCBI GI NO: 6094241 NR Description: SQUAMOSA-PROMOTER BINDING PROTEIN 2
MENSMDGEEDDTGDEDKRKRVMERARGPNTERVPLRLCLVDRCTANLTEAKQYYRRHKVCEVHAKASSATVAGVKQRFCQQCSRFHELAEFDETKRSCRRRLAGHNERRRKISGDSYGEGSGRRAVSLTQTQERNRIDMKLPMTNSPFKRPQIR

SEQ ID NO: 19560 - protein, 150 aa, Zea mays subsp. mays
  peptide (1)..(150): Ceres Seq. ID no. 12635766
  misc_feature (33)..(111): Pfam Name: Pfam Description:  SBP domain
  misc_feature (1)..(150): NCBI GI NO: 15232541 NR Description: squamosa promoter binding protein-like 5
  misc_feature (1)..(109): NCBI GI NO: 25456671 NR Description: squamosa promoter binding protein-like 5
  misc_feature (1)..(150): NCBI GI NO: 15219210 NR Description: transcription factor, putative
  misc_feature (1)..(150): NCBI GI NO: 25456654 NR Description: squamosa promoter binding protein 4
  misc_feature (4)..(113): NCBI GI NO: 6094239 NR Description: SQUAMOSA-PROMOTER BINDING PROTEIN 1
  misc_feature (1)..(117): NCBI GI NO: 30577628 NR Description: squamosa promoter binding like-protein
  misc_feature (1)..(111): NCBI GI NO: 18403387 NR Description: putative squamosa-promoter binding protein
  misc_feature (1)..(111): NCBI GI NO: 21618221 NR Description: putative squamosa-promoter binding protein
  misc_feature (1)..(111): NCBI GI NO: 25408313 NR Description: probable squamosa-promoter binding protein
  misc_feature (1)..(120): NCBI GI NO: 6094241 NR Description: SQUAMOSA-PROMOTER BINDING PROTEIN 2
MDGEEDDTGDEDKRKRVMERARGPNTERVPLRLCLVDRCTANLTEAKQYYRRHKVCEVHAKASSATVAGVKQRFCQQCSRFHELAEFDETKRSCRRRLAGHNERRRKISGDSYGEGSGRRAVSLTQTQERNRIDMKLPMTNSPFKRPQIR

SEQ ID NO: 19561 - DNA, 1143 bp, Zea mays subsp. mays
  misc_feature (1)..(1143): Ceres Seq. ID no. 13624571
tttttcgacttttactactcgaagttgatgagatttcctggataatcaaagtctcatcccttctctgttccgctcgctgaaaaagctcataacctctaaagcatggagtctctatcctttcctattctaaatcctctgttagcttctggttctagtctttacagaaaacagagctcgaggatgacctcttcaatgtcatcttcagttagtttcgccacaggaagaacatctctgtccactgttcgccgctctagagtaggtgttgttaagatgcaagctgttgatgaagatattgatctgaagcaaatgagagacatggctgctgctaagaagcgttgggatggtttgttaagagaaggaaaggtgaagcttctgacaccaagagaagcaggctatgctattcagctttcaaacaaacctcttctcgatgtccgtccttctagcgagcgtaacaaggcatgggttaaaggctctgactgggttcctatcttcgacaatgaagacaaccttgacgctggaactctttccaaaaaggtcaccagttttgctatgggtggatggtggagtggtacacctattttgtctttcaataagctcttcttgtcaaaggttgaggagaaattcccaaaagaaacagagctgatcgttgcttgccaaaaaggattgagatccttagctgcttgtgagctacttattaatgctggatatcagaatattttctgggtgcaaggcggtttagagtctgctgaagacgaggatctagtcacagaaggttctcagccgttgaagcttgctgggattggggggttttctgagttcctcggttggacagaccaacaaagagctcaagctgcgaaagaaggttgggggtaccgtttagtatttactgctcgtctgtttagggtaattctggctgcggatgccttgttccttggtgctcagcaacttggtcattatattcaggagttaagaggtcactaggactctctctgtaaccaaagctccgtgtggttgtactgcttctcttcacaaaaaaaactgtaaatttctgttgaagattgtagtttttgagatagagtagttgaaattgagatactgaaaaagaaaaatctttaaattttggaaaatcttcagtttctgttg

SEQ ID NO: 19562 - protein, 292 aa, Zea mays subsp. mays
  peptide (1)..(292): Ceres Seq. ID no. 13624572
  misc_feature (94)..(212): Pfam Name: Pfam Description:  Rhodanese-like domain
  misc_feature (1)..(174): NCBI GI NO: 15233950 NR Description: expressed protein [Arabidopsis thaliana]
  misc_feature (202)..(292): NCBI GI NO: 15233950 NR Description: expressed protein [Arabidopsis thaliana]
  misc_feature (82)..(240): NCBI GI NO: 18398296 NR Description: rhodanese-like domain protein
  misc_feature (82)..(240): NCBI GI NO: 18491227 NR Description: putative rhodanese family protein
  misc_feature (82)..(240): NCBI GI NO: 21592651 NR Description: rhodanese-like family protein
  misc_feature (87)..(241): NCBI GI NO: 15010630 NR Description: At2g42220/T24P15.13 [Arabidopsis thaliana]
  misc_feature (87)..(241): NCBI GI NO: 18405912 NR Description: rhodanese-like domain protein
MESLSFPILNPLLASGSSLYRKQSSRMTSSMSSSVSFATGRTSLSTVRRSRVGVVKMQAVDEDIDLKQMRDMAAAKKRWDGLLREGKVKLLTPREAGYAIQLSNKPLLDVRPSSERNKAWVKGSDWVPIFDNEDNLDAGTLSKKVTSFAMGGWWSGTPILSFNKLFLSKVEEKFPKETELIVACQKGLRSLAACELLINAGYQNIFWVQGGLESAEDEDLVTEGSQPLKLAGIGGFSEFLGWTDQQRAQAAKEGWGYRLVFTARLFRVILAADALFLGAQQLGHYIQELRGH

SEQ ID NO: 19563 - protein, 266 aa, Zea mays subsp. mays
  peptide (1)..(266): Ceres Seq. ID no. 13624573
  misc_feature (68)..(186): Pfam Name: Pfam Description:  Rhodanese-like domain
  misc_feature (1)..(148): NCBI GI NO: 15233950 NR Description: expressed protein [Arabidopsis thaliana]
  misc_feature (176)..(266): NCBI GI NO: 15233950 NR Description: expressed protein [Arabidopsis thaliana]
  misc_feature (56)..(214): NCBI GI NO: 18398296 NR Description: rhodanese-like domain protein
  misc_feature (56)..(214): NCBI GI NO: 18491227 NR Description: putative rhodanese family protein
  misc_feature (56)..(214): NCBI GI NO: 21592651 NR Description: rhodanese-like family protein
  misc_feature (61)..(215): NCBI GI NO: 15010630 NR Description: At2g42220/T24P15.13 [Arabidopsis thaliana]
  misc_feature (61)..(215): NCBI GI NO: 18405912 NR Description: rhodanese-like domain protein
MTSSMSSSVSFATGRTSLSTVRRSRVGVVKMQAVDEDIDLKQMRDMAAAKKRWDGLLREGKVKLLTPREAGYAIQLSNKPLLDVRPSSERNKAWVKGSDWVPIFDNEDNLDAGTLSKKVTSFAMGGWWSGTPILSFNKLFLSKVEEKFPKETELIVACQKGLRSLAACELLINAGYQNIFWVQGGLESAEDEDLVTEGSQPLKLAGIGGFSEFLGWTDQQRAQAAKEGWGYRLVFTARLFRVILAADALFLGAQQLGHYIQELRGH

SEQ ID NO: 19564 - protein, 262 aa, Zea mays subsp. mays
  peptide (1)..(262): Ceres Seq. ID no. 13624574
  misc_feature (64)..(182): Pfam Name: Pfam Description:  Rhodanese-like domain
  misc_feature (1)..(144): NCBI GI NO: 15233950 NR Description: expressed protein [Arabidopsis thaliana]
  misc_feature (172)..(262): NCBI GI NO: 15233950 NR Description: expressed protein [Arabidopsis thaliana]
  misc_feature (52)..(210): NCBI GI NO: 18398296 NR Description: rhodanese-like domain protein
  misc_feature (52)..(210): NCBI GI NO: 18491227 NR Description: putative rhodanese family protein
  misc_feature (52)..(210): NCBI GI NO: 21592651 NR Description: rhodanese-like family protein
  misc_feature (57)..(211): NCBI GI NO: 15010630 NR Description: At2g42220/T24P15.13 [Arabidopsis thaliana]
  misc_feature (57)..(211): NCBI GI NO: 18405912 NR Description: rhodanese-like domain protein
MSSSVSFATGRTSLSTVRRSRVGVVKMQAVDEDIDLKQMRDMAAAKKRWDGLLREGKVKLLTPREAGYAIQLSNKPLLDVRPSSERNKAWVKGSDWVPIFDNEDNLDAGTLSKKVTSFAMGGWWSGTPILSFNKLFLSKVEEKFPKETELIVACQKGLRSLAACELLINAGYQNIFWVQGGLESAEDEDLVTEGSQPLKLAGIGGFSEFLGWTDQQRAQAAKEGWGYRLVFTARLFRVILAADALFLGAQQLGHYIQELRGH

SEQ ID NO: 19565 - DNA, 1280 bp, Zea mays subsp. mays
  misc_feature (1)..(1280): Ceres Seq. ID no. 12634984
agcctgcgctcacttgagcacactgcacttttctgctcgcgacgccgcgtgcggacagtcagtctgtttccatctcccatggccgccatggccagcaacacttccggccctgttccgttcacggacgtcgacgacggcacggtgccgaagcgcccagccaaggaggagttcggcggcctcgtcgcagcgctgccgcggaagcatcaggccggcctggagctgcgcctgtaccagggcttctggctgcccgaccactgggtcgccggcaccgtcgtcttccagcggcgcttcgccccacgccccgacgacgtgatcctggccagctaccccaagtgcggcaccacgtggctcaaggcgctggccttcgccaccatgacgcgcgacgcgtacccggcgccggcgcagcacccgctcctccgcctcaacccgcacgactgcatcccgttcctggacgagatctttgccgacgggcaggaggccaagctggagaagctcccgtcgccgcgcctcatgaacacgcacatgccgcacaccttgctccccgagtcggtcaccggcgccgccgtcgccggctgcaaggtcgtgtacatctgcagggaccccaaggacatggtcgtgtcgctgtggcacttcctccggcgccggcagccggagctcccgttcgcggagctgttcgagcacgtgtgcgacggcgccgtggccgtcggcccgatctgggaccacgtgctcagctactggcgcgcgagcctcgcgcggcccgacagggtgctcttcctcaggtacgaggagctgctgcaggacacgggcaagcacgtgaggaagctggcggagttcatgggccggcctttctcgcctgccgaggagggcgccggcgccgtggaaggcgtggtggagctgtgcagcttcgagaagatgaaggggctggaggtgaacaagaaaggctcggcgggggcgtaccacgccatgccccgcgactctttcttcaggaaaggggtcgccggcgactgggtgaaccacatgacgccggagatggcgacgcggctggatgaggttgtccgtgacaagttccgcggcacggcgctcgcggctccatgatcgggacacgtcgcgtgcgtgtgggtaaattaagcgaggcaatcagcatgcgtgattcgcttgtactgtatgcttggctgctggtacctgtcgatttaaaataagagatgctgttctcggcacaaccactacctacattatggtataaatatttaactatgattatctattgcaacattttggcc

SEQ ID NO: 19566 - protein, 364 aa, Zea mays subsp. mays
  peptide (1)..(364): Ceres Seq. ID no. 12634985
  misc_feature (103)..(359): Pfam Name: Pfam Description:  Sulfotransferase domain
  misc_feature (35)..(347): NCBI GI NO: 34393650 NR Description: putative flavonol 3-sulfotransferase
  misc_feature (36)..(361): NCBI GI NO: 40253317 NR Description: putative flavonol 3-sulfotransferase
  misc_feature (24)..(361): NCBI GI NO: 40253319 NR Description: putative flavonol 3-sulfotransferase
  misc_feature (27)..(361): NCBI GI NO: 35215145 NR Description: putative flavonol 3'-sulfotransferase
  misc_feature (37)..(361): NCBI GI NO: 38346451 NR Description: OSJNBa0018J19.12
  misc_feature (52)..(359): NCBI GI NO: 37531912 NR Description: putative flavonol 3-sulfotransferase
  misc_feature (77)..(299): NCBI GI NO: 30349136 NR Description: STF-1 [Triticum monococcum]
  misc_feature (30)..(364): NCBI GI NO: 34894524 NR Description: putative steroid sulfotransferase
  misc_feature (27)..(361): NCBI GI NO: 38344441 NR Description: OSJNBa0038O10.13
  misc_feature (60)..(361): NCBI GI NO: 34905060 NR Description: putative flavonol 4'-sulfotransferase
SLRSLEHTALFCSRRRVRTVSLFPSPMAAMASNTSGPVPFTDVDDGTVPKRPAKEEFGGLVAALPRKHQAGLELRLYQGFWLPDHWVAGTVVFQRRFAPRPDDVILASYPKCGTTWLKALAFATMTRDAYPAPAQHPLLRLNPHDCIPFLDEIFADGQEAKLEKLPSPRLMNTHMPHTLLPESVTGAAVAGCKVVYICRDPKDMVVSLWHFLRRRQPELPFAELFEHVCDGAVAVGPIWDHVLSYWRASLARPDRVLFLRYEELLQDTGKHVRKLAEFMGRPFSPAEEGAGAVEGVVELCSFEKMKGLEVNKKGSAGAYHAMPRDSFFRKGVAGDWVNHMTPEMATRLDEVVRDKFRGTALAAP

SEQ ID NO: 19567 - protein, 338 aa, Zea mays subsp. mays
  peptide (1)..(338): Ceres Seq. ID no. 12634986
  misc_feature (77)..(333): Pfam Name: Pfam Description:  Sulfotransferase domain
  misc_feature (9)..(321): NCBI GI NO: 34393650 NR Description: putative flavonol 3-sulfotransferase
  misc_feature (10)..(335): NCBI GI NO: 40253317 NR Description: putative flavonol 3-sulfotransferase
  misc_feature (1)..(335): NCBI GI NO: 40253319 NR Description: putative flavonol 3-sulfotransferase
  misc_feature (1)..(335): NCBI GI NO: 35215145 NR Description: putative flavonol 3'-sulfotransferase
  misc_feature (11)..(335): NCBI GI NO: 38346451 NR Description: OSJNBa0018J19.12
  misc_feature (26)..(333): NCBI GI NO: 37531912 NR Description: putative flavonol 3-sulfotransferase
  misc_feature (51)..(273): NCBI GI NO: 30349136 NR Description: STF-1 [Triticum monococcum]
  misc_feature (4)..(338): NCBI GI NO: 34894524 NR Description: putative steroid sulfotransferase
  misc_feature (1)..(335): NCBI GI NO: 38344441 NR Description: OSJNBa0038O10.13
  misc_feature (34)..(335): NCBI GI NO: 34905060 NR Description: putative flavonol 4'-sulfotransferase
MAAMASNTSGPVPFTDVDDGTVPKRPAKEEFGGLVAALPRKHQAGLELRLYQGFWLPDHWVAGTVVFQRRFAPRPDDVILASYPKCGTTWLKALAFATMTRDAYPAPAQHPLLRLNPHDCIPFLDEIFADGQEAKLEKLPSPRLMNTHMPHTLLPESVTGAAVAGCKVVYICRDPKDMVVSLWHFLRRRQPELPFAELFEHVCDGAVAVGPIWDHVLSYWRASLARPDRVLFLRYEELLQDTGKHVRKLAEFMGRPFSPAEEGAGAVEGVVELCSFEKMKGLEVNKKGSAGAYHAMPRDSFFRKGVAGDWVNHMTPEMATRLDEVVRDKFRGTALAAP

SEQ ID NO: 19568 - protein, 335 aa, Zea mays subsp. mays
  peptide (1)..(335): Ceres Seq. ID no. 12634987
  misc_feature (74)..(330): Pfam Name: Pfam Description:  Sulfotransferase domain
  misc_feature (6)..(318): NCBI GI NO: 34393650 NR Description: putative flavonol 3-sulfotransferase
  misc_feature (7)..(332): NCBI GI NO: 40253317 NR Description: putative flavonol 3-sulfotransferase
  misc_feature (1)..(332): NCBI GI NO: 40253319 NR Description: putative flavonol 3-sulfotransferase
  misc_feature (1)..(332): NCBI GI NO: 35215145 NR Description: putative flavonol 3'-sulfotransferase
  misc_feature (8)..(332): NCBI GI NO: 38346451 NR Description: OSJNBa0018J19.12
  misc_feature (23)..(330): NCBI GI NO: 37531912 NR Description: putative flavonol 3-sulfotransferase
  misc_feature (48)..(270): NCBI GI NO: 30349136 NR Description: STF-1 [Triticum monococcum]
  misc_feature (1)..(335): NCBI GI NO: 34894524 NR Description: putative steroid sulfotransferase
  misc_feature (1)..(332): NCBI GI NO: 38344441 NR Description: OSJNBa0038O10.13
  misc_feature (31)..(332): NCBI GI NO: 34905060 NR Description: putative flavonol 4'-sulfotransferase
MASNTSGPVPFTDVDDGTVPKRPAKEEFGGLVAALPRKHQAGLELRLYQGFWLPDHWVAGTVVFQRRFAPRPDDVILASYPKCGTTWLKALAFATMTRDAYPAPAQHPLLRLNPHDCIPFLDEIFADGQEAKLEKLPSPRLMNTHMPHTLLPESVTGAAVAGCKVVYICRDPKDMVVSLWHFLRRRQPELPFAELFEHVCDGAVAVGPIWDHVLSYWRASLARPDRVLFLRYEELLQDTGKHVRKLAEFMGRPFSPAEEGAGAVEGVVELCSFEKMKGLEVNKKGSAGAYHAMPRDSFFRKGVAGDWVNHMTPEMATRLDEVVRDKFRGTALAAP

SEQ ID NO: 19569 - DNA, 717 bp, Zea mays subsp. mays
  misc_feature (1)..(717): Ceres Seq. ID no. 13599545
attatcatccacttgctgaagattccccactagaaagaaagaagcatacgattctctccttaccatcctgcttcgattctcaccaaacatggaagccctgattcaccacttcactctcctctccgaccaagcccttgtcgacaaaacattcgaccctgccacgatcgaagacctcatgcgtctcttcgaagtcgattcctacaaggcttgggcagctctcgaagccgagcaacaacaagagctcgaagccgctgaagaatctatccgcgaagccgaagctgaactcgatcgggatatggagtgggggatggaggagtacaggcggacgttggaggagatggagaggatggaggcggcggagcttaaagagcttgaggagaaggcggagactgctcggagaacggggagtttattggagaaagctgctaccatcgccgcgaaaaggcatattgcggcggcgatgggatcagctgctgcgtcgatgagatctgcgtggaagactgcatctgggaacaaagttcatccttcttgatcggagaatatgttcggtgtgtagtgattctgatacatgataattattatcgataatgatcaatgcatgggtccatgtattaggaacgttaggtgatgggttatgtcgatggtgccaaagtggattatattgtattatataattatttcctttaataaacttatcgaaagagctctcttttcaat

SEQ ID NO: 19570 - protein, 147 aa, Zea mays subsp. mays
  peptide (1)..(147): Ceres Seq. ID no. 13599546
  misc_feature (1)..(147): NCBI GI NO: 18406916 NR Description: expressed protein [Arabidopsis thaliana]
  misc_feature (1)..(147): NCBI GI NO: 21553414 NR Description: unknown [Arabidopsis thaliana]
  misc_feature (30)..(147): NCBI GI NO: 23306438 NR Description: Unknown protein [Arabidopsis thaliana]
MEALIHHFTLLSDQALVDKTFDPATIEDLMRLFEVDSYKAWAALEAEQQQELEAAEESIREAEAELDRDMEWGMEEYRRTLEEMERMEAAELKELEEKAETARRTGSLLEKAATIAAKRHIAAAMGSAAASMRSAWKTASGNKVHPS

SEQ ID NO: 19571 - protein, 118 aa, Zea mays subsp. mays
  peptide (1)..(118): Ceres Seq. ID no. 13599547
  misc_feature (1)..(118): NCBI GI NO: 18406916 NR Description: expressed protein [Arabidopsis thaliana]
  misc_feature (1)..(118): NCBI GI NO: 21553414 NR Description: unknown [Arabidopsis thaliana]
  misc_feature (1)..(118): NCBI GI NO: 23306438 NR Description: Unknown protein [Arabidopsis thaliana]
MRLFEVDSYKAWAALEAEQQQELEAAEESIREAEAELDRDMEWGMEEYRRTLEEMERMEAAELKELEEKAETARRTGSLLEKAATIAAKRHIAAAMGSAAASMRSAWKTASGNKVHPS

SEQ ID NO: 19572 - protein, 78 aa, Zea mays subsp. mays
  peptide (1)..(78): Ceres Seq. ID no. 13599548
  misc_feature (1)..(78): NCBI GI NO: 18406916 NR Description: expressed protein [Arabidopsis thaliana]
  misc_feature (1)..(78): NCBI GI NO: 21553414 NR Description: unknown [Arabidopsis thaliana]
  misc_feature (1)..(78): NCBI GI NO: 23306438 NR Description: Unknown protein [Arabidopsis thaliana]
MEWGMEEYRRTLEEMERMEAAELKELEEKAETARRTGSLLEKAATIAAKRHIAAAMGSAAASMRSAWKTASGNKVHPS

SEQ ID NO: 19573 - DNA, 872 bp, Zea mays subsp. mays
  misc_feature (1)..(872): Ceres Seq. ID no. 12590086
acacacacacacgcgagcctcacactctctgatcacagtaggactagcttcagctagcctgcagcgtctgccactccgggcattttcttgcatcaaccacggcaatggccaccgctgatgtccagaacccgacggccgcgctgacggaggaggcgcctgcggtggagacgcccgtcgccgccgaggaggttgctaagacagaggaggtccccgcgccggtggaggccgaagtcgaggcgcctgcccccgtcgaggttgaggcgaccaaggaggacgcaccggccgccgccgagacgaaggagaccaaggagcccgagccagcagctgctgccgagccggaggccgaggcgccgaaagagccagccgtggtcgagacagagaccaaggaggcggtggcagaggccgagccggcggtggcagaggaggtgaaggaggaggcggcgcctgctgccgagccggaggtggcggccgtcgccgaggaagcacctgctgctgcggaggaggagccggccgccgcggtggccagcgtcagcgtgtgaggcgcgcggtggagggcaactggctgggtcagcgtccacgacggcggccgtgtgctcctacgtggcaacggcgtgatgctgagtcagccagtggagtggactggagtgctactttttactacgagtactaggtgtggagtggagtggagtgctatgcgcggggtcgcgtgacgtggcctaaataaaagtgttgtcggtcagcatcgagcgagcgacgcagtgccactctagataatgtatgctttttattttgtcgacaagacatgattcattatttctacggaaaaaaaaaaaaaaaaaagcttatcgataccgtcgacctcgagggggggc

SEQ ID NO: 19574 - protein, 144 aa, Zea mays subsp. mays
  peptide (1)..(144): Ceres Seq. ID no. 12590087
  misc_feature (1)..(141): Pfam Name: BASP1 protein Pfam Description: Brain acid soluble protein 1
  misc_feature (1)..(144): NCBI GI NO: 40287520 NR Description: induced stolon tip protein [Capsicum annuum]
  misc_feature (1)..(137): NCBI GI NO: 418139 NR Description: INDUCED STOLEN TIP PROTEIN TUB8
  misc_feature (1)..(144): NCBI GI NO: 40287520 NR Description: induced stolon tip protein [Capsicum annuum]
  misc_feature (1)..(144): NCBI GI NO: 2961298 NR Description: hypothetical protein [Cicer arietinum]
  misc_feature (1)..(136): NCBI GI NO: 40063301 NR Description: ribosomal protein S16, putative
  misc_feature (1)..(139): NCBI GI NO: 117761 NR Description: Cytochrome c1 precursor
  misc_feature (12)..(144): NCBI GI NO: 7484697 NR Description: hypothetical protein - common buckwheat
  misc_feature (2)..(136): NCBI GI NO: 40063301 NR Description: ribosomal protein S16, putative
  misc_feature (4)..(136): NCBI GI NO: 7484697 NR Description: hypothetical protein - common buckwheat
  misc_feature (1)..(136): NCBI GI NO: 21585695 NR Description: allergenic-related protein Pt2L4
MATADVQNPTAALTEEAPAVETPVAAEEVAKTEEVPAPVEAEVEAPAPVEVEATKEDAPAAAETKETKEPEPAAAAEPEAEAPKEPAVVETETKEAVAEAEPAVAEEVKEEAAPAAEPEVAAVAEEAPAAAEEEPAAAVASVSV

SEQ ID NO: 19575 - DNA, 1174 bp, Zea mays subsp. mays
  misc_feature (1)..(1174): Ceres Seq. ID no. 13599307
aagattagtcactcttcgcaagccaaaaaaaaaaaccccaaattgcggaaggataagcctcgccggcgacgaaatcagggtttcatcgaacaagaagatggctcacgcttgcgtctacacatcggcttcttcactcaggtttacagccggattcgtctccgcgagtcccaacgcctcctctttcgattctcagaagctttccctccctttcgagcctcttcgttcaagaaagacgaagaagttagttagcgtcagaaagaattggaagagctcgtctccgaaggctgtgtactccggcaatctctggacgccggagactccttcgcctcaaggagtttggtccatcagagatgatttacaagtcccttcttcgccgtattttcctgcgtacgctcaaggacaaggaccacctcctatggtgcaagagcgtttccagagtatcataagccagctcttccaatataggattattcgttgtggtggtgctgtggacgatgatatggccaacataatcgtagctcagcttctttaccttgatgctgttgatcctactaaggatattgtcatgtatgtgaactctcctggtggatcagttacagctggcatggctatattcgatactatgaggcatatccgacctgatgtctccactgtctgtgtcggtctagctgctagtatgggagcctttctgcttagtgctggaaccaaagggaaaagatacagtctgccaaactcaaggataatgatccatcagccgcttggtggagctcaaggtggccaaaccgatatcgacattcaggcaaatgaaatgctgcatcacaaggcaaacctaaacggttacctcgcttaccagactggtcaaagcctagagaagataaaccaggacacagaccgtgatttcttcatgagtgctaaagaagcaaaagattacgggcttatcgatggtgttatcatgaaccctcttaaggcccttcagccacttgcagcagcttgatcgcctgaaggtaatgtttcagcttgtcacttacattttggtgggccttttctgaacttagaatgaaaacaaatcagtagctgatacatacatgaacaagtaaagttttctttctctgctgtttgattgaataacaatgacattgtaatgttttgatcctttgtaatcgaattattggcc

SEQ ID NO: 19576 - protein, 330 aa, Zea mays subsp. mays
  peptide (1)..(330): Ceres Seq. ID no. 13599308
  misc_feature (139)..(320): Pfam Name: Pfam Description:  Clp protease
  misc_feature (33)..(330): NCBI GI NO: 18378982 NR Description: ATP-dependent Clp protease proteolytic subunit
  misc_feature (33)..(330): NCBI GI NO: 15485610 NR Description: Clp protease 2 proteolytic subunit
  misc_feature (142)..(330): NCBI GI NO: 23126705 NR Description: hypothetical protein [Nostoc punctiforme]
  misc_feature (142)..(328): NCBI GI NO: 17228733 NR Description: ATP-dependent Clp protease proteolytic subunit
  misc_feature (142)..(328): NCBI GI NO: 23042319 NR Description: hypothetical protein
  misc_feature (142)..(327): NCBI GI NO: 16332037 NR Description: ATP-dependent protease; ClpP
  misc_feature (142)..(317): NCBI GI NO: 23041314 NR Description: hypothetical protein
  misc_feature (142)..(322): NCBI GI NO: 34558484 NR Description: ATP-DEPENDENT CLP PROTEASE PROTEOLYTIC SUBUNIT
  misc_feature (142)..(324): NCBI GI NO: 3023500 NR Description: ATP-dependent Clp protease proteolytic subunit 2
  misc_feature (142)..(324): NCBI GI NO: 25019682 NR Description: ClpP2 [Synechococcus sp. PCC 7942]
RLVTLRKPKKKTPNCGRISLAGDEIRVSSNKKMAHACVYTSASSLRFTAGFVSASPNASSFDSQKLSLPFEPLRSRKTKKLVSVRKNWKSSSPKAVYSGNLWTPETPSPQGVWSIRDDLQVPSSPYFPAYAQGQGPPPMVQERFQSIISQLFQYRIIRCGGAVDDDMANIIVAQLLYLDAVDPTKDIVMYVNSPGGSVTAGMAIFDTMRHIRPDVSTVCVGLAASMGAFLLSAGTKGKRYSLPNSRIMIHQPLGGAQGGQTDIDIQANEMLHHKANLNGYLAYQTGQSLEKINQDTDRDFFMSAKEAKDYGLIDGVIMNPLKALQPLAAA

SEQ ID NO: 19577 - protein, 298 aa, Zea mays subsp. mays
  peptide (1)..(298): Ceres Seq. ID no. 13599309
  misc_feature (107)..(288): Pfam Name: Pfam Description:  Clp protease
  misc_feature (1)..(298): NCBI GI NO: 18378982 NR Description: ATP-dependent Clp protease proteolytic subunit
  misc_feature (1)..(298): NCBI GI NO: 15485610 NR Description: Clp protease 2 proteolytic subunit
  misc_feature (110)..(298): NCBI GI NO: 23126705 NR Description: hypothetical protein [Nostoc punctiforme]
  misc_feature (110)..(296): NCBI GI NO: 17228733 NR Description: ATP-dependent Clp protease proteolytic subunit
  misc_feature (110)..(296): NCBI GI NO: 23042319 NR Description: hypothetical protein
  misc_feature (110)..(295): NCBI GI NO: 16332037 NR Description: ATP-dependent protease; ClpP
  misc_feature (110)..(285): NCBI GI NO: 23041314 NR Description: hypothetical protein
  misc_feature (110)..(290): NCBI GI NO: 34558484 NR Description: ATP-DEPENDENT CLP PROTEASE PROTEOLYTIC SUBUNIT
  misc_feature (110)..(292): NCBI GI NO: 3023500 NR Description: ATP-dependent Clp protease proteolytic subunit 2
  misc_feature (110)..(292): NCBI GI NO: 25019682 NR Description: ClpP2 [Synechococcus sp. PCC 7942]
MAHACVYTSASSLRFTAGFVSASPNASSFDSQKLSLPFEPLRSRKTKKLVSVRKNWKSSSPKAVYSGNLWTPETPSPQGVWSIRDDLQVPSSPYFPAYAQGQGPPPMVQERFQSIISQLFQYRIIRCGGAVDDDMANIIVAQLLYLDAVDPTKDIVMYVNSPGGSVTAGMAIFDTMRHIRPDVSTVCVGLAASMGAFLLSAGTKGKRYSLPNSRIMIHQPLGGAQGGQTDIDIQANEMLHHKANLNGYLAYQTGQSLEKINQDTDRDFFMSAKEAKDYGLIDGVIMNPLKALQPLAAA

SEQ ID NO: 19578 - protein, 192 aa, Zea mays subsp. mays
  peptide (1)..(192): Ceres Seq. ID no. 13599310
  misc_feature (1)..(182): Pfam Name: Pfam Description:  Clp protease
  misc_feature (1)..(192): NCBI GI NO: 18378982 NR Description: ATP-dependent Clp protease proteolytic subunit
  misc_feature (1)..(192): NCBI GI NO: 15485610 NR Description: Clp protease 2 proteolytic subunit
  misc_feature (4)..(192): NCBI GI NO: 23126705 NR Description: hypothetical protein [Nostoc punctiforme]
  misc_feature (4)..(190): NCBI GI NO: 17228733 NR Description: ATP-dependent Clp protease proteolytic subunit
  misc_feature (4)..(190): NCBI GI NO: 23042319 NR Description: hypothetical protein
  misc_feature (4)..(189): NCBI GI NO: 16332037 NR Description: ATP-dependent protease; ClpP
  misc_feature (4)..(179): NCBI GI NO: 23041314 NR Description: hypothetical protein
  misc_feature (4)..(184): NCBI GI NO: 34558484 NR Description: ATP-DEPENDENT CLP PROTEASE PROTEOLYTIC SUBUNIT
  misc_feature (4)..(186): NCBI GI NO: 3023500 NR Description: ATP-dependent Clp protease proteolytic subunit 2
  misc_feature (4)..(186): NCBI GI NO: 25019682 NR Description: ClpP2 [Synechococcus sp. PCC 7942]
MVQERFQSIISQLFQYRIIRCGGAVDDDMANIIVAQLLYLDAVDPTKDIVMYVNSPGGSVTAGMAIFDTMRHIRPDVSTVCVGLAASMGAFLLSAGTKGKRYSLPNSRIMIHQPLGGAQGGQTDIDIQANEMLHHKANLNGYLAYQTGQSLEKINQDTDRDFFMSAKEAKDYGLIDGVIMNPLKALQPLAAA

SEQ ID NO: 19579 - DNA, 850 bp, Zea mays subsp. mays
  misc_feature (1)..(850): Ceres Seq. ID no. 13599311
aaagtttcccatcacttctcacttcacctcctcaaaagattcctcggatcatcatcatcaacaatggctatggctacgcgcgcgatccgctgccagctaccgtctcttgttaccagatgcgaatcctcggaacctattaagcagatccagatccagcagcgaccgagaggaggcgatctagccgagaacgggaagatcgtgcttcagccgaggctctgcacgctgagatcttacggatctgagatgattgtcgctaaaaaagacggcggcggaggcggagatgaaggatctgaggtcgagttagcgtcgccgttttttgagacgctcactgattacatcgagagctcgaagaagagtcaggactttgaaaccatctccggccgtctcgccatgatcgttttcgcggcgaccgtggcggaggaggttgttacggggaactcgctgttcaagaaacttgacgtggaagggttgagtgaagctattggagcgggacttggagctatgggatgcgcagcggtgttcgcgtggctaacgatttcgaggaagagagttgggcggatctttaccgtgagttgcaactcgtttattgactcgttggtcgatcagatcgttgatgggttgttctacgacaccaagcctagtgattggtccgacgaaatctaaatctgtttatagatttcgtctgagtaccactacaaatgtataattagtgtataaacgtcgtctataatagtatactatacgtactatagttgttgttgatcttccattataatttcttcatggtggttgatgaagatgatattgaaagtctgtgtaacttgttcttctatatcaaaatataagaaat

SEQ ID NO: 19580 - protein, 220 aa, Zea mays subsp. mays
  peptide (1)..(220): Ceres Seq. ID no. 13599312
  misc_feature (22)..(220): NCBI GI NO: 18399845 NR Description: stress enhanced protein 2
  misc_feature (51)..(220): NCBI GI NO: 14423380 NR Description: Unknown protein [Arabidopsis thaliana]
  misc_feature (22)..(94): NCBI GI NO: 38345615 NR Description: OSJNBb0003B01.7
KVSHHFSLHLLKRFLGSSSSTMAMATRAIRCQLPSLVTRCESSEPIKQIQIQQRPRGGDLAENGKIVLQPRLCTLRSYGSEMIVAKKDGGGGGDEGSEVELASPFFETLTDYIESSKKSQDFETISGRLAMIVFAATVAEEVVTGNSLFKKLDVEGLSEAIGAGLGAMGCAAVFAWLTISRKRVGRIFTVSCNSFIDSLVDQIVDGLFYDTKPSDWSDEI

SEQ ID NO: 19581 - protein, 199 aa, Zea mays subsp. mays
  peptide (1)..(199): Ceres Seq. ID no. 13599313
  misc_feature (1)..(199): NCBI GI NO: 18399845 NR Description: stress enhanced protein 2
  misc_feature (30)..(199): NCBI GI NO: 14423380 NR Description: Unknown protein [Arabidopsis thaliana]
  misc_feature (1)..(73): NCBI GI NO: 38345615 NR Description: OSJNBb0003B01.7
MAMATRAIRCQLPSLVTRCESSEPIKQIQIQQRPRGGDLAENGKIVLQPRLCTLRSYGSEMIVAKKDGGGGGDEGSEVELASPFFETLTDYIESSKKSQDFETISGRLAMIVFAATVAEEVVTGNSLFKKLDVEGLSEAIGAGLGAMGCAAVFAWLTISRKRVGRIFTVSCNSFIDSLVDQIVDGLFYDTKPSDWSDEI

SEQ ID NO: 19582 - protein, 197 aa, Zea mays subsp. mays
  peptide (1)..(197): Ceres Seq. ID no. 13599314
  misc_feature (1)..(197): NCBI GI NO: 18399845 NR Description: stress enhanced protein 2
  misc_feature (28)..(197): NCBI GI NO: 14423380 NR Description: Unknown protein [Arabidopsis thaliana]
  misc_feature (1)..(71): NCBI GI NO: 38345615 NR Description: OSJNBb0003B01.7
MATRAIRCQLPSLVTRCESSEPIKQIQIQQRPRGGDLAENGKIVLQPRLCTLRSYGSEMIVAKKDGGGGGDEGSEVELASPFFETLTDYIESSKKSQDFETISGRLAMIVFAATVAEEVVTGNSLFKKLDVEGLSEAIGAGLGAMGCAAVFAWLTISRKRVGRIFTVSCNSFIDSLVDQIVDGLFYDTKPSDWSDEI

SEQ ID NO: 19583 - DNA, 1458 bp, Zea mays subsp. mays
  misc_feature (1)..(1458): Ceres Seq. ID no. 13599231
ctaattttacgaagcccgttaatcgcgttaccagcaatccaaaaagctccacaaccccacccttcttcttcctccgccatcgttgcctccgttcaaaagatttcagaaacccacacccacctaaacccatgcagtcccttgcgaaatctcggtcgctcgagtccgtccttcccctcgccgtccacctccagtccatggcgtacgtgaatgtgacgatgcggtggaagaaggactcatcgtttgatgccatccccgagatctcccacgcgcgcgacatccgcccgctcgtctccctcgcacacatcctgtccccatcgcccacccctgtatctgcggtctccaagctcggccccttgctcgagatcccagaccgccgggtcaccgctttcctccgccgcttccccgccgccttcgtcgagtctgtggggcagcacaacatcccctggttccgtctctctgatgccgccacccgactcctgcgggaggagcgggccgtcttcgccgcccgccgtgccgatgtctgtgctcgcctgcgccgcatcgtcttgatgaccccgcgacgccgcctcccgctccacatcgcgcagggcatgctctggcatcttggcattccagagaactacttaaaggacctggatcatgacattgcacaggatggattcaggattgtaatttcaggagatggtgaccatgggagggaattggagctaattgacgatggcaagaatgaagaaatgcctctgtcagttcttcaggtaaatgctatgagaaagttggggtcggtggaagaggtgcctgtcccgctcttcccgtccaagggtcttcggttgaagcaaaagattaaggactggttggaagggttccagaggctcccttatgtatctccatatgagaatttcagccacatcaatccgggtagtgatgtttcagagaagcgggcagtcggggtgctccatgagctgcttagtctgtttgtgacatgctctgctgagaggcgacggttacgctgcctccggcagcacctagggctgccacagaagtttcatcttgtgttcgagcggcaccctcatgtgttctacttattgttaaaggagaagacatgctttgttgtcctcaaagaggcctacatagctggagaagacactgcaattgaggcgcaccccatgttggaagtgttcaagaagtatgttgagttgatggagcagtcacgggaaatcataagatgtcgacggagcgggaagcctattgaactagagtccaaggcatgcggggatagctgagaagaaggatgggaatacatgtgcaaatatgacctctataacaagaatgtggatatgtactcttggtaggagctagtttatttctcattatttgtagagaaatatttctcattatttgtagagaaatacatcaagtgctgaaacaggttggtgactatgatatttaatctgcattctt

SEQ ID NO: 19584 - protein, 425 aa, Zea mays subsp. mays
  peptide (1)..(425): Ceres Seq. ID no. 15222542
  misc_feature (74)..(407): Pfam Name: DUF860 Pfam Description: Plant specific of unknown function
  misc_feature (46)..(411): NCBI GI NO: 15225035 NR Description: hypothetical protein [Arabidopsis thaliana]
  misc_feature (63)..(401): NCBI GI NO: 15238875 NR Description: hypothetical protein [Arabidopsis thaliana]
  misc_feature (66)..(412): NCBI GI NO: 11282335 NR Description: hypothetical protein F14P22
  misc_feature (66)..(412): NCBI GI NO: 18410975 NR Description: expressed protein [Arabidopsis thaliana]
  misc_feature (70)..(412): NCBI GI NO: 21536812 NR Description: unknown [Arabidopsis thaliana]
  misc_feature (63)..(424): NCBI GI NO: 15233788 NR Description: hypothetical protein [Arabidopsis thaliana]
  misc_feature (68)..(424): NCBI GI NO: 15217597 NR Description: hypothetical protein [Arabidopsis thaliana]
  misc_feature (68)..(424): NCBI GI NO: 3413424 NR Description: hypothetical protein [Arabidopsis thaliana]
  misc_feature (74)..(420): NCBI GI NO: 34894384 NR Description: unnamed protein product
  misc_feature (84)..(401): NCBI GI NO: 15224649 NR Description: expressed protein [Arabidopsis thaliana]
NFTKPVNRVTSNPKSSTTPPFFFLRHRCLRSKDFRNPHPPKPMQSLAKSRSLESVLPLAVHLQSMAYVNVTMRWKKDSSFDAIPEISHARDIRPLVSLAHILSPSPTPVSAVSKLGPLLEIPDRRVTAFLRRFPAAFVESVGQHNIPWFRLSDAATRLLREERAVFAARRADVCARLRRIVLMTPRRRLPLHIAQGMLWHLGIPENYLKDLDHDIAQDGFRIVISGDGDHGRELELIDDGKNEEMPLSVLQVNAMRKLGSVEEVPVPLFPSKGLRLKQKIKDWLEGFQRLPYVSPYENFSHINPGSDVSEKRAVGVLHELLSLFVTCSAERRRLRCLRQHLGLPQKFHLVFERHPHVFYLLLKEKTCFVVLKEAYIAGEDTAIEAHPMLEVFKKYVELMEQSREIIRCRRSGKPIELESKACGDS

SEQ ID NO: 19585 - protein, 383 aa, Zea mays subsp. mays
  peptide (1)..(383): Ceres Seq. ID no. 15222543
  misc_feature (32)..(365): Pfam Name: DUF860 Pfam Description: Plant specific of unknown function
  misc_feature (4)..(369): NCBI GI NO: 15225035 NR Description: hypothetical protein [Arabidopsis thaliana]
  misc_feature (21)..(359): NCBI GI NO: 15238875 NR Description: hypothetical protein [Arabidopsis thaliana]
  misc_feature (24)..(370): NCBI GI NO: 11282335 NR Description: hypothetical protein F14P22
  misc_feature (24)..(370): NCBI GI NO: 18410975 NR Description: expressed protein [Arabidopsis thaliana]
  misc_feature (28)..(370): NCBI GI NO: 21536812 NR Description: unknown [Arabidopsis thaliana]
  misc_feature (21)..(382): NCBI GI NO: 15233788 NR Description: hypothetical protein [Arabidopsis thaliana]
  misc_feature (26)..(382): NCBI GI NO: 15217597 NR Description: hypothetical protein [Arabidopsis thaliana]
  misc_feature (26)..(382): NCBI GI NO: 3413424 NR Description: hypothetical protein [Arabidopsis thaliana]
  misc_feature (32)..(378): NCBI GI NO: 34894384 NR Description: unnamed protein product
  misc_feature (42)..(359): NCBI GI NO: 15224649 NR Description: expressed protein [Arabidopsis thaliana]
MQSLAKSRSLESVLPLAVHLQSMAYVNVTMRWKKDSSFDAIPEISHARDIRPLVSLAHILSPSPTPVSAVSKLGPLLEIPDRRVTAFLRRFPAAFVESVGQHNIPWFRLSDAATRLLREERAVFAARRADVCARLRRIVLMTPRRRLPLHIAQGMLWHLGIPENYLKDLDHDIAQDGFRIVISGDGDHGRELELIDDGKNEEMPLSVLQVNAMRKLGSVEEVPVPLFPSKGLRLKQKIKDWLEGFQRLPYVSPYENFSHINPGSDVSEKRAVGVLHELLSLFVTCSAERRRLRCLRQHLGLPQKFHLVFERHPHVFYLLLKEKTCFVVLKEAYIAGEDTAIEAHPMLEVFKKYVELMEQSREIIRCRRSGKPIELESKACGDS

SEQ ID NO: 19586 - protein, 361 aa, Zea mays subsp. mays
  peptide (1)..(361): Ceres Seq. ID no. 15222544
  misc_feature (10)..(343): Pfam Name: DUF860 Pfam Description: Plant specific of unknown function
  misc_feature (1)..(347): NCBI GI NO: 15225035 NR Description: hypothetical protein [Arabidopsis thaliana]
  misc_feature (1)..(337): NCBI GI NO: 15238875 NR Description: hypothetical protein [Arabidopsis thaliana]
  misc_feature (2)..(348): NCBI GI NO: 11282335 NR Description: hypothetical protein F14P22
  misc_feature (2)..(348): NCBI GI NO: 18410975 NR Description: expressed protein [Arabidopsis thaliana]
  misc_feature (6)..(348): NCBI GI NO: 21536812 NR Description: unknown [Arabidopsis thaliana]
  misc_feature (1)..(360): NCBI GI NO: 15233788 NR Description: hypothetical protein [Arabidopsis thaliana]
  misc_feature (4)..(360): NCBI GI NO: 15217597 NR Description: hypothetical protein [Arabidopsis thaliana]
  misc_feature (4)..(360): NCBI GI NO: 3413424 NR Description: hypothetical protein [Arabidopsis thaliana]
  misc_feature (10)..(356): NCBI GI NO: 34894384 NR Description: unnamed protein product
  misc_feature (20)..(337): NCBI GI NO: 15224649 NR Description: expressed protein [Arabidopsis thaliana]
MAYVNVTMRWKKDSSFDAIPEISHARDIRPLVSLAHILSPSPTPVSAVSKLGPLLEIPDRRVTAFLRRFPAAFVESVGQHNIPWFRLSDAATRLLREERAVFAARRADVCARLRRIVLMTPRRRLPLHIAQGMLWHLGIPENYLKDLDHDIAQDGFRIVISGDGDHGRELELIDDGKNEEMPLSVLQVNAMRKLGSVEEVPVPLFPSKGLRLKQKIKDWLEGFQRLPYVSPYENFSHINPGSDVSEKRAVGVLHELLSLFVTCSAERRRLRCLRQHLGLPQKFHLVFERHPHVFYLLLKEKTCFVVLKEAYIAGEDTAIEAHPMLEVFKKYVELMEQSREIIRCRRSGKPIELESKACGDS

SEQ ID NO: 19587 - DNA, 1151 bp, Zea mays subsp. mays
  misc_feature (1)..(1151): Ceres Seq. ID no. 13599316
agtggatcccccgggctgcaggaattcgcacgagaccattacctagaacatcctaatcgaaaaataaaaatctcatcgaccgatcgagagagaatctttcgtcttctatcgaatgggcggaggaagagtcatggcgacggcggcgaaggtggctggaatcggagtcgccaaaggtggattcaggggaggattcggagtccccgcggcggcgaatgatcagtttatcgtgagaaacacctccgcgtctaagccggtttcggcttcgatttcatcggcggttcatccttccgtggaagaagacgcggtggtcatgcgtaaaccggtctgggaagacgagtgggaattcgcggaagtggagacgaagacgatccctagggttgttttcgacaagcctccgtctcttcaggaggctaaagaagccaccgatgatctcaaagatgccctcaacatggcgtgtatggaagggtcaaatgaagttggttctgtttcaagaatgttttcaagttttcaaccttctgagaacagagctgttgaatcagctgttccacaggttgctcttaaggcttttgcttttctcagtgaaaacaccgccgcgcagtctgttgttacttccattgcgtctgacccaaaggtgtgggatgctgtcatggaaaacaaggatctcatgaaatttcttgagaccaacactgcttcaactaaggatgaagctgacaatgacgacaaatctgaactttctagcgagactgaaagtgaagaagacagtgaagagaagccaatccagctcatggagattctgcgagacatgaagctgaaagctgttcaaatgatggaaaatgtatcttcctactttgggggtttgttcaggacagagactttcacagagggtggacaggagaggaagaggatgttgctcaacgaccctactactctctttggattagctgtttgcgttattttcatggtagttctgaaacgtgcttaacaagttccagtttccttttaaacttgccgatatagcttataactactgtgttctctttctgctacttcattatcgtttagagtttttttttttaaactgttctacttatgtttggaatgatttggaacttgcctttgatattttcataaataaaagtatgctttggttg

SEQ ID NO: 19588 - protein, 289 aa, Zea mays subsp. mays
  peptide (1)..(289): Ceres Seq. ID no. 13599317
  misc_feature (1)..(289): NCBI GI NO: 15239670 NR Description: expressed protein [Arabidopsis thaliana]
MGGGRVMATAAKVAGIGVAKGGFRGGFGVPAAANDQFIVRNTSASKPVSASISSAVHPSVEEDAVVMRKPVWEDEWEFAEVETKTIPRVVFDKPPSLQEAKEATDDLKDALNMACMEGSNEVGSVSRMFSSFQPSENRAVESAVPQVALKAFAFLSENTAAQSVVTSIASDPKVWDAVMENKDLMKFLETNTASTKDEADNDDKSELSSETESEEDSEEKPIQLMEILRDMKLKAVQMMENVSSYFGGLFRTETFTEGGQERKRMLLNDPTTLFGLAVCVIFMVVLKRA

SEQ ID NO: 19589 - protein, 283 aa, Zea mays subsp. mays
  peptide (1)..(283): Ceres Seq. ID no. 13599318
  misc_feature (1)..(283): NCBI GI NO: 15239670 NR Description: expressed protein [Arabidopsis thaliana]
MATAAKVAGIGVAKGGFRGGFGVPAAANDQFIVRNTSASKPVSASISSAVHPSVEEDAVVMRKPVWEDEWEFAEVETKTIPRVVFDKPPSLQEAKEATDDLKDALNMACMEGSNEVGSVSRMFSSFQPSENRAVESAVPQVALKAFAFLSENTAAQSVVTSIASDPKVWDAVMENKDLMKFLETNTASTKDEADNDDKSELSSETESEEDSEEKPIQLMEILRDMKLKAVQMMENVSSYFGGLFRTETFTEGGQERKRMLLNDPTTLFGLAVCVIFMVVLKRA

SEQ ID NO: 19590 - protein, 223 aa, Zea mays subsp. mays
  peptide (1)..(223): Ceres Seq. ID no. 13599319
  misc_feature (1)..(223): NCBI GI NO: 15239670 NR Description: expressed protein [Arabidopsis thaliana]
MRKPVWEDEWEFAEVETKTIPRVVFDKPPSLQEAKEATDDLKDALNMACMEGSNEVGSVSRMFSSFQPSENRAVESAVPQVALKAFAFLSENTAAQSVVTSIASDPKVWDAVMENKDLMKFLETNTASTKDEADNDDKSELSSETESEEDSEEKPIQLMEILRDMKLKAVQMMENVSSYFGGLFRTETFTEGGQERKRMLLNDPTTLFGLAVCVIFMVVLKRA

SEQ ID NO: 19591 - DNA, 859 bp, Zea mays subsp. mays
  misc_feature (1)..(859): Ceres Seq. ID no. 13599586
ggaattaaaaacacttttgccttatcatctaaaacccatcgagagttgataagaaaaacctttcaaaatggctcttgttcaatccagaactcttcctcgcgtcaacgtcccgttctcgccgattctgtccacactccaagctccgtcgtctctctttctccggagggaaattcgaccggtagcctcgccgttctcgtcctctaccgccgggagcttttccctctcgccgctgacgcatccaaggaagattctctgccctccacctcgcggcaagtttgttagagaagattatcttgtgaggaaactgtcagctcaagaacttcaagaactggtgaaaggagagaggaaggtgccgctaattgtggatttttatgctacttggtgtggaccttgtattttaatggcccaggaactcgaaatgcttgcagtagagtatgagagcaatgcaatgattgtgaaagtcgatacagatgatgagtacgagtttgctcgcgacatgcaggttcggggattacctacgttgttcttcatcagccctgacccaagcaaagatgcaatcaggacagaagggcttatcccaatacagatgatgcgtgatatcattgacaacgatatgtgaagtcttgtattgatgaaacactttcttgcttaaggattgaatagaatcgcggaaatgtaggattgaagaatctcatctaggtttcatggatgaagaatgaaattatgaaacgagatgaatataacctaagtaagaatcttatttgtatgcactatgcagtgttggttttggtgctgcctttctttttaaaaaaatttatcaacaaaacaaaaaaaaaaaaagcttatcgataccgtcgac

SEQ ID NO: 19592 - protein, 183 aa, Zea mays subsp. mays
  peptide (1)..(183): Ceres Seq. ID no. 15218602
  misc_feature (1)..(183): NCBI GI NO: 21537179 NR Description: thioredoxin, putative [Arabidopsis thaliana]
  misc_feature (1)..(183): NCBI GI NO: 15230779 NR Description: thioredoxin family [Arabidopsis thaliana]
  misc_feature (47)..(183): NCBI GI NO: 8489792 NR Description: putative thioredoxin [Lycopersicon esculentum]
  misc_feature (65)..(183): NCBI GI NO: 34904898 NR Description: similar to thioredoxin
  misc_feature (21)..(180): NCBI GI NO: 21354 NR Description: thioredoxin M precursor (AA -67 to 114)
  misc_feature (90)..(180): NCBI GI NO: 29346866 NR Description: thioredoxin (TRX)
  misc_feature (21)..(180): NCBI GI NO: 2507458 NR Description: Thioredoxin M-type, chloroplast precursor (TRX-M)
  misc_feature (82)..(176): NCBI GI NO: 21673615 NR Description: thioredoxin [Chlorobium tepidum TLS]
  misc_feature (92)..(180): NCBI GI NO: 628902 NR Description: thioredoxin - Chloroflexus aurantiacus
  misc_feature (92)..(180): NCBI GI NO: 1093914 NR Description: thioredoxin
MALVQSRTLPRVNVPFSPILSTLQAPSSLFLRREIRPVASPFSSSTAGSFSLSPLTHPRKILCPPPRGKFVREDYLVRKLSAQELQELVKGERKVPLIVDFYATWCGPCILMAQELEMLAVEYESNAMIVKVDTDDEYEFARDMQVRGLPTLFFISPDPSKDAIRTEGLIPIQMMRDIIDNDM

SEQ ID NO: 19593 - protein, 93 aa, Zea mays subsp. mays
  peptide (1)..(93): Ceres Seq. ID no. 15218603
GIKNTFALSSKTHRELIRKTFQNGSCSIQNSSSRQRPVLADSVHTPSSVVSLSPEGNSTGSLAVLVLYRRELFPLAADASKEDSLPSTSRQVC

SEQ ID NO: 19594 - DNA, 930 bp, Zea mays subsp. mays
  misc_feature (1)..(930): Ceres Seq. ID no. 13599585
acacattcaaactaataactctcaaaaactgagagcagaagagagtagaggagaaacaaatgtccatatccatggcgctattctctccgccgatctcttcttcagttcaaaaccccaagatctcgttccctctcctctccaccaagcgcttctctctcctctccgtcactcgcgcttcctccgattctgctgcagtctctgcaaccaccgtagagattccgaagcccgcgtcggtttctgtagaggaggtgccatctaaacctcctgcggaaagctcctccgacgagactgatctgccaaccacggcgacgggaatcaagtttcaggatgcgaagtgggttaatggaacctgggatctgaaacagttcgagaaagacgggaaaaccgattgggattctattatcgtcgctgaggcaaagaggagaaagtggcttgaagataacccagaaacaactactaacgctgagcctgttcttttcgacacctcgatcattccatggtgggcgtggatgaagagataccatctaccagaagctgaactcctcaatggtcgtgctgcgatgatagggttcttcatggcttactttgttgacagccttaccggagtaggacttgttgatcaaatgggaaacttcttctgcaaaacactcttgtttgtggctgtagctggagttcttttcatccgcaagaacgaagatttagataagctcaagggtctgatcgaagagacgacgctatatgacaagcaatggcaagcggcttggaaagagccggaatcatcatcatcgacgctttcttcaaagaagtgaacaaaatctttctcgctttttgtttcctcttttctcatgtgatgtttgtgatcagtgaaaaaagtctcaagataaacgcaaaatctatttggctttgaaaaaatctctttaaagtagtccc

SEQ ID NO: 19595 - protein, 249 aa, Zea mays subsp. mays
  peptide (1)..(249): Ceres Seq. ID no. 15218600
  misc_feature (1)..(249): NCBI GI NO: 30695110 NR Description: Lil3 protein [Arabidopsis thaliana]
  misc_feature (5)..(249): NCBI GI NO: 8978078 NR Description: Lil3 protein [Arabidopsis thaliana]
  misc_feature (19)..(249): NCBI GI NO: 21555799 NR Description: Lil3 protein [Arabidopsis thaliana]
  misc_feature (19)..(249): NCBI GI NO: 7485188 NR Description: hypothetical protein - Arabidopsis thaliana
  misc_feature (19)..(249): NCBI GI NO: 18414927 NR Description: Lil3 protein [Arabidopsis thaliana]
MSISMALFSPPISSSVQNPKISFPLLSTKRFSLLSVTRASSDSAAVSATTVEIPKPASVSVEEVPSKPPAESSSDETDLPTTATGIKFQDAKWVNGTWDLKQFEKDGKTDWDSIIVAEAKRRKWLEDNPETTTNAEPVLFDTSIIPWWAWMKRYHLPEAELLNGRAAMIGFFMAYFVDSLTGVGLVDQMGNFFCKTLLFVAVAGVLFIRKNEDLDKLKGLIEETTLYDKQWQAAWKEPESSSSTLSSKK

SEQ ID NO: 19596 - protein, 245 aa, Zea mays subsp. mays
  peptide (1)..(245): Ceres Seq. ID no. 15218601
  misc_feature (1)..(245): NCBI GI NO: 30695110 NR Description: Lil3 protein [Arabidopsis thaliana]
  misc_feature (1)..(245): NCBI GI NO: 8978078 NR Description: Lil3 protein [Arabidopsis thaliana]
  misc_feature (15)..(245): NCBI GI NO: 21555799 NR Description: Lil3 protein [Arabidopsis thaliana]
  misc_feature (15)..(245): NCBI GI NO: 7485188 NR Description: hypothetical protein - Arabidopsis thaliana
  misc_feature (15)..(245): NCBI GI NO: 18414927 NR Description: Lil3 protein [Arabidopsis thaliana]
MALFSPPISSSVQNPKISFPLLSTKRFSLLSVTRASSDSAAVSATTVEIPKPASVSVEEVPSKPPAESSSDETDLPTTATGIKFQDAKWVNGTWDLKQFEKDGKTDWDSIIVAEAKRRKWLEDNPETTTNAEPVLFDTSIIPWWAWMKRYHLPEAELLNGRAAMIGFFMAYFVDSLTGVGLVDQMGNFFCKTLLFVAVAGVLFIRKNEDLDKLKGLIEETTLYDKQWQAAWKEPESSSSTLSSKK

SEQ ID NO: 19597 - DNA, 705 bp, Zea mays subsp. mays
  misc_feature (1)..(705): Ceres Seq. ID no. 13599321
acatcctaatcgaaaaatcttcctcatcgcagcaatggcgtcttccttctcactcacgagtttcatctcctccatctccccattcaaacctcagaccaaacctgctcctcctcctccgagcctcgctctccctactccaacagtctctcacaggcggaagaacgatctcgccatcgagaaacctccttcttccaccgcttcgctctcctcggagctcgctcccgtgatatgcccgtcgcttgcgtactcgaacacgctcttcttcagcagctcggggtacaacgtgcaggtgtttgttgaagataacgagtctgaggagaggctggtgaatcgtttcagaagggaagtgatgagaaccggagttatacaggaatgtaagcgaaggagatacttcgagaacaaacaggatgagaagaagcgtaggactcgtgatgctgctaagcgtaacaagaaaaggcgtccttttgcaaagtttactcaagagactagagaagaagcagcagcggcagcatccaagagtaagaagaaggatgaagaagaagacaactgggagatgcctgatggagatgtaccttcttgaacactctttcagtatatagatcttcttccttttcggttataagttggtacattgtaacttcagatgagcatataacttgttttcggtgatgagttcttgccaatgttaaggcatctatctttgcc

SEQ ID NO: 19598 - protein, 192 aa, Zea mays subsp. mays
  peptide (1)..(192): Ceres Seq. ID no. 15222560
  misc_feature (95)..(148): Pfam Name: Pfam Description:  Ribosomal protein S21
  misc_feature (12)..(192): NCBI GI NO: 18405254 NR Description: expressed protein [Arabidopsis thaliana]
  misc_feature (12)..(192): NCBI GI NO: 14532554 NR Description: AT3g27160/MYF5_3 [Arabidopsis thaliana]
  misc_feature (9)..(192): NCBI GI NO: 17154781 NR Description: ribosome-like protein [Cucumis sativus]
  misc_feature (11)..(155): NCBI GI NO: 15242698 NR Description: hypothetical protein [Arabidopsis thaliana]
  misc_feature (95)..(157): NCBI GI NO: 24214929 NR Description: Ribosomal protein S21
HPNRKIFLIAAMASSFSLTSFISSISPFKPQTKPAPPPPSLALPTPTVSHRRKNDLAIEKPPSSTASLSSELAPVICPSLAYSNTLFFSSSGYNVQVFVEDNESEERLVNRFRREVMRTGVIQECKRRRYFENKQDEKKRRTRDAAKRNKKRRPFAKFTQETREEAAAAASKSKKKDEEEDNWEMPDGDVPS

SEQ ID NO: 19599 - protein, 181 aa, Zea mays subsp. mays
  peptide (1)..(181): Ceres Seq. ID no. 15222561
  misc_feature (84)..(137): Pfam Name: Pfam Description:  Ribosomal protein S21
  misc_feature (1)..(181): NCBI GI NO: 18405254 NR Description: expressed protein [Arabidopsis thaliana]
  misc_feature (1)..(181): NCBI GI NO: 14532554 NR Description: AT3g27160/MYF5_3 [Arabidopsis thaliana]
  misc_feature (1)..(181): NCBI GI NO: 17154781 NR Description: ribosome-like protein [Cucumis sativus]
  misc_feature (1)..(144): NCBI GI NO: 15242698 NR Description: hypothetical protein [Arabidopsis thaliana]
  misc_feature (84)..(146): NCBI GI NO: 24214929 NR Description: Ribosomal protein S21
MASSFSLTSFISSISPFKPQTKPAPPPPSLALPTPTVSHRRKNDLAIEKPPSSTASLSSELAPVICPSLAYSNTLFFSSSGYNVQVFVEDNESEERLVNRFRREVMRTGVIQECKRRRYFENKQDEKKRRTRDAAKRNKKRRPFAKFTQETREEAAAAASKSKKKDEEEDNWEMPDGDVPS

SEQ ID NO: 19600 - DNA, 1200 bp, Zea mays subsp. mays
  misc_feature (1)..(1200): Ceres Seq. ID no. 12635014
tcatctcccttgatcaaagatcagagctcaggagctcgcagcaatggagccgcaggccgagcccaagcccatcccgctgatgacgccgtacaagatgggcgcgtcgctagacctcgcccacagggtggtgctggcccctctcacgcggcagcgctcctacggcaacgtgccgcagccgcacgccgccgtctactacgggcagcgcgccacgcccggcggcatgctcatcacggaggccacgggggtctccgacacggcgcaggggtacaccgacacccctggcgtctggacggcggagcaggccgaggcgtggcggcccgtcgtcgacgccgtgcacgccaagggcgccctcttcttctgccagctctggcacgtcggccgcgtgtcgaagtacgggttccagcccggcggcgccgcgccggtgtcgagcacggagaggatggtcgggccgcaggtcaggcacgacggctccaccgaggagttctcgccgccgaggaggctggcggcggaggagatccccatgatcgtcgacgacttcaggaaagccgcacgcaacgccatcaacgccggattcgacggcgtcgagatccacggcggcaacgggtacctcatcgagcagttcctcaaggacagcgccaacgaccgggacgacggctacggcggcaacctggaaaaccggtgccgcttcgcgctcgaggtggtggacgccgtcgccaaggaggtgggtgcccaccgcgtgggcatccgcctctcgcccttcatggactacatggactgccacgactccgacccacacgcgctcggccttcacatggccacgaagctcaatgaccacggcatcctttatctccacatgattgagccccggatggccctcgtcgacggccggcgcgtggtcccgcaccgcctgctgccctacagggaggccttcaagggcacctttattgcgaatggcgggtacgaccgggaggagggggacaaggcggtcgcatcggggtatgccgacctcgtctcgtttgggcggctcttccttgcgaacccagacctgccgaagaggctagagctcaacgcgccgcttaacaagtataataggttgacgttttacatctccgatcccgtcgtcggctacaccgactacccgtttcttccttgatgtgtcattgaaccatgaataatgattgatccatatattgccatgtg

SEQ ID NO: 19601 - protein, 369 aa, Zea mays subsp. mays
  peptide (1)..(369): Ceres Seq. ID no. 12635015
  misc_feature (11)..(346): Pfam Name: Pfam Description:  NADH:flavin oxidoreductase / NADH oxidase family
  misc_feature (10)..(368): NCBI GI NO: 23495288 NR Description: 12-oxophytodienoic acid reductase [Oryza sativa]
  misc_feature (1)..(368): NCBI GI NO: 15223138 NR Description: 12-oxophytodienoate reductase
  misc_feature (1)..(368): NCBI GI NO: 21593388 NR Description: 12-oxophytodienoate reductase (OPR1)
  misc_feature (5)..(368): NCBI GI NO: 15223140 NR Description: 12-oxophytodienoate reductase
  misc_feature (1)..(368): NCBI GI NO: 2765083 NR Description: 12-oxophytodienoate reductase
  misc_feature (5)..(368): NCBI GI NO: 26450549 NR Description: putative 12-oxophytodienoate reductase OPR2
  misc_feature (2)..(368): NCBI GI NO: 40645459 NR Description: LEDI-5c protein [Lithospermum erythrorhizon]
  misc_feature (2)..(368): NCBI GI NO: 7449901 NR Description: probable 12-oxophytodienoate reductase (EC1
  misc_feature (1)..(368): NCBI GI NO: 7449902 NR Description: probable 12-oxophytodienoate reductase (EC1
  misc_feature (9)..(368): NCBI GI NO: 40645349 NR Description: hypothetical protein [Pisum sativum]
MEPQAEPKPIPLMTPYKMGASLDLAHRVVLAPLTRQRSYGNVPQPHAAVYYGQRATPGGMLITEATGVSDTAQGYTDTPGVWTAEQAEAWRPVVDAVHAKGALFFCQLWHVGRVSKYGFQPGGAAPVSSTERMVGPQVRHDGSTEEFSPPRRLAAEEIPMIVDDFRKAARNAINAGFDGVEIHGGNGYLIEQFLKDSANDRDDGYGGNLENRCRFALEVVDAVAKEVGAHRVGIRLSPFMDYMDCHDSDPHALGLHMATKLNDHGILYLHMIEPRMALVDGRRVVPHRLLPYREAFKGTFIANGGYDREEGDKAVASGYADLVSFGRLFLANPDLPKRLELNAPLNKYNRLTFYISDPVVGYTDYPFLP

SEQ ID NO: 19602 - protein, 357 aa, Zea mays subsp. mays
  peptide (1)..(357): Ceres Seq. ID no. 12635016
  misc_feature (1)..(334): Pfam Name: Pfam Description:  NADH:flavin oxidoreductase / NADH oxidase family
  misc_feature (1)..(356): NCBI GI NO: 23495288 NR Description: 12-oxophytodienoic acid reductase [Oryza sativa]
  misc_feature (1)..(356): NCBI GI NO: 15223138 NR Description: 12-oxophytodienoate reductase
  misc_feature (1)..(356): NCBI GI NO: 21593388 NR Description: 12-oxophytodienoate reductase (OPR1)
  misc_feature (1)..(356): NCBI GI NO: 15223140 NR Description: 12-oxophytodienoate reductase
  misc_feature (1)..(356): NCBI GI NO: 2765083 NR Description: 12-oxophytodienoate reductase
  misc_feature (1)..(356): NCBI GI NO: 26450549 NR Description: putative 12-oxophytodienoate reductase OPR2
  misc_feature (1)..(356): NCBI GI NO: 40645459 NR Description: LEDI-5c protein [Lithospermum erythrorhizon]
  misc_feature (1)..(356): NCBI GI NO: 7449901 NR Description: probable 12-oxophytodienoate reductase (EC1
  misc_feature (1)..(356): NCBI GI NO: 7449902 NR Description: probable 12-oxophytodienoate reductase (EC1
  misc_feature (1)..(356): NCBI GI NO: 40645349 NR Description: hypothetical protein [Pisum sativum]
MTPYKMGASLDLAHRVVLAPLTRQRSYGNVPQPHAAVYYGQRATPGGMLITEATGVSDTAQGYTDTPGVWTAEQAEAWRPVVDAVHAKGALFFCQLWHVGRVSKYGFQPGGAAPVSSTERMVGPQVRHDGSTEEFSPPRRLAAEEIPMIVDDFRKAARNAINAGFDGVEIHGGNGYLIEQFLKDSANDRDDGYGGNLENRCRFALEVVDAVAKEVGAHRVGIRLSPFMDYMDCHDSDPHALGLHMATKLNDHGILYLHMIEPRMALVDGRRVVPHRLLPYREAFKGTFIANGGYDREEGDKAVASGYADLVSFGRLFLANPDLPKRLELNAPLNKYNRLTFYISDPVVGYTDYPFLP

SEQ ID NO: 19603 - protein, 352 aa, Zea mays subsp. mays
  peptide (1)..(352): Ceres Seq. ID no. 12635017
  misc_feature (1)..(329): Pfam Name: Pfam Description:  NADH:flavin oxidoreductase / NADH oxidase family
  misc_feature (1)..(351): NCBI GI NO: 23495288 NR Description: 12-oxophytodienoic acid reductase [Oryza sativa]
  misc_feature (1)..(351): NCBI GI NO: 15223138 NR Description: 12-oxophytodienoate reductase
  misc_feature (1)..(351): NCBI GI NO: 21593388 NR Description: 12-oxophytodienoate reductase (OPR1)
  misc_feature (1)..(351): NCBI GI NO: 15223140 NR Description: 12-oxophytodienoate reductase
  misc_feature (1)..(351): NCBI GI NO: 2765083 NR Description: 12-oxophytodienoate reductase
  misc_feature (1)..(351): NCBI GI NO: 26450549 NR Description: putative 12-oxophytodienoate reductase OPR2
  misc_feature (1)..(351): NCBI GI NO: 40645459 NR Description: LEDI-5c protein [Lithospermum erythrorhizon]
  misc_feature (1)..(351): NCBI GI NO: 7449901 NR Description: probable 12-oxophytodienoate reductase (EC1
  misc_feature (1)..(351): NCBI GI NO: 7449902 NR Description: probable 12-oxophytodienoate reductase (EC1
  misc_feature (1)..(351): NCBI GI NO: 40645349 NR Description: hypothetical protein [Pisum sativum]
MGASLDLAHRVVLAPLTRQRSYGNVPQPHAAVYYGQRATPGGMLITEATGVSDTAQGYTDTPGVWTAEQAEAWRPVVDAVHAKGALFFCQLWHVGRVSKYGFQPGGAAPVSSTERMVGPQVRHDGSTEEFSPPRRLAAEEIPMIVDDFRKAARNAINAGFDGVEIHGGNGYLIEQFLKDSANDRDDGYGGNLENRCRFALEVVDAVAKEVGAHRVGIRLSPFMDYMDCHDSDPHALGLHMATKLNDHGILYLHMIEPRMALVDGRRVVPHRLLPYREAFKGTFIANGGYDREEGDKAVASGYADLVSFGRLFLANPDLPKRLELNAPLNKYNRLTFYISDPVVGYTDYPFLP

SEQ ID NO: 19604 - DNA, 727 bp, Zea mays subsp. mays
  misc_feature (1)..(727): Ceres Seq. ID no. 13599232
agtgttttctagtgactcggaaaggaaagcgtgactcgctctgaagactcagtgagggctctgtgatcggagttgtaaaaatgtcgacggtggtagatcggagtgtatcgacgctgaatccaaacgcgccggcgttcgatccggtgggattccgtgaggtagaggatttctctcccaagtggtgggagctggtgacaacatccaagtggttccgtgacttctggctcagtgccaactcggaggagtatgagttcggcgagttctcagatatggaggacgagttcgaggagctagtcatgacgtcatccggtgagaatgagatggatggatcttcggtgagagaatcagatgttgggaggtacttgaaggtgcttctgagcatggcgaagtctacgaaagggaagctttacagatctaatgtgtcttgttctgccaagtataaccagaagaagatgaacccaaacttctactgtcgccggaaccatcacatctatcagcctcggtgaaaaggttgcagcagcgtctgggaaagaaataaaagctcatctctaaatctcttgtgttttcatgaatgagatactctcatctttacttcttgttctgtactacttgttcctctgattatgtgaatattcttctgttttgtgctttgcgtttatcaaaataatttcgcatagaaaaaaaaaaaaaaaaaagcttatcgataccgtcgacctcgagggggggc

SEQ ID NO: 19605 - protein, 141 aa, Zea mays subsp. mays
  peptide (1)..(141): Ceres Seq. ID no. 13599233
  misc_feature (1)..(141): NCBI GI NO: 18414176 NR Description: expressed protein [Arabidopsis thaliana]
  misc_feature (1)..(141): NCBI GI NO: 21592596 NR Description: unknown [Arabidopsis thaliana]
  misc_feature (1)..(123): NCBI GI NO: 7485087 NR Description: hypothetical protein - Arabidopsis thaliana
  misc_feature (10)..(113): NCBI GI NO: 8489786 NR Description: dehydration-induced protein ERD15
  misc_feature (1)..(67): NCBI GI NO: 15227351 NR Description: ERD15 protein [Arabidopsis thaliana]
  misc_feature (1)..(67): NCBI GI NO: 21592689 NR Description: ERD15 protein [Arabidopsis thaliana]
  misc_feature (8)..(57): NCBI GI NO: 34395186 NR Description: unknown protein
  misc_feature (9)..(57): NCBI GI NO: 34899128 NR Description: P0496C02.30
MSTVVDRSVSTLNPNAPAFDPVGFREVEDFSPKWWELVTTSKWFRDFWLSANSEEYEFGEFSDMEDEFEELVMTSSGENEMDGSSVRESDVGRYLKVLLSMAKSTKGKLYRSNVSCSAKYNQKKMNPNFYCRRNHHIYQPR

SEQ ID NO: 19606 - protein, 78 aa, Zea mays subsp. mays
  peptide (1)..(78): Ceres Seq. ID no. 13599234
  misc_feature (1)..(78): NCBI GI NO: 18414176 NR Description: expressed protein [Arabidopsis thaliana]
  misc_feature (1)..(78): NCBI GI NO: 21592596 NR Description: unknown [Arabidopsis thaliana]
  misc_feature (1)..(60): NCBI GI NO: 7485087 NR Description: hypothetical protein - Arabidopsis thaliana
  misc_feature (1)..(50): NCBI GI NO: 8489786 NR Description: dehydration-induced protein ERD15
MEDEFEELVMTSSGENEMDGSSVRESDVGRYLKVLLSMAKSTKGKLYRSNVSCSAKYNQKKMNPNFYCRRNHHIYQPR

SEQ ID NO: 19607 - DNA, 852 bp, Zea mays subsp. mays
  misc_feature (1)..(852): Ceres Seq. ID no. 13599581
atctctcttcatttccctctctcgaacaagaagacaacaactcaaaacgcagagaagatctccagaacgacaccgtttcgtagcaaagatgctttcttcgtctccaacctccttcactcatccattcctctccacgtctccgcctctctcccccatatctccgccgtctcgctcacctcgcctcccgcctcctctcgtctccgcctcttgctcctacacctgcacggaggatccgccgaggctgcaccagatcccgcggcgaacgacgccggcgaacgcttcgctctacgagattctagaggttcctcgcggcgcgacgagccaggatatcaaatcggcttaccggaggttggctaggatctgccaccccgacgtggcggcgggaaccgatcggagtaactcttcggcggatgagttcatgaagatccacgcggcgtactgtacgctctctgatcctgacaaacgctctgtttacgatcggaggatgcttcgtcggagccgtccgttgaccgtcagcacctccgggatgggcagttacgttggacggaactgggaaaccgatcagtgctggtagcgagttgactcggtgaccgagttagctcgagttaattcgaattaataaaacacggttgtaaaaataggaagcgataaaagctggggttagcgatgtaattaacagtagtattagtgtgctaacatacgccaagagctaaacgtacgctccctctccctgcccacggccacgggcgatcagcgccgtttgcatcgtgttacgtaggatctacgtgtgttttttttttaccttctgaatcctgtaatacttatcaatgaaaacaaaataaacactgttat

SEQ ID NO: 19608 - protein, 190 aa, Zea mays subsp. mays
  peptide (1)..(190): Ceres Seq. ID no. 13599582
  misc_feature (94)..(162): Pfam Name: Pfam Description:  DnaJ domain
  misc_feature (30)..(190): NCBI GI NO: 15233446 NR Description: DnaJ protein family [Arabidopsis thaliana]
  misc_feature (30)..(190): NCBI GI NO: 9843641 NR Description: J11 protein [Arabidopsis thaliana]
  misc_feature (30)..(190): NCBI GI NO: 15227919 NR Description: J11 protein, putative [Arabidopsis thaliana]
  misc_feature (53)..(190): NCBI GI NO: 7488763 NR Description: DnaJ protein homolog - kidney bean (fragment)
  misc_feature (56)..(190): NCBI GI NO: 15231204 NR Description: DnaJ protein family [Arabidopsis thaliana]
  misc_feature (32)..(160): NCBI GI NO: 6691127 NR Description: DnaJ-like protein [Arabidopsis thaliana]
  misc_feature (32)..(160): NCBI GI NO: 15236355 NR Description: DnaJ protein family [Arabidopsis thaliana]
  misc_feature (32)..(160): NCBI GI NO: 30682610 NR Description: DnaJ protein family [Arabidopsis thaliana]
  misc_feature (41)..(190): NCBI GI NO: 34894012 NR Description: P0672D08.16
  misc_feature (79)..(160): NCBI GI NO: 34863272 NR Description: similar to hypothetical protein FLJ40417
SLFISLSRTRRQQLKTQRRSPERHRFVAKMLSSSPTSFTHPFLSTSPPLSPISPPSRSPRLPPPLVSASCSYTCTEDPPRLHQIPRRTTPANASLYEILEVPRGATSQDIKSAYRRLARICHPDVAAGTDRSNSSADEFMKIHAAYCTLSDPDKRSVYDRRMLRRSRPLTVSTSGMGSYVGRNWETDQCW

SEQ ID NO: 19609 - protein, 161 aa, Zea mays subsp. mays
  peptide (1)..(161): Ceres Seq. ID no. 13599583
  misc_feature (65)..(133): Pfam Name: Pfam Description:  DnaJ domain
  misc_feature (1)..(161): NCBI GI NO: 15233446 NR Description: DnaJ protein family [Arabidopsis thaliana]
  misc_feature (1)..(161): NCBI GI NO: 9843641 NR Description: J11 protein [Arabidopsis thaliana]
  misc_feature (1)..(161): NCBI GI NO: 15227919 NR Description: J11 protein, putative [Arabidopsis thaliana]
  misc_feature (24)..(161): NCBI GI NO: 7488763 NR Description: DnaJ protein homolog - kidney bean (fragment)
  misc_feature (27)..(161): NCBI GI NO: 15231204 NR Description: DnaJ protein family [Arabidopsis thaliana]
  misc_feature (3)..(131): NCBI GI NO: 6691127 NR Description: DnaJ-like protein [Arabidopsis thaliana]
  misc_feature (3)..(131): NCBI GI NO: 30682610 NR Description: DnaJ protein family [Arabidopsis thaliana]
  misc_feature (3)..(131): NCBI GI NO: 15236355 NR Description: DnaJ protein family [Arabidopsis thaliana]
  misc_feature (12)..(161): NCBI GI NO: 34894012 NR Description: P0672D08.16
  misc_feature (50)..(131): NCBI GI NO: 34863272 NR Description: similar to hypothetical protein FLJ40417
MLSSSPTSFTHPFLSTSPPLSPISPPSRSPRLPPPLVSASCSYTCTEDPPRLHQIPRRTTPANASLYEILEVPRGATSQDIKSAYRRLARICHPDVAAGTDRSNSSADEFMKIHAAYCTLSDPDKRSVYDRRMLRRSRPLTVSTSGMGSYVGRNWETDQCW

SEQ ID NO: 19610 - protein, 118 aa, Zea mays subsp. mays
  peptide (1)..(118): Ceres Seq. ID no. 13599584
ISLHFPLSNKKTTTQNAEKISRTTPFRSKDAFFVSNLLHSSIPLHVSASLPHISAVSLTSPPASSRLRLLLLHLHGGSAEAAPDPAANDAGERFALRDSRGSSRRDEPGYQIGLPEVG

SEQ ID NO: 19611 - DNA, 1912 bp, Zea mays subsp. mays
  misc_feature (1)..(1912): Ceres Seq. ID no. 13599322
aatcgccagcgagagccatgccgcctcctcccctgccctcgccgagcctgaccgactgaccccacctcgccactgttctttccctgccacctgggccccacagcgcccctttaccgtcaccaccaaatccccaaatcccggaggcacgaggagggaattcgtcgcctgaccgatcggccgatccactgccgtcggcaccccaatccgccgctgccgccatgttcaacaagatcatcaagaggggaaaccgcaagggcgcgcgcggggacaacgcggaggccgccgcgcgccccgcagcgccctcgtcgtcctccgggagcggcggcggcggcgcgggggcagccgcgcccgtcaccgtcaaccacgcctcccgggccacagcgccttcgccgtcctcgcccacttcgccgcacgtggcgccgtctgcgcttgcgaccaacccggcgggggcggcgtccccgccactcctcgagccgctcccgcttctccgcgacgtcgccgccgcggatcgcccgggcctcttcctccgcaagctccgcatcgtcgccgcgctctttgacctttcggactcgctcaagcacccacgggagaaggaggccaaacgccaggctctcctcgagctcgtcgattacgtgcaggctccagctcaggcagcgggcgccaacgcacccacgcgcctcccggaccacgtccaggtgttaaacacaggcgctcgtcgccgccatctctgccaacatcttccgcccgctaccacccgcgctgcacgaatccgccgccgcgatcgaccccggcgccgcgcccgacgaggaggaggagccatacctcgacccctcctggccacacctccagctcgtctatgagctccttctccgatacgttgtttcgcccgacaccgacaccaaggtcgccaagcggtatgtggaccacgccttcgtcctccgtctcctcgacctctttgactccgaggatccgcgtgagcgcgagtacctcaagaccgtgctccaccgcatctatggcaagttcatggtacaccgaccattcattcgcaaggccatcaacaatgtgttctaccggttcatctttgaaacgcagcgccacaatggcataggggagctccttgagatccttggaagcatcattaatggctttgccttgccaatgaaggaggagcacaaactattccttgcccgtgctctcatccccctgcataagcccaaatctgttgcgatctaccatcagcagctgtcctattgtattgttcagttcgttgagaaggactacaaattagcagatactgtgattaggggtctgctcaaatactggccagtcacaaactgccagaaagaggtgttgtttctgggggagcttgaagaagtgctcgaggcaacacagcctgcagagttccagcggtgcatggtgccactgttcaagcagattggacgatgccttaacagttctcacttccaggttgctgaacgtgctttgttcttgtggaacaatgatcatattgtaagcttgatagcacaaaatcgtgttgttatatttccaattatatttgaagctcttgagaggaatatacagagccactggaatcaagcagttcatggtctcactgcaaatgtgcgcaagatgtttttggacatggacagtgaactatttgaagagtgccagcagcagtacatggagaaacaagcgaaagccaaagagatacaggaacaacgagaatcagcatggagacaattggaagctgttgttgctgccaaggctgctggagatgacatggttttggtcaactaggtaatataacctttcgcttcatttatttgttagtgcttgtgttcgtaagtttttctagtcttgtaacctaaaaccgtactactctgtttatgtcctcttgttcttgctttgtttt

SEQ ID NO: 19612 - protein, 257 aa, Zea mays subsp. mays
  peptide (1)..(257): Ceres Seq. ID no. 15222562
  misc_feature (1)..(245): Pfam Name: B56 family Pfam Description: Protein phosphatase 2A regulatory B subunit
  misc_feature (1)..(250): NCBI GI NO: 15232782 NR Description: B' regulatory subunit of PP2A (AtB'beta)
  misc_feature (1)..(254): NCBI GI NO: 15242766 NR Description: B' regulatory subunit of PP2A (AtB'alpha)
  misc_feature (1)..(248): NCBI GI NO: 15233133 NR Description: protein phosphatase 2A regulatory subunit B-relatedprotein
  misc_feature (1)..(256): NCBI GI NO: 7485149 NR Description: hypothetical protein - Arabidopsis thaliana
  misc_feature (1)..(256): NCBI GI NO: 18414444 NR Description: B' regulatory subunit of PP2A (AtB'gamma)
  misc_feature (1)..(256): NCBI GI NO: 20147343 NR Description: AT4g15410/dl3750w [Arabidopsis thaliana]
  misc_feature (1)..(252): NCBI GI NO: 21530786 NR Description: putative protein phosphatase 2A B'teta subunit
  misc_feature (1)..(257): NCBI GI NO: 21530784 NR Description: putative protein phosphatase 2A B'zeta subunit
  misc_feature (1)..(249): NCBI GI NO: 15230961 NR Description: B regulatory subunit of protein phosphatase 2A -related
  misc_feature (1)..(243): NCBI GI NO: 21537284 NR Description: B  regulatory subunit of protein phosphatase 2A
MVHRPFIRKAINNVFYRFIFETQRHNGIGELLEILGSIINGFALPMKEEHKLFLARALIPLHKPKSVAIYHQQLSYCIVQFVEKDYKLADTVIRGLLKYWPVTNCQKEVLFLGELEEVLEATQPAEFQRCMVPLFKQIGRCLNSSHFQVAERALFLWNNDHIVSLIAQNRVVIFPIIFEALERNIQSHWNQAVHGLTANVRKMFLDMDSELFEECQQQYMEKQAKAKEIQEQRESAWRQLEAVVAAKAAGDDMVLVN

SEQ ID NO: 19613 - protein, 213 aa, Zea mays subsp. mays
  peptide (1)..(213): Ceres Seq. ID no. 15222563
  misc_feature (86)..(141): Pfam Name: B56 family Pfam Description: Protein phosphatase 2A regulatory B subunit
  misc_feature (1)..(141): NCBI GI NO: 15232782 NR Description: B' regulatory subunit of PP2A (AtB'beta)
  misc_feature (1)..(178): NCBI GI NO: 15242766 NR Description: B' regulatory subunit of PP2A (AtB'alpha)
  misc_feature (1)..(177): NCBI GI NO: 15233133 NR Description: protein phosphatase 2A regulatory subunit B-relatedprotein
  misc_feature (25)..(139): NCBI GI NO: 7485149 NR Description: hypothetical protein - Arabidopsis thaliana
  misc_feature (25)..(139): NCBI GI NO: 18414444 NR Description: B' regulatory subunit of PP2A (AtB'gamma)
  misc_feature (25)..(139): NCBI GI NO: 20147343 NR Description: AT4g15410/dl3750w [Arabidopsis thaliana]
  misc_feature (77)..(167): NCBI GI NO: 21530786 NR Description: putative protein phosphatase 2A B'teta subunit
  misc_feature (4)..(142): NCBI GI NO: 15230961 NR Description: B regulatory subunit of protein phosphatase 2A -related
  misc_feature (1)..(139): NCBI GI NO: 21530784 NR Description: putative protein phosphatase 2A B'zeta subunit
  misc_feature (26)..(142): NCBI GI NO: 21537284 NR Description: B  regulatory subunit of protein phosphatase 2A
MFNKIIKRGNRKGARGDNAEAAARPAAPSSSSGSGGGGAGAAAPVTVNHASRATAPSPSSPTSPHVAPSALATNPAGAASPPLLEPLPLLRDVAAADRPGLFLRKLRIVAALFDLSDSLKHPREKEAKRQALLELVDYVQAPAQAAGANAPTRLPDHVQVLNTGARRRHLCQHLPPATTRAARIRRRDRPRRRARRGGGAIPRPLLATPPARL

SEQ ID NO: 19614 - protein, 212 aa, Zea mays subsp. mays
  peptide (1)..(212): Ceres Seq. ID no. 15222564
  misc_feature (1)..(200): Pfam Name: B56 family Pfam Description: Protein phosphatase 2A regulatory B subunit
  misc_feature (1)..(205): NCBI GI NO: 15232782 NR Description: B' regulatory subunit of PP2A (AtB'beta)
  misc_feature (1)..(209): NCBI GI NO: 15242766 NR Description: B' regulatory subunit of PP2A (AtB'alpha)
  misc_feature (1)..(203): NCBI GI NO: 15233133 NR Description: protein phosphatase 2A regulatory subunit B-relatedprotein
  misc_feature (1)..(211): NCBI GI NO: 7485149 NR Description: hypothetical protein - Arabidopsis thaliana
  misc_feature (1)..(211): NCBI GI NO: 18414444 NR Description: B' regulatory subunit of PP2A (AtB'gamma)
  misc_feature (1)..(211): NCBI GI NO: 20147343 NR Description: AT4g15410/dl3750w [Arabidopsis thaliana]
  misc_feature (1)..(207): NCBI GI NO: 21530786 NR Description: putative protein phosphatase 2A B'teta subunit
  misc_feature (1)..(212): NCBI GI NO: 21530784 NR Description: putative protein phosphatase 2A B'zeta subunit
  misc_feature (1)..(204): NCBI GI NO: 15230961 NR Description: B regulatory subunit of protein phosphatase 2A -related
  misc_feature (1)..(198): NCBI GI NO: 21537284 NR Description: B  regulatory subunit of protein phosphatase 2A
MKEEHKLFLARALIPLHKPKSVAIYHQQLSYCIVQFVEKDYKLADTVIRGLLKYWPVTNCQKEVLFLGELEEVLEATQPAEFQRCMVPLFKQIGRCLNSSHFQVAERALFLWNNDHIVSLIAQNRVVIFPIIFEALERNIQSHWNQAVHGLTANVRKMFLDMDSELFEECQQQYMEKQAKAKEIQEQRESAWRQLEAVVAAKAAGDDMVLVN

SEQ ID NO: 19615 - DNA, 1104 bp, Zea mays subsp. mays
  misc_feature (1)..(1104): Ceres Seq. ID no. 12635231
gaggggataacgaagagtggcgcagtggccatcgagactcgagagggagtggcagacgcgaggttgcaaggagatggcggacggcaagggaagggagaattcggccgtggcattgaagacctcgccgtcagtgccgatggctcggggattgcgcggcggtagtaaccctctggaggagtggagcggccgcgtaaaagcgattgaggccgggttccgtgcgtggatggcgaagcagcccatccacatcgaggccgcggtgtccacggccgttggggcggtgcagggcggggctctgggtgggctcatgggctcgctcacagccgacggagggtcgccgttccccatcccgcagccgccgtccaacgccaactcggatgccatggcgtcgttcaagcaggcccaggctctagctgctggacccttggtgcaagcccgaaactttgcagtcatgactggcgcaaatgcaggcatatcttgtgtcatgagaaggctacgaggacaagaggacatccagggcagcatgacagctgcttttggttctggtgctcttttctccatagtgagcggaatgggaactcctaatccagttttaaatgcaattacaactggtgttgcttttgcagtatttcaaggtggctttttcatgattgggcagaaattctcaaagccatcaagtgaagatacatactactctctgacaagaagcatgctgcacaaactgggtcttgaaaaatatgaaaagaatttcaggaagggtctcctcaacgatcaaacattaccactccttacggacagtgctctgagagatgtgaagatccctcctggacccagacttctcattctcgaccaaattaaaagggaccctggcctggttcgagcaaagtgaagtcacaattgtcaacaattggtcctttctgagctgcatagggtttgaaagcaatgccacctcttttttttaaataagctttctaggaaagtaagcaataatttagctgtgctgttgttaattgtttttggccgatcaatttgcatcactcattaaattttgaacatgtgtttacatgcatcttattcaaatttaaattggcattccgaacgatatgc

SEQ ID NO: 19616 - protein, 270 aa, Zea mays subsp. mays
  peptide (1)..(270): Ceres Seq. ID no. 12635232
  misc_feature (49)..(196): Pfam Name: Pfam Description:  Tim17/Tim22/Tim23 family
  misc_feature (15)..(262): NCBI GI NO: 32487911 NR Description: OJ000315_02.15
  misc_feature (26)..(266): NCBI GI NO: 15238598 NR Description: putative protein; protein id: At5g24650
  misc_feature (26)..(266): NCBI GI NO: 21593899 NR Description: unknown [Arabidopsis thaliana]
  misc_feature (1)..(264): NCBI GI NO: 15229167 NR Description: putative protein; protein id: At3g49560
MADGKGRENSAVALKTSPSVPMARGLRGGSNPLEEWSGRVKAIEAGFRAWMAKQPIHIEAAVSTAVGAVQGGALGGLMGSLTADGGSPFPIPQPPSNANSDAMASFKQAQALAAGPLVQARNFAVMTGANAGISCVMRRLRGQEDIQGSMTAAFGSGALFSIVSGMGTPNPVLNAITTGVAFAVFQGGFFMIGQKFSKPSSEDTYYSLTRSMLHKLGLEKYEKNFRKGLLNDQTLPLLTDSALRDVKIPPGPRLLILDQIKRDPGLVRAK

SEQ ID NO: 19617 - protein, 249 aa, Zea mays subsp. mays
  peptide (1)..(249): Ceres Seq. ID no. 12635233
  misc_feature (28)..(175): Pfam Name: Pfam Description:  Tim17/Tim22/Tim23 family
  misc_feature (1)..(241): NCBI GI NO: 32487911 NR Description: OJ000315_02.15
  misc_feature (5)..(245): NCBI GI NO: 15238598 NR Description: putative protein; protein id: At5g24650
  misc_feature (5)..(245): NCBI GI NO: 21593899 NR Description: unknown [Arabidopsis thaliana]
  misc_feature (1)..(243): NCBI GI NO: 15229167 NR Description: putative protein; protein id: At3g49560
MARGLRGGSNPLEEWSGRVKAIEAGFRAWMAKQPIHIEAAVSTAVGAVQGGALGGLMGSLTADGGSPFPIPQPPSNANSDAMASFKQAQALAAGPLVQARNFAVMTGANAGISCVMRRLRGQEDIQGSMTAAFGSGALFSIVSGMGTPNPVLNAITTGVAFAVFQGGFFMIGQKFSKPSSEDTYYSLTRSMLHKLGLEKYEKNFRKGLLNDQTLPLLTDSALRDVKIPPGPRLLILDQIKRDPGLVRAK

SEQ ID NO: 19618 - protein, 220 aa, Zea mays subsp. mays
  peptide (1)..(220): Ceres Seq. ID no. 12635234
  misc_feature (1)..(146): Pfam Name: Pfam Description:  Tim17/Tim22/Tim23 family
  misc_feature (1)..(212): NCBI GI NO: 32487911 NR Description: OJ000315_02.15
  misc_feature (1)..(216): NCBI GI NO: 15238598 NR Description: putative protein; protein id: At5g24650
  misc_feature (1)..(216): NCBI GI NO: 21593899 NR Description: unknown [Arabidopsis thaliana]
  misc_feature (1)..(214): NCBI GI NO: 15229167 NR Description: putative protein; protein id: At3g49560
MAKQPIHIEAAVSTAVGAVQGGALGGLMGSLTADGGSPFPIPQPPSNANSDAMASFKQAQALAAGPLVQARNFAVMTGANAGISCVMRRLRGQEDIQGSMTAAFGSGALFSIVSGMGTPNPVLNAITTGVAFAVFQGGFFMIGQKFSKPSSEDTYYSLTRSMLHKLGLEKYEKNFRKGLLNDQTLPLLTDSALRDVKIPPGPRLLILDQIKRDPGLVRAK

SEQ ID NO: 19619 - DNA, 825 bp, Zea mays subsp. mays
  misc_feature (1)..(825): Ceres Seq. ID no. 13623012
gaaaaaaaacagaactcgcaccgttctcgtctaatctctctctcgacaatggctcgatcttcgtctccgtctctttctctctcccggtgccgattcgccgcggcttatctcctcccttcatctcgatccatcttcttccgatctcaatcctcgaatcgccgctctaacctcggggagctgattgagatcgatgtcgccgcgtcgcagtcgcagtcgcaatcggatcctctttcgcagaagctggaggacgcggtgcaccggataatggtgcgccgagccgcgcctgattggctccctttccttcccggcgcttcgtattgggtcccgcctcgtaggtcccagtcccatgggatcgctaagctcgttgagaagctggcgaatcccatcggcgatgaagagtcagtctctgtcgcgtcgggtcgtggatggccttgttctgattacttcatcaaaggtgtagagcctgaatcggtggagacggagatggcttcaggtactgctgcatctcactctgaggatgaggaaggctaaaacattaaaactcgttaaaaccattgtctggactcttcaaaagatttgttgattttaggaacgcggatcaaagaagaattgaaccaccaagagcggttttgaagaggtgacatggtttagactttaagagagggtagaggaaacaaaccttttacaacacatgagatcctatcaagttctgaaatgttaaaaaaaaaaacaataagaaaaggcgttgtagctcagccccctgttttcaatgtaatctttcttataacagtttgatgaatcctgtgtatatatatattcgccggg

SEQ ID NO: 19620 - protein, 176 aa, Zea mays subsp. mays
  peptide (1)..(176): Ceres Seq. ID no. 15219384
  misc_feature (17)..(175): NCBI GI NO: 21592720 NR Description: unknown [Arabidopsis thaliana]
  misc_feature (17)..(175): NCBI GI NO: 18412160 NR Description: expressed protein [Arabidopsis thaliana]
  misc_feature (17)..(175): NCBI GI NO: 25364101 NR Description: hypothetical protein F9K20.6
  misc_feature (17)..(175): NCBI GI NO: 18394407 NR Description: expressed protein [Arabidopsis thaliana]
  misc_feature (17)..(152): NCBI GI NO: 30685027 NR Description: expressed protein [Arabidopsis thaliana]
  misc_feature (51)..(164): NCBI GI NO: 14423398 NR Description: Unknown protein [Arabidopsis thaliana]
  misc_feature (51)..(164): NCBI GI NO: 18398961 NR Description: expressed protein [Arabidopsis thaliana]
  misc_feature (17)..(170): NCBI GI NO: 38175698 NR Description: unknown protein
  misc_feature (17)..(175): NCBI GI NO: 38346553 NR Description: OSJNBa0035M09.14
EKKQNSHRSRLISLSTMARSSSPSLSLSRCRFAAAYLLPSSRSIFFRSQSSNRRSNLGELIEIDVAASQSQSQSDPLSQKLEDAVHRIMVRRAAPDWLPFLPGASYWVPPRRSQSHGIAKLVEKLANPIGDEESVSVASGRGWPCSDYFIKGVEPESVETEMASGTAASHSEDEEG

SEQ ID NO: 19621 - protein, 160 aa, Zea mays subsp. mays
  peptide (1)..(160): Ceres Seq. ID no. 15219385
  misc_feature (1)..(159): NCBI GI NO: 21592720 NR Description: unknown [Arabidopsis thaliana]
  misc_feature (1)..(159): NCBI GI NO: 18412160 NR Description: expressed protein [Arabidopsis thaliana]
  misc_feature (1)..(159): NCBI GI NO: 25364101 NR Description: hypothetical protein F9K20.6
  misc_feature (1)..(159): NCBI GI NO: 18394407 NR Description: expressed protein [Arabidopsis thaliana]
  misc_feature (1)..(136): NCBI GI NO: 30685027 NR Description: expressed protein [Arabidopsis thaliana]
  misc_feature (35)..(148): NCBI GI NO: 14423398 NR Description: Unknown protein [Arabidopsis thaliana]
  misc_feature (35)..(148): NCBI GI NO: 18398961 NR Description: expressed protein [Arabidopsis thaliana]
  misc_feature (1)..(154): NCBI GI NO: 38175698 NR Description: unknown protein
  misc_feature (1)..(159): NCBI GI NO: 38346553 NR Description: OSJNBa0035M09.14
MARSSSPSLSLSRCRFAAAYLLPSSRSIFFRSQSSNRRSNLGELIEIDVAASQSQSQSDPLSQKLEDAVHRIMVRRAAPDWLPFLPGASYWVPPRRSQSHGIAKLVEKLANPIGDEESVSVASGRGWPCSDYFIKGVEPESVETEMASGTAASHSEDEEG

SEQ ID NO: 19622 - protein, 88 aa, Zea mays subsp. mays
  peptide (1)..(88): Ceres Seq. ID no. 15219386
  misc_feature (1)..(87): NCBI GI NO: 21592720 NR Description: unknown [Arabidopsis thaliana]
  misc_feature (1)..(87): NCBI GI NO: 18412160 NR Description: expressed protein [Arabidopsis thaliana]
  misc_feature (1)..(87): NCBI GI NO: 25364101 NR Description: hypothetical protein F9K20.6
  misc_feature (1)..(87): NCBI GI NO: 18394407 NR Description: expressed protein [Arabidopsis thaliana]
  misc_feature (1)..(64): NCBI GI NO: 30685027 NR Description: expressed protein [Arabidopsis thaliana]
  misc_feature (1)..(76): NCBI GI NO: 14423398 NR Description: Unknown protein [Arabidopsis thaliana]
  misc_feature (1)..(76): NCBI GI NO: 18398961 NR Description: expressed protein [Arabidopsis thaliana]
  misc_feature (1)..(82): NCBI GI NO: 38175698 NR Description: unknown protein
  misc_feature (1)..(87): NCBI GI NO: 38346553 NR Description: OSJNBa0035M09.14
MVRRAAPDWLPFLPGASYWVPPRRSQSHGIAKLVEKLANPIGDEESVSVASGRGWPCSDYFIKGVEPESVETEMASGTAASHSEDEEG

SEQ ID NO: 19623 - DNA, 712 bp, Zea mays subsp. mays
  misc_feature (1)..(712): Ceres Seq. ID no. 15225031
aagccttatcgttggaagagaagaagaaaaatgttggagagtataaaccttcctatctcctgcaacttctctagctttcctcatctaaaaccctccagaaaagcccaatccctaagccaaccccgaaacctcacccttgtacagtcaagagctcctttgccttttctgaaacccgatagaattctccttcgcaacaacaacaagagtcaattcttgaaacacgagaagaagggtctcttccatgtgtgcagaagctcactaaacaacccagatccagacaaaactgaaattcaagatgaaggaagagactggacgagctccgtattgcttttcgctctctggggtgcgcttctttactactgcttcaatcttgctcctgatcaaaccccaacacaagacttgtactttgtgaaaaagctgttgaatttgaaaggcgatgatggttttagaatgaaccagatccttgttgggttatggtatataatgggtttatggcctgttgtatacgctatgctcttacttcccactggtcgaagtaaaactcaggcatggcctttcgttgttttcctcatcctcccctgctttgtttcctagggagagagagtacaaaaatgtatagccttttttttttggaatattacaagtttgggtgttgagaattgggattgttcttatggtggacaaaagctatgaatcaattagcctttctact

SEQ ID NO: 19624 - protein, 197 aa, Zea mays subsp. mays
  peptide (1)..(197): Ceres Seq. ID no. 15225032
  misc_feature (103)..(194): NCBI GI NO: 29647433 NR Description: unknown protein
  misc_feature (71)..(118): NCBI GI NO: 15228138 NR Description: expressed protein [Arabidopsis thaliana]
KPYRWKRRRKMLESINLPISCNFSSFPHLKPSRKAQSLSQPRNLTLVQSRAPLPFLKPDRILLRNNNKSQFLKHEKKGLFHVCRSSLNNPDPDKTEIQDEGRDWTSSVLLFALWGALLYYCFNLAPDQTPTQDLYFVKKLLNLKGDDGFRMNQILVGLWYIMGLWPVVYAMLLLPTGRSKTQAWPFVVFLILPCFVS

SEQ ID NO: 19625 - protein, 187 aa, Zea mays subsp. mays
  peptide (1)..(187): Ceres Seq. ID no. 15225033
  misc_feature (93)..(184): NCBI GI NO: 29647433 NR Description: unknown protein
  misc_feature (61)..(108): NCBI GI NO: 15228138 NR Description: expressed protein [Arabidopsis thaliana]
MLESINLPISCNFSSFPHLKPSRKAQSLSQPRNLTLVQSRAPLPFLKPDRILLRNNNKSQFLKHEKKGLFHVCRSSLNNPDPDKTEIQDEGRDWTSSVLLFALWGALLYYCFNLAPDQTPTQDLYFVKKLLNLKGDDGFRMNQILVGLWYIMGLWPVVYAMLLLPTGRSKTQAWPFVVFLILPCFVS

SEQ ID NO: 19626 - DNA, 1094 bp, Zea mays subsp. mays
  misc_feature (1)..(1094): Ceres Seq. ID no. 13599323
aacatcgatcgtccctgtgagcatttgctcttgcgcttcttgacactccaatttgccagaaagaagcaaacatccatatttggtagcaatggcagcgtcgaggtgcagcaccgccttcgtcttgctcgtcgtggtcacggtggcggcggcggcggcggcggcgctgctgcagccggcggaggcggcagcggcggcacgccgcgccgacgcccacgtgctctggtacccgggaacaaggcagcgtagccccagcggcttcaggggtttccctcgctccaggctgtcgccaccgtccgcgggcaggctaacgccgccgtcgcccagcggcaggccgatgacgccgccgccgtcccaggcgcaggcgccgccggcgcccatctcgcccccgtgcaccgccgcgaacccgcagcccggcttccctggcatgccggtgggcggcaccggcggcttcggaggggcgtcgccctcgccgccgtcggcgccgacggactgcgtgacgccgctggcggggctgatgacgtgcgcgtcgttcctgacggggagcgaggcggagacgccgaccccgcagagcgagtgctgcggcgggctgggcatgttcctcaacagctcggcggcggcggacgaccggtcgctgcgttgcctgtgcccggtgatcctcggcgacgtgaaccgcatgctccccaagcccatcgaccccgtccgcatgatgtacctccccatcgcctgcggcgtcgtcctcccgcctcaagtcctcttcatctgcttcactgggcagccgacgccgccggtggtgaaccggattcctgactcctggaagacctcgtcttcttcagcattgtcgccttgagctggtgccgacgatcggatttggttactgctcatcacgcaggcacagtctatcccgggacgtatctatcaagtttaattattaagattacaaaaaaacgtgagaaactagctggttactaccaactttgcagccatgagagtggtcaacgcatcatgggccaattgtggtgtagtattactgatcgatgtaatagctagcatgttttcctttttcttattgagaatgtaaacaaaaatacaagagc

SEQ ID NO: 19627 - protein, 252 aa, Zea mays subsp. mays
  peptide (1)..(252): Ceres Seq. ID no. 15222565
  misc_feature (135)..(220): Pfam Name: Pfam Description:  Protease inhibitor/seed storage/LTP family
  misc_feature (69)..(231): NCBI GI NO: 34901090 NR Description: hypothetical protein~predicted by GlimmerM etc.
  misc_feature (76)..(235): NCBI GI NO: 34901578 NR Description: P0571D04.3
  misc_feature (75)..(235): NCBI GI NO: 38347146 NR Description: OSJNBa0039G19.6
  misc_feature (122)..(233): NCBI GI NO: 25553602 NR Description: OJ1656_E11.34
  misc_feature (47)..(162): NCBI GI NO: 6678581 NR Description: Wiskott-Aldrich syndrome homolog
  misc_feature (47)..(162): NCBI GI NO: 1150834 NR Description: Wiscott-Aldrich Syndrome protein homolog
MAASRCSTAFVLLVVVTVAAAAAAALLQPAEAAAAARRADAHVLWYPGTRQRSPSGFRGFPRSRLSPPSAGRLTPPSPSGRPMTPPPSQAQAPPAPISPPCTAANPQPGFPGMPVGGTGGFGGASPSPPSAPTDCVTPLAGLMTCASFLTGSEAETPTPQSECCGGLGMFLNSSAAADDRSLRCLCPVILGDVNRMLPKPIDPVRMMYLPIACGVVLPPQVLFICFTGQPTPPVVNRIPDSWKTSSSSALSP

SEQ ID NO: 19628 - protein, 170 aa, Zea mays subsp. mays
  peptide (1)..(170): Ceres Seq. ID no. 15222566
  misc_feature (53)..(138): Pfam Name: Pfam Description:  Protease inhibitor/seed storage/LTP family
  misc_feature (1)..(149): NCBI GI NO: 34901090 NR Description: hypothetical protein~predicted by GlimmerM etc.
  misc_feature (1)..(153): NCBI GI NO: 34901578 NR Description: P0571D04.3
  misc_feature (1)..(153): NCBI GI NO: 38347146 NR Description: OSJNBa0039G19.6
  misc_feature (40)..(151): NCBI GI NO: 25553602 NR Description: OJ1656_E11.34
  misc_feature (1)..(80): NCBI GI NO: 6678581 NR Description: Wiskott-Aldrich syndrome homolog
  misc_feature (1)..(80): NCBI GI NO: 1150834 NR Description: Wiscott-Aldrich Syndrome protein homolog
MTPPPSQAQAPPAPISPPCTAANPQPGFPGMPVGGTGGFGGASPSPPSAPTDCVTPLAGLMTCASFLTGSEAETPTPQSECCGGLGMFLNSSAAADDRSLRCLCPVILGDVNRMLPKPIDPVRMMYLPIACGVVLPPQVLFICFTGQPTPPVVNRIPDSWKTSSSSALSP

SEQ ID NO: 19629 - protein, 140 aa, Zea mays subsp. mays
  peptide (1)..(140): Ceres Seq. ID no. 15222567
  misc_feature (23)..(108): Pfam Name: Pfam Description:  Protease inhibitor/seed storage/LTP family
  misc_feature (1)..(119): NCBI GI NO: 34901090 NR Description: hypothetical protein~predicted by GlimmerM etc.
  misc_feature (1)..(123): NCBI GI NO: 34901578 NR Description: P0571D04.3
  misc_feature (1)..(123): NCBI GI NO: 38347146 NR Description: OSJNBa0039G19.6
  misc_feature (10)..(121): NCBI GI NO: 25553602 NR Description: OJ1656_E11.34
  misc_feature (1)..(50): NCBI GI NO: 6678581 NR Description: Wiskott-Aldrich syndrome homolog
  misc_feature (1)..(50): NCBI GI NO: 1150834 NR Description: Wiscott-Aldrich Syndrome protein homolog
MPVGGTGGFGGASPSPPSAPTDCVTPLAGLMTCASFLTGSEAETPTPQSECCGGLGMFLNSSAAADDRSLRCLCPVILGDVNRMLPKPIDPVRMMYLPIACGVVLPPQVLFICFTGQPTPPVVNRIPDSWKTSSSSALSP

SEQ ID NO: 19630 - DNA, 899 bp, Zea mays subsp. mays
  misc_feature (1)..(899): Ceres Seq. ID no. 15226901
ctcccccagcccacaggacaactacaaacgcaaacgcactgtgtgctgctgcctgctgctccgtgctgtgccgtggtgtcctcctctcacctgctccaaccaagcaccgccgtcccagcgtccctcaccggccatccagccagccgccgcacggcccgtcgaccccaccgcagggctccctcccgcgctgtcctctccagtctccagcgatgaagcgcctgctgcggcgcctctcccgcgtggccgcggccgacgcctgcgcctgcgccgccgccgcggcgtaccagccgctccggccgggcgccaaggcggccgcgctctccggcgcgcggcggctgggcggcggcgcgcgcgcgccgggtggccacgtgcccgtctgcgtcggcgaggagggcgggcccctggagcggtacgccgtgcgcgccgagctcctcgcccgccccgccttcgccgcgctgctccgccgcgccgcgcaggagtacggctacgcccgccccggcgcgctccgcatcccctgccccgtcgccgacttccgcgacctcctcgtccagctctcctccacctccgcggaccagcccgacgacgacgcggcgctctgctgccactactgctaggcgattctctggcgccaccgctctcattccacccatccaatccggcggaaaggacaaaaaaaaaaagaaagaaagaaagaaacattcgccgcagttgccgcggagggcgtaattgcgatttgcccttgccccctcggtgactgcagcgccaagtgctgctttgcttgtacatacgggagggttagttaagttaactgtgccgtggatccttggatggatgtgggcacggcagggattttctcctgcagctcaacaacagttttttgcgcctgctgtctgtctgat

SEQ ID NO: 19631 - protein, 250 aa, Zea mays subsp. mays
  peptide (1)..(250): Ceres Seq. ID no. 15226902
  misc_feature (40)..(250): NCBI GI NO: 23018055 NR Description: COG1205: Distinct helicase family with a unique C-terminal domain including a metal-binding cysteine cluster
  misc_feature (34)..(192): NCBI GI NO: 25989119 NR Description: unknown [Streptomyces aureofaciens]
  misc_feature (88)..(248): NCBI GI NO: 15600175 NR Description: probable two-component sensor
  misc_feature (32)..(80): NCBI GI NO: 14599404 NR Description: protease 1 [Pneumocystis carinii]
  misc_feature (24)..(196): NCBI GI NO: 29247944 NR Description: GLP_26_54603_52153 [Giardia lamblia ATCC 50803]
  misc_feature (61)..(205): NCBI GI NO: 29247944 NR Description: GLP_26_54603_52153 [Giardia lamblia ATCC 50803]
  misc_feature (64)..(226): NCBI GI NO: 7949115 NR Description: Ser/Arg-related nuclear matrix protein
  misc_feature (36)..(250): NCBI GI NO: 29247944 NR Description: GLP_26_54603_52153 [Giardia lamblia ATCC 50803]
SPSPQDNYKRKRTVCCCLLLRAVPWCPPLTCSNQAPPSQRPSPAIQPAAARPVDPTAGLPPALSSPVSSDEAPAAAPLPRGRGRRLRLRRRRGVPAAPAGRQGGRALRRAAAGRRRARAGWPRARLRRRGGRAPGAVRRARRAPRPPRLRRAAPPRRAGVRLRPPRRAPHPLPRRRLPRPPRPALLHLRGPARRRRGALLPLLLGDSLAPPLSFHPSNPAERTKKKRKKERNIRRSCRGGRNCDLPLPPR

SEQ ID NO: 19632 - protein, 203 aa, Zea mays subsp. mays
  peptide (1)..(203): Ceres Seq. ID no. 15226903
  misc_feature (99)..(185): Pfam Name: Pfam Description:  Auxin responsive protein
  misc_feature (53)..(190): NCBI GI NO: 38345606 NR Description: OSJNBa0093O08.8
  misc_feature (53)..(190): NCBI GI NO: 5852079 NR Description: zwh0002.1 [Oryza sativa (indica cultivar-group)]
  misc_feature (70)..(194): NCBI GI NO: 15219296 NR Description: auxin-induced
  misc_feature (70)..(184): NCBI GI NO: 15230601 NR Description: auxin-induced
  misc_feature (70)..(191): NCBI GI NO: 15223462 NR Description: auxin-induced
  misc_feature (70)..(184): NCBI GI NO: 15219275 NR Description: auxin-induced
  misc_feature (119)..(188): NCBI GI NO: 15232400 NR Description: auxin-induced
PPAHRTTTNANALCAAACCSVLCRGVLLSPAPTKHRRPSVPHRPSSQPPHGPSTPPQGSLPRCPLQSPAMKRLLRRLSRVAAADACACAAAAAYQPLRPGAKAAALSGARRLGGGARAPGGHVPVCVGEEGGPLERYAVRAELLARPAFAALLRRAAQEYGYARPGALRIPCPVADFRDLLVQLSSTSADQPDDDAALCCHYC

SEQ ID NO: 19633 - protein, 134 aa, Zea mays subsp. mays
  peptide (1)..(134): Ceres Seq. ID no. 15226904
  misc_feature (30)..(116): Pfam Name: Pfam Description:  Auxin responsive protein
  misc_feature (1)..(121): NCBI GI NO: 38345606 NR Description: OSJNBa0093O08.8
  misc_feature (1)..(121): NCBI GI NO: 5852079 NR Description: zwh0002.1 [Oryza sativa (indica cultivar-group)]
  misc_feature (1)..(125): NCBI GI NO: 15219296 NR Description: auxin-induced
  misc_feature (1)..(115): NCBI GI NO: 15230601 NR Description: auxin-induced
  misc_feature (1)..(122): NCBI GI NO: 15223462 NR Description: auxin-induced
  misc_feature (1)..(115): NCBI GI NO: 15219275 NR Description: auxin-induced
  misc_feature (50)..(119): NCBI GI NO: 15232400 NR Description: auxin-induced
MKRLLRRLSRVAAADACACAAAAAYQPLRPGAKAAALSGARRLGGGARAPGGHVPVCVGEEGGPLERYAVRAELLARPAFAALLRRAAQEYGYARPGALRIPCPVADFRDLLVQLSSTSADQPDDDAALCCHYC

SEQ ID NO: 19634 - DNA, 1706 bp, Zea mays subsp. mays
  misc_feature (1)..(1706): Ceres Seq. ID no. 13599324
actagatttttcttctttctgatcctcttaaggtttcagaatctgtactgccattttctcggtaaaatgggaacccgatttcaatccttcttgctcctgttcttgctttcttgtttaatctttatatcggcgacctcatccgagcaaaaaggtgatggaacccttagaattggattgaagaaaaggaaactaaaccgggccaacaggctagcttctcagctttttttgaaaaaccgagggtcttggtcgtccaaaggtttttttcacctgaacgatggcaattcggatactgttccccctaaaaattatttggatgctcaatattacggtgacattaccattggtactccacctcagaagtttactgccatctttgatactggaagctccaatctctggatgccatcttctaaatgctacctatcggttgcttgttattttcattcgaagtacacggctagcgagtcatcaacatacaaaaagaacggaaaacctgcgtcaatccgctatgggacaggtgctatatctggttacttcagcaatgatgatgttaaaattggtgatcttgttatcaaggatcaggagttcatagaggctactaatgagcctggtattacattcttggtagccaagtttgatggaatcctagggttgggattcaaagagatagctgttggaaattcaacaccggtttggtataacatggtagaaaaaggtctggttaaggaacagattttttcgttttggcttaaccgcaacccgcaagatcaagaaggtggtgagattgtctttggcggagtcgatcctaagcacttcaaaggagagcatacttatgttcccgtgacacgtaaaggttactggcaatttgacatgggtgatctccacattgctggcaaaccaacaggatactgttctaatggttgttctgccattgctgattctggaacttctctactcaccggtccaacgagtgtcatcacaatgatcaatcatgcgattggagcagtaggagtcgcaagcaaagagtgcaaaaccgtcataggtcaatatggaaaaaccatgttgaactcccttttatctcaggcggatcctaggaaggtatgctcacagataggactctgcggtttcaatgagagaatggggattaagtcagttctagacgatggaacatcagatcttataaacgaagcgatgtgcagcgtttgtgaaatggcaaccgtgtggatgcagagtgaattgaatcagaatgaaacacaagaacgtatactctcttatgctgctgagctatgtgaccatataccaagtccgaaccaacaatcagcagtgaactgcgagaaggtttcgtcgatgcctatagtcacattcaccattggtggcaaaccctttgatctctcacctcaagattatatattcaagattggggatggagttcagtctcagtgcaccagtggtttcactgccatggacatccctccacctcgtggacctctctggatcttgggtgatatattcatgggaccataccatactgtgttcgattatgggaaagcaagagttggattcgccaaatctgcttaaagaaagatcaaaaccctttgttaatatgatgtttgtgaatgtgtttaaatcttaaatggttgtaataacttaaaagcattgctatcctagaatggtgtatcatcttaaatacatattcttaagctttt

SEQ ID NO: 19635 - protein, 525 aa, Zea mays subsp. mays
  peptide (1)..(525): Ceres Seq. ID no. 13599325
  misc_feature (54)..(385): Pfam Name: Pfam Description:  Eukaryotic aspartyl protease
  misc_feature (23)..(525): NCBI GI NO: 15233518 NR Description: aspartic protease -related [Arabidopsis thaliana]
  misc_feature (23)..(525): NCBI GI NO: 21616053 NR Description: aspartic proteinase [Theobroma cacao]
  misc_feature (23)..(525): NCBI GI NO: 7435838 NR Description: probable aspartic proteinase (EC 3
  misc_feature (23)..(525): NCBI GI NO: 15186732 NR Description: aspartic proteinase 1 [Glycine max]
  misc_feature (29)..(525): NCBI GI NO: 2811025 NR Description: Aspartic proteinase precursor
  misc_feature (35)..(525): NCBI GI NO: 15221141 NR Description: aspartic proteinase -related
  misc_feature (23)..(524): NCBI GI NO: 22330379 NR Description: aspartic protease -related [Arabidopsis thaliana]
  misc_feature (23)..(525): NCBI GI NO: 20800441 NR Description: aspartic proteinase [Vigna unguiculata]
  misc_feature (49)..(525): NCBI GI NO: 1354272 NR Description: aspartic proteinase [Arabidopsis thaliana]
  misc_feature (23)..(525): NCBI GI NO: 7435837 NR Description: aspartic proteinase (EC 3.4.23.-) - cowpea
TRFFFFLILLRFQNLYCHFLGKMGTRFQSFLLLFLLSCLIFISATSSEQKGDGTLRIGLKKRKLNRANRLASQLFLKNRGSWSSKGFFHLNDGNSDTVPPKNYLDAQYYGDITIGTPPQKFTAIFDTGSSNLWMPSSKCYLSVACYFHSKYTASESSTYKKNGKPASIRYGTGAISGYFSNDDVKIGDLVIKDQEFIEATNEPGITFLVAKFDGILGLGFKEIAVGNSTPVWYNMVEKGLVKEQIFSFWLNRNPQDQEGGEIVFGGVDPKHFKGEHTYVPVTRKGYWQFDMGDLHIAGKPTGYCSNGCSAIADSGTSLLTGPTSVITMINHAIGAVGVASKECKTVIGQYGKTMLNSLLSQADPRKVCSQIGLCGFNERMGIKSVLDDGTSDLINEAMCSVCEMATVWMQSELNQNETQERILSYAAELCDHIPSPNQQSAVNCEKVSSMPIVTFTIGGKPFDLSPQDYIFKIGDGVQSQCTSGFTAMDIPPPRGPLWILGDIFMGPYHTVFDYGKARVGFAKSA

SEQ ID NO: 19636 - protein, 503 aa, Zea mays subsp. mays
  peptide (1)..(503): Ceres Seq. ID no. 13599326
  misc_feature (32)..(363): Pfam Name: Pfam Description:  Eukaryotic aspartyl protease
  misc_feature (1)..(503): NCBI GI NO: 15233518 NR Description: aspartic protease -related [Arabidopsis thaliana]
  misc_feature (1)..(503): NCBI GI NO: 21616053 NR Description: aspartic proteinase [Theobroma cacao]
  misc_feature (1)..(503): NCBI GI NO: 7435838 NR Description: probable aspartic proteinase (EC 3
  misc_feature (1)..(503): NCBI GI NO: 15186732 NR Description: aspartic proteinase 1 [Glycine max]
  misc_feature (7)..(503): NCBI GI NO: 2811025 NR Description: Aspartic proteinase precursor
  misc_feature (13)..(503): NCBI GI NO: 15221141 NR Description: aspartic proteinase -related
  misc_feature (1)..(502): NCBI GI NO: 22330379 NR Description: aspartic protease -related [Arabidopsis thaliana]
  misc_feature (1)..(503): NCBI GI NO: 20800441 NR Description: aspartic proteinase [Vigna unguiculata]
  misc_feature (27)..(503): NCBI GI NO: 1354272 NR Description: aspartic proteinase [Arabidopsis thaliana]
  misc_feature (1)..(503): NCBI GI NO: 7435837 NR Description: aspartic proteinase (EC 3.4.23.-) - cowpea
MGTRFQSFLLLFLLSCLIFISATSSEQKGDGTLRIGLKKRKLNRANRLASQLFLKNRGSWSSKGFFHLNDGNSDTVPPKNYLDAQYYGDITIGTPPQKFTAIFDTGSSNLWMPSSKCYLSVACYFHSKYTASESSTYKKNGKPASIRYGTGAISGYFSNDDVKIGDLVIKDQEFIEATNEPGITFLVAKFDGILGLGFKEIAVGNSTPVWYNMVEKGLVKEQIFSFWLNRNPQDQEGGEIVFGGVDPKHFKGEHTYVPVTRKGYWQFDMGDLHIAGKPTGYCSNGCSAIADSGTSLLTGPTSVITMINHAIGAVGVASKECKTVIGQYGKTMLNSLLSQADPRKVCSQIGLCGFNERMGIKSVLDDGTSDLINEAMCSVCEMATVWMQSELNQNETQERILSYAAELCDHIPSPNQQSAVNCEKVSSMPIVTFTIGGKPFDLSPQDYIFKIGDGVQSQCTSGFTAMDIPPPRGPLWILGDIFMGPYHTVFDYGKARVGFAKSA

SEQ ID NO: 19637 - protein, 392 aa, Zea mays subsp. mays
  peptide (1)..(392): Ceres Seq. ID no. 13599327
  misc_feature (1)..(252): Pfam Name: Pfam Description:  Eukaryotic aspartyl protease
  misc_feature (1)..(392): NCBI GI NO: 15233518 NR Description: aspartic protease -related [Arabidopsis thaliana]
  misc_feature (1)..(392): NCBI GI NO: 21616053 NR Description: aspartic proteinase [Theobroma cacao]
  misc_feature (1)..(392): NCBI GI NO: 7435838 NR Description: probable aspartic proteinase (EC 3
  misc_feature (1)..(392): NCBI GI NO: 15186732 NR Description: aspartic proteinase 1 [Glycine max]
  misc_feature (1)..(392): NCBI GI NO: 2811025 NR Description: Aspartic proteinase precursor
  misc_feature (1)..(392): NCBI GI NO: 15221141 NR Description: aspartic proteinase -related
  misc_feature (1)..(391): NCBI GI NO: 22330379 NR Description: aspartic protease -related [Arabidopsis thaliana]
  misc_feature (1)..(392): NCBI GI NO: 20800441 NR Description: aspartic proteinase [Vigna unguiculata]
  misc_feature (1)..(392): NCBI GI NO: 1354272 NR Description: aspartic proteinase [Arabidopsis thaliana]
  misc_feature (1)..(392): NCBI GI NO: 7435837 NR Description: aspartic proteinase (EC 3.4.23.-) - cowpea
MPSSKCYLSVACYFHSKYTASESSTYKKNGKPASIRYGTGAISGYFSNDDVKIGDLVIKDQEFIEATNEPGITFLVAKFDGILGLGFKEIAVGNSTPVWYNMVEKGLVKEQIFSFWLNRNPQDQEGGEIVFGGVDPKHFKGEHTYVPVTRKGYWQFDMGDLHIAGKPTGYCSNGCSAIADSGTSLLTGPTSVITMINHAIGAVGVASKECKTVIGQYGKTMLNSLLSQADPRKVCSQIGLCGFNERMGIKSVLDDGTSDLINEAMCSVCEMATVWMQSELNQNETQERILSYAAELCDHIPSPNQQSAVNCEKVSSMPIVTFTIGGKPFDLSPQDYIFKIGDGVQSQCTSGFTAMDIPPPRGPLWILGDIFMGPYHTVFDYGKARVGFAKSA

SEQ ID NO: 19638 - DNA, 619 bp, Zea mays subsp. mays
  misc_feature (1)..(619): Ceres Seq. ID no. 13599249
attgaaaattagattttgtccggtggagaagatgggagcagaaacggtcgtggaagctgagaaaattgacgacttgctcgaggcagctagatacaatgatatagatgatctcaaaagcttggcctttgatggtgtctctcttaactctcgcgattcccaaggccgaacagcgcttcatatggccgcggcgaatggacatatgagtatagtggagtatctgatcagtcaaggagtggatattaacgctctgaacgaggagaacaatgctcctctgcattgggcttgtttgaatggccatatcgaggttgtgaagaaaatgatcttggcaggagccagtcttagtcttttgaatcggtacgagcggactcccatggacgaagctattggtgcagggaagatggagattatagatgctatcaacacaactgttacacaaatggaacttgaaaacaccactgtagcctgactttaatggcgtcttcctaaatgcttgttgtctctctctctctctgtagtttacagcgtagtttttataatgtggaagttttgcgttgttatgtagactgatggttagaactggaatcatctgaaatcgaattctaccaaaaagattattgcc

SEQ ID NO: 19639 - protein, 154 aa, Zea mays subsp. mays
  peptide (1)..(154): Ceres Seq. ID no. 13599250
  misc_feature (86)..(118): Pfam Name: Pfam Description:  Ankyrin repeat
  misc_feature (11)..(153): NCBI GI NO: 30684047 NR Description: expressed protein [Arabidopsis thaliana]
  misc_feature (11)..(153): NCBI GI NO: 14586362 NR Description: putative protein [Arabidopsis thaliana]
  misc_feature (11)..(154): NCBI GI NO: 34899080 NR Description: contains ESTs AU031990
  misc_feature (28)..(136): NCBI GI NO: 28373837 NR Description: Chain A
  misc_feature (25)..(139): NCBI GI NO: 28274846 NR Description: ankyrin repeat protein E2_17 [synthetic construct]
  misc_feature (25)..(139): NCBI GI NO: 28373666 NR Description: Chain A
  misc_feature (25)..(139): NCBI GI NO: 28274850 NR Description: ankyrin repeat protein E3_19 [synthetic construct]
  misc_feature (25)..(139): NCBI GI NO: 28274844 NR Description: ankyrin repeat protein E2_5 [synthetic construct]
  misc_feature (25)..(139): NCBI GI NO: 28274852 NR Description: ankyrin repeat protein E4_2 [synthetic construct]
  misc_feature (25)..(139): NCBI GI NO: 28274854 NR Description: ankyrin repeat protein E4_8 [synthetic construct]
LKIRFCPVEKMGAETVVEAEKIDDLLEAARYNDIDDLKSLAFDGVSLNSRDSQGRTALHMAAANGHMSIVEYLISQGVDINALNEENNAPLHWACLNGHIEVVKKMILAGASLSLLNRYERTPMDEAIGAGKMEIIDAINTTVTQMELENTTVA

SEQ ID NO: 19640 - protein, 144 aa, Zea mays subsp. mays
  peptide (1)..(144): Ceres Seq. ID no. 13599251
  misc_feature (76)..(108): Pfam Name: Pfam Description:  Ankyrin repeat
  misc_feature (1)..(143): NCBI GI NO: 30684047 NR Description: expressed protein [Arabidopsis thaliana]
  misc_feature (1)..(143): NCBI GI NO: 14586362 NR Description: putative protein [Arabidopsis thaliana]
  misc_feature (1)..(144): NCBI GI NO: 34899080 NR Description: contains ESTs AU031990
  misc_feature (18)..(126): NCBI GI NO: 28373837 NR Description: Chain A
  misc_feature (15)..(129): NCBI GI NO: 28274846 NR Description: ankyrin repeat protein E2_17 [synthetic construct]
  misc_feature (15)..(129): NCBI GI NO: 28373666 NR Description: Chain A
  misc_feature (15)..(129): NCBI GI NO: 28274850 NR Description: ankyrin repeat protein E3_19 [synthetic construct]
  misc_feature (15)..(129): NCBI GI NO: 28274844 NR Description: ankyrin repeat protein E2_5 [synthetic construct]
  misc_feature (15)..(129): NCBI GI NO: 28274854 NR Description: ankyrin repeat protein E4_8 [synthetic construct]
  misc_feature (15)..(129): NCBI GI NO: 28274852 NR Description: ankyrin repeat protein E4_2 [synthetic construct]
MGAETVVEAEKIDDLLEAARYNDIDDLKSLAFDGVSLNSRDSQGRTALHMAAANGHMSIVEYLISQGVDINALNEENNAPLHWACLNGHIEVVKKMILAGASLSLLNRYERTPMDEAIGAGKMEIIDAINTTVTQMELENTTVA

SEQ ID NO: 19641 - protein, 95 aa, Zea mays subsp. mays
  peptide (1)..(95): Ceres Seq. ID no. 13599252
  misc_feature (27)..(59): Pfam Name: Pfam Description:  Ankyrin repeat
  misc_feature (1)..(94): NCBI GI NO: 30684047 NR Description: expressed protein [Arabidopsis thaliana]
  misc_feature (1)..(94): NCBI GI NO: 14586362 NR Description: putative protein [Arabidopsis thaliana]
  misc_feature (1)..(95): NCBI GI NO: 34899080 NR Description: contains ESTs AU031990
  misc_feature (1)..(77): NCBI GI NO: 28373837 NR Description: Chain A
  misc_feature (1)..(80): NCBI GI NO: 28274846 NR Description: ankyrin repeat protein E2_17 [synthetic construct]
  misc_feature (1)..(80): NCBI GI NO: 28373666 NR Description: Chain A
  misc_feature (1)..(80): NCBI GI NO: 28274850 NR Description: ankyrin repeat protein E3_19 [synthetic construct]
  misc_feature (1)..(80): NCBI GI NO: 28274844 NR Description: ankyrin repeat protein E2_5 [synthetic construct]
  misc_feature (1)..(80): NCBI GI NO: 28274852 NR Description: ankyrin repeat protein E4_2 [synthetic construct]
  misc_feature (1)..(80): NCBI GI NO: 28274854 NR Description: ankyrin repeat protein E4_8 [synthetic construct]
MAAANGHMSIVEYLISQGVDINALNEENNAPLHWACLNGHIEVVKKMILAGASLSLLNRYERTPMDEAIGAGKMEIIDAINTTVTQMELENTTVA

SEQ ID NO: 19642 - DNA, 842 bp, Zea mays subsp. mays
  misc_feature (1)..(842): Ceres Seq. ID no. 13599328
ctttttccacttcctccctcctaatcctaaatcagcatcaatggcgattaccttctcagatctacacacagaggaaggcctcaaatccgtggaggagcacctcgccggaaaaacctacatctccggagatcaattgtccgtggatgatgtgaaggtatacgctgccgtttcggtgaaacctagcgatgctttccctaatgctagcaggtggttcgattgcgtcgcttcccatctagctaaaagcttccctggaaaagccgttggagttagtatcggtggctctgctgctgctgctcctgctcaagctgaggcacctgcagcagctgcagctgatgatgatgatgacatggatctgtttggtgacgagaccgaggaggaaaagaaagcagctgaggagagggaggctgccaagaaggacaccaaaaagcccaaagagagtggaaagtcctctgtgctcatggaagttaagccatgggatgacgagactgacatgaagaaacttgaggagtgtgttcgcgctgttgagatgcctggtcttctttggggagcttcaaaactggttccagttggttacggcatcaagaagctcacgatcatgctcacaatcgttgatgacctcgtgtccccagacaacctcattgaagactacctcacctgtgaacctaacaacgagtacatccagagtgttgacatcgtcgcattcaacaagatctagagactttaaaaacctctccccctaccaaacgatacattttgatttccttccaagttttgttatcttttgttgtttgcttgagatgcttattctctagttgcaagacctatgttacatgctatcaaag

SEQ ID NO: 19643 - protein, 237 aa, Zea mays subsp. mays
  peptide (1)..(237): Ceres Seq. ID no. 13599329
  misc_feature (148)..(237): Pfam Name: Pfam Description:  EF-1 guanine nucleotide exchange domain
  misc_feature (14)..(237): NCBI GI NO: 30687350 NR Description: elongation factor 1B alpha-subunit
  misc_feature (14)..(237): NCBI GI NO: 15239877 NR Description: elongation factor 1B alpha-subunit (emb|CAB64729
  misc_feature (32)..(237): NCBI GI NO: 27754711 NR Description: putative elongation factor 1B alpha-subunit
  misc_feature (14)..(237): NCBI GI NO: 38175744 NR Description: putative translation elongation factor eEF-1 beta'chain
  misc_feature (14)..(237): NCBI GI NO: 232031 NR Description: ELONGATION FACTOR 1-BETA' (EF-1-BETA')
  misc_feature (14)..(237): NCBI GI NO: 34899162 NR Description: putative translation elongation factor eEF-1 beta'chain
  misc_feature (14)..(237): NCBI GI NO: 232033 NR Description: ELONGATION FACTOR 1-BETA' (EF-1-BETA')
  misc_feature (14)..(237): NCBI GI NO: 6015064 NR Description: ELONGATION FACTOR 1-BETA (EF-1-BETA)
  misc_feature (14)..(237): NCBI GI NO: 38232568 NR Description: translational elongation factor 1 subunit Bbeta
  misc_feature (14)..(237): NCBI GI NO: 6166140 NR Description: ELONGATION FACTOR 1-BETA (EF-1-BETA)
FFHFLPPNPKSASMAITFSDLHTEEGLKSVEEHLAGKTYISGDQLSVDDVKVYAAVSVKPSDAFPNASRWFDCVASHLAKSFPGKAVGVSIGGSAAAAPAQAEAPAAAAADDDDDMDLFGDETEEEKKAAEEREAAKKDTKKPKESGKSSVLMEVKPWDDETDMKKLEECVRAVEMPGLLWGASKLVPVGYGIKKLTIMLTIVDDLVSPDNLIEDYLTCEPNNEYIQSVDIVAFNKI

SEQ ID NO: 19644 - protein, 224 aa, Zea mays subsp. mays
  peptide (1)..(224): Ceres Seq. ID no. 13599330
  misc_feature (135)..(224): Pfam Name: Pfam Description:  EF-1 guanine nucleotide exchange domain
  misc_feature (1)..(224): NCBI GI NO: 30687350 NR Description: elongation factor 1B alpha-subunit
  misc_feature (1)..(224): NCBI GI NO: 15239877 NR Description: elongation factor 1B alpha-subunit (emb|CAB64729
  misc_feature (19)..(224): NCBI GI NO: 27754711 NR Description: putative elongation factor 1B alpha-subunit
  misc_feature (1)..(224): NCBI GI NO: 38175744 NR Description: putative translation elongation factor eEF-1 beta'chain
  misc_feature (1)..(224): NCBI GI NO: 232031 NR Description: ELONGATION FACTOR 1-BETA' (EF-1-BETA')
  misc_feature (1)..(224): NCBI GI NO: 34899162 NR Description: putative translation elongation factor eEF-1 beta'chain
  misc_feature (1)..(224): NCBI GI NO: 232033 NR Description: ELONGATION FACTOR 1-BETA' (EF-1-BETA')
  misc_feature (1)..(224): NCBI GI NO: 6015064 NR Description: ELONGATION FACTOR 1-BETA (EF-1-BETA)
  misc_feature (1)..(224): NCBI GI NO: 38232568 NR Description: translational elongation factor 1 subunit Bbeta
  misc_feature (1)..(224): NCBI GI NO: 6166140 NR Description: ELONGATION FACTOR 1-BETA (EF-1-BETA)
MAITFSDLHTEEGLKSVEEHLAGKTYISGDQLSVDDVKVYAAVSVKPSDAFPNASRWFDCVASHLAKSFPGKAVGVSIGGSAAAAPAQAEAPAAAAADDDDDMDLFGDETEEEKKAAEEREAAKKDTKKPKESGKSSVLMEVKPWDDETDMKKLEECVRAVEMPGLLWGASKLVPVGYGIKKLTIMLTIVDDLVSPDNLIEDYLTCEPNNEYIQSVDIVAFNKI

SEQ ID NO: 19645 - protein, 122 aa, Zea mays subsp. mays
  peptide (1)..(122): Ceres Seq. ID no. 13599331
  misc_feature (33)..(122): Pfam Name: Pfam Description:  EF-1 guanine nucleotide exchange domain
  misc_feature (1)..(122): NCBI GI NO: 30687350 NR Description: elongation factor 1B alpha-subunit
  misc_feature (1)..(122): NCBI GI NO: 15239877 NR Description: elongation factor 1B alpha-subunit (emb|CAB64729
  misc_feature (1)..(122): NCBI GI NO: 27754711 NR Description: putative elongation factor 1B alpha-subunit
  misc_feature (1)..(122): NCBI GI NO: 38175744 NR Description: putative translation elongation factor eEF-1 beta'chain
  misc_feature (1)..(122): NCBI GI NO: 232031 NR Description: ELONGATION FACTOR 1-BETA' (EF-1-BETA')
  misc_feature (1)..(122): NCBI GI NO: 34899162 NR Description: putative translation elongation factor eEF-1 beta'chain
  misc_feature (1)..(122): NCBI GI NO: 232033 NR Description: ELONGATION FACTOR 1-BETA' (EF-1-BETA')
  misc_feature (1)..(122): NCBI GI NO: 6015064 NR Description: ELONGATION FACTOR 1-BETA (EF-1-BETA)
  misc_feature (1)..(122): NCBI GI NO: 38232568 NR Description: translational elongation factor 1 subunit Bbeta
  misc_feature (1)..(122): NCBI GI NO: 6166140 NR Description: ELONGATION FACTOR 1-BETA (EF-1-BETA)
MDLFGDETEEEKKAAEEREAAKKDTKKPKESGKSSVLMEVKPWDDETDMKKLEECVRAVEMPGLLWGASKLVPVGYGIKKLTIMLTIVDDLVSPDNLIEDYLTCEPNNEYIQSVDIVAFNKI

SEQ ID NO: 19646 - DNA, 1267 bp, Zea mays subsp. mays
  misc_feature (1)..(1267): Ceres Seq. ID no. 13599575
tacctagaacatcctaatcgaaaactctctctctctctagcctctccattccgtgtggcgaccgagcgaaccctagccgagattagactaccatccccaatctaccggaggaggacgaggacgacgccgacgagatgctgagggttgcggggaggaggctctcgtcttcgctctcctggcgccccgtggcgaccgtcggagccaggggcccgctcgctggcgccggcggccctgggagagacgacgacgacggttcggcctaccagcggcggttcgccatcgagtcccccttcttcaccgccgcgagaggcttttcttcagctgaaacacttgttccacggaaccaagatgctgggttggctgaactcccagccactgttgctgcactgaagaaccccaactcaaaaatcctttatgaccagtacaaccatgaaagatatcctcctggagatcccagcaagcgtgcctttgcctactttgttctgagtggtgggagattcgtatatgcatcactgctgcgtctccttgtcttgaagtttgtcttgagcatgtcagcaagtaaggatgtgcttgcacttgcttcccttgaggttgatctatccagcattgaacccggtagcacagtgactgtcaagtggcgtggaaagccagtcttcatcaggcgacggacagacgatgacatcaagctggccaacagcgtggatgttgcatccctgcgccacccagagcaagacgctgagcgtgtgaagaacccagagtggctggtggttattggtgtctgcactcatcttggttgcattccccttcccaactctggagactttggtggctggttctgcccgtgccatggctcccactatgacatctctggcagaatccgcaagggccctgccccgtacaaccttgaggtgcccacctacagtttcttggaagataacaagatgctcataggctaagagcctaaaaccagtacctaccgacatatattatccacaggagtgaattcctgttgcgctgttattttgttttcaatgtggctaggagtttttgtttcaggactattgcaacggtgatccactgttacctactgaagttcatttgcagtgcgaaataattatttctcctatgttgctactggattgcaagttgttttgtactgattttctgagaccctatcggaaggatattgtatacctcttctggtccttgctacctatatatttgttaaataagcaaacatactattcttctaaaaaaaaaaaaaaaa

SEQ ID NO: 19647 - protein, 273 aa, Zea mays subsp. mays; identical to SEQ ID NO: 6724
  peptide (1)..(273): Ceres Seq. ID no. 13599576
  misc_feature (173)..(269): Pfam Name: Pfam Description:  Rieske [2Fe-2S] domain
  misc_feature (1)..(273): NCBI GI NO: 1717957 NR Description: Ubiquinol-cytochrome C reductase iron-sulfur subunit
  misc_feature (1)..(273): NCBI GI NO: 38347166 NR Description: OSJNBa0039C07.12
  misc_feature (1)..(273): NCBI GI NO: 1076675 NR Description: ubiquinol-cytochrome-c reductase (EC 1
  misc_feature (1)..(273): NCBI GI NO: 1717950 NR Description: Ubiquinol-cytochrome C reductase iron-sulfur subunit 2
  misc_feature (1)..(273): NCBI GI NO: 586145 NR Description: Ubiquinol-cytochrome C reductase iron-sulfur subunit
  misc_feature (1)..(273): NCBI GI NO: 1717953 NR Description: Ubiquinol-cytochrome C reductase iron-sulfur subunit 5
  misc_feature (1)..(273): NCBI GI NO: 1717951 NR Description: Ubiquinol-cytochrome C reductase iron-sulfur subunit 3
  misc_feature (36)..(273): NCBI GI NO: 1717949 NR Description: Ubiquinol-cytochrome C reductase iron-sulfur subunit 1
  misc_feature (1)..(273): NCBI GI NO: 18417067 NR Description: ubiquinol--cytochrome C reductase
  misc_feature (1)..(273): NCBI GI NO: 21553507 NR Description: ubiquinol--cytochrome-c reductase-like protein

SEQ ID NO: 19648 - DNA, 1935 bp, Zea mays subsp. mays
  misc_feature (1)..(1935): Ceres Seq. ID no. 12637422
gaccgatgccgctgctgctgcgcggcgcctccctcctccgcctctgccagtgtaccagtgggctctcaagtgtgaaatttagttcaagagtaacggtactagtgaatctcaacgccatgagggacggaatgcgggccacatattcacgtagagctgcctctaagaacagtgaggtcaagaaagatgagcagccactcacagagaaggaagatgctgctgaaagtgatttggagatggagcgagggaggagcagcagccctagccagctccaatcaatgactgtcaaggagctcagggagctcacgaggaggaggggtatttctgtgaaaggtaccaagaaagatttagtatcagcactgatgaattctatggccgtggaagcaaatggtgaagagggaaagtcatccgttgagctggttagccccttggaagtacctttgaaaagaaaaggtggtgcttctgttgtggttgaacaaaaactagaaagttctgagattatttctgaaacacctaacaagaaaagaagtagaacaaaacaaaaatcaagcaagaacaccacttgtcaggaaatttcggtgactaatgtcaagctaagtaagactgttgtccagaaggaaacagttgacggattaagtcctgatgatgattcagagccttggactatactcgtgcataagaaaccagaagccagctggattccatacaaccctaggactatgaggcctccacctcttagcaaggatacacgggctctgaagattatgtcatggaatgtcaatggattgaaagcattgctcaaatcaagaggcttctctgtgcagcagttagcacagagggaggactttgatgtgctttgcttacaagaaacaaaaatgcaggagaaggatattgaagttattaaggacactttgcttgatggctacacaaatagtttctggacttgcagtgtgtcaaagcttggctattctggcactgcaataatttcaagagtcaaaccactgtcgatcaagtatgggcttggtataccagaccatgatactgaagggagggttgtgactgtagagtttgatgacttctacctgttaactgcttatgtaccaaactctggtgatggtctaaaaagattgacttacagggtcacagagtgggatccatcccttggtaactacatgaaagaattggagaaatcgaagcctgtcatactaaccggtgatcttaattgtgcgcatcaggagattgatatacatgaccctgctggaaatcgtagaagtgctggcttcacaaacgaggaaagagaatcatttgggaccaattttttgtccaaagggttcgttgatacgtttcggaaacagcatcctaatgttgttgcctatagttactgggggtacagacataatgcccggaagacaaacaaaggttggcgcctggattactttcttgtgtccgaatcaatcgcagaaaaagtgcatgattcatatattcttccggacatctctgccagtgatcacagtccccttggtctcgtgctgaagctgtaggctgtatcacaggctatgccaaacattcagtctgaagcttgtgccatatttctcagacagcgatgcttattcctgatggtttctggttcgttcagattcctggcaggaacaaggacttttgtcagactattagtgaaacaaggctttgtaatgcactgagcagatttgagactattagtggacaacttactgttagcaaagctgcacctttgtaatgtaaatatgcggccatatcttgtgctgcacttgtgcagctcaatatgagcagcaggggaagctcattacctggtcatggaattatgatactgaccttaacctgttgaggtctttaaactatcttgtcatgtgctgtgccgctgatggcgtcagaaaataactgtgccatgcaatttcacgc

SEQ ID NO: 19649 - protein, 511 aa, Zea mays subsp. mays
  peptide (1)..(511): Ceres Seq. ID no. 12637423
  misc_feature (251)..(509): Pfam Name: Pfam Description:  Endonuclease/Exonuclease/phosphatase family
  misc_feature (78)..(511): NCBI GI NO: 34908948 NR Description: putative exodeoxyribonuclease
  misc_feature (156)..(511): NCBI GI NO: 472869 NR Description: ARP protein [Arabidopsis thaliana]
  misc_feature (156)..(511): NCBI GI NO: 15227354 NR Description: DNA-
  misc_feature (53)..(203): NCBI GI NO: 472869 NR Description: ARP protein [Arabidopsis thaliana]
  misc_feature (53)..(203): NCBI GI NO: 15227354 NR Description: DNA-
  misc_feature (212)..(511): NCBI GI NO: 34908950 NR Description: putative exodeoxyribonuclease
  misc_feature (251)..(511): NCBI GI NO: 16800960 NR Description: similar to 3'-exo-deoxyribonuclease exoA
  misc_feature (251)..(511): NCBI GI NO: 16803822 NR Description: similar to 3'-exo-deoxyribonuclease exoA
  misc_feature (251)..(510): NCBI GI NO: 20808602 NR Description: Exonuclease III [Thermoanaerobacter tengcongensis]
  misc_feature (251)..(511): NCBI GI NO: 16081140 NR Description: 3'-exo-deoxyribonuclease [Bacillus subtilis]
PMPLLLRGASLLRLCQCTSGLSSVKFSSRVTVLVNLNAMRDGMRATYSRRAASKNSEVKKDEQPLTEKEDAAESDLEMERGRSSSPSQLQSMTVKELRELTRRRGISVKGTKKDLVSALMNSMAVEANGEEGKSSVELVSPLEVPLKRKGGASVVVEQKLESSEIISETPNKKRSRTKQKSSKNTTCQEISVTNVKLSKTVVQKETVDGLSPDDDSEPWTILVHKKPEASWIPYNPRTMRPPPLSKDTRALKIMSWNVNGLKALLKSRGFSVQQLAQREDFDVLCLQETKMQEKDIEVIKDTLLDGYTNSFWTCSVSKLGYSGTAIISRVKPLSIKYGLGIPDHDTEGRVVTVEFDDFYLLTAYVPNSGDGLKRLTYRVTEWDPSLGNYMKELEKSKPVILTGDLNCAHQEIDIHDPAGNRRSAGFTNEERESFGTNFLSKGFVDTFRKQHPNVVAYSYWGYRHNARKTNKGWRLDYFLVSESIAEKVHDSYILPDISASDHSPLGLVLKL

SEQ ID NO: 19650 - protein, 510 aa, Zea mays subsp. mays
  peptide (1)..(510): Ceres Seq. ID no. 12637424
  misc_feature (250)..(508): Pfam Name: Pfam Description:  Endonuclease/Exonuclease/phosphatase family
  misc_feature (77)..(510): NCBI GI NO: 34908948 NR Description: putative exodeoxyribonuclease
  misc_feature (155)..(510): NCBI GI NO: 472869 NR Description: ARP protein [Arabidopsis thaliana]
  misc_feature (155)..(510): NCBI GI NO: 15227354 NR Description: DNA-
  misc_feature (52)..(202): NCBI GI NO: 472869 NR Description: ARP protein [Arabidopsis thaliana]
  misc_feature (52)..(202): NCBI GI NO: 15227354 NR Description: DNA-
  misc_feature (211)..(510): NCBI GI NO: 34908950 NR Description: putative exodeoxyribonuclease
  misc_feature (250)..(510): NCBI GI NO: 16800960 NR Description: similar to 3'-exo-deoxyribonuclease exoA
  misc_feature (250)..(510): NCBI GI NO: 16803822 NR Description: similar to 3'-exo-deoxyribonuclease exoA
  misc_feature (250)..(509): NCBI GI NO: 20808602 NR Description: Exonuclease III [Thermoanaerobacter tengcongensis]
  misc_feature (250)..(510): NCBI GI NO: 16081140 NR Description: 3'-exo-deoxyribonuclease [Bacillus subtilis]
MPLLLRGASLLRLCQCTSGLSSVKFSSRVTVLVNLNAMRDGMRATYSRRAASKNSEVKKDEQPLTEKEDAAESDLEMERGRSSSPSQLQSMTVKELRELTRRRGISVKGTKKDLVSALMNSMAVEANGEEGKSSVELVSPLEVPLKRKGGASVVVEQKLESSEIISETPNKKRSRTKQKSSKNTTCQEISVTNVKLSKTVVQKETVDGLSPDDDSEPWTILVHKKPEASWIPYNPRTMRPPPLSKDTRALKIMSWNVNGLKALLKSRGFSVQQLAQREDFDVLCLQETKMQEKDIEVIKDTLLDGYTNSFWTCSVSKLGYSGTAIISRVKPLSIKYGLGIPDHDTEGRVVTVEFDDFYLLTAYVPNSGDGLKRLTYRVTEWDPSLGNYMKELEKSKPVILTGDLNCAHQEIDIHDPAGNRRSAGFTNEERESFGTNFLSKGFVDTFRKQHPNVVAYSYWGYRHNARKTNKGWRLDYFLVSESIAEKVHDSYILPDISASDHSPLGLVLKL

SEQ ID NO: 19651 - protein, 473 aa, Zea mays subsp. mays
  peptide (1)..(473): Ceres Seq. ID no. 12637425
  misc_feature (213)..(471): Pfam Name: Pfam Description:  Endonuclease/Exonuclease/phosphatase family
  misc_feature (40)..(473): NCBI GI NO: 34908948 NR Description: putative exodeoxyribonuclease
  misc_feature (118)..(473): NCBI GI NO: 472869 NR Description: ARP protein [Arabidopsis thaliana]
  misc_feature (118)..(473): NCBI GI NO: 15227354 NR Description: DNA-
  misc_feature (15)..(165): NCBI GI NO: 472869 NR Description: ARP protein [Arabidopsis thaliana]
  misc_feature (15)..(165): NCBI GI NO: 15227354 NR Description: DNA-
  misc_feature (174)..(473): NCBI GI NO: 34908950 NR Description: putative exodeoxyribonuclease
  misc_feature (213)..(473): NCBI GI NO: 16800960 NR Description: similar to 3'-exo-deoxyribonuclease exoA
  misc_feature (213)..(473): NCBI GI NO: 16803822 NR Description: similar to 3'-exo-deoxyribonuclease exoA
  misc_feature (213)..(472): NCBI GI NO: 20808602 NR Description: Exonuclease III [Thermoanaerobacter tengcongensis]
  misc_feature (213)..(473): NCBI GI NO: 16081140 NR Description: 3'-exo-deoxyribonuclease [Bacillus subtilis]
MRDGMRATYSRRAASKNSEVKKDEQPLTEKEDAAESDLEMERGRSSSPSQLQSMTVKELRELTRRRGISVKGTKKDLVSALMNSMAVEANGEEGKSSVELVSPLEVPLKRKGGASVVVEQKLESSEIISETPNKKRSRTKQKSSKNTTCQEISVTNVKLSKTVVQKETVDGLSPDDDSEPWTILVHKKPEASWIPYNPRTMRPPPLSKDTRALKIMSWNVNGLKALLKSRGFSVQQLAQREDFDVLCLQETKMQEKDIEVIKDTLLDGYTNSFWTCSVSKLGYSGTAIISRVKPLSIKYGLGIPDHDTEGRVVTVEFDDFYLLTAYVPNSGDGLKRLTYRVTEWDPSLGNYMKELEKSKPVILTGDLNCAHQEIDIHDPAGNRRSAGFTNEERESFGTNFLSKGFVDTFRKQHPNVVAYSYWGYRHNARKTNKGWRLDYFLVSESIAEKVHDSYILPDISASDHSPLGLVLKL

SEQ ID NO: 19652 - DNA, 2270 bp, Zea mays subsp. mays
  misc_feature (1)..(2270): Ceres Seq. ID no. 13624495
gctcactagtccccccccccccccccccccattccgcgcagttccgcgtgcgaggaacaggaaccgctgctgctctctgcctccgctccgatcctgcttgcgctcgagaaccgcgacgccgacgcccttccttgacgcgttgttgatctgcgagctcagatctgcatattagagaagatttttcgtatattctggtgaacatgaagagaaaggcgcagtcaggaaaatctcgctcatggtggtgggacaatcatattagtccacaaaattctaagtgtctctctaaaaatctagaagaaatggagaagcaggtgaaacaaatgttggggctcattggcgaaggagagttttctgcagaaaaagcggaggtgttctatgagaagcggcctttacttattactcatgtggagaacttctattgcatgtatcgtgctcttgctgcacgatatgacgatgtaactggacaactacgcaaaaacattccatcatctcttcaatcatatggctcggttggtgtctctgaatcagattctgagacacaatgtttcacatctccagagtttgatatgccacagcaaaagcaaaagcctggaccagatttccttgatttttccattggctctggtgttagctctgatgtatcaaagaagggtagtgaaaggtcttcatcatcttcagattctgattcagagcttgatgaggccaaagaggaaaatggtagtattttttatgccttgagccaaaaaaatattgagctagaagatgagcttcaagaagtaaggggaaaacttgatgctttagaggaaaaacatgctcattgccaaagagatttgagtaccaactcaaaagttactgaacatgattctgctttagagagctcaacaaaagtcaacagcgaaaaggaagcattggaagctgtgctgtttgagcggaaaaatgagattgaaatgctgaaaggtgcaatggcctcagctgctaagcagtttgaagttgaattggcacatcgtgatcttgaaattggtaagtgcaagcatgaacttggagtactctcggagaagtatttgcatgataagtctactctcgaggatgagcttagaaggctccatggaataatcaagaatatggaaggtgacttagaaaaaatttcacaggagagattgcagctcaggtctcggattaaagagctcgagcaggcagctcacagcttagactattcagcttccgagatagttgagctacaagaagtaataaggaatacacaagcagaattagaaaaggtcacaaaggagaaagaagtgctcaaagaacacgctaacgaatttgagcaacttttaaagggccttgaggtctcaggtacagaggttgcaaagctaccagaaactatcaagaacctggaagcccagctagaaagatccttcgaagagaaatcagtactccaagaccagatcaagcagctggagcaggttatgtctgaatcttcggagaaacattcacatgagcagttctctcttactgcggatcttttgaagttatctgaagtgaacgcttctcttgaaggcaaattgtccgatgtggcggcagagcttatccaagtttatgctgacaaggaagaagaatctctcgataatgagaagcaaatttctgtcctcagtaaagatattgctgatctcaggagaaagcttgaattgttgtcatctgagaaaaccacagttgatgatgagttggccaaactgctagctgatattatgattcgtgacgaaaagatgaagcaaatggatgaccacctaaatcagcttcagttagagcatgccaagctgatggcagaatttgacaatgcacacaggtccttgtcagagctgcatgcgcaggtttctgagctggaagacgaggtagagaagcagaagcttgtgatatccgagagtgcagagggaaagcgggaggccatcaggcagctgtgcttctccattgaacactaccgcagcgggtatcagcagctgaggcagctgctgcaaggccacaggaggccgttggtgatggcaacctgataaatgaacaaagtccgtttgccaacaaattgcgcagttgcttgtctctgggcgtgttctatttgtagctctgttctttcacaacttgtgccgtgtagtttatgttataaagaattctgtgtggtatgtgtgtagaatgtaatgggatgggatatttatgttgttccttcatactcctatgrstgtttttthcwcttgctgttggaactggaggggggaaaggat

SEQ ID NO: 19653 - protein, 614 aa, Zea mays subsp. mays
  peptide (1)..(614): Ceres Seq. ID no. 15218761
  misc_feature (27)..(581): Pfam Name: Pfam Description:  Myosin tail
  misc_feature (5)..(526): NCBI GI NO: 22002966 NR Description: putative CENP-E like kinetochore protein
  misc_feature (159)..(613): NCBI GI NO: 34896156 NR Description: P0701D05.33
  misc_feature (1)..(546): NCBI GI NO: 34896156 NR Description: P0701D05.33
  misc_feature (156)..(613): NCBI GI NO: 22002966 NR Description: putative CENP-E like kinetochore protein
  misc_feature (9)..(423): NCBI GI NO: 34896152 NR Description: P0701D05.31
  misc_feature (3)..(520): NCBI GI NO: 8777333 NR Description: contains similarity to unknownprotein~gb|AAB63087
  misc_feature (3)..(520): NCBI GI NO: 30697046 NR Description: contains similarity to unknown protein(gb|AAB63087
  misc_feature (3)..(452): NCBI GI NO: 30697043 NR Description: contains similarity to unknown protein(gb|AAB63087
  misc_feature (3)..(433): NCBI GI NO: 15224515 NR Description: expressed protein [Arabidopsis thaliana]
  misc_feature (3)..(433): NCBI GI NO: 28416683 NR Description: At2g30500 [Arabidopsis thaliana]
MKRKAQSGKSRSWWWDNHISPQNSKCLSKNLEEMEKQVKQMLGLIGEGEFSAEKAEVFYEKRPLLITHVENFYCMYRALAARYDDVTGQLRKNIPSSLQSYGSVGVSESDSETQCFTSPEFDMPQQKQKPGPDFLDFSIGSGVSSDVSKKGSERSSSSSDSDSELDEAKEENGSIFYALSQKNIELEDELQEVRGKLDALEEKHAHCQRDLSTNSKVTEHDSALESSTKVNSEKEALEAVLFERKNEIEMLKGAMASAAKQFEVELAHRDLEIGKCKHELGVLSEKYLHDKSTLEDELRRLHGIIKNMEGDLEKISQERLQLRSRIKELEQAAHSLDYSASEIVELQEVIRNTQAELEKVTKEKEVLKEHANEFEQLLKGLEVSGTEVAKLPETIKNLEAQLERSFEEKSVLQDQIKQLEQVMSESSEKHSHEQFSLTADLLKLSEVNASLEGKLSDVAAELIQVYADKEEESLDNEKQISVLSKDIADLRRKLELLSSEKTTVDDELAKLLADIMIRDEKMKQMDDHLNQLQLEHAKLMAEFDNAHRSLSELHAQVSELEDEVEKQKLVISESAEGKREAIRQLCFSIEHYRSGYQQLRQLLQGHRRPLVMAT

SEQ ID NO: 19654 - protein, 581 aa, Zea mays subsp. mays
  peptide (1)..(581): Ceres Seq. ID no. 15218762
  misc_feature (1)..(548): Pfam Name: Pfam Description:  Myosin tail
  misc_feature (1)..(493): NCBI GI NO: 22002966 NR Description: putative CENP-E like kinetochore protein
  misc_feature (126)..(580): NCBI GI NO: 34896156 NR Description: P0701D05.33
  misc_feature (1)..(513): NCBI GI NO: 34896156 NR Description: P0701D05.33
  misc_feature (123)..(580): NCBI GI NO: 22002966 NR Description: putative CENP-E like kinetochore protein
  misc_feature (1)..(390): NCBI GI NO: 34896152 NR Description: P0701D05.31
  misc_feature (1)..(487): NCBI GI NO: 8777333 NR Description: contains similarity to unknownprotein~gb|AAB63087
  misc_feature (1)..(487): NCBI GI NO: 30697046 NR Description: contains similarity to unknown protein(gb|AAB63087
  misc_feature (1)..(419): NCBI GI NO: 30697043 NR Description: contains similarity to unknown protein(gb|AAB63087
  misc_feature (1)..(400): NCBI GI NO: 15224515 NR Description: expressed protein [Arabidopsis thaliana]
  misc_feature (1)..(400): NCBI GI NO: 28416683 NR Description: At2g30500 [Arabidopsis thaliana]
MEKQVKQMLGLIGEGEFSAEKAEVFYEKRPLLITHVENFYCMYRALAARYDDVTGQLRKNIPSSLQSYGSVGVSESDSETQCFTSPEFDMPQQKQKPGPDFLDFSIGSGVSSDVSKKGSERSSSSSDSDSELDEAKEENGSIFYALSQKNIELEDELQEVRGKLDALEEKHAHCQRDLSTNSKVTEHDSALESSTKVNSEKEALEAVLFERKNEIEMLKGAMASAAKQFEVELAHRDLEIGKCKHELGVLSEKYLHDKSTLEDELRRLHGIIKNMEGDLEKISQERLQLRSRIKELEQAAHSLDYSASEIVELQEVIRNTQAELEKVTKEKEVLKEHANEFEQLLKGLEVSGTEVAKLPETIKNLEAQLERSFEEKSVLQDQIKQLEQVMSESSEKHSHEQFSLTADLLKLSEVNASLEGKLSDVAAELIQVYADKEEESLDNEKQISVLSKDIADLRRKLELLSSEKTTVDDELAKLLADIMIRDEKMKQMDDHLNQLQLEHAKLMAEFDNAHRSLSELHAQVSELEDEVEKQKLVISESAEGKREAIRQLCFSIEHYRSGYQQLRQLLQGHRRPLVMAT

SEQ ID NO: 19655 - protein, 574 aa, Zea mays subsp. mays
  peptide (1)..(574): Ceres Seq. ID no. 15218763
  misc_feature (1)..(541): Pfam Name: Pfam Description:  Myosin tail
  misc_feature (1)..(486): NCBI GI NO: 22002966 NR Description: putative CENP-E like kinetochore protein
  misc_feature (119)..(573): NCBI GI NO: 34896156 NR Description: P0701D05.33
  misc_feature (1)..(506): NCBI GI NO: 34896156 NR Description: P0701D05.33
  misc_feature (116)..(573): NCBI GI NO: 22002966 NR Description: putative CENP-E like kinetochore protein
  misc_feature (1)..(383): NCBI GI NO: 34896152 NR Description: P0701D05.31
  misc_feature (1)..(480): NCBI GI NO: 8777333 NR Description: contains similarity to unknownprotein~gb|AAB63087
  misc_feature (1)..(480): NCBI GI NO: 30697046 NR Description: contains similarity to unknown protein(gb|AAB63087
  misc_feature (1)..(412): NCBI GI NO: 30697043 NR Description: contains similarity to unknown protein(gb|AAB63087
  misc_feature (1)..(393): NCBI GI NO: 15224515 NR Description: expressed protein [Arabidopsis thaliana]
  misc_feature (1)..(393): NCBI GI NO: 28416683 NR Description: At2g30500 [Arabidopsis thaliana]
MLGLIGEGEFSAEKAEVFYEKRPLLITHVENFYCMYRALAARYDDVTGQLRKNIPSSLQSYGSVGVSESDSETQCFTSPEFDMPQQKQKPGPDFLDFSIGSGVSSDVSKKGSERSSSSSDSDSELDEAKEENGSIFYALSQKNIELEDELQEVRGKLDALEEKHAHCQRDLSTNSKVTEHDSALESSTKVNSEKEALEAVLFERKNEIEMLKGAMASAAKQFEVELAHRDLEIGKCKHELGVLSEKYLHDKSTLEDELRRLHGIIKNMEGDLEKISQERLQLRSRIKELEQAAHSLDYSASEIVELQEVIRNTQAELEKVTKEKEVLKEHANEFEQLLKGLEVSGTEVAKLPETIKNLEAQLERSFEEKSVLQDQIKQLEQVMSESSEKHSHEQFSLTADLLKLSEVNASLEGKLSDVAAELIQVYADKEEESLDNEKQISVLSKDIADLRRKLELLSSEKTTVDDELAKLLADIMIRDEKMKQMDDHLNQLQLEHAKLMAEFDNAHRSLSELHAQVSELEDEVEKQKLVISESAEGKREAIRQLCFSIEHYRSGYQQLRQLLQGHRRPLVMAT

SEQ ID NO: 19656 - DNA, 1581 bp, Zea mays subsp. mays
  misc_feature (1)..(1581): Ceres Seq. ID no. 15224454
tagtcccccccccccccaaaaaatggagaaatgcttggtgtatcgcatctaagaaacagaagacttttgtccaatgggtttgtttcattagggaaggaggatcttcagctcatgtatagtgatggtgataaggcttttggtacatccactgatctttgcattgatgagagactaagaatcgcatctgatggcattatttttgtcagcatggagatctttcgacctcagaaggaacatggtttagcgtagactgggttgaaaggaaaatttaagattactacaagatgtctatggcttgataatggaagattgttggacgcactctacaaagcagctcatgctgcattgtcaagttgtcctgtgaattgtccacttagtcacatggagaggatggtagctgaaatcttgaggaaaatggtacggaagtatagtgggaagaggcctgacgtcattgcggttgctatggagaacaccacagcaagtttctcagaacacctcgatgctaaatcatctggaaattttgaaccttcctcagctactagccatctgagcaggagtccagctatgagtcttgaaggcagttataaaacacacccagacaacccagaggtggatgctgaagaaacccttcctgaggccacgagaacagcaccggatgatgcaactacaagttccaatggtgaagcattcttctcttcagatttacatcagcctaaaacattggagcacttatgggagtcattcaaatctcctacagttgttaaaattgcacggattgtcaatggggggaagaagcacaatctcggcaagattggcataatgggtaaggactcagcaatccagtcagctcccgctccagctaaatcttcaaaaaagaacaagtggaaacctgaggaaatcaagagcttaatacagatgcgtggcgagatgaatgggagatttcagagcgtgaaaggaagaatggtcctgtgggaggagattttcgacaacatgttgaagcaaggaataagtcgtactctggcacagtgcaaatcgctttggacatcgttagttcagaaatacgaggttagggacaaattctgtttcttccgagttctaaaaaaccaccaccggaaagcaagtacagaagaatgttttgctccatctgtagaacgaagcaagatagcttcagattgcggttgcaatgtctgacagcggtaatttctctgtcgttggcaggaaagcaagaaggacgtggagagcatgaagacgtggccatatttctcggccatggataggatcctatcgcagcaaggggaaagctgggaatgctttcaaactacagatgaacaggatatgaaggcagccttgttccaaaagcagtcttttggtgatgtacatggagcttttgcatagagtagtttatgtggcagttattcaataattttcatctggtggatgtatagggttcgtatagcaacatttccttgtagaaagttgaagttgtatatcgagggtggatttacctgtgtttatcttttcgaccccaagcctctggaagctgtgaaccatagcctcataaaatatgcctgttgttgattc

SEQ ID NO: 19657 - protein, 269 aa, Zea mays subsp. mays
  peptide (1)..(269): Ceres Seq. ID no. 15224455
  misc_feature (168)..(224): Pfam Name: Pfam Description:  Myb-like DNA-binding domain
  misc_feature (1)..(98): NCBI GI NO: 28393617 NR Description: unknown protein [Arabidopsis thaliana]
  misc_feature (155)..(269): NCBI GI NO: 28393617 NR Description: unknown protein [Arabidopsis thaliana]
  misc_feature (73)..(228): NCBI GI NO: 15242756 NR Description: expressed protein [Arabidopsis thaliana]
  misc_feature (1)..(98): NCBI GI NO: 15242756 NR Description: expressed protein [Arabidopsis thaliana]
  misc_feature (155)..(269): NCBI GI NO: 15242756 NR Description: expressed protein [Arabidopsis thaliana]
MERMVAEILRKMVRKYSGKRPDVIAVAMENTTASFSEHLDAKSSGNFEPSSATSHLSRSPAMSLEGSYKTHPDNPEVDAEETLPEATRTAPDDATTSSNGEAFFSSDLHQPKTLEHLWESFKSPTVVKIARIVNGGKKHNLGKIGIMGKDSAIQSAPAPAKSSKKNKWKPEEIKSLIQMRGEMNGRFQSVKGRMVLWEEIFDNMLKQGISRTLAQCKSLWTSLVQKYEVRDKFCFFRVLKNHHRKASTEECFAPSVERSKIASDCGCNV

SEQ ID NO: 19658 - protein, 266 aa, Zea mays subsp. mays
  peptide (1)..(266): Ceres Seq. ID no. 15224456
  misc_feature (165)..(221): Pfam Name: Pfam Description:  Myb-like DNA-binding domain
  misc_feature (1)..(95): NCBI GI NO: 28393617 NR Description: unknown protein [Arabidopsis thaliana]
  misc_feature (152)..(266): NCBI GI NO: 28393617 NR Description: unknown protein [Arabidopsis thaliana]
  misc_feature (70)..(225): NCBI GI NO: 15242756 NR Description: expressed protein [Arabidopsis thaliana]
  misc_feature (1)..(95): NCBI GI NO: 15242756 NR Description: expressed protein [Arabidopsis thaliana]
  misc_feature (152)..(266): NCBI GI NO: 15242756 NR Description: expressed protein [Arabidopsis thaliana]
MVAEILRKMVRKYSGKRPDVIAVAMENTTASFSEHLDAKSSGNFEPSSATSHLSRSPAMSLEGSYKTHPDNPEVDAEETLPEATRTAPDDATTSSNGEAFFSSDLHQPKTLEHLWESFKSPTVVKIARIVNGGKKHNLGKIGIMGKDSAIQSAPAPAKSSKKNKWKPEEIKSLIQMRGEMNGRFQSVKGRMVLWEEIFDNMLKQGISRTLAQCKSLWTSLVQKYEVRDKFCFFRVLKNHHRKASTEECFAPSVERSKIASDCGCNV

SEQ ID NO: 19659 - protein, 258 aa, Zea mays subsp. mays
  peptide (1)..(258): Ceres Seq. ID no. 15224457
  misc_feature (157)..(213): Pfam Name: Pfam Description:  Myb-like DNA-binding domain
  misc_feature (1)..(87): NCBI GI NO: 28393617 NR Description: unknown protein [Arabidopsis thaliana]
  misc_feature (144)..(258): NCBI GI NO: 28393617 NR Description: unknown protein [Arabidopsis thaliana]
  misc_feature (62)..(217): NCBI GI NO: 15242756 NR Description: expressed protein [Arabidopsis thaliana]
  misc_feature (1)..(87): NCBI GI NO: 15242756 NR Description: expressed protein [Arabidopsis thaliana]
  misc_feature (144)..(258): NCBI GI NO: 15242756 NR Description: expressed protein [Arabidopsis thaliana]
MVRKYSGKRPDVIAVAMENTTASFSEHLDAKSSGNFEPSSATSHLSRSPAMSLEGSYKTHPDNPEVDAEETLPEATRTAPDDATTSSNGEAFFSSDLHQPKTLEHLWESFKSPTVVKIARIVNGGKKHNLGKIGIMGKDSAIQSAPAPAKSSKKNKWKPEEIKSLIQMRGEMNGRFQSVKGRMVLWEEIFDNMLKQGISRTLAQCKSLWTSLVQKYEVRDKFCFFRVLKNHHRKASTEECFAPSVERSKIASDCGCNV

SEQ ID NO: 19660 - DNA, 706 bp, Zea mays subsp. mays
  misc_feature (1)..(706): Ceres Seq. ID no. 13623650
aacaagcccctttccaggtcactgctgaccttgttcatatcgatttctttgttttgtagtcagttttgctgtgcagagttactctttcagtttgcctaatttaaaaggaaaaaaaactttacatgcaagaaataatggatgctgttaacaatagtggaaaatttgacacgaagtttggaggctttactggtactgacggtccattggggaagataatggagaattcaaaaactcgggctgagatcggttgggaaccaaagtatccaagcttcaccgaattccttggtatcagcagttaacatccttgcatagtgttcagttagtctgactcagctgagttgcaaccgtgattagattgtacatcgttaggggatggtacacagattcagttctgggaagataaatgggttggggtctgtcctttgaaagaccaatttccagatctgtacaacattgtgagaaagaaaaaggcaacagtagctaatgttcttcaacataatcaacttaatgtggcttttcgtcggtcacttaatgtaaataatctagctgctttgaataaggtagtagctagagtatttactattagtctatttgatcgaagagacacgtttgtttgggatcttctcccgcaaggtcagtttacggtcagctctatgtatagggctttagtcgccccgaacattgtttcgagaaaccaccccatctg

SEQ ID NO: 19661 - protein, 58 aa, Zea mays subsp. mays
  peptide (1)..(58): Ceres Seq. ID no. 13623651
  misc_feature (1)..(58): NCBI GI NO: 34914690 NR Description: P0560B06.4
  misc_feature (1)..(58): NCBI GI NO: 15225016 NR Description: expressed protein [Arabidopsis thaliana]
  misc_feature (1)..(58): NCBI GI NO: 17473602 NR Description: unknown protein [Arabidopsis thaliana]
MQEIMDAVNNSGKFDTKFGGFTGTDGPLGKIMENSKTRAEIGWEPKYPSFTEFLGISS

SEQ ID NO: 19662 - protein, 54 aa, Zea mays subsp. mays
  peptide (1)..(54): Ceres Seq. ID no. 13623652
  misc_feature (1)..(54): NCBI GI NO: 34914690 NR Description: P0560B06.4
  misc_feature (1)..(54): NCBI GI NO: 15225016 NR Description: expressed protein [Arabidopsis thaliana]
  misc_feature (1)..(54): NCBI GI NO: 17473602 NR Description: unknown protein [Arabidopsis thaliana]
MDAVNNSGKFDTKFGGFTGTDGPLGKIMENSKTRAEIGWEPKYPSFTEFLGISS

SEQ ID NO: 19663 - protein, 32 aa, Zea mays subsp. mays
  peptide (1)..(32): Ceres Seq. ID no. 13623653
NKPLSRSLLTLFISISLFCSQFCCAELLFQFA

SEQ ID NO: 19664 - DNA, 1960 bp, Zea mays subsp. mays
  misc_feature (1)..(1960): Ceres Seq. ID no. 13600301
gaacttcagtagattgagggatctaagagagtcaagggtagctgaagtagttccattgaaagaagttgaagaggaaatcatgtccagaaggcatacagaaatttctgatgataatacaccacctgagcaggaaagagagccaaagcaaggtgggaccggaaaaccaagtcagttggtggatacttcaaccaaagctacatctgagcaggttgctgcaaagttggaggaaagtgaaatggaaaaagaattatgtgcagaggcagaggacccttcagagttcatcactcatcgagccaaagattttgtgtcgagcatgaaggacattgaaacccggtttatgcgtgcagctgaagcaggaaatgaggtttccagaatgcttgaaaccaagaagatccgacttgacatatgtgctaaaataccaggttctccagtcaagctaccttctgcccgatttgtgtcagcacttcgagtgtgctgcaatcgtgatgttattctcaaccaggaaactgcgcagcatgtttcaaaggttgtcacatggaagcgttctgtctcatctctttcatcatcatctaagagtgcacttatgacatcgataatgaaagatgatgtggatgacagtaatagtgattttgttgaggaattcgccatggtatccggaagccattcttctacgttggacaggctacacgcatgggagagaaaactatatgatgaaatcaaggcaagtgaaaatgttaggaaggcctatgatgagaaatgtaacctactccgacgccaatttgcacgaggcctaaatgcgcaggtgattgataagactagagctgttgtgaaggatctccattccagggtatctgttgtgattcaagctgttgatgcaatctccaaaagaattgagaagataagggatgaagaactgcagccacagcttgtcgagctaattcaagggctaatcagaatgtggaaactgatgctggaatgtcaccacaaacagttcatcacgatcacattagcataccacgtgaaagactcgacctcggcgcgtcaaggtgagcaccaccatcaccgccaggcggcgatgcatctgtggaatgagatggacagcttctcctccagcttcagaaactgggtcaccgctcacaaatcgtacgtcgaggccctcaacgcgtggctccagaagtgcgtcctgcagccgccccaggaccggcgcaggcgcaaacgcaaggtctccttccctcctcggcaggccgtctcccctcccatattcatcctctgcggggactggctcgccaggacagaacctctccctgctgacgagctatgcagatccctcaaagacgtgatgcagctcctccgcgactcgttcgagcaccgcgacgagcagaacaggcccagaagcggcgagtcgcaggagtgcgggatgctggagaacagtagcgagcaggaggcggcggctaagagtgggagttgtgcagcatcagctgaagggctgcagtcgagactgacggcggttcttgaccgcctgacaaagttctcggaggcatcactgaagtgctacgaggagctcaagcagaactacgagatggcctgtgctgattataggagagttggaccaaatgctcagcttgcttaggattgatgttggttgtggtgtgtgacttcttgctatctctgttctggatgacaaattctctagtgttttggtatatattttgtgaacaatcaggtgatagcacaatctttggccgaatattactgatgatttagtgctatcagttatgtatgctccactgtgggccctgccctgatgcttcgaaaggcctatgagaaccgttttcaccacgatataacaggcaaaatataccatgatttctgtgcgctaaaaaaaaaaaaaaaaaaaactcgagggggggcccggtacccaattcgtgttaaacacaataaagttggaacgggagggggg

SEQ ID NO: 19665 - protein, 542 aa, Zea mays subsp. mays
  peptide (1)..(542): Ceres Seq. ID no. 13600302
  misc_feature (102)..(444): Pfam Name: DUF632 Pfam Description: Protein of unknown function
  misc_feature (64)..(444): NCBI GI NO: 15236022 NR Description: hypothetical protein [Arabidopsis thaliana]
  misc_feature (485)..(532): NCBI GI NO: 15236022 NR Description: hypothetical protein [Arabidopsis thaliana]
  misc_feature (99)..(535): NCBI GI NO: 15225846 NR Description: expressed protein [Arabidopsis thaliana]
  misc_feature (221)..(467): NCBI GI NO: 22324428 NR Description: hypothetical protein~predicted by GeneMark
  misc_feature (87)..(192): NCBI GI NO: 22324428 NR Description: hypothetical protein~predicted by GeneMark
  misc_feature (167)..(468): NCBI GI NO: 32526673 NR Description: bzip-like transcription factor-like protein
  misc_feature (15)..(127): NCBI GI NO: 32526673 NR Description: bzip-like transcription factor-like protein
  misc_feature (17)..(509): NCBI GI NO: 19424001 NR Description: unknown protein [Arabidopsis thaliana]
  misc_feature (17)..(509): NCBI GI NO: 15223973 NR Description: expressed protein [Arabidopsis thaliana]
  misc_feature (14)..(464): NCBI GI NO: 15219083 NR Description: bzip-related transcription factor
NFSRLRDLRESRVAEVVPLKEVEEEIMSRRHTEISDDNTPPEQEREPKQGGTGKPSQLVDTSTKATSEQVAAKLEESEMEKELCAEAEDPSEFITHRAKDFVSSMKDIETRFMRAAEAGNEVSRMLETKKIRLDICAKIPGSPVKLPSARFVSALRVCCNRDVILNQETAQHVSKVVTWKRSVSSLSSSSKSALMTSIMKDDVDDSNSDFVEEFAMVSGSHSSTLDRLHAWERKLYDEIKASENVRKAYDEKCNLLRRQFARGLNAQVIDKTRAVVKDLHSRVSVVIQAVDAISKRIEKIRDEELQPQLVELIQGLIRMWKLMLECHHKQFITITLAYHVKDSTSARQGEHHHHRQAAMHLWNEMDSFSSSFRNWVTAHKSYVEALNAWLQKCVLQPPQDRRRRKRKVSFPPRQAVSPPIFILCGDWLARTEPLPADELCRSLKDVMQLLRDSFEHRDEQNRPRSGESQECGMLENSSEQEAAAKSGSCAASAEGLQSRLTAVLDRLTKFSEASLKCYEELKQNYEMACADYRRVGPNAQLA

SEQ ID NO: 19666 - protein, 516 aa, Zea mays subsp. mays
  peptide (1)..(516): Ceres Seq. ID no. 13600303
  misc_feature (76)..(418): Pfam Name: DUF632 Pfam Description: Protein of unknown function
  misc_feature (38)..(418): NCBI GI NO: 15236022 NR Description: hypothetical protein [Arabidopsis thaliana]
  misc_feature (459)..(506): NCBI GI NO: 15236022 NR Description: hypothetical protein [Arabidopsis thaliana]
  misc_feature (73)..(509): NCBI GI NO: 15225846 NR Description: expressed protein [Arabidopsis thaliana]
  misc_feature (195)..(441): NCBI GI NO: 22324428 NR Description: hypothetical protein~predicted by GeneMark
  misc_feature (61)..(166): NCBI GI NO: 22324428 NR Description: hypothetical protein~predicted by GeneMark
  misc_feature (141)..(442): NCBI GI NO: 32526673 NR Description: bzip-like transcription factor-like protein
  misc_feature (1)..(101): NCBI GI NO: 32526673 NR Description: bzip-like transcription factor-like protein
  misc_feature (1)..(483): NCBI GI NO: 19424001 NR Description: unknown protein [Arabidopsis thaliana]
  misc_feature (1)..(483): NCBI GI NO: 15223973 NR Description: expressed protein [Arabidopsis thaliana]
  misc_feature (1)..(438): NCBI GI NO: 15219083 NR Description: bzip-related transcription factor
MSRRHTEISDDNTPPEQEREPKQGGTGKPSQLVDTSTKATSEQVAAKLEESEMEKELCAEAEDPSEFITHRAKDFVSSMKDIETRFMRAAEAGNEVSRMLETKKIRLDICAKIPGSPVKLPSARFVSALRVCCNRDVILNQETAQHVSKVVTWKRSVSSLSSSSKSALMTSIMKDDVDDSNSDFVEEFAMVSGSHSSTLDRLHAWERKLYDEIKASENVRKAYDEKCNLLRRQFARGLNAQVIDKTRAVVKDLHSRVSVVIQAVDAISKRIEKIRDEELQPQLVELIQGLIRMWKLMLECHHKQFITITLAYHVKDSTSARQGEHHHHRQAAMHLWNEMDSFSSSFRNWVTAHKSYVEALNAWLQKCVLQPPQDRRRRKRKVSFPPRQAVSPPIFILCGDWLARTEPLPADELCRSLKDVMQLLRDSFEHRDEQNRPRSGESQECGMLENSSEQEAAAKSGSCAASAEGLQSRLTAVLDRLTKFSEASLKCYEELKQNYEMACADYRRVGPNAQLA

SEQ ID NO: 19667 - protein, 464 aa, Zea mays subsp. mays
  peptide (1)..(464): Ceres Seq. ID no. 13600304
  misc_feature (24)..(366): Pfam Name: DUF632 Pfam Description: Protein of unknown function
  misc_feature (1)..(366): NCBI GI NO: 15236022 NR Description: hypothetical protein [Arabidopsis thaliana]
  misc_feature (407)..(454): NCBI GI NO: 15236022 NR Description: hypothetical protein [Arabidopsis thaliana]
  misc_feature (21)..(457): NCBI GI NO: 15225846 NR Description: expressed protein [Arabidopsis thaliana]
  misc_feature (143)..(389): NCBI GI NO: 22324428 NR Description: hypothetical protein~predicted by GeneMark
  misc_feature (9)..(114): NCBI GI NO: 22324428 NR Description: hypothetical protein~predicted by GeneMark
  misc_feature (89)..(390): NCBI GI NO: 32526673 NR Description: bzip-like transcription factor-like protein
  misc_feature (1)..(49): NCBI GI NO: 32526673 NR Description: bzip-like transcription factor-like protein
  misc_feature (1)..(431): NCBI GI NO: 19424001 NR Description: unknown protein [Arabidopsis thaliana]
  misc_feature (1)..(431): NCBI GI NO: 15223973 NR Description: expressed protein [Arabidopsis thaliana]
  misc_feature (1)..(386): NCBI GI NO: 15219083 NR Description: bzip-related transcription factor
MEKELCAEAEDPSEFITHRAKDFVSSMKDIETRFMRAAEAGNEVSRMLETKKIRLDICAKIPGSPVKLPSARFVSALRVCCNRDVILNQETAQHVSKVVTWKRSVSSLSSSSKSALMTSIMKDDVDDSNSDFVEEFAMVSGSHSSTLDRLHAWERKLYDEIKASENVRKAYDEKCNLLRRQFARGLNAQVIDKTRAVVKDLHSRVSVVIQAVDAISKRIEKIRDEELQPQLVELIQGLIRMWKLMLECHHKQFITITLAYHVKDSTSARQGEHHHHRQAAMHLWNEMDSFSSSFRNWVTAHKSYVEALNAWLQKCVLQPPQDRRRRKRKVSFPPRQAVSPPIFILCGDWLARTEPLPADELCRSLKDVMQLLRDSFEHRDEQNRPRSGESQECGMLENSSEQEAAAKSGSCAASAEGLQSRLTAVLDRLTKFSEASLKCYEELKQNYEMACADYRRVGPNAQLA

SEQ ID NO: 19668 - DNA, 1864 bp, Zea mays subsp. mays
  misc_feature (1)..(1864): Ceres Seq. ID no. 14302150
attttttgggggccatagtgacttgaggacggtgtacacatccatagtaaagggtacaatcgagcaagttagaatgatgttattgggaagttcacaatgaaaatccaaataatagtaccgctgcaataatctcttctcctgaggctgtcctgctttgctgcttaaaaccgtattcagttattgttctaaaaaaatgattcatacctactgaaaaccgttctcactctatctaattccttctatttttttcttttttctaaatgaaccctcacccagcattcaccatacgcagtttattttagcagttgatatactatatcaaactaagaaccatgtgaagatagttctctatcatagcaacctctagcatcgtagggatctattttccatttttaacaatcaggttaatagcttgagcttgggtgccttaaatgctcactatttttcatatggggtgatgtgcatcaagcggacggtctggcaagattgacaaatcattgtgctttctcccccggtaagaattgcatcttgacacatcagcttcaaagcagatgctgaccgaaagaattagcattcttttttgggatgtttagaagtcctatcatgtgatctgttcaaaagggagtcttaaaaagaaacagttccaaaacctcaaataatatacatatagatatcaaaaggttgtataatgttgttgccttgtttgctgagtggttctattgattaattaaagctctagcatattgttaaggtttcgacctgagtttgttccatgattttagtggaacgactcaatttcttattgatgggataacaggcagctgttgatcaaatcgaaccctggcgaagttgtgaagcctggtgaggaatccgattcattgtgttcagggctgcttgcggtttgaatttgacagtatttgtgtttgtgccagtgatcagccggctacactaccacctgaaccggttgcattgcatagactcttccgagtttaacaagtaggtgttggtagttcgtcaggggcgtttagcttttgccaatgggggatttggctgcattttgttaccttttggtatatgtactgattatattatttattggtctataagaccactggggtactaaactatattgctgattgttaagataagatctgtgatgatttttgccaagtgagcacctgatcttttttatgcaatcaatttcaggtgtgtgtagacaacctattttttagttgatatagatggtgctgatttgttagttaaagctattgtctttgatggtcacacttttattggaaatctgcaattccttttatgttgtaacaaaatttaatatctaaaaatgttgttggtgtcttggtggtaccgtgtcagttgtcaacagtccaattccattctcatggctttgattctgacgtatgattatgattattttaaatttgtgcagattcattcaaggcaatcaacgatgaaggcatgcccatgtatcagaggcccttcatgaagggcaagctgtacatccacttctcggtggagttcccggactcattgagcccggagcagtggaatgccctggaggatgttctcccacccaagccagtatcacagtacactgacatagagctggacgagtgcgaggagacaatgccctacgacgtgaacatcgaagaggagatgcggaggcagcagcagcaccaggaggcctacgacgaggatgatgatgtgccaggcggtgggcagagggtgcagtgcgcccagcagtaggcagcttacgtcaaatttgctgtttcgctttgggcgactattgagtttacccgcttgtattggtctgatgatacttcggttacaagagtgcagtattact

SEQ ID NO: 19669 - protein, 95 aa, Zea mays subsp. mays
  peptide (1)..(95): Ceres Seq. ID no. 14302151
  misc_feature (1)..(95): NCBI GI NO: 5802244 NR Description: seed maturation protein PM37 [Glycine max]
  misc_feature (1)..(95): NCBI GI NO: 29367357 NR Description: DNAJ-like protein
  misc_feature (1)..(95): NCBI GI NO: 7441932 NR Description: DnaJ protein homolog ZMDJ1 - maize
  misc_feature (1)..(95): NCBI GI NO: 4008159 NR Description: DnaJ homolog [Salix gilgiana]
  misc_feature (1)..(95): NCBI GI NO: 10945669 NR Description: J1P [Daucus carota]
  misc_feature (1)..(95): NCBI GI NO: 27529856 NR Description: DnaJ homolog [Nicotiana tabacum]
  misc_feature (1)..(95): NCBI GI NO: 1169382 NR Description: DnaJ protein homolog 2
  misc_feature (1)..(95): NCBI GI NO: 7595798 NR Description: DnaJ protein [Euphorbia esula]
  misc_feature (1)..(95): NCBI GI NO: 461942 NR Description: DnaJ protein homolog 1 (DNAJ-1)
  misc_feature (1)..(95): NCBI GI NO: 6782421 NR Description: DnaJ-like protein [Lycopersicon esculentum]
MPMYQRPFMKGKLYIHFSVEFPDSLSPEQWNALEDVLPPKPVSQYTDIELDECEETMPYDVNIEEEMRRQQQHQEAYDEDDDVPGGGQRVQCAQQ

SEQ ID NO: 19670 - protein, 93 aa, Zea mays subsp. mays
  peptide (1)..(93): Ceres Seq. ID no. 14302152
  misc_feature (1)..(93): NCBI GI NO: 5802244 NR Description: seed maturation protein PM37 [Glycine max]
  misc_feature (1)..(93): NCBI GI NO: 29367357 NR Description: DNAJ-like protein
  misc_feature (1)..(93): NCBI GI NO: 7441932 NR Description: DnaJ protein homolog ZMDJ1 - maize
  misc_feature (1)..(93): NCBI GI NO: 4008159 NR Description: DnaJ homolog [Salix gilgiana]
  misc_feature (1)..(93): NCBI GI NO: 10945669 NR Description: J1P [Daucus carota]
  misc_feature (1)..(93): NCBI GI NO: 27529856 NR Description: DnaJ homolog [Nicotiana tabacum]
  misc_feature (1)..(93): NCBI GI NO: 1169382 NR Description: DnaJ protein homolog 2
  misc_feature (1)..(93): NCBI GI NO: 7595798 NR Description: DnaJ protein [Euphorbia esula]
  misc_feature (1)..(93): NCBI GI NO: 461942 NR Description: DnaJ protein homolog 1 (DNAJ-1)
  misc_feature (1)..(93): NCBI GI NO: 6782421 NR Description: DnaJ-like protein [Lycopersicon esculentum]
MYQRPFMKGKLYIHFSVEFPDSLSPEQWNALEDVLPPKPVSQYTDIELDECEETMPYDVNIEEEMRRQQQHQEAYDEDDDVPGGGQRVQCAQQ

SEQ ID NO: 19671 - protein, 87 aa, Zea mays subsp. mays
  peptide (1)..(87): Ceres Seq. ID no. 14302153
  misc_feature (1)..(87): NCBI GI NO: 5802244 NR Description: seed maturation protein PM37 [Glycine max]
  misc_feature (1)..(87): NCBI GI NO: 29367357 NR Description: DNAJ-like protein
  misc_feature (1)..(87): NCBI GI NO: 7441932 NR Description: DnaJ protein homolog ZMDJ1 - maize
  misc_feature (1)..(87): NCBI GI NO: 4008159 NR Description: DnaJ homolog [Salix gilgiana]
  misc_feature (1)..(87): NCBI GI NO: 10945669 NR Description: J1P [Daucus carota]
  misc_feature (1)..(87): NCBI GI NO: 27529856 NR Description: DnaJ homolog [Nicotiana tabacum]
  misc_feature (1)..(87): NCBI GI NO: 1169382 NR Description: DnaJ protein homolog 2
  misc_feature (1)..(87): NCBI GI NO: 7595798 NR Description: DnaJ protein [Euphorbia esula]
  misc_feature (1)..(87): NCBI GI NO: 461942 NR Description: DnaJ protein homolog 1 (DNAJ-1)
  misc_feature (1)..(87): NCBI GI NO: 6782421 NR Description: DnaJ-like protein [Lycopersicon esculentum]
MKGKLYIHFSVEFPDSLSPEQWNALEDVLPPKPVSQYTDIELDECEETMPYDVNIEEEMRRQQQHQEAYDEDDDVPGGGQRVQCAQQ

SEQ ID NO: 19672 - DNA, 2225 bp, Zea mays subsp. mays
  misc_feature (1)..(2225): Ceres Seq. ID no. 14302694
attttgacctcggaaaggtttgaacccgtcagggactaaagatgccaaaggtatattgttttccttctcattctactatgctataactatttctcctctactgttttttaccctacgaactgtgttgctaattttaatctacactacatctacttaaactcaattgttcagtgtcatagctttgctggaagccacatggcatattacttacatgccttcttagagtcttttagttatttcggtaatctgtattataggaatcataattaatgttgttttataacaataaatttatattgttgttttttagtcagaaaaaatgcttgtcatttggtcaattagctagcgacatgatattaagtgttgtagcgtggtcaagggttagctatgtctatgtgccatgtgttaaaagtattaggctacaaaaatccgaaaatgtcttgataaaagcaaaaaatagtaggaccattgaaaatttaaattagtatcgttgttacaagtttacccaacttcgagtataagagagcatagttcagcccctcgtctatcacttgtatgtaaggtgaactgtttcgtttttctatagcccgaccaatgtgcctctaagcatattcccaacaggacttagtgtgttgaaaacgccgagtcagaaatttgcacacatttttgagttatatgtatttattttagttcatttggactttggttgtgaacttaatgctccaagttattttgaccgcagtgggtcctttctccaaagtacttaaaattttcattccctatcacgcctagaggccctatgggtctgcaaatgtgattttctccataaacatcaataaggttgtagctttaagtaatggatgggtggttcttgcatgtactcttccatctgctttgtcggaatgaagcttcagttgaatttgttatagtcgttcactggtgcaaactgttattgctttgttatgtgtcatttgtttgtaggtctggaagatgagtaggcggaacgtggttgcaatagatcctattcaagtgtactatgtggaagggatcttggagcagttggcgttcgtggaggagtcgaagcgcaaggaggactgggtcgtcaggaaccaggagcgcagggcggccaaacgcaatcgcatccgcgacgagcacaaggtcgttgtcaggcagcccaaggactcaccaccacgttccacaacagggagcgtgacatcctgcggatgaggacccacttcaaggttagcaagcagccgcccaatgaggcgctcgactccaggctctttgcaattcgcatccctggctccatggacttgcattcgcacattaggaaggtcttgaggaagctacgtctgatgatggtcctcaccggaataaccttttctttgcacactaactgattgaattgacacatcttgtgtaccattgaaatctgaccacttcttttgccaacccctcttttgttaaaaataaaattaaaaattagattgtcaatcttgaggccacaatggagttattcgtggagcttcgagttattggaggtcgagctgtaaaaagctagcgttttttgcatattgtacacagtatcaggaggatgagccagaagcacaagaatggtattgccaagcagcacacctgctctacagcttagttatgtttagatttatatatgatatatatgaggtttctttgctcacatgtatttgcctgcacctatctaggtttagctctattgattacatcttttgtgcagggctgatgagctatcccctgatgagcttgagcgcctcttgaatcatgaccatggttggttgattgccaacccccaccagttcaaggtccctagctggttcctcaacaggaaaaagtactacaaggatggtaggttctctcaggttgtttccaacgcccttgacaagaagctcagcttagggatgactctaggctgaagaagaccaggaaccactatggtctgtcactactggggtctacttgtccgtggccagcacaccaagactaccaaaaggcatggaaagactataggtgtgtcggagaatagataaagtcaatttggtgcctaccttggatatttattatctgtaggatagatgaaccgttctggtttatgaaacttttgttgcgtattccaagctggttgaattgaatgttcttaagaaccaatgtcattagaaaagttaaaagattcaataatttgaaatggtttt

SEQ ID NO: 19673 - protein, 78 aa, Zea mays subsp. mays
  peptide (1)..(78): Ceres Seq. ID no. 14302695
  misc_feature (18)..(64): NCBI GI NO: 38636688 NR Description: putative 60S ribosomal protein L7 (RPL7A)
MSRRNVVAIDPIQVYYVEGILEQLAFVEESKRKEDWVVRNQERRAAKRNRIRDEHKVVVRQPKDSPPRSTTGSVTSCG

SEQ ID NO: 19674 - protein, 71 aa, Zea mays subsp. mays
  peptide (1)..(71): Ceres Seq. ID no. 14302696
MLFYNNKFILLFFSQKKCLSFGQLASDMILSVVAWSRVSYVYVPCVKSIRLQKSENVLIKAKNSRTIENLN

SEQ ID NO: 19675 - protein, 58 aa, Zea mays subsp. mays
  peptide (1)..(58): Ceres Seq. ID no. 14302697
MWKGSWSSWRSWRSRSARRTGSSGTRSAGRPNAIASATSTRSLSGSPRTHHHVPQQGA

SEQ ID NO: 19676 - DNA, 2297 bp, Zea mays subsp. mays
  misc_feature (1)..(2297): Ceres Seq. ID no. 13600419
gsaccttcggcttttgctccgacgccggcgagmgagaccgagagacgaggcgagccaccgcggcggcggttgcagcgatggggtccatgacgatcggtgccaagtacaagaccacgatcaaggaccccggcaccccgggcatcctccgcatgaacggtgataggttcaccttcacccctaatgatccacgatcggcaatgaagttcaatgttgatttccgaaccatcaaaggtcacaagttcaataaagtagagggtaacaaagcagcattattgaacctttcaaaagaagacaaggctggaggctacatatttgagtttgacaatgttggtaaccgtgaccaatgtcgagactttgtagctagggttttaggcaaacatcaagggatagtgcctcctagaccaactgtggctcctgaaaactcagttgcttccgctgctctggaacaactcagtgccgcagaagtggagagacgggttaaactgttgcgagaagacagcgaattgcagaaactacataagaagtttgttcttggaaatattctgcaagaatctgaattttgggcaacaagaaagaatttacttgatgatgaagcaaataagagatcaaaacaaaagccaggtttcaagagtgcacttgtagatattaggccaacaactgatggtcggacaaacaaggttactttccagatcacacctgagatgatacatcagatttttgcagaaaagcctgctgtccgtagagcatatttagattttgttccaaaaaagatgtcagaaacccgattttgggaaaaatactgtagagctgagtatctagtcaggacaaaaaacactgcagcagcaacagctgaggcagctggaaatgaggaattagctatcttcctgaagaatgatgatatactggccaaggaggcaaagttgaagataaaacgagtcgatccaacattagacatggaggcagacactggagatgattacattcatcttccggaccatgggattcaccgtgatggtagcaaagagacagtcgatgctgacagtgagttggcgaggaggacgctgtctcaggacctgaaccgtcatgcagctgttgttcttgaagggagatctcttgatgtcgagtcatctgatccaaagactttagctgaagcccttgcaagatccaagaaagaaccaccttctacttctaatgttgatgatgataatcatgagagactaatgaaggtggctagaatgacagagatagaggatctgcaagctccacgaagtcttctgtatgcaccactttgtataaaggatcctagagaatattttgattcccaacaagcaaatgctctgagatctctaggtggcagcaatggtggaagaaaagcccatagttgcagcttgagcactgaagaagtgttccatcatttaatggatcaaatgtcttctgttaaagttaataggcttaactgtccgattgttcagtctgatatggctcttaaggttcttaatgaattaaacgaagggatttctcgttcaaggagacttaacctcaagaatcctcaagaaggtctccttggtcagctgcctcaacatacacgggacgagcttatggatcattggacggctatccaggaattgctacgccatttttggtcatcgtatccaataacaagtgcagtactttataacaaggttcaaagagttaaagaagctatgacacagatatatcaaaagctgcagcttataaaggaattggcacagcctgatgtaagacatgaaatatctcggctagtaaagcccatgactcaggccttggatgccgccttcaaccatgatttggaacagcagcagaaatcgtccaaggccggaaacaggcacaacgggttttgagcctaggagattggtttgaccaacacatgaagcgagacggacggacgggctgtgcccgaatacacaagagctgctgcagaattcttgaggcttgtacgattttgttctttttcccctcgcttattaatagctgccggaggagcctgctgtttgcagccccggaatcttgatctatgcatcaattgtttgtaactgactgaatagtgaagactcgcaacgcatgatgctgccgacgcgttgtacttgtacatggcagtaatggctattcgagatagaaccaaagctttaccattttgttttatgcggtttttttcatggccgccgggcagaattatacacatgtatgtcatctacagcgttacaaacataccattatacaaaaaaaaaaaaaaaaaaaactcgaggggggggcccggt

SEQ ID NO: 19677 - protein, 625 aa, Zea mays subsp. mays
  peptide (1)..(625): Ceres Seq. ID no. 15218664
  misc_feature (224)..(270): Pfam Name: Pfam Description:  BSD domain
  misc_feature (26)..(625): NCBI GI NO: 38636938 NR Description: unknown protein
  misc_feature (34)..(548): NCBI GI NO: 30696007 NR Description: expressed protein [Arabidopsis thaliana]
  misc_feature (561)..(625): NCBI GI NO: 30696007 NR Description: expressed protein [Arabidopsis thaliana]
  misc_feature (57)..(617): NCBI GI NO: 15233107 NR Description: hypothetical protein [Arabidopsis thaliana]
  misc_feature (418)..(625): NCBI GI NO: 8778495 NR Description: F20N2.15 [Arabidopsis thaliana]
  misc_feature (86)..(222): NCBI GI NO: 8778495 NR Description: F20N2.15 [Arabidopsis thaliana]
  misc_feature (256)..(390): NCBI GI NO: 8778495 NR Description: F20N2.15 [Arabidopsis thaliana]
  misc_feature (34)..(76): NCBI GI NO: 8778495 NR Description: F20N2.15 [Arabidopsis thaliana]
  misc_feature (400)..(432): NCBI GI NO: 8778495 NR Description: F20N2.15 [Arabidopsis thaliana]
  misc_feature (154)..(602): NCBI GI NO: 19922250 NR Description: CG8151-PB [Drosophila melanogaster]
  misc_feature (11)..(11): Xaa is any aa, unknown or other
TFGFCSDAGEXDRETRRATAAAVAAMGSMTIGAKYKTTIKDPGTPGILRMNGDRFTFTPNDPRSAMKFNVDFRTIKGHKFNKVEGNKAALLNLSKEDKAGGYIFEFDNVGNRDQCRDFVARVLGKHQGIVPPRPTVAPENSVASAALEQLSAAEVERRVKLLREDSELQKLHKKFVLGNILQESEFWATRKNLLDDEANKRSKQKPGFKSALVDIRPTTDGRTNKVTFQITPEMIHQIFAEKPAVRRAYLDFVPKKMSETRFWEKYCRAEYLVRTKNTAAATAEAAGNEELAIFLKNDDILAKEAKLKIKRVDPTLDMEADTGDDYIHLPDHGIHRDGSKETVDADSELARRTLSQDLNRHAAVVLEGRSLDVESSDPKTLAEALARSKKEPPSTSNVDDDNHERLMKVARMTEIEDLQAPRSLLYAPLCIKDPREYFDSQQANALRSLGGSNGGRKAHSCSLSTEEVFHHLMDQMSSVKVNRLNCPIVQSDMALKVLNELNEGISRSRRLNLKNPQEGLLGQLPQHTRDELMDHWTAIQELLRHFWSSYPITSAVLYNKVQRVKEAMTQIYQKLQLIKELAQPDVRHEISRLVKPMTQALDAAFNHDLEQQQKSSKAGNRHNGF

SEQ ID NO: 19678 - protein, 600 aa, Zea mays subsp. mays
  peptide (1)..(600): Ceres Seq. ID no. 15218665
  misc_feature (199)..(245): Pfam Name: Pfam Description:  BSD domain
  misc_feature (1)..(600): NCBI GI NO: 38636938 NR Description: unknown protein
  misc_feature (9)..(523): NCBI GI NO: 30696007 NR Description: expressed protein [Arabidopsis thaliana]
  misc_feature (536)..(600): NCBI GI NO: 30696007 NR Description: expressed protein [Arabidopsis thaliana]
  misc_feature (32)..(592): NCBI GI NO: 15233107 NR Description: hypothetical protein [Arabidopsis thaliana]
  misc_feature (393)..(600): NCBI GI NO: 8778495 NR Description: F20N2.15 [Arabidopsis thaliana]
  misc_feature (61)..(197): NCBI GI NO: 8778495 NR Description: F20N2.15 [Arabidopsis thaliana]
  misc_feature (231)..(365): NCBI GI NO: 8778495 NR Description: F20N2.15 [Arabidopsis thaliana]
  misc_feature (9)..(51): NCBI GI NO: 8778495 NR Description: F20N2.15 [Arabidopsis thaliana]
  misc_feature (375)..(407): NCBI GI NO: 8778495 NR Description: F20N2.15 [Arabidopsis thaliana]
  misc_feature (129)..(577): NCBI GI NO: 19922250 NR Description: CG8151-PB [Drosophila melanogaster]
MGSMTIGAKYKTTIKDPGTPGILRMNGDRFTFTPNDPRSAMKFNVDFRTIKGHKFNKVEGNKAALLNLSKEDKAGGYIFEFDNVGNRDQCRDFVARVLGKHQGIVPPRPTVAPENSVASAALEQLSAAEVERRVKLLREDSELQKLHKKFVLGNILQESEFWATRKNLLDDEANKRSKQKPGFKSALVDIRPTTDGRTNKVTFQITPEMIHQIFAEKPAVRRAYLDFVPKKMSETRFWEKYCRAEYLVRTKNTAAATAEAAGNEELAIFLKNDDILAKEAKLKIKRVDPTLDMEADTGDDYIHLPDHGIHRDGSKETVDADSELARRTLSQDLNRHAAVVLEGRSLDVESSDPKTLAEALARSKKEPPSTSNVDDDNHERLMKVARMTEIEDLQAPRSLLYAPLCIKDPREYFDSQQANALRSLGGSNGGRKAHSCSLSTEEVFHHLMDQMSSVKVNRLNCPIVQSDMALKVLNELNEGISRSRRLNLKNPQEGLLGQLPQHTRDELMDHWTAIQELLRHFWSSYPITSAVLYNKVQRVKEAMTQIYQKLQLIKELAQPDVRHEISRLVKPMTQALDAAFNHDLEQQQKSSKAGNRHNGF

SEQ ID NO: 19679 - protein, 597 aa, Zea mays subsp. mays
  peptide (1)..(597): Ceres Seq. ID no. 15218666
  misc_feature (196)..(242): Pfam Name: Pfam Description:  BSD domain
  misc_feature (1)..(597): NCBI GI NO: 38636938 NR Description: unknown protein
  misc_feature (6)..(520): NCBI GI NO: 30696007 NR Description: expressed protein [Arabidopsis thaliana]
  misc_feature (533)..(597): NCBI GI NO: 30696007 NR Description: expressed protein [Arabidopsis thaliana]
  misc_feature (29)..(589): NCBI GI NO: 15233107 NR Description: hypothetical protein [Arabidopsis thaliana]
  misc_feature (390)..(597): NCBI GI NO: 8778495 NR Description: F20N2.15 [Arabidopsis thaliana]
  misc_feature (58)..(194): NCBI GI NO: 8778495 NR Description: F20N2.15 [Arabidopsis thaliana]
  misc_feature (228)..(362): NCBI GI NO: 8778495 NR Description: F20N2.15 [Arabidopsis thaliana]
  misc_feature (6)..(48): NCBI GI NO: 8778495 NR Description: F20N2.15 [Arabidopsis thaliana]
  misc_feature (372)..(404): NCBI GI NO: 8778495 NR Description: F20N2.15 [Arabidopsis thaliana]
  misc_feature (126)..(574): NCBI GI NO: 19922250 NR Description: CG8151-PB [Drosophila melanogaster]
MTIGAKYKTTIKDPGTPGILRMNGDRFTFTPNDPRSAMKFNVDFRTIKGHKFNKVEGNKAALLNLSKEDKAGGYIFEFDNVGNRDQCRDFVARVLGKHQGIVPPRPTVAPENSVASAALEQLSAAEVERRVKLLREDSELQKLHKKFVLGNILQESEFWATRKNLLDDEANKRSKQKPGFKSALVDIRPTTDGRTNKVTFQITPEMIHQIFAEKPAVRRAYLDFVPKKMSETRFWEKYCRAEYLVRTKNTAAATAEAAGNEELAIFLKNDDILAKEAKLKIKRVDPTLDMEADTGDDYIHLPDHGIHRDGSKETVDADSELARRTLSQDLNRHAAVVLEGRSLDVESSDPKTLAEALARSKKEPPSTSNVDDDNHERLMKVARMTEIEDLQAPRSLLYAPLCIKDPREYFDSQQANALRSLGGSNGGRKAHSCSLSTEEVFHHLMDQMSSVKVNRLNCPIVQSDMALKVLNELNEGISRSRRLNLKNPQEGLLGQLPQHTRDELMDHWTAIQELLRHFWSSYPITSAVLYNKVQRVKEAMTQIYQKLQLIKELAQPDVRHEISRLVKPMTQALDAAFNHDLEQQQKSSKAGNRHNGF

SEQ ID NO: 19680 - DNA, 1970 bp, Zea mays subsp. mays
  misc_feature (1)..(1970): Ceres Seq. ID no. 13599971
aaacaggtgtgcctcgctcagactgcaagctacgtcggctagccgtccgaaatcaacatgtgcagcgcttccctgaagaaaccatggacatgccagaggtgttgaggtcacttagcattacagattataatattgcggttatggccccaattgatagcttcagggtttgccgtgtgctgcatatagaaaacaactacgtacccatcaacctaaagcatctagggaagctgttgcatctcaagttcctacagatatctggcacgactattgatgagctccctagagaaattgggcatctgaggtctcttcagacactgatattagccgatactggactagacgagctgccaccggctgtttgctcacttacacggttgatgtgcctgatagccctggagttcgaaaggttaccagctgacaggatggggaacctaacgtccctggaggagctacgactacatagggtagttggccggagtgccacccaagccctagtggcagagcttggcaagctgacgaggttgagggtggtcagcatcgccttttcagagcagctagaggagagcttgcaagaagcattcgtgcaatctctgtccaatctgcggggactccaggaactagcgcttttgtttaaaatgccacagcgggtaagcgatatgtggggagactgggagccaccaaggcagctccggcgcctgattattaaaggcatcgacttctcacggcagcctcgatggatcagccgctcctgcctgccacgcctctgctccttatctctggtggtgtacgctcttgaagcacaggacctagataatctagcgaggttgccagagctccagtacctcacgctagatggtctcagctggcctccaaggtatactgttggcccagacgacttcaggaatctgaggttctgcgatgtgagcacaacgttcgagtttcgtaagggcgccatgccaaggcttgaagtgctgcactttggagtttatgcagggtactggagttgggaaaagaatggtgtgccgttcgagcagttcccaacgaaggatgtgatcgaagatcttgacttggacctggataacgtccttttacttcagcaagtgatggtcaaagtcgactgctcaggtgctactgccgcacaagtggaggaggtggaggccgtggtcatgcgtgccgtggaaaatcatgccaaccgtccaaccatagtaatggatcgagtatatgaacaaaatatcctatccgacgaagagcgggaggctctgctttggcgacacattgaagaggattgctgcgtgcgcacgatgaaggataaatctgatgctttcttcatcagccagctgtggttatatcgacatcttcaggaagccattattttcatcgactgttcgggtgccagcatgtgtgaggtgcagaaagtggaagcagcttatagacatgcagccgaggttcatcctaaccatccaagtattgaacttatcagaacaaacaccgacggaatggcctcctcctcatctgaccatcccaacacagagcccaggaattgatgactcggtttgtcagatccttccaacccagcagcaggtaaatgtgagttgcttaagtaccaagagagaggtcctgttcagcaagatgattagaagcattggcatggcttgttaattagattcgcggttcttagtctaaaatcacattgaagagggagacggacccaagtgatgcagttcatctgttatctgtatcagtctctatttttataagctgtcatatattttctcgaaactatcttgtgttgattttgtgtgatgtgtacttttaatggcacgggccatgtattttccttggaaacgaccatgtggacttaatttttcccccattttctttcctgagatgggctgtgtatttgcttgaaagataaggatggtattatctttgtattgaactctaaatgcttaaatgaaggatcatccgga

SEQ ID NO: 19681 - protein, 513 aa, Zea mays subsp. mays
  peptide (1)..(513): Ceres Seq. ID no. 13599972
  misc_feature (10)..(330): NCBI GI NO: 34394780 NR Description: putative CC-NBS-LRR resistance protein MLA13
  misc_feature (452)..(495): NCBI GI NO: 34394780 NR Description: putative CC-NBS-LRR resistance protein MLA13
  misc_feature (3)..(499): NCBI GI NO: 40253772 NR Description: putative RGH1A
  misc_feature (10)..(330): NCBI GI NO: 34904708 NR Description: P0446G09.19
  misc_feature (9)..(413): NCBI GI NO: 40253763 NR Description: putative RGH1A
  misc_feature (461)..(493): NCBI GI NO: 40253763 NR Description: putative RGH1A
  misc_feature (41)..(400): NCBI GI NO: 34394780 NR Description: putative CC-NBS-LRR resistance protein MLA13
  misc_feature (5)..(404): NCBI GI NO: 27464234 NR Description: CC-NBS-LRR resistance protein MLA13
  misc_feature (453)..(489): NCBI GI NO: 27464234 NR Description: CC-NBS-LRR resistance protein MLA13
  misc_feature (5)..(404): NCBI GI NO: 33943718 NR Description: MLA7 [Hordeum vulgare]
TGVPRSDCKLRRLAVRNQHVQRFPEETMDMPEVLRSLSITDYNIAVMAPIDSFRVCRVLHIENNYVPINLKHLGKLLHLKFLQISGTTIDELPREIGHLRSLQTLILADTGLDELPPAVCSLTRLMCLIALEFERLPADRMGNLTSLEELRLHRVVGRSATQALVAELGKLTRLRVVSIAFSEQLEESLQEAFVQSLSNLRGLQELALLFKMPQRVSDMWGDWEPPRQLRRLIIKGIDFSRQPRWISRSCLPRLCSLSLVVYALEAQDLDNLARLPELQYLTLDGLSWPPRYTVGPDDFRNLRFCDVSTTFEFRKGAMPRLEVLHFGVYAGYWSWEKNGVPFEQFPTKDVIEDLDLDLDNVLLLQQVMVKVDCSGATAAQVEEVEAVVMRAVENHANRPTIVMDRVYEQNILSDEEREALLWRHIEEDCCVRTMKDKSDAFFISQLWLYRHLQEAIIFIDCSGASMCEVQKVEAAYRHAAEVHPNHPSIELIRTNTDGMASSSSDHPNTEPRN

SEQ ID NO: 19682 - protein, 486 aa, Zea mays subsp. mays
  peptide (1)..(486): Ceres Seq. ID no. 13599973
  misc_feature (1)..(303): NCBI GI NO: 34394780 NR Description: putative CC-NBS-LRR resistance protein MLA13
  misc_feature (425)..(468): NCBI GI NO: 34394780 NR Description: putative CC-NBS-LRR resistance protein MLA13
  misc_feature (1)..(472): NCBI GI NO: 40253772 NR Description: putative RGH1A
  misc_feature (1)..(303): NCBI GI NO: 34904708 NR Description: P0446G09.19
  misc_feature (1)..(386): NCBI GI NO: 40253763 NR Description: putative RGH1A
  misc_feature (434)..(466): NCBI GI NO: 40253763 NR Description: putative RGH1A
  misc_feature (14)..(373): NCBI GI NO: 34394780 NR Description: putative CC-NBS-LRR resistance protein MLA13
  misc_feature (1)..(377): NCBI GI NO: 27464234 NR Description: CC-NBS-LRR resistance protein MLA13
  misc_feature (426)..(462): NCBI GI NO: 27464234 NR Description: CC-NBS-LRR resistance protein MLA13
  misc_feature (1)..(377): NCBI GI NO: 33943718 NR Description: MLA7 [Hordeum vulgare]
MDMPEVLRSLSITDYNIAVMAPIDSFRVCRVLHIENNYVPINLKHLGKLLHLKFLQISGTTIDELPREIGHLRSLQTLILADTGLDELPPAVCSLTRLMCLIALEFERLPADRMGNLTSLEELRLHRVVGRSATQALVAELGKLTRLRVVSIAFSEQLEESLQEAFVQSLSNLRGLQELALLFKMPQRVSDMWGDWEPPRQLRRLIIKGIDFSRQPRWISRSCLPRLCSLSLVVYALEAQDLDNLARLPELQYLTLDGLSWPPRYTVGPDDFRNLRFCDVSTTFEFRKGAMPRLEVLHFGVYAGYWSWEKNGVPFEQFPTKDVIEDLDLDLDNVLLLQQVMVKVDCSGATAAQVEEVEAVVMRAVENHANRPTIVMDRVYEQNILSDEEREALLWRHIEEDCCVRTMKDKSDAFFISQLWLYRHLQEAIIFIDCSGASMCEVQKVEAAYRHAAEVHPNHPSIELIRTNTDGMASSSSDHPNTEPRN

SEQ ID NO: 19683 - protein, 484 aa, Zea mays subsp. mays
  peptide (1)..(484): Ceres Seq. ID no. 13599974
  misc_feature (1)..(301): NCBI GI NO: 34394780 NR Description: putative CC-NBS-LRR resistance protein MLA13
  misc_feature (423)..(466): NCBI GI NO: 34394780 NR Description: putative CC-NBS-LRR resistance protein MLA13
  misc_feature (1)..(470): NCBI GI NO: 40253772 NR Description: putative RGH1A
  misc_feature (1)..(301): NCBI GI NO: 34904708 NR Description: P0446G09.19
  misc_feature (1)..(384): NCBI GI NO: 40253763 NR Description: putative RGH1A
  misc_feature (432)..(464): NCBI GI NO: 40253763 NR Description: putative RGH1A
  misc_feature (12)..(371): NCBI GI NO: 34394780 NR Description: putative CC-NBS-LRR resistance protein MLA13
  misc_feature (1)..(375): NCBI GI NO: 27464234 NR Description: CC-NBS-LRR resistance protein MLA13
  misc_feature (424)..(460): NCBI GI NO: 27464234 NR Description: CC-NBS-LRR resistance protein MLA13
  misc_feature (1)..(375): NCBI GI NO: 33943718 NR Description: MLA7 [Hordeum vulgare]
MPEVLRSLSITDYNIAVMAPIDSFRVCRVLHIENNYVPINLKHLGKLLHLKFLQISGTTIDELPREIGHLRSLQTLILADTGLDELPPAVCSLTRLMCLIALEFERLPADRMGNLTSLEELRLHRVVGRSATQALVAELGKLTRLRVVSIAFSEQLEESLQEAFVQSLSNLRGLQELALLFKMPQRVSDMWGDWEPPRQLRRLIIKGIDFSRQPRWISRSCLPRLCSLSLVVYALEAQDLDNLARLPELQYLTLDGLSWPPRYTVGPDDFRNLRFCDVSTTFEFRKGAMPRLEVLHFGVYAGYWSWEKNGVPFEQFPTKDVIEDLDLDLDNVLLLQQVMVKVDCSGATAAQVEEVEAVVMRAVENHANRPTIVMDRVYEQNILSDEEREALLWRHIEEDCCVRTMKDKSDAFFISQLWLYRHLQEAIIFIDCSGASMCEVQKVEAAYRHAAEVHPNHPSIELIRTNTDGMASSSSDHPNTEPRN

SEQ ID NO: 19684 - DNA, 1876 bp, Zea mays subsp. mays
  misc_feature (1)..(1876): Ceres Seq. ID no. 13624195
  misc_feature (1452)..(1452): n is a, c, t, g, unknown, or other
aacaacttgaaaacatcttaagggtagaagcgacgtagctgtttgatgttccaagcgttgccgtagatctcgccttgattgttggccagcttgtatgttccgggcttcagaactttggcgatgacgaatggcccttcccaggggggtgtgagcttgtgcctccctcgggcgtcttgccgcagccgaagcactagatcgcccacctggaggtctcgggaccggacccctcgggcgtggtagcgtcgcagggactgctggtaccgcgccgagtgtagtaaggccctgtcccgagcctcctccagctggtccagcgattcctctcggctagcttggttgctttgatcggtgtaggccctcgtcctcggggagccgtattccaggtcagtgggcaagatagcttcagccccgtaaaccaggaaaaacggcgtgaaacccgtggcacgactcggcgtcgtccttaggctccagaccaccgaggggagttccttcatccatcgcttgccgaacttgttgaggtcgttgtagatccgaggcttgagcccttgtagaatcatgccgttggcacgctctacttgcccattcgacatgggatgagccacggcggcccagtccacccggatatggtgatcctcgcaaaaaatccaaaattttttgccggtgaactgggtgccgttgtcggtgatgatggagttcgggaccccgaagcgatggatgatgttggtgaagaacgccaccgcctgctcggacctgatgctgttcagaggttgggcctcgatccacttggagaatttgtcgatggcgaccagcaggtgcgtatagcccccgggcgccttctgcaagggaccgacgaggtccagaccccatacagcgaagggccaggtgatgggtattgtctgcagagcctgagcgggaaggtgggtccgcttcgcatagaattggcacccttcgcaggtgcggacaattctagtggcgtcagccaccgccgttggccagtagaagccctgccggaaagcattcccgacaagggctcggggtgctgcgtggtggccggaagcccccgagtgtatttcttgcagcaattcccgaccttcggcgatggagatgcatcgctagaggaggcccgaggggctgcgatgttagagctcctcttcattgcccagcaagacgaatgacttggcgcgtcgcgctacccgccgagcctcgacttggtcgaggggtagctctcctcgacggagatatcgcaggtacggggcctgccaatctcgatctggcgtggccccactctgttcttcctcgacgtccagtgcctcgtcctcggggggccgagggtacctcgggccgttccgagggtgcctcgggctgagcagacctcccagcgcaagcaagagcgccgaacacatggttcatgcaccgctggtacgtcgcgcccgcattcctcaaaccgaacggcantggtgacatagcagtacatgccgaacggcgtgatgaaagaagtcgcgagctggtcggactctttcattcggatctggtgataccctgagtaggcatcgaggaaggacagggtttcgcacccagcggtggaatccacgatttggtcgatgcgaggcaaagggtagggaaccttcggacatgctttgttgagaccagtgtagtctacgcacatccgccatttcccccctttcttcctcacaagcaccagggttggcaagccattcgggatggaatacctctttgatgaaccctgctgccattagcttgtggatctcttcgccaatcactctgcgcttttcctcgtcgaatcggcgcagagactgcctgacgggccgggctccggcccgaatatccagcgagtgctcggcgacatccctcggtattg

SEQ ID NO: 19685 - protein, 193 aa, Zea mays subsp. mays
  peptide (1)..(193): Ceres Seq. ID no. 13624196
  misc_feature (1)..(48): NCBI GI NO: 18542179 NR Description: putative pol protein [Zea mays]
MSHGGPVHPDMVILAKNPKFFAGELGAVVGDDGVRDPEAMDDVGEERHRLLGPDAVQRLGLDPLGEFVDGDQQVRIAPGRLLQGTDEVQTPYSEGPGDGYCLQSLSGKVGPLRIELAPFAGADNSSGVSHRRWPVEALPESIPDKGSGCCVVAGSPRVYFLQQFPTFGDGDASLEEARGAAMLELLFIAQQDE

SEQ ID NO: 19686 - protein, 183 aa, Zea mays subsp. mays
  peptide (1)..(183): Ceres Seq. ID no. 13624197
  misc_feature (1)..(38): NCBI GI NO: 18542179 NR Description: putative pol protein [Zea mays]
MVILAKNPKFFAGELGAVVGDDGVRDPEAMDDVGEERHRLLGPDAVQRLGLDPLGEFVDGDQQVRIAPGRLLQGTDEVQTPYSEGPGDGYCLQSLSGKVGPLRIELAPFAGADNSSGVSHRRWPVEALPESIPDKGSGCCVVAGSPRVYFLQQFPTFGDGDASLEEARGAAMLELLFIAQQDE

SEQ ID NO: 19687 - protein, 154 aa, Zea mays subsp. mays
  peptide (1)..(154): Ceres Seq. ID no. 13624198
MDDVGEERHRLLGPDAVQRLGLDPLGEFVDGDQQVRIAPGRLLQGTDEVQTPYSEGPGDGYCLQSLSGKVGPLRIELAPFAGADNSSGVSHRRWPVEALPESIPDKGSGCCVVAGSPRVYFLQQFPTFGDGDASLEEARGAAMLELLFIAQQDE

SEQ ID NO: 19688 - DNA, 2275 bp, Zea mays subsp. mays
  misc_feature (1)..(2275): Ceres Seq. ID no. 15226371
cccccccccccccccccccagaagagcctgctgtagcggcgcaaacgcaggaggaacaacaactgcggccgtttgagcttgaggttgagaagggcgctgccttcactctgggcctcctagctgtaaagcctgaacatcaacaatttatagttgatgctggtgcactacctcccctagtgaaacttttgaaaaggcagagaagtactacaaattcaaggatggttaatagcgttatcaagagagcagctgatgcaattaccaaccttgcacatgagaatagcaacatcaaaactagagtcagaatggaaggtggaatcccaccacttgttgaattgcttgaatctcaggatcttaaggtgcagagggcagctgcaggggccttgcggactttagcctttaaaaatgatgaaaataaaactcagattgttcaatgcaatgctttgccaactttgatcttaatgctgcgatctgaagatgccgcaattcactatgaagcagttggtgtcattggaaatttggttcattcatcacctaacatcaagaaggaggtccttaatgcaggggcactgcaacctgtgattggattattaagctcatgttgtacagaaagccaaagagaggctgctttgttgctagggcaatttgcttcagccgactcagattgcaaggtccatattatgcaaaggggtgcagtccgtccactaattgaaatgctacagtcggctgatgtccaactccgggagatgtctgcttttgcactcggcaggcttgcccaggacacacataaccaagcaggtattgcatataatggtggcttggtgcctttgtttaaactccttgactcaaaaaatggatctctgcaacataatgctgcatttgccctttatggagttgcagataatgaggactatgtatctgacttcattaaagtaggaggtgtccaaaagttgcaagatggggaatttattgtgcaggcaacaaaggactgtgtggcaaaaacattgaaaaggttagaggagaagataaatggacgagtgttgaaacacttgctttatttgatgcgagtaggagagcaatctgtgcaaaggcgtgttgctctagctctcgcacacctttgtgctcctgaagatcaaagggcaatttttattgataataatggtctcgacttgcttcttgatcttctgatttccatgagcccaaaacatcaacaagatggctcagcagcattatacaaattggccaacaaagctgcagcactttctcccatggatgctgcccctccatctccaacacctcaggtttatcttggtgagcaatacgtgaatagttcaacactttcagatgttactttcttggtagaaggaaagcgcttttatgcacacagaattgctttgcttgcttcttcggatgcatttcgtgcaatgtttgatggcgggtatagggaaaaggatgcaagagacattgaaattccaaatatcagatgggaggtctttgaactcatgatgagatttatctatacagggtcagtgcagattaacagtgaaatttcacaggatcttcttagagctgctgatcagtatctcttagaaggactcaaacgcttatgtgaatatactattgcgaaggatgtgaatctagataatgtatctgacatgtatgacttgtccgaagcctttcatgccgtgtcactgagacatacatgcatcttgtacattctggaacattttaacaagatctgcaccagagccggttctgcacagctgatccagcgtgttattccagagatccgcaattttctaaccaaggcactgaattcatcaagaagtccaagtccaagcgacaggaactcgcagacttgatgagtcccaattcattggcaccgacgccgtcatctgaccaaagttgctggagatcctgtacagtaaaatttctggcgctgagcgttcaatggtatctattttgggtacatggtggcgcggtccttgaaattaacatcagcaatgtaacaaaattttctaagatctagttgaggataaggataaggagaacatgtctcgtactcatgcatcgaccagcttacactgggataggctatagttggatggtcctggccgtaattcgtcggtctcagctttgattgagtttagtgttgtttccaccttccagttcacagttcagtgtatgcccgcatctgtttatttaaagtattaagcgtgaacaagttagacattaggacatgtacaatgatgtttaatgtagaggctcttgaggtgtc

SEQ ID NO: 19689 - protein, 618 aa, Zea mays subsp. mays
  peptide (1)..(618): Ceres Seq. ID no. 15226372
  misc_feature (435)..(543): Pfam Name: Pfam Description:  BTB/POZ domain
  misc_feature (22)..(606): NCBI GI NO: 30687245 NR Description: expressed protein [Arabidopsis thaliana]
  misc_feature (25)..(611): NCBI GI NO: 18491179 NR Description: unknown protein [Arabidopsis thaliana]
  misc_feature (25)..(611): NCBI GI NO: 30684235 NR Description: expressed protein [Arabidopsis thaliana]
  misc_feature (25)..(611): NCBI GI NO: 9955550 NR Description: putative protein [Arabidopsis thaliana]
  misc_feature (22)..(352): NCBI GI NO: 15239713 NR Description: expressed protein [Arabidopsis thaliana]
  misc_feature (30)..(541): NCBI GI NO: 15239713 NR Description: expressed protein [Arabidopsis thaliana]
  misc_feature (27)..(373): NCBI GI NO: 6320824 NR Description: An armadillo repeat-containing protein localized onthe vacuolar membrane
  misc_feature (44)..(384): NCBI GI NO: 32414859 NR Description: hypothetical protein [Neurospora crassa]
  misc_feature (25)..(383): NCBI GI NO: 19112030 NR Description: putative vacuolar protein; beta-catenin family
  misc_feature (25)..(383): NCBI GI NO: 7491624 NR Description: hypothetical protein SPBC354
PPPPPPEEPAVAAQTQEEQQLRPFELEVEKGAAFTLGLLAVKPEHQQFIVDAGALPPLVKLLKRQRSTTNSRMVNSVIKRAADAITNLAHENSNIKTRVRMEGGIPPLVELLESQDLKVQRAAAGALRTLAFKNDENKTQIVQCNALPTLILMLRSEDAAIHYEAVGVIGNLVHSSPNIKKEVLNAGALQPVIGLLSSCCTESQREAALLLGQFASADSDCKVHIMQRGAVRPLIEMLQSADVQLREMSAFALGRLAQDTHNQAGIAYNGGLVPLFKLLDSKNGSLQHNAAFALYGVADNEDYVSDFIKVGGVQKLQDGEFIVQATKDCVAKTLKRLEEKINGRVLKHLLYLMRVGEQSVQRRVALALAHLCAPEDQRAIFIDNNGLDLLLDLLISMSPKHQQDGSAALYKLANKAAALSPMDAAPPSPTPQVYLGEQYVNSSTLSDVTFLVEGKRFYAHRIALLASSDAFRAMFDGGYREKDARDIEIPNIRWEVFELMMRFIYTGSVQINSEISQDLLRAADQYLLEGLKRLCEYTIAKDVNLDNVSDMYDLSEAFHAVSLRHTCILYILEHFNKICTRAGSAQLIQRVIPEIRNFLTKALNSSRSPSPSDRNSQT

SEQ ID NO: 19690 - protein, 546 aa, Zea mays subsp. mays
  peptide (1)..(546): Ceres Seq. ID no. 15226373
  misc_feature (363)..(471): Pfam Name: Pfam Description:  BTB/POZ domain
  misc_feature (1)..(534): NCBI GI NO: 30687245 NR Description: expressed protein [Arabidopsis thaliana]
  misc_feature (1)..(539): NCBI GI NO: 18491179 NR Description: unknown protein [Arabidopsis thaliana]
  misc_feature (1)..(539): NCBI GI NO: 30684235 NR Description: expressed protein [Arabidopsis thaliana]
  misc_feature (1)..(539): NCBI GI NO: 9955550 NR Description: putative protein [Arabidopsis thaliana]
  misc_feature (1)..(280): NCBI GI NO: 15239713 NR Description: expressed protein [Arabidopsis thaliana]
  misc_feature (1)..(469): NCBI GI NO: 15239713 NR Description: expressed protein [Arabidopsis thaliana]
  misc_feature (1)..(301): NCBI GI NO: 6320824 NR Description: An armadillo repeat-containing protein localized onthe vacuolar membrane
  misc_feature (1)..(312): NCBI GI NO: 32414859 NR Description: hypothetical protein [Neurospora crassa]
  misc_feature (1)..(311): NCBI GI NO: 19112030 NR Description: putative vacuolar protein; beta-catenin family
  misc_feature (1)..(311): NCBI GI NO: 7491624 NR Description: hypothetical protein SPBC354
MVNSVIKRAADAITNLAHENSNIKTRVRMEGGIPPLVELLESQDLKVQRAAAGALRTLAFKNDENKTQIVQCNALPTLILMLRSEDAAIHYEAVGVIGNLVHSSPNIKKEVLNAGALQPVIGLLSSCCTESQREAALLLGQFASADSDCKVHIMQRGAVRPLIEMLQSADVQLREMSAFALGRLAQDTHNQAGIAYNGGLVPLFKLLDSKNGSLQHNAAFALYGVADNEDYVSDFIKVGGVQKLQDGEFIVQATKDCVAKTLKRLEEKINGRVLKHLLYLMRVGEQSVQRRVALALAHLCAPEDQRAIFIDNNGLDLLLDLLISMSPKHQQDGSAALYKLANKAAALSPMDAAPPSPTPQVYLGEQYVNSSTLSDVTFLVEGKRFYAHRIALLASSDAFRAMFDGGYREKDARDIEIPNIRWEVFELMMRFIYTGSVQINSEISQDLLRAADQYLLEGLKRLCEYTIAKDVNLDNVSDMYDLSEAFHAVSLRHTCILYILEHFNKICTRAGSAQLIQRVIPEIRNFLTKALNSSRSPSPSDRNSQT

SEQ ID NO: 19691 - protein, 518 aa, Zea mays subsp. mays
  peptide (1)..(518): Ceres Seq. ID no. 15226374
  misc_feature (335)..(443): Pfam Name: Pfam Description:  BTB/POZ domain
  misc_feature (1)..(506): NCBI GI NO: 30687245 NR Description: expressed protein [Arabidopsis thaliana]
  misc_feature (1)..(511): NCBI GI NO: 18491179 NR Description: unknown protein [Arabidopsis thaliana]
  misc_feature (1)..(511): NCBI GI NO: 30684235 NR Description: expressed protein [Arabidopsis thaliana]
  misc_feature (1)..(511): NCBI GI NO: 9955550 NR Description: putative protein [Arabidopsis thaliana]
  misc_feature (1)..(252): NCBI GI NO: 15239713 NR Description: expressed protein [Arabidopsis thaliana]
  misc_feature (1)..(441): NCBI GI NO: 15239713 NR Description: expressed protein [Arabidopsis thaliana]
  misc_feature (1)..(273): NCBI GI NO: 6320824 NR Description: An armadillo repeat-containing protein localized onthe vacuolar membrane
  misc_feature (1)..(284): NCBI GI NO: 32414859 NR Description: hypothetical protein [Neurospora crassa]
  misc_feature (1)..(283): NCBI GI NO: 19112030 NR Description: putative vacuolar protein; beta-catenin family
  misc_feature (1)..(283): NCBI GI NO: 7491624 NR Description: hypothetical protein SPBC354
MEGGIPPLVELLESQDLKVQRAAAGALRTLAFKNDENKTQIVQCNALPTLILMLRSEDAAIHYEAVGVIGNLVHSSPNIKKEVLNAGALQPVIGLLSSCCTESQREAALLLGQFASADSDCKVHIMQRGAVRPLIEMLQSADVQLREMSAFALGRLAQDTHNQAGIAYNGGLVPLFKLLDSKNGSLQHNAAFALYGVADNEDYVSDFIKVGGVQKLQDGEFIVQATKDCVAKTLKRLEEKINGRVLKHLLYLMRVGEQSVQRRVALALAHLCAPEDQRAIFIDNNGLDLLLDLLISMSPKHQQDGSAALYKLANKAAALSPMDAAPPSPTPQVYLGEQYVNSSTLSDVTFLVEGKRFYAHRIALLASSDAFRAMFDGGYREKDARDIEIPNIRWEVFELMMRFIYTGSVQINSEISQDLLRAADQYLLEGLKRLCEYTIAKDVNLDNVSDMYDLSEAFHAVSLRHTCILYILEHFNKICTRAGSAQLIQRVIPEIRNFLTKALNSSRSPSPSDRNSQT

SEQ ID NO: 19692 - DNA, 2805 bp, Zea mays subsp. mays
  misc_feature (1)..(2805): Ceres Seq. ID no. 13600310
ggaaaagatcccctgcagaggacatgagaaacggcgttgcagattccaaaacccatcagaaaacttctgtcttttctggacaaaaggttcgtgaagttttccaattaaaacgcggaacatattcagatcttactgctgccaagatttcagagatgatgcactctaatagcttagataatgcaccgacacagtcgcttattagtgttgttaatggtattttggatgaaagcatagaaaggaaaaagggagaaataccacatcgtgtagtttacttactgcggaaagtcgttcaagagattgagcaccgtctctgtattcaagcagagcacataagaagtcaaaatgttaccatcaagacaagagaacaaaagtactgttcaaaaattaaagcacttgaaatgttggtaaatggcacaaatgaagaaaaccagatggcaataaacaggcttcagatagtcaagaatgagaagtcacaaatcgaagagaaaaaagaactctgtgagaaagatgttcaacgattaatgaaagagaaagaatattccaaaagcatcataatgaacctaacaaaagatatggaagccatgaatagattgcatgagcagcaacttgagcaaattggaagaaaggcaaaggaaatggaggaacaattaaccaccagggtaaaagaagtagagtatctcttgctacaatcgaataagaaagttgaagaacttgagattgcttctaagctaaaatcacagttatgggatcagaaagagaacatttttcagagttacatggataatcaacaattagttatcaaggacataagaatattgtcacagtcatatgaaaatgatatgtatgcacttcaaatgcagtggagaaatgaaatctctaacttaggatctgggttaaaatgtttggttgatgccgctgaaaattatcataaagtcctgacagagaaccaaaagttatttaatgaagtgcaagaactaaaaggtaatataagagtatattgtcgtgttaggccatttctttccggtcaagataaaaagtccaccacaattgactacatgggggaaaatggtgagcttcttatatcaaatccatttaagcaagggaaggacggacatagaatgttcaagtttaataaagtgtttactccatttgcttcccaagctgaggttttttctgacatacaaccactgatccgatcagttctggatggattcaacgtttgtatttttgcatatggccagactggttctggcaaaacttacactatgagtgggcctaccacatcaaaacaagattggggtgtcaattatcgagctttaaatgatttgtttgatatttcactaagtaggagaaatgccttctcatatgaggtgggggtacaaatggttgagatatacaatgaacaagtccgtgatctgctatcaaatgatattgcacaaagaagacttgggatttggaacacttctcaacccaatgggcttgttgttccagatgcaagcttgcactcagttaagtcgacatctgatgtattagacttgatggagattggacaagcaaatagagcagttggttcaacagcgctaaatgaacgaagtagtcggtcacacagtattctaactgtacatgttcgagggatggatttgaagaatggatcaacctctaggggttgtttgcatcttattgatcttgctggtagtgagagggtagagaagtctgaagtaaccggcgatagattaaaagaagctcaatacattaacaaatcactctctgcgttaggtgatgttatttttgctttgtcacagaaaagtgcccatgtgccttatagaaacagcaagttaacacaagttcttcaaagttctttaggtggacaagcaaaaactctaatgtttgttcagataaatcctgatgttgagtcatattcagaaactataagtactttaaagtttgctgaaagggtgtctggagtagagttaggtgctgctagaagtaacaaggagggaaaagatataaaagagctattggaacaggttgcgtctttgaaagacacaattttgcgcaaagatatggaaatagagcagatccaggtcatcaaagacaaagtaaaatccccaaatttgttgttagatagaaatgtgcctggcttgacgaagactacagcaaaccaacctagccaactattatcaggcgaacgaatgcttaagtctagtgacagagttctatcggatcgtcagagttacggcgaggtgaatgtagatcctaaccaccatgtgatggatactgcaccagtgagcatagatgaagcaggatatgagaacaatgcatcggatgatggtttatcgggtgaaaccgagaatgataattcagctgctgagatgacagcggaacggctgcatagatttccatcaagaataagcaggttcactctcacaaagaacgggcagccatctatgtctagatcgaacccaaaggatgctaagactccaagcaatacgaaagctccatcgagccggttgacaggaggctcttcagccaggtctaaaagacggcagtagagcacgatcatgttgctcgttttgatgtgcattgtagttgaaatgtgaatttggtgggtagttgtaggaccgttttatgattgtaactttagaaaatgtcagacactgatggcagaatatttgagacatttgtttgatcatttgcttatgccgagcaaaacagcaaacaatgctcgattgtatgtgaaacactctgacctgtgaccatttgaatgtcggtgcgcctccggaagtccggagttgtgtatatacc

SEQ ID NO: 19693 - protein, 849 aa, Zea mays subsp. mays
  peptide (1)..(849): Ceres Seq. ID no. 13600311
  misc_feature (50)..(336): Pfam Name: Pfam Description:  Myosin tail
  misc_feature (33)..(697): NCBI GI NO: 25404429 NR Description: kinesin-like protein, 73641-79546
  misc_feature (33)..(697): NCBI GI NO: 30696876 NR Description: kinesin-related protein [Arabidopsis thaliana]
  misc_feature (33)..(386): NCBI GI NO: 6633835 NR Description: F2K11.1 [Arabidopsis thaliana]
  misc_feature (388)..(697): NCBI GI NO: 6633835 NR Description: F2K11.1 [Arabidopsis thaliana]
  misc_feature (94)..(832): NCBI GI NO: 12324217 NR Description: kinesin-related protein; 103921-99132
  misc_feature (94)..(832): NCBI GI NO: 22330608 NR Description: kinesin-related protein [Arabidopsis thaliana]
  misc_feature (94)..(751): NCBI GI NO: 25406299 NR Description: protein kinesin F2P9.27
  misc_feature (92)..(474): NCBI GI NO: 6714287 NR Description: F15H18.10 [Arabidopsis thaliana]
  misc_feature (482)..(846): NCBI GI NO: 6714287 NR Description: F15H18.10 [Arabidopsis thaliana]
  misc_feature (153)..(842): NCBI GI NO: 22329655 NR Description: kinesin-related protein [Arabidopsis thaliana]
KRSPAEDMRNGVADSKTHQKTSVFSGQKVREVFQLKRGTYSDLTAAKISEMMHSNSLDNAPTQSLISVVNGILDESIERKKGEIPHRVVYLLRKVVQEIEHRLCIQAEHIRSQNVTIKTREQKYCSKIKALEMLVNGTNEENQMAINRLQIVKNEKSQIEEKKELCEKDVQRLMKEKEYSKSIIMNLTKDMEAMNRLHEQQLEQIGRKAKEMEEQLTTRVKEVEYLLLQSNKKVEELEIASKLKSQLWDQKENIFQSYMDNQQLVIKDIRILSQSYENDMYALQMQWRNEISNLGSGLKCLVDAAENYHKVLTENQKLFNEVQELKGNIRVYCRVRPFLSGQDKKSTTIDYMGENGELLISNPFKQGKDGHRMFKFNKVFTPFASQAEVFSDIQPLIRSVLDGFNVCIFAYGQTGSGKTYTMSGPTTSKQDWGVNYRALNDLFDISLSRRNAFSYEVGVQMVEIYNEQVRDLLSNDIAQRRLGIWNTSQPNGLVVPDASLHSVKSTSDVLDLMEIGQANRAVGSTALNERSSRSHSILTVHVRGMDLKNGSTSRGCLHLIDLAGSERVEKSEVTGDRLKEAQYINKSLSALGDVIFALSQKSAHVPYRNSKLTQVLQSSLGGQAKTLMFVQINPDVESYSETISTLKFAERVSGVELGAARSNKEGKDIKELLEQVASLKDTILRKDMEIEQIQVIKDKVKSPNLLLDRNVPGLTKTTANQPSQLLSGERMLKSSDRVLSDRQSYGEVNVDPNHHVMDTAPVSIDEAGYENNASDDGLSGETENDNSAAEMTAERLHRFPSRISRFTLTKNGQPSMSRSNPKDAKTPSNTKAPSSRLTGGSSARSKRRQ

SEQ ID NO: 19694 - protein, 842 aa, Zea mays subsp. mays
  peptide (1)..(842): Ceres Seq. ID no. 13600312
  misc_feature (43)..(329): Pfam Name: Pfam Description:  Myosin tail
  misc_feature (26)..(690): NCBI GI NO: 25404429 NR Description: kinesin-like protein, 73641-79546
  misc_feature (26)..(690): NCBI GI NO: 30696876 NR Description: kinesin-related protein [Arabidopsis thaliana]
  misc_feature (26)..(379): NCBI GI NO: 6633835 NR Description: F2K11.1 [Arabidopsis thaliana]
  misc_feature (381)..(690): NCBI GI NO: 6633835 NR Description: F2K11.1 [Arabidopsis thaliana]
  misc_feature (87)..(825): NCBI GI NO: 12324217 NR Description: kinesin-related protein; 103921-99132
  misc_feature (87)..(825): NCBI GI NO: 22330608 NR Description: kinesin-related protein [Arabidopsis thaliana]
  misc_feature (87)..(744): NCBI GI NO: 25406299 NR Description: protein kinesin F2P9.27
  misc_feature (85)..(467): NCBI GI NO: 6714287 NR Description: F15H18.10 [Arabidopsis thaliana]
  misc_feature (475)..(839): NCBI GI NO: 6714287 NR Description: F15H18.10 [Arabidopsis thaliana]
  misc_feature (146)..(835): NCBI GI NO: 22329655 NR Description: kinesin-related protein [Arabidopsis thaliana]
MRNGVADSKTHQKTSVFSGQKVREVFQLKRGTYSDLTAAKISEMMHSNSLDNAPTQSLISVVNGILDESIERKKGEIPHRVVYLLRKVVQEIEHRLCIQAEHIRSQNVTIKTREQKYCSKIKALEMLVNGTNEENQMAINRLQIVKNEKSQIEEKKELCEKDVQRLMKEKEYSKSIIMNLTKDMEAMNRLHEQQLEQIGRKAKEMEEQLTTRVKEVEYLLLQSNKKVEELEIASKLKSQLWDQKENIFQSYMDNQQLVIKDIRILSQSYENDMYALQMQWRNEISNLGSGLKCLVDAAENYHKVLTENQKLFNEVQELKGNIRVYCRVRPFLSGQDKKSTTIDYMGENGELLISNPFKQGKDGHRMFKFNKVFTPFASQAEVFSDIQPLIRSVLDGFNVCIFAYGQTGSGKTYTMSGPTTSKQDWGVNYRALNDLFDISLSRRNAFSYEVGVQMVEIYNEQVRDLLSNDIAQRRLGIWNTSQPNGLVVPDASLHSVKSTSDVLDLMEIGQANRAVGSTALNERSSRSHSILTVHVRGMDLKNGSTSRGCLHLIDLAGSERVEKSEVTGDRLKEAQYINKSLSALGDVIFALSQKSAHVPYRNSKLTQVLQSSLGGQAKTLMFVQINPDVESYSETISTLKFAERVSGVELGAARSNKEGKDIKELLEQVASLKDTILRKDMEIEQIQVIKDKVKSPNLLLDRNVPGLTKTTANQPSQLLSGERMLKSSDRVLSDRQSYGEVNVDPNHHVMDTAPVSIDEAGYENNASDDGLSGETENDNSAAEMTAERLHRFPSRISRFTLTKNGQPSMSRSNPKDAKTPSNTKAPSSRLTGGSSARSKRRQ

SEQ ID NO: 19695 - protein, 799 aa, Zea mays subsp. mays
  peptide (1)..(799): Ceres Seq. ID no. 13600313
  misc_feature (1)..(286): Pfam Name: Pfam Description:  Myosin tail
  misc_feature (1)..(647): NCBI GI NO: 25404429 NR Description: kinesin-like protein, 73641-79546
  misc_feature (1)..(647): NCBI GI NO: 30696876 NR Description: kinesin-related protein [Arabidopsis thaliana]
  misc_feature (1)..(336): NCBI GI NO: 6633835 NR Description: F2K11.1 [Arabidopsis thaliana]
  misc_feature (338)..(647): NCBI GI NO: 6633835 NR Description: F2K11.1 [Arabidopsis thaliana]
  misc_feature (44)..(782): NCBI GI NO: 12324217 NR Description: kinesin-related protein; 103921-99132
  misc_feature (44)..(782): NCBI GI NO: 22330608 NR Description: kinesin-related protein [Arabidopsis thaliana]
  misc_feature (44)..(701): NCBI GI NO: 25406299 NR Description: protein kinesin F2P9.27
  misc_feature (42)..(424): NCBI GI NO: 6714287 NR Description: F15H18.10 [Arabidopsis thaliana]
  misc_feature (432)..(796): NCBI GI NO: 6714287 NR Description: F15H18.10 [Arabidopsis thaliana]
  misc_feature (103)..(792): NCBI GI NO: 22329655 NR Description: kinesin-related protein [Arabidopsis thaliana]
MMHSNSLDNAPTQSLISVVNGILDESIERKKGEIPHRVVYLLRKVVQEIEHRLCIQAEHIRSQNVTIKTREQKYCSKIKALEMLVNGTNEENQMAINRLQIVKNEKSQIEEKKELCEKDVQRLMKEKEYSKSIIMNLTKDMEAMNRLHEQQLEQIGRKAKEMEEQLTTRVKEVEYLLLQSNKKVEELEIASKLKSQLWDQKENIFQSYMDNQQLVIKDIRILSQSYENDMYALQMQWRNEISNLGSGLKCLVDAAENYHKVLTENQKLFNEVQELKGNIRVYCRVRPFLSGQDKKSTTIDYMGENGELLISNPFKQGKDGHRMFKFNKVFTPFASQAEVFSDIQPLIRSVLDGFNVCIFAYGQTGSGKTYTMSGPTTSKQDWGVNYRALNDLFDISLSRRNAFSYEVGVQMVEIYNEQVRDLLSNDIAQRRLGIWNTSQPNGLVVPDASLHSVKSTSDVLDLMEIGQANRAVGSTALNERSSRSHSILTVHVRGMDLKNGSTSRGCLHLIDLAGSERVEKSEVTGDRLKEAQYINKSLSALGDVIFALSQKSAHVPYRNSKLTQVLQSSLGGQAKTLMFVQINPDVESYSETISTLKFAERVSGVELGAARSNKEGKDIKELLEQVASLKDTILRKDMEIEQIQVIKDKVKSPNLLLDRNVPGLTKTTANQPSQLLSGERMLKSSDRVLSDRQSYGEVNVDPNHHVMDTAPVSIDEAGYENNASDDGLSGETENDNSAAEMTAERLHRFPSRISRFTLTKNGQPSMSRSNPKDAKTPSNTKAPSSRLTGGSSARSKRRQ

SEQ ID NO: 19696 - DNA, 1580 bp, Zea mays subsp. mays
  misc_feature (1)..(1580): Ceres Seq. ID no. 14302617
ttttagtggaggagctactgtcttgagggttactagtgtctgacactatcttgagcaagtcagagacaggagtagagttggattgcagctcctctatgaggagcttgattttgttggacatagccactcgattgaatgacaactttccaacatggccaccgtcaccagacatggcatcggtagcagcagcatcgtgtctcggggtcggggacagcagccagagaagcatgagagccagttaccagcagtgtggcgagcagcatggcgggcatggtgagcttgggctgcgaggccaccgcccaactccggtgcggcgtctcgagtcccgtcgtgtttgtcctggatcatgaagtagtgaagctcgtccacagcatcctcagcctcgtcggccttcttgccgagaatctcgagctgctccagcaggttggggttcccggcgacgacgtcgtccctccccttggccacgtccagcagcgctctagcgtaccgcatcttctctttgatcatgttaaggttggtgccgagctcggcgctggacacgtaggatttcatccagtcgtcggggagattattgagaacatggccaaggagatacttggccgttcccagagccacctccatcttctgctccggtcgagatggaagtcgaaagaacagtgtgcgtgtgctgctggctggatgttgcccagcgccgaggaccgacgtatgcttatatggcgttctggtaattgataattgattggtcctgatgcgattcgtgcttatctataattctatccggatccggctcgctaggcatctttgccgagggcgtacggcttcctcgtggtcctcatctaatggtgctgtcacattcaaagaagaaagtgctgggaaaaccacgtacgagaatttccgatacagatcagacagcaggcctaacatctatagccaaggatgtctgaataactttctacaagtcttctgcagcaagacaaaaccggcgtgtttagaaggttttgtcttctgcatgcgttgaatgatctatagccacgtacgacaaagttttatagaaggttttgtcgtgcatgcgttgaatggtccaagccatagggacgaaccgacgtgtccggcttcgtttcgtgctttgcttttaattgggtggcgactcagattttcatgtcaaaatctgcagcctcgtgtgaagatgctagagaagacaaaaggcaagcgctgatgatcctgcaagtggtatgaatagagagcctataaagtgcctttctggcgcacaatctgaagctgcaaagcaaacgcaatgctgccgtcgggagattggaactacaatatctttgcatctctagctagtgaatgttcctttggactgatgactttgccgtagaggttagccgtcactcgtcactggacagtgcgtttgctgctatatcaagaggttcttttttttaaaagcttggtttcaatgtatacaaagtttcgtttaaggaccctttgctaccccctttgctaccgagtgtagtccaaaggctacttaactcataaacacaggagacacaaagatataggaggtattgatactttcattc

SEQ ID NO: 19697 - protein, 156 aa, Zea mays subsp. mays
  peptide (1)..(156): Ceres Seq. ID no. 14302618
MAGMVSLGCEATAQLRCGVSSPVVFVLDHEVVKLVHSILSLVGLLAENLELLQQVGVPGDDVVPPLGHVQQRSSVPHLLFDHVKVGAELGAGHVGFHPVVGEIIENMAKEILGRSQSHLHLLLRSRWKSKEQCACAAGWMLPSAEDRRMLIWRSGN

SEQ ID NO: 19698 - protein, 153 aa, Zea mays subsp. mays
  peptide (1)..(153): Ceres Seq. ID no. 14302619
MVSLGCEATAQLRCGVSSPVVFVLDHEVVKLVHSILSLVGLLAENLELLQQVGVPGDDVVPPLGHVQQRSSVPHLLFDHVKVGAELGAGHVGFHPVVGEIIENMAKEILGRSQSHLHLLLRSRWKSKEQCACAAGWMLPSAEDRRMLIWRSGN

SEQ ID NO: 19699 - protein, 89 aa, Zea mays subsp. mays
  peptide (1)..(89): Ceres Seq. ID no. 14302620
  misc_feature (40)..(79): NCBI GI NO: 22327677 NR Description: DHHC-type zinc finger domain-containing protein
MRFVLIYNSIRIRLARHLCRGRTASSWSSSNGAVTFKEESAGKTTYENFRYRSDSRPNIYSQGCLNNFLQVFCSKTKPACLEGFVFCMR

SEQ ID NO: 19700 - DNA, 1718 bp, Zea mays subsp. mays
  misc_feature (1)..(1718): Ceres Seq. ID no. 12638003
tcgctggtactgggagcgggtgacagttattgtggatgcatgtgctattgtcggttaatgaacttcggaagctatttaagatcttacaatgccctttggcatattttaaatggaaatcaaagcactctgtttctttgttatttatttgttgtataatttgcttccacttgcagaattggtcttctagtggtctgcttgagaaaatgaagaaactttctgaaagaaggaagcttgaagatttaacaattggtccagtccttacagtaagtcaggggcggagccagcccttttttgggggtcagctgaccccggtaaatttctgaatatctaatagaaaatggtgttaataacaatagttctatagtgaagatctagtagaaaatactgatgaccccgataaaatttttgctagcttcgctactgcagtaagtggacagttctggattgtaatcacaattgttctttgtaactaaaatgatatggtgtcgtgttgggaacaaacagtagttaaaaacttaatcaagcaataaatggaaccaggtaataatatattattttctgttattttagtagatgtgaagggcaatcctagtctagcggtgagagttgtctcaccgagtcaccaggttgagggttcgaagatttgcctatcccctttctaaaccttactcatgtgtgtgtaagaagagaagtttttttttattttagtagatgtgagggtgtccagacatcaaatagtgtgtaagaagagaagacaaaggaaattgtctttgcacagtacaggttttcatataaaaggtcaaatatgtgtggagaaagaaaaagaacatgtagctattcatcactatttttttgtctcaactgtttatatggtcacaactcacaactggattagcggtataaagtttttctgtttcttcttattaacatatcatggatcttttctgatccaggttactacagaagccatgatagagcacatgaacaaccttctcaaaataagaggatcaaaggttctgtttggtggtgaaccgttagcgaatcactcaattcccaaaatttatggtgccatgaagcctactgctgtatttgttcctctagaagaaattctaaaaagtgggaacttcgagcttgtgacaaaggagatatttggtccattccaggtagtcacagaatactctgaggatcagcttgagttggtcttagaagcctgcgaaaggatgaatgcgcatctgacagctgcagttgtctcaaacgacccgctattcctgcaggatgtacttgggagatccgttaacgggacaacctacgccggaattcgagcgaggaccacgggcgctccacagaaccactggtttggcccggccggtgatccgcgaggcgcagggatcgggactccggaagccatcaaacttgtctggtcctgccacagggaagtcatatatgacgtcgggcccgtgcccgagagctgggcgcttccttccgcgacctgattagctagacgaggatagactattccatgtcatcacgagaaataaaaggggaagataagcgaagccagcaggactggagcgaccgaccgagagcgagtggctgcatgcctaggcattcattctctgcacgcaactgcactttcaaccctggagaaaacataataaatgctcgttcccctgtacttgagatacatggtacttggaaccggaacgtcggacaactcg

SEQ ID NO: 19701 - protein, 207 aa, Zea mays subsp. mays
  peptide (1)..(207): Ceres Seq. ID no. 12638004
  misc_feature (26)..(207): NCBI GI NO: 18449341 NR Description: putative aldehyde dehydrogenase MIS1 [Zea mays]
  misc_feature (26)..(207): NCBI GI NO: 18449337 NR Description: putative aldehyde dehydrogenase BIS1
  misc_feature (26)..(207): NCBI GI NO: 18449343 NR Description: putative aldehyde dehydrogenase WIS1
  misc_feature (26)..(207): NCBI GI NO: 10178084 NR Description: dehydrogenase [Arabidopsis thaliana]
  misc_feature (26)..(207): NCBI GI NO: 18424599 NR Description: dehydrogenase; protein id: At5g62530
  misc_feature (26)..(207): NCBI GI NO: 34921534 NR Description: Probable aldehyde dehydrogenase
  misc_feature (26)..(207): NCBI GI NO: 15383744 NR Description: delta-1-pyrroline-5- carboxylate dehydrogenaseprecursor
MVTTHNWISGIKFFCFFLLTYHGSFLIQVTTEAMIEHMNNLLKIRGSKVLFGGEPLANHSIPKIYGAMKPTAVFVPLEEILKSGNFELVTKEIFGPFQVVTEYSEDQLELVLEACERMNAHLTAAVVSNDPLFLQDVLGRSVNGTTYAGIRARTTGAPQNHWFGPAGDPRGAGIGTPEAIKLVWSCHREVIYDVGPVPESWALPSAT

SEQ ID NO: 19702 - protein, 174 aa, Zea mays subsp. mays
  peptide (1)..(174): Ceres Seq. ID no. 12638005
  misc_feature (1)..(174): NCBI GI NO: 18449341 NR Description: putative aldehyde dehydrogenase MIS1 [Zea mays]
  misc_feature (1)..(174): NCBI GI NO: 18449337 NR Description: putative aldehyde dehydrogenase BIS1
  misc_feature (1)..(174): NCBI GI NO: 18449343 NR Description: putative aldehyde dehydrogenase WIS1
  misc_feature (1)..(174): NCBI GI NO: 10178084 NR Description: dehydrogenase [Arabidopsis thaliana]
  misc_feature (1)..(174): NCBI GI NO: 18424599 NR Description: dehydrogenase; protein id: At5g62530
  misc_feature (1)..(174): NCBI GI NO: 34921534 NR Description: Probable aldehyde dehydrogenase
  misc_feature (1)..(174): NCBI GI NO: 15383744 NR Description: delta-1-pyrroline-5- carboxylate dehydrogenaseprecursor
MIEHMNNLLKIRGSKVLFGGEPLANHSIPKIYGAMKPTAVFVPLEEILKSGNFELVTKEIFGPFQVVTEYSEDQLELVLEACERMNAHLTAAVVSNDPLFLQDVLGRSVNGTTYAGIRARTTGAPQNHWFGPAGDPRGAGIGTPEAIKLVWSCHREVIYDVGPVPESWALPSAT

SEQ ID NO: 19703 - protein, 170 aa, Zea mays subsp. mays
  peptide (1)..(170): Ceres Seq. ID no. 12638006
  misc_feature (1)..(170): NCBI GI NO: 18449341 NR Description: putative aldehyde dehydrogenase MIS1 [Zea mays]
  misc_feature (1)..(170): NCBI GI NO: 18449337 NR Description: putative aldehyde dehydrogenase BIS1
  misc_feature (1)..(170): NCBI GI NO: 18449343 NR Description: putative aldehyde dehydrogenase WIS1
  misc_feature (1)..(170): NCBI GI NO: 10178084 NR Description: dehydrogenase [Arabidopsis thaliana]
  misc_feature (1)..(170): NCBI GI NO: 18424599 NR Description: dehydrogenase; protein id: At5g62530
  misc_feature (1)..(170): NCBI GI NO: 34921534 NR Description: Probable aldehyde dehydrogenase
  misc_feature (1)..(170): NCBI GI NO: 15383744 NR Description: delta-1-pyrroline-5- carboxylate dehydrogenaseprecursor
MNNLLKIRGSKVLFGGEPLANHSIPKIYGAMKPTAVFVPLEEILKSGNFELVTKEIFGPFQVVTEYSEDQLELVLEACERMNAHLTAAVVSNDPLFLQDVLGRSVNGTTYAGIRARTTGAPQNHWFGPAGDPRGAGIGTPEAIKLVWSCHREVIYDVGPVPESWALPSAT

SEQ ID NO: 19704 - DNA, 2901 bp, Zea mays subsp. mays
  misc_feature (1)..(2901): Ceres Seq. ID no. 15227313
gataattctgttgggagtgtgtaccatctgatcaataggataccgcactctcagttttattggaaggtcaattgcaaactgtaaccctgctgtatgaagtgcttctgactttttcccgagtccagctgcgcactctgtgcttttgaactcgtcttgtgcaaggccaccagtaaacttgtttattcgttgtctgacatcgagatccgttagactaactgacctatagtacatctctgttagaaaaaggtcatagggaaaagaaaaaaacaggattacaatgttatcagaagtgaaagtgtgctcgctctaactagtaagcacagagactccctactctaccaaaaactaatgcacaaattataatcgtcttaggataggtatcaagatttcaactgaccgtttgggcgcaaactaaagaaactccggtaattttgaaccactctttttcttttcgctctctgatcaggagtttagaccacatgtacagtacagctacaagagtcagtagctgattagcggtggttacgaaggctattcacggaaggcttcaagccagagccaactcagtccatcggtgcggttagtgatcctcacaatgtaaccaatgtcctttttggcttttctatatcaacaattccttcagcttgcatgacactcaaagtaccaataccaaactatttttcttaaagtagacaaacacatggctacgagataatgtcacaaattgtcatccgctaccttttttatctcatgggaaaaaatgacggttagctcttcattagaattgaaggactcacagatacttgttattcttaaatgaaatataagctgtgcacgtatatgtacgtataacattttattgtttcagaaataaatatgtcgcgatcgatatataattcggatatgaggtgtcagctggatttgataacgtgagctcactgcctgacctgattttgaagtgtcagtgagacagccatttgacacagttgatacagttttgtatctggcgggatcgattgagcatcttccatgcaccaagtctagcagaataataattgttcttgctgagagggatcaatgcgtactgcaagacattgacccagaagagcttcacgcaaaattgcaagaccctagttttctcgaagaagctcaattgattgatgttcgggagcctgatgaagtgtaagatattccatcattatacttcattttattttgtctccacacaatcatcaaactaacatggcattcatgataagtgcccccaactttctgggtgagacatgtgtgaccttttgtccttagattgtaattcatgaatgaggatgcaaatgctttgctgatattgcgttatggtaaaaagaccagtaacttttgcataggctgccatgatgtttttttgcaaggtgataggttatatgttaaccagaagtgataaagttgggacttgtccttgtttgagaatcgagagtcatgtccgtatattggcgtgatttcacaaataatgagctggatcataaatgttaaattattcaataattacaacatctttttgtggttttcaaaaggaaatatgtaagttatcaagctaatgttgttaaaacaaacaacattagctgcagctttatctcgtatatggaccatttagtatgttaaccctctcatacttggaagatcctaattgcacaaattttagagtgtgcttcacatagttgtagcacatggatcgggacgtgcagttatttgattcagctagtatgttttttgtggttctcttgcatttctaggaatgatattgtgattaccaggttgagtttcattcttttatttattttcgttcttgctgggttgatgttgaatttctactacctgcatggtagggagaaagcttcacttccaggcttcaaggtgaactggcagatatgtttctgcggctttgtgaacttaaacttaaatttggctgcaggagtttccattgcctgtctctaaacttgcagtgcttctttggctgagtgtaggttactgccatattggaggatggtagaatatttgaagttgaccttttggttggtgccgatggaatatggtcaaaggtgaggaagacactattcgggcactcagatgccacctattcaggttacacctgctacactggaattgcagattttgtgctgcccgatatcgatacggttggaaaaccacagttgattttaagccatacattggtccaatctataatgcgatactaggacgtttggccaatcatgatcaggatcaggtttggcaaaattctcttttctcactccctttcttgtgtgcttgcagtgcactctcatttatcatgcaaatttgtgttctcccaagaggtaaaaaaatgcgccatatcttgcatgagtttggtggtctctacttttggtgatggtcttgaaagagaattaccagcatgccttcccatactcgttgacaggatgggtaatgaaattacaagacttacagttgtcaagttattgcaaatttacctctacgtattgatctctcgtgtgtcctggatcatgttgtttctgaactcacagctttccttcgtaaggtacttgcatagttgcatggatctttgctgccttcatttgatttttattttctatgaaaagcatagcaaagagcaagataatgccttcgttttctctctcttatggaacaggccaacagagctcttaggcaggcgacgttgggaactctaaattctttggttgtcacatatggtttgcaatatgtcaatataactaaataacaacttgctaaggtgttcagtccttagtaggctgcatgtaaagcttttatttagccgtcctattttgttctctaggtatcaaatttgaatacatagaatatatttacactctg

SEQ ID NO: 19705 - protein, 157 aa, Zea mays subsp. mays
  peptide (1)..(157): Ceres Seq. ID no. 15227314
  misc_feature (33)..(84): Pfam Name: TATA-binding protein Pfam Description: TBP
  misc_feature (33)..(84): NCBI GI NO: 7487809 NR Description: hypothetical protein At2g02560
  misc_feature (33)..(84): NCBI GI NO: 22325430 NR Description: TIP120 protein, putative [Arabidopsis thaliana]
MIRIRFGKILFSHSLSCVLAVHSHLSCKFVFSQEVKKCAISCMSLVVSTFGDGLERELPACLPILVDRMGNEITRLTVVKLLQIYLYVLISRVSWIMLFLNSQLSFVRYLHSCMDLCCLHLIFIFYEKHSKEQDNAFVFSLLWNRPTELLGRRRWEL

SEQ ID NO: 19706 - protein, 115 aa, Zea mays subsp. mays
  peptide (1)..(115): Ceres Seq. ID no. 15227315
  misc_feature (1)..(42): NCBI GI NO: 7487809 NR Description: hypothetical protein At2g02560
  misc_feature (1)..(42): NCBI GI NO: 22325430 NR Description: TIP120 protein, putative [Arabidopsis thaliana]
MSLVVSTFGDGLERELPACLPILVDRMGNEITRLTVVKLLQIYLYVLISRVSWIMLFLNSQLSFVRYLHSCMDLCCLHLIFIFYEKHSKEQDNAFVFSLLWNRPTELLGRRRWEL

SEQ ID NO: 19707 - protein, 111 aa, Zea mays subsp. mays
  peptide (1)..(111): Ceres Seq. ID no. 15227316
  misc_feature (42)..(65): NCBI GI NO: 7487809 NR Description: hypothetical protein At2g02560
  misc_feature (42)..(65): NCBI GI NO: 22325430 NR Description: TIP120 protein, putative [Arabidopsis thaliana]
MVKGEEDTIRALRCHLFRLHLLHWNCRFCAARYRYGWKTTVDFKPYIGPIYNAILGRLANHDQDQVWQNSLFSLPFLCACSALSFIMQICVLPRGKKMRHILHEFGGLYFW

SEQ ID NO: 19708 - DNA, 2516 bp, Zea mays subsp. mays
  misc_feature (1)..(2516): Ceres Seq. ID no. 14309727
gcatgcgtccgcggtgggtgcgcctagagcctgcagccaccgtagcgaaatctccaatcttgatgttgcgcggggcgaagattgcctctgccgtcgttagggtcaagcaccgagtcgccggctgctgccccctctccctatcgtcgcgccatccatttcctcgccgttgacgacgacgagcgagactagggaccggccttcgacgaagtggcggctactgctcgatctagcgagggtggctggcatcgagctggggcggcggccatgagccatctcttcgacaacaggtgagaatgaatcttacagttcaaccatatatcctcttccggacaatgtaaatatcaactccagtagatcgatcagtcggtgtcctagccatggcatcagaatagcaatggacagctgcgacagaaactcaactagcagaatcacagggaaggatattaagcaggcgattatgttcagtgcctctttgaacaagctcacattaaaccaagatgaggccaccgaatacacaaatttgatcctagaagaacttcagacaggtcaaggagtcctccagatgaatgtcatgagcaagggcctgtcaagggatctccaaccaacctgcgggccaataccagtgccaatgaaatgcagccgacagcgacatatacttactgcaaccgtagtcttcttccaagctcactggaggcgtatatttgtggttttcttgtggctcatggcatgtgctgcactcttcacatggaagttcatgcagtacagacagcggttggctttcgaggtaatggggtactgcctgtcgacagccaagggggctgcagagacgctcaagctcaacatggccattgtgctcctacctgtttgccgcaacacggtcacttggctcaggagaagccgtgttatcaactcggtcatcccatttaatgacaatattaacttccacaagcttgttgcagcgggaattgtgatcggtgtaatccttcatggaggcatccacctggcatgcgacttcccaaggatcacaaggacagataaggccttctttggacgcacaattgccgctgactttgggtaccaccagccatcctacctggagatagtggtatcaaccgaggggacaactggtatagcaatggtggtactaatgtttgtcgcattcttgcttgctagtagtccttcgagaagaaatccaggaatgctgccacctctcgtcagacagttagctgggttcaatgccttctggtactcgcaccatgtgttcatcgctgtctatgtgctcctcattgtgcattccatgttcctattcctagcaaaggatgtagcagagaagacgacgtggatgtatgtcgcaattcctgtggtgatctacattggagaacggatgttcaggatggtcagatctatggtgttcgatgtcaagatcctcaatgccacagtttatccagggatggtacttgcactcaaggtgacaaagcctccaggttttcggtatcaaagtggaatgtatgtatttgtccaatgtccagaagtatcaaagtttgaatggcacccattttcccttacatctgctccagaagatgatcacttgagcatccatataagatctcttggtgattggagctaccaaatgtatgatgtcttccaacagatgctactttccagcaactccagcatgcctaaaatattctttgatggtccctacggtgcagcgtcacaggatcactcaaagtacgaaattatattgttaattggacttggaataggagcaacgcctttcataagtgttctcaaagacattgccaatggattagataaggggcatggcaacttaaattatcactctgaccgactgaagaaggcctacttttattgggtgacaagagagcaaggatcctttgagtggttcagggatatcatgaaagaggtttcggttctagacagcaagcagggtgtgatagaaatgtataactacctgacaagtgtctaccaagaaggtgataagcggtcgatgctaataagtgcgattcaagcacttcattttgcacgccatggcattgatatcatctcaaaaactcctgttcatacgcacttttcgaggccaaactggcctagagtgctacatggccttgcaagaaggcatatcggggagaggataggggttttctactgtggtccggacgatttgggaaggcagctggagaagctctgccacaaagtgaacacaaaaacattcacgcgatttgtgttccacaaggagcatttctaataatagagactagcatagatcaactccttaggaacaaacctgtcaagtatgatctcaaagctgccaagcacttcatttttttcgcatcactccttcctatcttttgctttagtatctctgtcttcatttaaccattataaagctgatcttacttgaggagctttgtatctaactagaaaaaaacagcgccctatcgggcgcttagacgatttcttgaatgtgatctttgtgatttttttttcttttc

SEQ ID NO: 19709 - protein, 624 aa, Zea mays subsp. mays
  peptide (1)..(624): Ceres Seq. ID no. 14309728
  misc_feature (132)..(476): Pfam Name: Pfam Description:  Ferric reductase like transmembrane component
  misc_feature (1)..(476): NCBI GI NO: 11358758 NR Description: respiratory burst oxidase protein D
  misc_feature (1)..(476): NCBI GI NO: 15238842 NR Description: respiratory burst oxidase protein D
  misc_feature (425)..(624): NCBI GI NO: 11358758 NR Description: respiratory burst oxidase protein D
  misc_feature (425)..(624): NCBI GI NO: 15238842 NR Description: respiratory burst oxidase protein D
  misc_feature (1)..(541): NCBI GI NO: 18407959 NR Description: respiratory burst oxidase protein F
  misc_feature (490)..(624): NCBI GI NO: 18407959 NR Description: respiratory burst oxidase protein F
  misc_feature (1)..(541): NCBI GI NO: 3242456 NR Description: Atrboh F [Arabidopsis thaliana]
  misc_feature (490)..(624): NCBI GI NO: 3242456 NR Description: Atrboh F [Arabidopsis thaliana]
  misc_feature (1)..(485): NCBI GI NO: 17384016 NR Description: NADPH oxidase [Nicotiana tabacum]
  misc_feature (486)..(624): NCBI GI NO: 17384016 NR Description: NADPH oxidase [Nicotiana tabacum]
MDSCDRNSTSRITGKDIKQAIMFSASLNKLTLNQDEATEYTNLILEELQTGQGVLQMNVMSKGLSRDLQPTCGPIPVPMKCSRQRHILTATVVFFQAHWRRIFVVFLWLMACAALFTWKFMQYRQRLAFEVMGYCLSTAKGAAETLKLNMAIVLLPVCRNTVTWLRRSRVINSVIPFNDNINFHKLVAAGIVIGVILHGGIHLACDFPRITRTDKAFFGRTIAADFGYHQPSYLEIVVSTEGTTGIAMVVLMFVAFLLASSPSRRNPGMLPPLVRQLAGFNAFWYSHHVFIAVYVLLIVHSMFLFLAKDVAEKTTWMYVAIPVVIYIGERMFRMVRSMVFDVKILNATVYPGMVLALKVTKPPGFRYQSGMYVFVQCPEVSKFEWHPFSLTSAPEDDHLSIHIRSLGDWSYQMYDVFQQMLLSSNSSMPKIFFDGPYGAASQDHSKYEIILLIGLGIGATPFISVLKDIANGLDKGHGNLNYHSDRLKKAYFYWVTREQGSFEWFRDIMKEVSVLDSKQGVIEMYNYLTSVYQEGDKRSMLISAIQALHFARHGIDIISKTPVHTHFSRPNWPRVLHGLARRHIGERIGVFYCGPDDLGRQLEKLCHKVNTKTFTRFVFHKEHF

SEQ ID NO: 19710 - protein, 603 aa, Zea mays subsp. mays
  peptide (1)..(603): Ceres Seq. ID no. 14309729
  misc_feature (111)..(455): Pfam Name: Pfam Description:  Ferric reductase like transmembrane component
  misc_feature (1)..(455): NCBI GI NO: 11358758 NR Description: respiratory burst oxidase protein D
  misc_feature (1)..(455): NCBI GI NO: 15238842 NR Description: respiratory burst oxidase protein D
  misc_feature (404)..(603): NCBI GI NO: 11358758 NR Description: respiratory burst oxidase protein D
  misc_feature (404)..(603): NCBI GI NO: 15238842 NR Description: respiratory burst oxidase protein D
  misc_feature (1)..(520): NCBI GI NO: 18407959 NR Description: respiratory burst oxidase protein F
  misc_feature (469)..(603): NCBI GI NO: 18407959 NR Description: respiratory burst oxidase protein F
  misc_feature (1)..(520): NCBI GI NO: 3242456 NR Description: Atrboh F [Arabidopsis thaliana]
  misc_feature (469)..(603): NCBI GI NO: 3242456 NR Description: Atrboh F [Arabidopsis thaliana]
  misc_feature (1)..(464): NCBI GI NO: 17384016 NR Description: NADPH oxidase [Nicotiana tabacum]
  misc_feature (465)..(603): NCBI GI NO: 17384016 NR Description: NADPH oxidase [Nicotiana tabacum]
MFSASLNKLTLNQDEATEYTNLILEELQTGQGVLQMNVMSKGLSRDLQPTCGPIPVPMKCSRQRHILTATVVFFQAHWRRIFVVFLWLMACAALFTWKFMQYRQRLAFEVMGYCLSTAKGAAETLKLNMAIVLLPVCRNTVTWLRRSRVINSVIPFNDNINFHKLVAAGIVIGVILHGGIHLACDFPRITRTDKAFFGRTIAADFGYHQPSYLEIVVSTEGTTGIAMVVLMFVAFLLASSPSRRNPGMLPPLVRQLAGFNAFWYSHHVFIAVYVLLIVHSMFLFLAKDVAEKTTWMYVAIPVVIYIGERMFRMVRSMVFDVKILNATVYPGMVLALKVTKPPGFRYQSGMYVFVQCPEVSKFEWHPFSLTSAPEDDHLSIHIRSLGDWSYQMYDVFQQMLLSSNSSMPKIFFDGPYGAASQDHSKYEIILLIGLGIGATPFISVLKDIANGLDKGHGNLNYHSDRLKKAYFYWVTREQGSFEWFRDIMKEVSVLDSKQGVIEMYNYLTSVYQEGDKRSMLISAIQALHFARHGIDIISKTPVHTHFSRPNWPRVLHGLARRHIGERIGVFYCGPDDLGRQLEKLCHKVNTKTFTRFVFHKEHF

SEQ ID NO: 19711 - protein, 568 aa, Zea mays subsp. mays
  peptide (1)..(568): Ceres Seq. ID no. 14309730
  misc_feature (76)..(420): Pfam Name: Pfam Description:  Ferric reductase like transmembrane component
  misc_feature (1)..(420): NCBI GI NO: 11358758 NR Description: respiratory burst oxidase protein D
  misc_feature (1)..(420): NCBI GI NO: 15238842 NR Description: respiratory burst oxidase protein D
  misc_feature (369)..(568): NCBI GI NO: 11358758 NR Description: respiratory burst oxidase protein D
  misc_feature (369)..(568): NCBI GI NO: 15238842 NR Description: respiratory burst oxidase protein D
  misc_feature (1)..(485): NCBI GI NO: 18407959 NR Description: respiratory burst oxidase protein F
  misc_feature (434)..(568): NCBI GI NO: 18407959 NR Description: respiratory burst oxidase protein F
  misc_feature (1)..(485): NCBI GI NO: 3242456 NR Description: Atrboh F [Arabidopsis thaliana]
  misc_feature (434)..(568): NCBI GI NO: 3242456 NR Description: Atrboh F [Arabidopsis thaliana]
  misc_feature (1)..(429): NCBI GI NO: 17384016 NR Description: NADPH oxidase [Nicotiana tabacum]
  misc_feature (430)..(568): NCBI GI NO: 17384016 NR Description: NADPH oxidase [Nicotiana tabacum]
MNVMSKGLSRDLQPTCGPIPVPMKCSRQRHILTATVVFFQAHWRRIFVVFLWLMACAALFTWKFMQYRQRLAFEVMGYCLSTAKGAAETLKLNMAIVLLPVCRNTVTWLRRSRVINSVIPFNDNINFHKLVAAGIVIGVILHGGIHLACDFPRITRTDKAFFGRTIAADFGYHQPSYLEIVVSTEGTTGIAMVVLMFVAFLLASSPSRRNPGMLPPLVRQLAGFNAFWYSHHVFIAVYVLLIVHSMFLFLAKDVAEKTTWMYVAIPVVIYIGERMFRMVRSMVFDVKILNATVYPGMVLALKVTKPPGFRYQSGMYVFVQCPEVSKFEWHPFSLTSAPEDDHLSIHIRSLGDWSYQMYDVFQQMLLSSNSSMPKIFFDGPYGAASQDHSKYEIILLIGLGIGATPFISVLKDIANGLDKGHGNLNYHSDRLKKAYFYWVTREQGSFEWFRDIMKEVSVLDSKQGVIEMYNYLTSVYQEGDKRSMLISAIQALHFARHGIDIISKTPVHTHFSRPNWPRVLHGLARRHIGERIGVFYCGPDDLGRQLEKLCHKVNTKTFTRFVFHKEHF

SEQ ID NO: 19712 - DNA, 1221 bp, Zea mays subsp. mays
  misc_feature (1)..(1221): Ceres Seq. ID no. 15226175
gtttcactcgaggaggtgaagcctgaacagaatgaagctgaccaaccagacaacattctctgtgatgttgttgaatgcatggaagaagatgcagatgagttagcttatgcatatccatgcaaagcagagtcagaatcgtctgattctgaatcatctgatgaggatgaccctggagggatttctgtgtctggcgacgagaactgtgacccagatactaaatttaccatgagcaattcattcaaggcagatttttttaggtctagcagaacatcagaggacttcgccacatggcagcgcatcataaggttggatgctatccggtcaaacagtgaatggattttgttctcccgcaaccagtctgaagttcccaaggagagagcattgcagtctgcagcatctgttgggttgaaagactatgagcacttggagcccagtatgatttatcatgcagctcgattagttgggttgctcgaagcatatgcggtctacgatccagagattggctactgccaaggcatgagcgatctgttgtcacctatcattgcggtgatggaggatgacgatgaagcgttctggtgtttcgtgggtttcatgaggaaagcaaggcacaacttcaggctcgacgaggttggaatacgaaggcaattgaagattgtctctcagattatcaagcgcaaagattcgcacctgtataggcatctgcagaagttgcaggccgaggactgtttcttcgtgtacagaatggtggtggttctgttcaggcgagagctcacctttgagcaaaccgtgtgcctgtggggggttatgtgggctgaccaggcagccatacgagccgggatcgggaggtccacctggggaaggataaggctgcgtgctccgccaactgacgacctgttgctctacgccatcgccgcctgcgtcctgcagaggaggaagctgataattgagaagtatagcagcatggacgagatactgcgagagtgcaatagcatggccgggcagctagacgtctggaggctgctagatgatgcacatgacctggttgttaaccttcatgataaaatctgatctgttctcggccctcatggtagaacagatgtactaagcctcaacaaaaggaaagaaaaaaaagaaactgaggctccttccacctaaggcattgttcgtttattccaattccatgtggattggagtgtattggaatggattaggatagatttt

SEQ ID NO: 19713 - protein, 355 aa, Zea mays subsp. mays
  peptide (1)..(355): Ceres Seq. ID no. 15226176
  misc_feature (44)..(355): NCBI GI NO: 15229125 NR Description: GTPase activating -related protein
  misc_feature (3)..(355): NCBI GI NO: 15238237 NR Description: GTPase activator protein of Rab-related smallGTPases-like protein
  misc_feature (42)..(355): NCBI GI NO: 37536102 NR Description: putative GTPase activating protein
  misc_feature (44)..(355): NCBI GI NO: 15238518 NR Description: GTPase activator-related protein of Rab-like smallGTPases
  misc_feature (92)..(355): NCBI GI NO: 9759196 NR Description: GTPase activator protein of Rab-like small GTPases-like protein
  misc_feature (92)..(355): NCBI GI NO: 15238777 NR Description: GTPase activator protein of Rab-related smallGTPases-like protein
  misc_feature (67)..(271): NCBI GI NO: 34893986 NR Description: P0672D08.1
  misc_feature (69)..(272): NCBI GI NO: 40738957 NR Description: hypothetical protein AN6618.2
  misc_feature (109)..(271): NCBI GI NO: 30688016 NR Description: expressed protein [Arabidopsis thaliana]
  misc_feature (95)..(272): NCBI GI NO: 38103631 NR Description: hypothetical protein MG04067.4
VSLEEVKPEQNEADQPDNILCDVVECMEEDADELAYAYPCKAESESSDSESSDEDDPGGISVSGDENCDPDTKFTMSNSFKADFFRSSRTSEDFATWQRIIRLDAIRSNSEWILFSRNQSEVPKERALQSAASVGLKDYEHLEPSMIYHAARLVGLLEAYAVYDPEIGYCQGMSDLLSPIIAVMEDDDEAFWCFVGFMRKARHNFRLDEVGIRRQLKIVSQIIKRKDSHLYRHLQKLQAEDCFFVYRMVVVLFRRELTFEQTVCLWGVMWADQAAIRAGIGRSTWGRIRLRAPPTDDLLLYAIAACVLQRRKLIIEKYSSMDEILRECNSMAGQLDVWRLLDDAHDLVVNLHDKI

SEQ ID NO: 19714 - protein, 329 aa, Zea mays subsp. mays
  peptide (1)..(329): Ceres Seq. ID no. 15226177
  misc_feature (18)..(329): NCBI GI NO: 15229125 NR Description: GTPase activating -related protein
  misc_feature (1)..(329): NCBI GI NO: 15238237 NR Description: GTPase activator protein of Rab-related smallGTPases-like protein
  misc_feature (16)..(329): NCBI GI NO: 37536102 NR Description: putative GTPase activating protein
  misc_feature (18)..(329): NCBI GI NO: 15238518 NR Description: GTPase activator-related protein of Rab-like smallGTPases
  misc_feature (66)..(329): NCBI GI NO: 9759196 NR Description: GTPase activator protein of Rab-like small GTPases-like protein
  misc_feature (66)..(329): NCBI GI NO: 15238777 NR Description: GTPase activator protein of Rab-related smallGTPases-like protein
  misc_feature (41)..(245): NCBI GI NO: 34893986 NR Description: P0672D08.1
  misc_feature (43)..(246): NCBI GI NO: 40738957 NR Description: hypothetical protein AN6618.2
  misc_feature (83)..(245): NCBI GI NO: 30688016 NR Description: expressed protein [Arabidopsis thaliana]
  misc_feature (69)..(246): NCBI GI NO: 38103631 NR Description: hypothetical protein MG04067.4
MEEDADELAYAYPCKAESESSDSESSDEDDPGGISVSGDENCDPDTKFTMSNSFKADFFRSSRTSEDFATWQRIIRLDAIRSNSEWILFSRNQSEVPKERALQSAASVGLKDYEHLEPSMIYHAARLVGLLEAYAVYDPEIGYCQGMSDLLSPIIAVMEDDDEAFWCFVGFMRKARHNFRLDEVGIRRQLKIVSQIIKRKDSHLYRHLQKLQAEDCFFVYRMVVVLFRRELTFEQTVCLWGVMWADQAAIRAGIGRSTWGRIRLRAPPTDDLLLYAIAACVLQRRKLIIEKYSSMDEILRECNSMAGQLDVWRLLDDAHDLVVNLHDKI

SEQ ID NO: 19715 - protein, 280 aa, Zea mays subsp. mays
  peptide (1)..(280): Ceres Seq. ID no. 15226178
  misc_feature (1)..(280): NCBI GI NO: 15229125 NR Description: GTPase activating -related protein
  misc_feature (1)..(280): NCBI GI NO: 15238237 NR Description: GTPase activator protein of Rab-related smallGTPases-like protein
  misc_feature (1)..(280): NCBI GI NO: 37536102 NR Description: putative GTPase activating protein
  misc_feature (1)..(280): NCBI GI NO: 15238518 NR Description: GTPase activator-related protein of Rab-like smallGTPases
  misc_feature (17)..(280): NCBI GI NO: 9759196 NR Description: GTPase activator protein of Rab-like small GTPases-like protein
  misc_feature (17)..(280): NCBI GI NO: 15238777 NR Description: GTPase activator protein of Rab-related smallGTPases-like protein
  misc_feature (1)..(196): NCBI GI NO: 34893986 NR Description: P0672D08.1
  misc_feature (1)..(197): NCBI GI NO: 40738957 NR Description: hypothetical protein AN6618.2
  misc_feature (34)..(196): NCBI GI NO: 30688016 NR Description: expressed protein [Arabidopsis thaliana]
  misc_feature (20)..(197): NCBI GI NO: 38103631 NR Description: hypothetical protein MG04067.4
MSNSFKADFFRSSRTSEDFATWQRIIRLDAIRSNSEWILFSRNQSEVPKERALQSAASVGLKDYEHLEPSMIYHAARLVGLLEAYAVYDPEIGYCQGMSDLLSPIIAVMEDDDEAFWCFVGFMRKARHNFRLDEVGIRRQLKIVSQIIKRKDSHLYRHLQKLQAEDCFFVYRMVVVLFRRELTFEQTVCLWGVMWADQAAIRAGIGRSTWGRIRLRAPPTDDLLLYAIAACVLQRRKLIIEKYSSMDEILRECNSMAGQLDVWRLLDDAHDLVVNLHDKI

SEQ ID NO: 19716 - DNA, 749 bp, Zea mays subsp. mays
  misc_feature (1)..(749): Ceres Seq. ID no. 13623632
aattcctaccatgacttagttgctgattctattagtttatggaaaatagttgacatgaaagttctcgaggaacttttggaggaagtgattaagcttcagtgcagctcagccagctatgtttacgattgttttattagatgtttgagcaaagtcgacagattggaggaagcaaaaagttttctcgtagggatgcagagtgctaacttaaccccaagtgaggatgtatatacttgtatgatagaatgttgctacagaatgaaattgctaaaagaagctttaaggtttcttgattcaatggtgaaaagaaactatttaccacgtttagaatcttataggtttattatttgtgctctttgtgaggaaggaagctttcatactgctaaaagcatttttggtgacatactatcaaaggaatacaaccgtgatgagattgcttggaagattttgattgatggcttattacaaaaaggaaacactgctgactgctcccgtctgctatcattcatggaggaacagaattgccgtcctggttctgcaatatattctaggcttacaggcgaaataacagttacaagtgaagctcaggaaattgctacatgaatacggacaaaccaaccaaccttagtgttggtgttgatggttccatgaatcagtacaagatgggcaaattgaaagctaaaaagactttggctgtttgacattagcagtgcccctgtaattgtgaggaaggatgtggcaacacaaataat

SEQ ID NO: 19717 - protein, 199 aa, Zea mays subsp. mays
  peptide (1)..(199): Ceres Seq. ID no. 13623633
  misc_feature (9)..(198): NCBI GI NO: 34015356 NR Description: putative fertility restorer
  misc_feature (16)..(184): NCBI GI NO: 15238505 NR Description: pentatricopeptide (PPR) repeat-containing protein
  misc_feature (5)..(196): NCBI GI NO: 15235288 NR Description: pentatricopeptide (PPR) repeat-containing protein
  misc_feature (1)..(184): NCBI GI NO: 14532710 NR Description: unknown protein [Arabidopsis thaliana]
  misc_feature (1)..(184): NCBI GI NO: 30794106 NR Description: unknown protein [Arabidopsis thaliana]
  misc_feature (1)..(184): NCBI GI NO: 18424537 NR Description: pentatricopeptide (PPR) repeat-containing protein
  misc_feature (28)..(198): NCBI GI NO: 15237375 NR Description: pentatricopeptide (PPR) repeat-containing protein
  misc_feature (19)..(184): NCBI GI NO: 15231438 NR Description: pentatricopeptide (PPR) repeat-containing protein
  misc_feature (5)..(199): NCBI GI NO: 15232243 NR Description: pentatricopeptide (PPR) repeat-containing protein
  misc_feature (2)..(184): NCBI GI NO: 18087893 NR Description: putative membrane-associated salt-inducibleprotein
NSYHDLVADSISLWKIVDMKVLEELLEEVIKLQCSSASYVYDCFIRCLSKVDRLEEAKSFLVGMQSANLTPSEDVYTCMIECCYRMKLLKEALRFLDSMVKRNYLPRLESYRFIICALCEEGSFHTAKSIFGDILSKEYNRDEIAWKILIDGLLQKGNTADCSRLLSFMEEQNCRPGSAIYSRLTGEITVTSEAQEIAT

SEQ ID NO: 19718 - protein, 181 aa, Zea mays subsp. mays
  peptide (1)..(181): Ceres Seq. ID no. 13623634
  misc_feature (1)..(180): NCBI GI NO: 34015356 NR Description: putative fertility restorer
  misc_feature (1)..(166): NCBI GI NO: 15238505 NR Description: pentatricopeptide (PPR) repeat-containing protein
  misc_feature (1)..(178): NCBI GI NO: 15235288 NR Description: pentatricopeptide (PPR) repeat-containing protein
  misc_feature (1)..(166): NCBI GI NO: 14532710 NR Description: unknown protein [Arabidopsis thaliana]
  misc_feature (1)..(166): NCBI GI NO: 18424537 NR Description: pentatricopeptide (PPR) repeat-containing protein
  misc_feature (1)..(166): NCBI GI NO: 30794106 NR Description: unknown protein [Arabidopsis thaliana]
  misc_feature (10)..(180): NCBI GI NO: 15237375 NR Description: pentatricopeptide (PPR) repeat-containing protein
  misc_feature (1)..(166): NCBI GI NO: 15231438 NR Description: pentatricopeptide (PPR) repeat-containing protein
  misc_feature (1)..(181): NCBI GI NO: 15232243 NR Description: pentatricopeptide (PPR) repeat-containing protein
  misc_feature (1)..(166): NCBI GI NO: 18087893 NR Description: putative membrane-associated salt-inducibleprotein
MKVLEELLEEVIKLQCSSASYVYDCFIRCLSKVDRLEEAKSFLVGMQSANLTPSEDVYTCMIECCYRMKLLKEALRFLDSMVKRNYLPRLESYRFIICALCEEGSFHTAKSIFGDILSKEYNRDEIAWKILIDGLLQKGNTADCSRLLSFMEEQNCRPGSAIYSRLTGEITVTSEAQEIAT

SEQ ID NO: 19719 - protein, 136 aa, Zea mays subsp. mays
  peptide (1)..(136): Ceres Seq. ID no. 13623635
  misc_feature (1)..(135): NCBI GI NO: 34015356 NR Description: putative fertility restorer
  misc_feature (1)..(121): NCBI GI NO: 15238505 NR Description: pentatricopeptide (PPR) repeat-containing protein
  misc_feature (1)..(133): NCBI GI NO: 15235288 NR Description: pentatricopeptide (PPR) repeat-containing protein
  misc_feature (1)..(121): NCBI GI NO: 14532710 NR Description: unknown protein [Arabidopsis thaliana]
  misc_feature (1)..(121): NCBI GI NO: 18424537 NR Description: pentatricopeptide (PPR) repeat-containing protein
  misc_feature (1)..(121): NCBI GI NO: 30794106 NR Description: unknown protein [Arabidopsis thaliana]
  misc_feature (1)..(135): NCBI GI NO: 15237375 NR Description: pentatricopeptide (PPR) repeat-containing protein
  misc_feature (1)..(121): NCBI GI NO: 15231438 NR Description: pentatricopeptide (PPR) repeat-containing protein
  misc_feature (1)..(136): NCBI GI NO: 15232243 NR Description: pentatricopeptide (PPR) repeat-containing protein
  misc_feature (1)..(121): NCBI GI NO: 18087893 NR Description: putative membrane-associated salt-inducibleprotein
MQSANLTPSEDVYTCMIECCYRMKLLKEALRFLDSMVKRNYLPRLESYRFIICALCEEGSFHTAKSIFGDILSKEYNRDEIAWKILIDGLLQKGNTADCSRLLSFMEEQNCRPGSAIYSRLTGEITVTSEAQEIAT

SEQ ID NO: 19720 - DNA, 2193 bp, Zea mays subsp. mays
  misc_feature (1)..(2193): Ceres Seq. ID no. 15224896
ctcactagtcccccccccccccccccgcctaaaagaaccttgtccttaccaaagtttaacttagttgcagttgggatgaaaacgggtatccaaattcttaggataaatttaatattttaaaattaatatgtacgaaattggatgcttagattttcttatgttatcaagcacattattataagtaagaataaaactttgctagtgtcatattctatggtttgatgtgtactagtctgcgtacatgtgtttatcgtttaaaaataattgttttggtaaatttttatcgttatcgatgcacttttgattgtatactttcgttatcgatattattgaaatatggataccgttttcgttttcgacaatatcgtatcgttttcgtttccgtcaaaataatttgaaagtgaaagtggtggagtctttttccgatcgttttcgaccgttttcagccttacccaaacccttatttaaagctatatggctatttgatgtttgcttacttcgtatttcttgtaaaaaccatcggtcggtccgcccctggtagcagcagcaggaggacaccatgaagcttgacgtgaatgcccttcgctacctcgccaaggacgacttccgtgtcctcaccgccgtcgagatgggcatgcgcaaccatgagattgttccagtagaacttattgacaggattgccagattgaagcatggaggcacatacaaagtgctgaggaatcttttgaggaacaagctggtgcatcatggtgccactaaatacgatggatatcggctcacctatctgggatatgacttccttgccatcaagactttggttaatcgaggagtttttgcttcagttggccgccagattggtgttggaaaggagtcagatatatttgaggtagccacagacgatggtacagtacttgccatgaagcttcataggttgggcaggacatcttttagagctgtgaaatctaagcgtgactatctaaggcaccgaaggagctttaattggctgtatctctcacgactcgcagccttgaaggaatttgcctttatgaaggctttaggagatcatggtttccctgttccaactgctgtggattgcaaccggcattgtgtgatcatgtcacttgtgcagggatatcctcttgttcaagtgaaaaagttacaaaatccggatgatgtttttgactcaattcttggtcttatcgttcgtttggctgagcatggactcatacactgtgactttaatgagttcaatatcatgattgacgatgatgaaaaaattacagtgattgactttccgcagatggtgtctgtttctcaccgtaatgcccaaatgttttttgaccgagacattgaatgcatctacaagttctttaacaaaaggttcaatctgaggtcagtgaaaaatgaagaacaagctggatctgaaaatgatgatgaagggaacagcagaccttcctttttgtccgtggaaaagggtgctggttccttggacaaggaactagctgccagtggatttaccaggaaagagaaagtggatatggataagtacatcgaggaagttgttgaagggcatgattccagctcagatgatgataatgatgaggacagttccgatgagcctgattgtgatcttaccccaagtgattcagacgcgcctggaactttttctgaagagcatggaacaagttgtagcggcgagaacagattggaaattcctccctcggatggcaatggagtggttatggcaccgctcgaatctgggatcaagacgttttccatggaagatgatgataacgatgatggctcgtcagaggatgctgatgaagaagaagatgctgagctcacgaaacaattgaacaagcaaaggagaaaagcaatcgcagctgcccatgggcggagaagaccaacgtcatccaggaacgcctacaaggacaagggtaagggcaccatgaactccaagatgcagaggcaggcgtgcaactggtgatggttgagtgcctcttgcggcagtaaatagattaggcgcagggttttgtgtggttgtataaccgtgggaccctttactagaatcaactccggctttatatttttactaggtgagtaatcgtgcgtcgcaacgagaacacataatattacgagaacttatatataaaatgtcgcaacgaaaacatataatattatgagaacttatat

SEQ ID NO: 19721 - protein, 475 aa, Zea mays subsp. mays
  peptide (1)..(475): Ceres Seq. ID no. 15224897
  misc_feature (106)..(288): Pfam Name: Pfam Description:  RIO1 family
  misc_feature (1)..(355): NCBI GI NO: 34907494 NR Description: B1099D03.17
  misc_feature (1)..(468): NCBI GI NO: 15230437 NR Description: hypothetical protein [Arabidopsis thaliana]
  misc_feature (159)..(475): NCBI GI NO: 34907494 NR Description: B1099D03.17
  misc_feature (2)..(452): NCBI GI NO: 28502888 NR Description: Similar to hypothetical protein FLJ11159
  misc_feature (2)..(471): NCBI GI NO: 37681925 NR Description: RIO kinase 2 [Danio rerio]
  misc_feature (2)..(353): NCBI GI NO: 26354833 NR Description: unnamed protein product [Mus musculus]
  misc_feature (2)..(377): NCBI GI NO: 27730419 NR Description: similar to RIKEN cDNA 2010110K24
  misc_feature (2)..(390): NCBI GI NO: 13385428 NR Description: RIKEN cDNA 2010110K24 [Mus musculus]
  misc_feature (2)..(353): NCBI GI NO: 14789753 NR Description: RIKEN cDNA 2010110K24 [Mus musculus]
  misc_feature (2)..(435): NCBI GI NO: 8922905 NR Description: hypothetical protein FLJ11159 [Homo sapiens]
MKLDVNALRYLAKDDFRVLTAVEMGMRNHEIVPVELIDRIARLKHGGTYKVLRNLLRNKLVHHGATKYDGYRLTYLGYDFLAIKTLVNRGVFASVGRQIGVGKESDIFEVATDDGTVLAMKLHRLGRTSFRAVKSKRDYLRHRRSFNWLYLSRLAALKEFAFMKALGDHGFPVPTAVDCNRHCVIMSLVQGYPLVQVKKLQNPDDVFDSILGLIVRLAEHGLIHCDFNEFNIMIDDDEKITVIDFPQMVSVSHRNAQMFFDRDIECIYKFFNKRFNLRSVKNEEQAGSENDDEGNSRPSFLSVEKGAGSLDKELAASGFTRKEKVDMDKYIEEVVEGHDSSSDDDNDEDSSDEPDCDLTPSDSDAPGTFSEEHGTSCSGENRLEIPPSDGNGVVMAPLESGIKTFSMEDDDNDDGSSEDADEEEDAELTKQLNKQRRKAIAAAHGRRRPTSSRNAYKDKGKGTMNSKMQRQACNW

SEQ ID NO: 19722 - protein, 452 aa, Zea mays subsp. mays
  peptide (1)..(452): Ceres Seq. ID no. 15224898
  misc_feature (83)..(265): Pfam Name: Pfam Description:  RIO1 family
  misc_feature (1)..(332): NCBI GI NO: 34907494 NR Description: B1099D03.17
  misc_feature (1)..(445): NCBI GI NO: 15230437 NR Description: hypothetical protein [Arabidopsis thaliana]
  misc_feature (136)..(452): NCBI GI NO: 34907494 NR Description: B1099D03.17
  misc_feature (1)..(429): NCBI GI NO: 28502888 NR Description: Similar to hypothetical protein FLJ11159
  misc_feature (1)..(448): NCBI GI NO: 37681925 NR Description: RIO kinase 2 [Danio rerio]
  misc_feature (1)..(330): NCBI GI NO: 26354833 NR Description: unnamed protein product [Mus musculus]
  misc_feature (1)..(354): NCBI GI NO: 27730419 NR Description: similar to RIKEN cDNA 2010110K24
  misc_feature (1)..(367): NCBI GI NO: 13385428 NR Description: RIKEN cDNA 2010110K24 [Mus musculus]
  misc_feature (1)..(330): NCBI GI NO: 14789753 NR Description: RIKEN cDNA 2010110K24 [Mus musculus]
  misc_feature (1)..(412): NCBI GI NO: 8922905 NR Description: hypothetical protein FLJ11159 [Homo sapiens]
MGMRNHEIVPVELIDRIARLKHGGTYKVLRNLLRNKLVHHGATKYDGYRLTYLGYDFLAIKTLVNRGVFASVGRQIGVGKESDIFEVATDDGTVLAMKLHRLGRTSFRAVKSKRDYLRHRRSFNWLYLSRLAALKEFAFMKALGDHGFPVPTAVDCNRHCVIMSLVQGYPLVQVKKLQNPDDVFDSILGLIVRLAEHGLIHCDFNEFNIMIDDDEKITVIDFPQMVSVSHRNAQMFFDRDIECIYKFFNKRFNLRSVKNEEQAGSENDDEGNSRPSFLSVEKGAGSLDKELAASGFTRKEKVDMDKYIEEVVEGHDSSSDDDNDEDSSDEPDCDLTPSDSDAPGTFSEEHGTSCSGENRLEIPPSDGNGVVMAPLESGIKTFSMEDDDNDDGSSEDADEEEDAELTKQLNKQRRKAIAAAHGRRRPTSSRNAYKDKGKGTMNSKMQRQACNW

SEQ ID NO: 19723 - protein, 450 aa, Zea mays subsp. mays
  peptide (1)..(450): Ceres Seq. ID no. 15224899
  misc_feature (81)..(263): Pfam Name: Pfam Description:  RIO1 family
  misc_feature (1)..(330): NCBI GI NO: 34907494 NR Description: B1099D03.17
  misc_feature (1)..(443): NCBI GI NO: 15230437 NR Description: hypothetical protein [Arabidopsis thaliana]
  misc_feature (134)..(450): NCBI GI NO: 34907494 NR Description: B1099D03.17
  misc_feature (1)..(427): NCBI GI NO: 28502888 NR Description: Similar to hypothetical protein FLJ11159
  misc_feature (1)..(446): NCBI GI NO: 37681925 NR Description: RIO kinase 2 [Danio rerio]
  misc_feature (1)..(328): NCBI GI NO: 26354833 NR Description: unnamed protein product [Mus musculus]
  misc_feature (1)..(352): NCBI GI NO: 27730419 NR Description: similar to RIKEN cDNA 2010110K24
  misc_feature (1)..(365): NCBI GI NO: 13385428 NR Description: RIKEN cDNA 2010110K24 [Mus musculus]
  misc_feature (1)..(328): NCBI GI NO: 14789753 NR Description: RIKEN cDNA 2010110K24 [Mus musculus]
  misc_feature (1)..(410): NCBI GI NO: 8922905 NR Description: hypothetical protein FLJ11159 [Homo sapiens]
MRNHEIVPVELIDRIARLKHGGTYKVLRNLLRNKLVHHGATKYDGYRLTYLGYDFLAIKTLVNRGVFASVGRQIGVGKESDIFEVATDDGTVLAMKLHRLGRTSFRAVKSKRDYLRHRRSFNWLYLSRLAALKEFAFMKALGDHGFPVPTAVDCNRHCVIMSLVQGYPLVQVKKLQNPDDVFDSILGLIVRLAEHGLIHCDFNEFNIMIDDDEKITVIDFPQMVSVSHRNAQMFFDRDIECIYKFFNKRFNLRSVKNEEQAGSENDDEGNSRPSFLSVEKGAGSLDKELAASGFTRKEKVDMDKYIEEVVEGHDSSSDDDNDEDSSDEPDCDLTPSDSDAPGTFSEEHGTSCSGENRLEIPPSDGNGVVMAPLESGIKTFSMEDDDNDDGSSEDADEEEDAELTKQLNKQRRKAIAAAHGRRRPTSSRNAYKDKGKGTMNSKMQRQACNW

SEQ ID NO: 19724 - DNA, 534 bp, Zea mays subsp. mays
  misc_feature (1)..(534): Ceres Seq. ID no. 12637673
cacattggatggatacgaacacacaacttattctcagcgaagtttcccaatctatcgtgggcaaccatttcagcagtacaacaacatgacttccagttacatccgaccgatgagggctcatcacaatggtcagcctgtctggtctaattataggctgacagaacctccaccaactacaatgggtgacggaatgctctggggagggaggggtggccattcgtttgcagcgagcggactgccacctacacttaggaaagattttgggagaatcttttagtcctgaatccggaggaatgccgaatgccaccaaattgatggcatcagttgtttgcatctgcaattccgggttggattatttgctgggggtgcctactggtattgcaatttgttgtgttcctccgatgtctcccaggatgttcggttcaaatgattatatggtacgggatatgattacagtgctcgttctttgctatacctgcacgatctagtagaaaaatgtcagttgtgctacttgatgcgaatcttgctagttcg

SEQ ID NO: 19725 - protein, 91 aa, Zea mays subsp. mays
  peptide (1)..(91): Ceres Seq. ID no. 12637674
  misc_feature (4)..(91): NCBI GI NO: 38344150 NR Description: OSJNBa0041A02.17
TLDGYEHTTYSQRSFPIYRGQPFQQYNNMTSSYIRPMRAHHNGQPVWSNYRLTEPPPTTMGDGMLWGGRGGHSFAASGLPPTLRKDFGRIF

SEQ ID NO: 19726 - protein, 64 aa, Zea mays subsp. mays
  peptide (1)..(64): Ceres Seq. ID no. 12637675
MPNATKLMASVVCICNSGLDYLLGVPTGIAICCVPPMSPRMFGSNDYMVRDMITVLVLCYTCTI

SEQ ID NO: 19727 - protein, 63 aa, Zea mays subsp. mays
  peptide (1)..(63): Ceres Seq. ID no. 12637676
  misc_feature (1)..(63): NCBI GI NO: 38344150 NR Description: OSJNBa0041A02.17
MTSSYIRPMRAHHNGQPVWSNYRLTEPPPTTMGDGMLWGGRGGHSFAASGLPPTLRKDFGRIF

SEQ ID NO: 19728 - DNA, 555 bp, Zea mays subsp. mays
  misc_feature (1)..(555): Ceres Seq. ID no. 12594507
attccgttccaacttccaaggtccgagggctccagaaaccggcaaggggatcgaagcggagagcaagggagcggtcgagcgggtgacatcatcgtcatccagggtttctcaatcggcagcgatggcgaccagggcggcggcgaggttcctgcagcgcaggtttctgtcttccggcggcaaggtcctcagcgaggaggagaaggccgccgagaacgtgtacatcaagaaagtggaacaagagaagctggagaagctcgcacgcaaggtatgcaaatacacaatatctctaagcattgaattgggcagcattcttttatgttcgatccagtgttgtcgtaaacgaccctgtaatctgtttacacactgtgtaaactacacggtcactagctgtttccattcaatcatcgtttatcctgttttacttggtcgtgtatcctaaattaatgctaaagataggtgcccaagtattaaccattttaagtttagtctgtcgttggataataagctaaacatggactaattttttttttttttttgtaatgagttctactcatc

SEQ ID NO: 19729 - protein, 145 aa, Zea mays subsp. mays
  peptide (1)..(145): Ceres Seq. ID no. 12594508
  misc_feature (37)..(88): NCBI GI NO: 5821432 NR Description: F1F0-ATPase inhibitor protein
  misc_feature (41)..(88): NCBI GI NO: 18401511 NR Description: expressed protein; protein id: At2g27730
  misc_feature (41)..(88): NCBI GI NO: 21592886 NR Description: F1F0-ATPase inhibitor protein
FRSNFQGPRAPETGKGIEAESKGAVERVTSSSSRVSQSAAMATRAAARFLQRRFLSSGGKVLSEEEKAAENVYIKKVEQEKLEKLARKVCKYTISLSIELGSILLCSIQCCRKRPCNLFTHCVNYTVTSCFHSIIVYPVLLGRVS

SEQ ID NO: 19730 - protein, 105 aa, Zea mays subsp. mays
  peptide (1)..(105): Ceres Seq. ID no. 12594509
  misc_feature (1)..(48): NCBI GI NO: 5821432 NR Description: F1F0-ATPase inhibitor protein
  misc_feature (1)..(48): NCBI GI NO: 18401511 NR Description: expressed protein; protein id: At2g27730
  misc_feature (1)..(48): NCBI GI NO: 21592886 NR Description: F1F0-ATPase inhibitor protein
MATRAAARFLQRRFLSSGGKVLSEEEKAAENVYIKKVEQEKLEKLARKVCKYTISLSIELGSILLCSIQCCRKRPCNLFTHCVNYTVTSCFHSIIVYPVLLGRVS

SEQ ID NO: 19731 - protein, 98 aa, Zea mays subsp. mays
  peptide (1)..(98): Ceres Seq. ID no. 12594510
IPFQLPRSEGSRNRQGDRSGEQGSGRAGDIIVIQGFSIGSDGDQGGGEVPAAQVSVFRRQGPQRGGEGRRERVHQESGTREAGEARTQGMQIHNISKH

SEQ ID NO: 19732 - DNA, 687 bp, Zea mays subsp. mays
  misc_feature (1)..(687): Ceres Seq. ID no. 13600072
agactcatcatcagttcaattcaatccaatccaatccaatcccaccccgccccttccaagaactctagtatcaaccaaccgtccaacaaaagcaggagtcgcatccgaccccccgcatcagagacaggcagggagggaaccgagatccgtccgtccgtgtcgatggagtcaacggtggagcggataagctcgtcggtgcagtcctgggtgaaggaccacgagctcgcagccatcggaggcgtgtgggctgcggcggtgggcacttcggtggcgtacagccggaggaaggcgccgcagcggggcacgggcctgcgcctcatccacgccaggatgcacgcgcaggcgctcacgctcgccgtcctcggcggcgccgccctcttccactactacggcgacggcgggcgcaggaagagggccgacgacatcgacctcgacttctactcgcagctgccgccggccaccgacgccgacggcaacgagaaccagcggtggagctggtaggaggagaaggaagaactgtagcagactagcagtgggtgcttgcagcaataataattgaggtggggccctatgacgtggcgggcgggagggattagtctgtgctaatcctaatccatccagctcagacaagacgacgggcggcccgtttacttaacattatcggtccatgctgtcatggccggcacc

SEQ ID NO: 19733 - protein, 166 aa, Zea mays subsp. mays
  peptide (1)..(166): Ceres Seq. ID no. 13600073
  misc_feature (66)..(126): Pfam Name: Pfam Description:  Hypoxia induced protein conserved region
  misc_feature (64)..(130): NCBI GI NO: 15241035 NR Description: expressed protein [Arabidopsis thaliana]
  misc_feature (66)..(130): NCBI GI NO: 15230007 NR Description: hypothetical protein [Arabidopsis thaliana]
  misc_feature (59)..(99): NCBI GI NO: 3282394 NR Description: anaerobically inducible early gene 2
RLIISSIQSNPIQSHPAPSKNSSINQPSNKSRSRIRPPASETGREGTEIRPSVSMESTVERISSSVQSWVKDHELAAIGGVWAAAVGTSVAYSRRKAPQRGTGLRLIHARMHAQALTLAVLGGAALFHYYGDGGRRKRADDIDLDFYSQLPPATDADGNENQRWSW

SEQ ID NO: 19734 - protein, 112 aa, Zea mays subsp. mays
  peptide (1)..(112): Ceres Seq. ID no. 13600074
  misc_feature (12)..(72): Pfam Name: Pfam Description:  Hypoxia induced protein conserved region
  misc_feature (10)..(76): NCBI GI NO: 15241035 NR Description: expressed protein [Arabidopsis thaliana]
  misc_feature (12)..(76): NCBI GI NO: 15230007 NR Description: hypothetical protein [Arabidopsis thaliana]
  misc_feature (5)..(45): NCBI GI NO: 3282394 NR Description: anaerobically inducible early gene 2
MESTVERISSSVQSWVKDHELAAIGGVWAAAVGTSVAYSRRKAPQRGTGLRLIHARMHAQALTLAVLGGAALFHYYGDGGRRKRADDIDLDFYSQLPPATDADGNENQRWSW

SEQ ID NO: 19735 - DNA, 1372 bp, Zea mays subsp. mays
  misc_feature (1)..(1372): Ceres Seq. ID no. 13600370
aacagtagctgccctgcctgactcctgcctccagcatgtccgacctgtcaaggactgttcctcaggagcagctcgtgtcccaggacctgctgcacctctcgccaacgcccgtgatcaaccttggccacctcagccttgatgattccgtgacgcgatctggcgtgatcaaccaaatcgccagagcatgccatgatctaggatacttccaggttacaaaccatgggatcagtcaatccgtcatggattgtgctgttgaagcagcttcagatttcttccaactaccaagtgaggcaaaggaacagttcgcatcacaggacctccgcaaacctgttagatatgacaccagctctaaagatagcattagcatgtcacgggcattcctaaagcattatgcccatccgcccagagactggattcagtattggccagacaaaccaccaatctacagggaatacatgggaaagtatgctgttgaagtaaggagggtggctttgcatctgatgcaggcaatactagaaggcctaggattgggcaaggaatacatgaacgagaaatttcagcaaggctcacaactactgtcagtgaactgctatcctaaagcatcacaagacgccatgactatagggctggctccacactctgattatggatttcttaccatcttgctcacaagttgccagggcctccaagtcgttgaccgcagcagcgacgacagctggaaaacggtccagcaacttccgcatgcgttgcatgtccatgtaggagaccacatggaagtcctgagcaatggtcaaatcaaaacagttgtgcaccgtgctgttttgaatcccgaagaagcaaggatttctatagcaagcattcatggttttgagctacatgagaaggtcgcctgtgctaaggagcttgtggatgaacaaaatcccccaaaatacaaagagagcagctttactgacttcctcgaccatctcacagctaatatggacaacaagaacaggaattttcttgaaagcctcagaatgtaaggactacaagccctaatttggtacaaccttaactacaagtccaaaaggtggtaagacaacatcctatatatgtstactttagagttcagactaatgctctaaacttctatgtccttgttgctttgataaagaggtgctaattaacttcgtcatattggggatatgtagttctggtataaaattttaaaccatccaatcatgcaggttaactggtgcgttgatatttgagaaagcagatcgagctaaggtttactgtcacatgttgaactgaagtgtccatgtatttttttttaacgaaatgaagtgtccatgtaatcttcaataaagccctatatgtgtctggtggtgcc

SEQ ID NO: 19736 - protein, 328 aa, Zea mays subsp. mays
  peptide (1)..(328): Ceres Seq. ID no. 15218923
  misc_feature (177)..(278): Pfam Name: II Pfam Description: 2OG-Fe
  misc_feature (1)..(328): NCBI GI NO: 32488371 NR Description: OSJNBa0043A12.1
  misc_feature (23)..(328): NCBI GI NO: 32488372 NR Description: OSJNBa0043A12.2
  misc_feature (59)..(328): NCBI GI NO: 15240797 NR Description: oxidoreductase, 2OG-Fe(II) oxygenase family
  misc_feature (25)..(327): NCBI GI NO: 7433240 NR Description: probable flavonol synthase
  misc_feature (25)..(327): NCBI GI NO: 30689834 NR Description: flavonol synthase family [Arabidopsis thaliana]
  misc_feature (55)..(328): NCBI GI NO: 15228020 NR Description: oxidoreductase, 2OG-Fe(II) oxygenase family
  misc_feature (135)..(327): NCBI GI NO: 15232291 NR Description: oxidoreductase, 2OG-Fe(II) oxygenase family
  misc_feature (25)..(100): NCBI GI NO: 15232291 NR Description: oxidoreductase, 2OG-Fe(II) oxygenase family
  misc_feature (9)..(319): NCBI GI NO: 37536444 NR Description: unknown protein
  misc_feature (43)..(319): NCBI GI NO: 38345872 NR Description: OSJNBa0064M23.14
MSDLSRTVPQEQLVSQDLLHLSPTPVINLGHLSLDDSVTRSGVINQIARACHDLGYFQVTNHGISQSVMDCAVEAASDFFQLPSEAKEQFASQDLRKPVRYDTSSKDSISMSRAFLKHYAHPPRDWIQYWPDKPPIYREYMGKYAVEVRRVALHLMQAILEGLGLGKEYMNEKFQQGSQLLSVNCYPKASQDAMTIGLAPHSDYGFLTILLTSCQGLQVVDRSSDDSWKTVQQLPHALHVHVGDHMEVLSNGQIKTVVHRAVLNPEEARISIASIHGFELHEKVACAKELVDEQNPPKYKESSFTDFLDHLTANMDNKNRNFLESLRM

SEQ ID NO: 19737 - protein, 260 aa, Zea mays subsp. mays
  peptide (1)..(260): Ceres Seq. ID no. 15218924
  misc_feature (109)..(210): Pfam Name: II Pfam Description: 2OG-Fe
  misc_feature (1)..(260): NCBI GI NO: 32488371 NR Description: OSJNBa0043A12.1
  misc_feature (1)..(260): NCBI GI NO: 32488372 NR Description: OSJNBa0043A12.2
  misc_feature (1)..(260): NCBI GI NO: 15240797 NR Description: oxidoreductase, 2OG-Fe(II) oxygenase family
  misc_feature (1)..(259): NCBI GI NO: 7433240 NR Description: probable flavonol synthase
  misc_feature (1)..(259): NCBI GI NO: 30689834 NR Description: flavonol synthase family [Arabidopsis thaliana]
  misc_feature (1)..(260): NCBI GI NO: 15228020 NR Description: oxidoreductase, 2OG-Fe(II) oxygenase family
  misc_feature (67)..(259): NCBI GI NO: 15232291 NR Description: oxidoreductase, 2OG-Fe(II) oxygenase family
  misc_feature (1)..(32): NCBI GI NO: 15232291 NR Description: oxidoreductase, 2OG-Fe(II) oxygenase family
  misc_feature (1)..(251): NCBI GI NO: 37536444 NR Description: unknown protein
  misc_feature (1)..(251): NCBI GI NO: 38345872 NR Description: OSJNBa0064M23.14
MDCAVEAASDFFQLPSEAKEQFASQDLRKPVRYDTSSKDSISMSRAFLKHYAHPPRDWIQYWPDKPPIYREYMGKYAVEVRRVALHLMQAILEGLGLGKEYMNEKFQQGSQLLSVNCYPKASQDAMTIGLAPHSDYGFLTILLTSCQGLQVVDRSSDDSWKTVQQLPHALHVHVGDHMEVLSNGQIKTVVHRAVLNPEEARISIASIHGFELHEKVACAKELVDEQNPPKYKESSFTDFLDHLTANMDNKNRNFLESLRM

SEQ ID NO: 19738 - protein, 218 aa, Zea mays subsp. mays
  peptide (1)..(218): Ceres Seq. ID no. 15218925
  misc_feature (67)..(168): Pfam Name: II Pfam Description: 2OG-Fe
  misc_feature (1)..(218): NCBI GI NO: 32488371 NR Description: OSJNBa0043A12.1
  misc_feature (1)..(218): NCBI GI NO: 32488372 NR Description: OSJNBa0043A12.2
  misc_feature (1)..(218): NCBI GI NO: 15240797 NR Description: oxidoreductase, 2OG-Fe(II) oxygenase family
  misc_feature (1)..(217): NCBI GI NO: 7433240 NR Description: probable flavonol synthase
  misc_feature (1)..(217): NCBI GI NO: 30689834 NR Description: flavonol synthase family [Arabidopsis thaliana]
  misc_feature (1)..(218): NCBI GI NO: 15228020 NR Description: oxidoreductase, 2OG-Fe(II) oxygenase family
  misc_feature (25)..(217): NCBI GI NO: 15232291 NR Description: oxidoreductase, 2OG-Fe(II) oxygenase family
  misc_feature (1)..(209): NCBI GI NO: 37536444 NR Description: unknown protein
  misc_feature (1)..(209): NCBI GI NO: 38345872 NR Description: OSJNBa0064M23.14
  misc_feature (1)..(215): NCBI GI NO: 15238567 NR Description: oxidoreductase, 2OG-Fe(II) oxygenase family
MSRAFLKHYAHPPRDWIQYWPDKPPIYREYMGKYAVEVRRVALHLMQAILEGLGLGKEYMNEKFQQGSQLLSVNCYPKASQDAMTIGLAPHSDYGFLTILLTSCQGLQVVDRSSDDSWKTVQQLPHALHVHVGDHMEVLSNGQIKTVVHRAVLNPEEARISIASIHGFELHEKVACAKELVDEQNPPKYKESSFTDFLDHLTANMDNKNRNFLESLRM

SEQ ID NO: 19739 - DNA, 696 bp, Zea mays subsp. mays
  misc_feature (1)..(696): Ceres Seq. ID no. 13623723
taatccaaaactgatcccctctgtttctgctgacccaccaaaaccctaatggcttcccgcctcctccacctgcgccgcctcctcccggccgcgcgcccgtcatgcgccgccgcgttctccaccgccgtcaccccgaccccgcaggtctccggtctcgtcgacgagatctgcggcctcaacctcatcgaggcctcctccctcgccgatgcgctgcgcggccgcctcggcgtcgaccagctccctcccctagccatcctcatgggcggcgcagccccgctggccggagatgctgccggggccggcgaggaggcgaaacccaaggaggaaaaaatggcgttcgacgtgaagctggaggggttcgacgccgcggcgaagctcaagattatcaaggagctgagggcgatcacgagtttgggcctgaaggaggccaaggagctcgtggagaaggcgccggccgtgctcaaggccggggttcccaaggaggaggcggagagcatcgccgagaagatgcgggcactgggcgccaagattgttctcgagtgagaggacgagatctctgtatgcctttgcttcttgatttcttcctgtttattgtacgaaggaattagagaaattttggtactaaggagtcaataattgacgagactgactctagatatcctctcgttgatagtggaaatggcagttgagcttttg

SEQ ID NO: 19740 - protein, 168 aa, Zea mays subsp. mays
  peptide (1)..(168): Ceres Seq. ID no. 13623724
  misc_feature (58)..(117): Pfam Name: 20 copies Pfam Description: Collagen triple helix repeat
  misc_feature (39)..(143): NCBI GI NO: 465445 NR Description: PROBABLE NUCLEAR ANTIGEN
  misc_feature (39)..(146): NCBI GI NO: 93144 NR Description: hypothetical protein - suid herpesvirus 1
MRRRVLHRRHPDPAGLRSRRRDLRPQPHRGLLPRRCAARPPRRRPAPSPSHPHGRRSPAGRRCCRGRRGGETQGGKNGVRREAGGVRRRGEAQDYQGAEGDHEFGPEGGQGARGEGAGRAQGRGSQGGGGEHRREDAGTGRQDCSRVRGRDLCMPLLLDFFLFIVRRN

SEQ ID NO: 19741 - protein, 164 aa, Zea mays subsp. mays
  peptide (1)..(164): Ceres Seq. ID no. 13623725
  misc_feature (97)..(164): Pfam Name: Pfam Description:  Ribosomal protein L7/L12 C-terminal domain
  misc_feature (22)..(164): NCBI GI NO: 15234393 NR Description: ribosomal protein [Arabidopsis thaliana]
  misc_feature (29)..(164): NCBI GI NO: 18409467 NR Description: expressed protein [Arabidopsis thaliana]
  misc_feature (8)..(164): NCBI GI NO: 34913132 NR Description: contains EST AU058363
  misc_feature (42)..(164): NCBI GI NO: 15209174 NR Description: hypothetical protein [Solanum demissum]
  misc_feature (26)..(164): NCBI GI NO: 40745733 NR Description: hypothetical protein AN2057.2
  misc_feature (1)..(164): NCBI GI NO: 15235649 NR Description: ribosomal - like protein [Arabidopsis thaliana]
  misc_feature (24)..(164): NCBI GI NO: 32411687 NR Description: hypothetical protein [Neurospora crassa]
  misc_feature (17)..(164): NCBI GI NO: 15230614 NR Description: expressed protein [Arabidopsis thaliana]
  misc_feature (33)..(163): NCBI GI NO: 730573 NR Description: 50S ribosomal protein L7/L12
  misc_feature (1)..(164): NCBI GI NO: 19075581 NR Description: putative 60s ribosomal protein l7/l12
MASRLLHLRRLLPAARPSCAAAFSTAVTPTPQVSGLVDEICGLNLIEASSLADALRGRLGVDQLPPLAILMGGAAPLAGDAAGAGEEAKPKEEKMAFDVKLEGFDAAAKLKIIKELRAITSLGLKEAKELVEKAPAVLKAGVPKEEAESIAEKMRALGAKIVLE

SEQ ID NO: 19742 - protein, 94 aa, Zea mays subsp. mays
  peptide (1)..(94): Ceres Seq. ID no. 13623726
  misc_feature (27)..(94): Pfam Name: Pfam Description:  Ribosomal protein L7/L12 C-terminal domain
  misc_feature (1)..(94): NCBI GI NO: 15234393 NR Description: ribosomal protein [Arabidopsis thaliana]
  misc_feature (1)..(94): NCBI GI NO: 18409467 NR Description: expressed protein [Arabidopsis thaliana]
  misc_feature (1)..(94): NCBI GI NO: 34913132 NR Description: contains EST AU058363
  misc_feature (1)..(94): NCBI GI NO: 15209174 NR Description: hypothetical protein [Solanum demissum]
  misc_feature (1)..(94): NCBI GI NO: 40745733 NR Description: hypothetical protein AN2057.2
  misc_feature (1)..(94): NCBI GI NO: 15235649 NR Description: ribosomal - like protein [Arabidopsis thaliana]
  misc_feature (1)..(94): NCBI GI NO: 32411687 NR Description: hypothetical protein [Neurospora crassa]
  misc_feature (1)..(94): NCBI GI NO: 15230614 NR Description: expressed protein [Arabidopsis thaliana]
  misc_feature (1)..(93): NCBI GI NO: 730573 NR Description: 50S ribosomal protein L7/L12
  misc_feature (1)..(94): NCBI GI NO: 19075581 NR Description: putative 60s ribosomal protein l7/l12
MGGAAPLAGDAAGAGEEAKPKEEKMAFDVKLEGFDAAAKLKIIKELRAITSLGLKEAKELVEKAPAVLKAGVPKEEAESIAEKMRALGAKIVLE

SEQ ID NO: 19743 - DNA, 761 bp, Zea mays subsp. mays
  misc_feature (1)..(761): Ceres Seq. ID no. 13600371
ccatcccagccagccgtcaaagcacgacacatccaggtccaagcaaagcatccccagcccagccgagaccgcgtgcgctccacgcagcatccgccgcagcagccgcccagagaagtcgccgccggagaagggggaggatgtcgtggcagacgtacgtcgacgaccacctgtgctgcgagatcgacggccagcacctcacctccgccgccatcctcggccacgacggcagcgtctgggccgagtcccccaacttccccaagttcaagcctgaggagattgctggcatcgttaaagactttgaagaacctggacaccttgcaccaactggtcttttccttggaggcacaaagtacatggtcatccaaggtgaacctggggttgtcatccgaggaaagaagggcaccggtggcattactatcaagaagaccggcatggccctgattcttggtatctacgatgagcccatgactcctggccagtgcaatttggtcgtggagaggctcggcgactacctggtcgagcagggtttctaagcccgccctgatatgctgttattttggtcgtctgggactaagtttgctctactgtgggctttgcatccatctgcttggcgtaccgcatgatatatgcagtgaataattttagcttggggtttgtcggttggtgatgtgtcgaaggggaaaaatggatttactatgttttctttttaatgtttggcatcgcgtcgtatcaaactcagccgctctttcgctgagtaatgt

SEQ ID NO: 19744 - protein, 176 aa, Zea mays subsp. mays
  peptide (1)..(176): Ceres Seq. ID no. 15218926
  misc_feature (47)..(171): Pfam Name: Pfam Description:  Profilin
  misc_feature (46)..(176): NCBI GI NO: 1346803 NR Description: Profilin 1
  misc_feature (46)..(176): NCBI GI NO: 1346804 NR Description: Profilin 2
  misc_feature (46)..(176): NCBI GI NO: 1709779 NR Description: Profilin 1
  misc_feature (46)..(176): NCBI GI NO: 1346806 NR Description: Profilin 3
  misc_feature (46)..(176): NCBI GI NO: 14423853 NR Description: Profilin 5 (ZmPRO5)
  misc_feature (46)..(176): NCBI GI NO: 3914423 NR Description: Profilin 4 (ZmPRO4)
  misc_feature (46)..(176): NCBI GI NO: 14161637 NR Description: profilin [Ananas comosus]
  misc_feature (46)..(175): NCBI GI NO: 3914432 NR Description: PROFILIN 2/4 (POLLEN ALLERGEN PHL P 11) (PHL P XI)
  misc_feature (46)..(175): NCBI GI NO: 464466 NR Description: Profilin 1 (ZmPRO1)
  misc_feature (46)..(175): NCBI GI NO: 464471 NR Description: PROFILIN 1 (POLLEN ALLERGEN PHL P 11) (PHL P XI)
IPASRQSTTHPGPSKASPAQPRPRALHAASAAAAAQRSRRRRRGRMSWQTYVDDHLCCEIDGQHLTSAAILGHDGSVWAESPNFPKFKPEEIAGIVKDFEEPGHLAPTGLFLGGTKYMVIQGEPGVVIRGKKGTGGITIKKTGMALILGIYDEPMTPGQCNLVVERLGDYLVEQGF

SEQ ID NO: 19745 - protein, 146 aa, Zea mays subsp. mays
  peptide (1)..(146): Ceres Seq. ID no. 15218927
PSQPAVKARHIQVQAKHPQPSRDRVRSTQHPPQQPPREVAAGEGGGCRGRRTSTTTCAARSTASTSPPPPSSATTAASGPSPPTSPSSSLRRLLASLKTLKNLDTLHQLVFSLEAQSTWSSKVNLGLSSEERRAPVALLSRRPAWP

SEQ ID NO: 19746 - protein, 131 aa, Zea mays subsp. mays
  peptide (1)..(131): Ceres Seq. ID no. 15218928
  misc_feature (2)..(126): Pfam Name: Pfam Description:  Profilin
  misc_feature (1)..(131): NCBI GI NO: 1346803 NR Description: Profilin 1
  misc_feature (1)..(131): NCBI GI NO: 1346804 NR Description: Profilin 2
  misc_feature (1)..(131): NCBI GI NO: 1709779 NR Description: Profilin 1
  misc_feature (1)..(131): NCBI GI NO: 1346806 NR Description: Profilin 3
  misc_feature (1)..(131): NCBI GI NO: 14423853 NR Description: Profilin 5 (ZmPRO5)
  misc_feature (1)..(131): NCBI GI NO: 3914423 NR Description: Profilin 4 (ZmPRO4)
  misc_feature (1)..(131): NCBI GI NO: 14161637 NR Description: profilin [Ananas comosus]
  misc_feature (1)..(130): NCBI GI NO: 3914432 NR Description: PROFILIN 2/4 (POLLEN ALLERGEN PHL P 11) (PHL P XI)
  misc_feature (1)..(130): NCBI GI NO: 464466 NR Description: Profilin 1 (ZmPRO1)
  misc_feature (1)..(130): NCBI GI NO: 464471 NR Description: PROFILIN 1 (POLLEN ALLERGEN PHL P 11) (PHL P XI)
MSWQTYVDDHLCCEIDGQHLTSAAILGHDGSVWAESPNFPKFKPEEIAGIVKDFEEPGHLAPTGLFLGGTKYMVIQGEPGVVIRGKKGTGGITIKKTGMALILGIYDEPMTPGQCNLVVERLGDYLVEQGF

SEQ ID NO: 19747 - DNA, 750 bp, Zea mays subsp. mays
  misc_feature (1)..(750): Ceres Seq. ID no. 12636818
agatggtgttatatgcttcttgccgtggtattgcttctaaaatctctcactaaatcagccagctcttctgcttgtccttattttgtttaatattccttgattgttatgatgagttgagaaggccgacacttgacggatgcagctatggcgtggtggaggtggagctcgtcttgcctgacagccccttcgcatcccccaccaaggaggaggcctcatgcgctgatgctgtcaccgctgcagccgctcggaatggcagcagcagcagccctcgccatgtggcttcaccgtcccttttcgcacccgcgtcttccaccaccctcgacctgcccccctacagctcctcctgcttctttcaggtgcccaggttttctcctgggcatgaagccattgggctgtgatgtgtgaggtgcacggagcaaaaaaagagggaggggacctccattcctctaatctgggagatggcccctaaagttatggagcaaaaggattacgatttcaaggcagatatttggttgtttggcattactgcacttgaacttgctattggccatgcaccattttctatccaacctccagcaaaggtttttctcatgacgttgcaacatgcccctccataacttcataacacaaaggagaagaagttttcagacgtatggtttcaaaaatattttctaagaaattaattgtgtgtgactattgaatcatttcttgtcttgtttgtagtcttttaagagtctgattgccacttgc

SEQ ID NO: 19748 - protein, 86 aa, Zea mays subsp. mays
  peptide (1)..(86): Ceres Seq. ID no. 12636819
MAWWRWSSSCLTAPSHPPPRRRPHALMLSPLQPLGMAAAAALAMWLHRPFSHPRLPPPSTCPPTAPPASFRCPGFLLGMKPLGCDV

SEQ ID NO: 19749 - protein, 60 aa, Zea mays subsp. mays
  peptide (1)..(60): Ceres Seq. ID no. 12636820
MLSPLQPLGMAAAAALAMWLHRPFSHPRLPPPSTCPPTAPPASFRCPGFLLGMKPLGCDV

SEQ ID NO: 19750 - protein, 52 aa, Zea mays subsp. mays
  peptide (1)..(52): Ceres Seq. ID no. 12636821
  misc_feature (1)..(52): Pfam Name: Pfam Description:  Protein kinase domain
  misc_feature (1)..(52): NCBI GI NO: 11358725 NR Description: protein kinase-like protein - Arabidopsis thaliana
  misc_feature (1)..(52): NCBI GI NO: 17529280 NR Description: putative protein kinase [Arabidopsis thaliana]
  misc_feature (1)..(52): NCBI GI NO: 30685021 NR Description: protein kinase family [Arabidopsis thaliana]
  misc_feature (1)..(52): NCBI GI NO: 7485682 NR Description: hypothetical protein F17O7
  misc_feature (1)..(52): NCBI GI NO: 17998578 NR Description: putative Ste-20 related kinase, 3'-partial
  misc_feature (1)..(52): NCBI GI NO: 37536118 NR Description: putative Ste20-related protein kinase
  misc_feature (1)..(52): NCBI GI NO: 2262107 NR Description: Ser/Thr protein kinase isolog
  misc_feature (1)..(52): NCBI GI NO: 7486904 NR Description: hypothetical protein T12H20
  misc_feature (1)..(52): NCBI GI NO: 7487178 NR Description: hypothetical protein T19F6
  misc_feature (1)..(52): NCBI GI NO: 22328895 NR Description: putative protein; protein id: At4g24100
MAPKVMEQKDYDFKADIWLFGITALELAIGHAPFSIQPPAKVFLMTLQHAPP

SEQ ID NO: 19751 - DNA, 725 bp, Zea mays subsp. mays
  misc_feature (1)..(725): Ceres Seq. ID no. 13624255
aaaatttcgttcgaccattctatccacaaactccaaccatagcgtcgtgtactcgtgtaccagttgatgctgccactgcccacggcgggggcggtcgccgccgcaggggtagcggcgcccctcgggtcgcgtccgctccgcctcgtcgcgactcgagccaccactaccccttcttctcccactacttccacctcggccatatccaacgcgtcaccagcggggcattcccgcaaggacctgtcaggcagggacggcgccccgtcgaagcccaccaagccccgggtgttcttcctcgacgtcaatcctctatgcttccgcggctcccagcgcaacctcggggccttcgcgcgctggctggcgctcttcttcgcgcacgtcagcctccgtgaccctgtcgttgctgttttggacggcgatggagagaaagagaacgagtaccggaggcgggtgctgccttagtacaaggcgcatagggctcgcggcgttggcactggcgctgacacgcgcgtcgtcaacgttctctgcgaatgcaatgtccgggtgggtgcacatgtttaaactagtgcagccactcagttattcttagctcagactcagattattgagtgtcaattttggaaacggcaaattcaggttgtaagagtcgatggatatgaggctgatgatgtggtggctaccttgacagaacaggttctacagaaaggttacagagttttcaaagcctc

SEQ ID NO: 19752 - protein, 130 aa, Zea mays subsp. mays
  peptide (1)..(130): Ceres Seq. ID no. 13624256
  misc_feature (71)..(130): Pfam Name: Pfam Description:  5'-3' exonuclease
  misc_feature (5)..(130): NCBI GI NO: 34907292 NR Description: putative DNA polymerase I
  misc_feature (29)..(130): NCBI GI NO: 15218609 NR Description: DNA polymerase type I -related
MLPLPTAGAVAAAGVAAPLGSRPLRLVATRATTTPSSPTTSTSAISNASPAGHSRKDLSGRDGAPSKPTKPRVFFLDVNPLCFRGSQRNLGAFARWLALFFAHVSLRDPVVAVLDGDGEKENEYRRRVLP

SEQ ID NO: 19753 - protein, 128 aa, Zea mays subsp. mays
  peptide (1)..(128): Ceres Seq. ID no. 13624257
NFVRPFYPQTPTIASCTRVPVDAATAHGGGGRRRRGSGAPRVASAPPRRDSSHHYPFFSHYFHLGHIQRVTSGAFPQGPVRQGRRPVEAHQAPGVLPRRQSSMLPRLPAQPRGLRALAGALLRARQPP

SEQ ID NO: 19754 - DNA, 902 bp, Zea mays subsp. mays
  misc_feature (1)..(902): Ceres Seq. ID no. 12637454
atcaacaacctctccgctttctccttcccgtctctctcctctggtcccgattcccttctccgagcttcctccctataaataaggcggcccgcggcggccatcaattcccgtcaccgcccaccgaggccgcgaattattcctccgccccgcccgccgcgaaaaccctagccgccgccgatcccatggccaccgcctccagccaggcgagcctcctcctccagaagcagctccgagatctcgcgaagcaccccgtcgatgggttttcagctgggctcgtcgacgacagcaacgtcttcgagtggcaggtcaccatcatcggcccgcccgagaccctatatgatggaggctatttcaatgcaattatgagcttcccacaaaattatccgaacagccctccaacagtcagattcacttctgaaatgtggcatcctaatgtttatccagatgggcgggtatgcatttctattcttcatccacctggtgatgatcccaacggatatgagctcgcgagtgagcgttggacaccagtccatacggttgagagtatagtattaagcatcatttcgatgctttctagtccaaatgatgaatcaccggcaaatattgaagcagctaaggactggagagagaagcaggatgagttcaagaagaaggtcaggcgcgccgtacggaaatcccaggaaatgctctgaataaaatgggagtactggggaagttagccatgccatttcaggtgtggagggttttgctgttgatctccaaatgtccatccgacactagcaatttcacttctcccctgtatattttccattagcctgtctcctgtggaggtcttggttttgactctgaaaacgcaacacatattctaagggtttggttgttgtaattgtgtggcttcggct

SEQ ID NO: 19755 - protein, 229 aa, Zea mays subsp. mays
  peptide (1)..(229): Ceres Seq. ID no. 12637455
  misc_feature (61)..(229): NCBI GI NO: 34908132 NR Description: putative Ubiquitin carrier protein UBC7
  misc_feature (61)..(229): NCBI GI NO: 7437989 NR Description: ubiquitin-conjugating enzyme E2 - maize
  misc_feature (61)..(228): NCBI GI NO: 7437988 NR Description: ubiquitin-conjugating enzyme - maize
  misc_feature (62)..(228): NCBI GI NO: 19347846 NR Description: putative E2, ubiquitin-conjugating enzyme UBC7
  misc_feature (62)..(228): NCBI GI NO: 28973769 NR Description: putative E2, ubiquitin-conjugating enzyme UBC7
  misc_feature (65)..(228): NCBI GI NO: 31088843 NR Description: Ubiquitin-conjugating enzyme E2 7
  misc_feature (65)..(228): NCBI GI NO: 18408206 NR Description: E2, ubiquitin-conjugating enzyme 13
  misc_feature (61)..(229): NCBI GI NO: 136647 NR Description: Ubiquitin-conjugating enzyme E2-20 kDa
  misc_feature (64)..(229): NCBI GI NO: 18410268 NR Description: E2, ubiquitin-conjugating enzyme 14
  misc_feature (93)..(228): NCBI GI NO: 18424219 NR Description: E2, ubiquitin-conjugating enzyme 7
QQPLRFLLPVSLLWSRFPSPSFLPINKAARGGHQFPSPPTEAANYSSAPPAAKTLAAADPMATASSQASLLLQKQLRDLAKHPVDGFSAGLVDDSNVFEWQVTIIGPPETLYDGGYFNAIMSFPQNYPNSPPTVRFTSEMWHPNVYPDGRVCISILHPPGDDPNGYELASERWTPVHTVESIVLSIISMLSSPNDESPANIEAAKDWREKQDEFKKKVRRAVRKSQEML

SEQ ID NO: 19756 - protein, 169 aa, Zea mays subsp. mays
  peptide (1)..(169): Ceres Seq. ID no. 12637456
  misc_feature (1)..(169): NCBI GI NO: 34908132 NR Description: putative Ubiquitin carrier protein UBC7
  misc_feature (1)..(169): NCBI GI NO: 7437989 NR Description: ubiquitin-conjugating enzyme E2 - maize
  misc_feature (1)..(168): NCBI GI NO: 7437988 NR Description: ubiquitin-conjugating enzyme - maize
  misc_feature (2)..(168): NCBI GI NO: 19347846 NR Description: putative E2, ubiquitin-conjugating enzyme UBC7
  misc_feature (2)..(168): NCBI GI NO: 28973769 NR Description: putative E2, ubiquitin-conjugating enzyme UBC7
  misc_feature (5)..(168): NCBI GI NO: 31088843 NR Description: Ubiquitin-conjugating enzyme E2 7
  misc_feature (5)..(168): NCBI GI NO: 18408206 NR Description: E2, ubiquitin-conjugating enzyme 13
  misc_feature (1)..(169): NCBI GI NO: 136647 NR Description: Ubiquitin-conjugating enzyme E2-20 kDa
  misc_feature (4)..(169): NCBI GI NO: 18410268 NR Description: E2, ubiquitin-conjugating enzyme 14
  misc_feature (33)..(168): NCBI GI NO: 18424219 NR Description: E2, ubiquitin-conjugating enzyme 7
MATASSQASLLLQKQLRDLAKHPVDGFSAGLVDDSNVFEWQVTIIGPPETLYDGGYFNAIMSFPQNYPNSPPTVRFTSEMWHPNVYPDGRVCISILHPPGDDPNGYELASERWTPVHTVESIVLSIISMLSSPNDESPANIEAAKDWREKQDEFKKKVRRAVRKSQEML

SEQ ID NO: 19757 - DNA, 1290 bp, Zea mays subsp. mays
  misc_feature (1)..(1290): Ceres Seq. ID no. 13623732
acctagaacatcctaatcgaaaacagacctacttactcatccaccaatcatcagttcatcacagcacgaacgacatggctgctgctccggtggttgtgccgcgcatgaagctgggctcgcaggggctggaggtctcggcgcagggcctcggctgcatgggcatgtccgcggcctacggcgagcgcaagcccgaccaggacatgatcgcgctcctccgccacgccgtcgccgccggcgtcaccttcctcgacacctccgacatctacggcccccacaccaacgagctcttactcggcaaggcgctgcagggaggggtgagggagcaggtccaattggccacgaaatttggcatcacggccacctgggaggtccacggcgacccggcctacgtgcgggcggcgtgcgagggcagcctcgcccggctcggcgtcgactgcatcgacctctactaccagcaccgcatcgacaagaatgtccccgtggagatcacgatgggtgagatcaagaagttagtccaagaaggaaaagtgaaatacgtcgggttgtcggaggcctcggcgtcgacaataagaagggcacacgcagttcatcccatcaccgccgttcagctggagtggtctttgtggtcaagagatgtcgaagaagatataatcccaacttgcagagaacttggcattggaattgtagcttacagtccactaggcagaggttttctatccactggacctaaactagtggacacattaccagaagacgatttccgcaagaatctcccaagatttcaacccgagaacatgaagaagaatgcagagatattcgagcgcgtgagcgagatggctgcgaggaagggttgcacgtcgtctcagctcgtgctggcttgggttcaccaccagggaagcgatgtgtgccccatacccggcacgacgaaagttgagaatttcaaccagaacctgagagcattgtctgttgagctcacggctgaggagatggctgagctcgagtcctacgctgccatggatgcggtccaaggtgatcggtaccacaacacgttcctcaacacctggaaggactccgagaccccttccctgtcatcctggaaagccacttagttgggtatcatgggaatcaatcactatgctgatgcttcgtatcactggtttgaaatagttgcaaatcaaataatttcacgagcactccgtgcatggatggaatcatggaaccaccaattgtttactaatgtagcacaattcctgcccatgagtgttgaactttttattatgcctgcaaggt

SEQ ID NO: 19758 - protein, 368 aa, Zea mays subsp. mays
  peptide (1)..(368): Ceres Seq. ID no. 13623733
  misc_feature (26)..(367): NCBI GI NO: 38345357 NR Description: OSJNBa0032I19.9
  misc_feature (26)..(367): NCBI GI NO: 38344997 NR Description: OSJNBa0008A08.11
  misc_feature (28)..(367): NCBI GI NO: 38344994 NR Description: OSJNBa0008A08.8
  misc_feature (32)..(368): NCBI GI NO: 30102704 NR Description: At1g60680 [Arabidopsis thaliana]
  misc_feature (32)..(367): NCBI GI NO: 15219786 NR Description: aldo/keto reductase family [Arabidopsis thaliana]
  misc_feature (32)..(367): NCBI GI NO: 18406861 NR Description: aldo/keto reductase family [Arabidopsis thaliana]
  misc_feature (32)..(367): NCBI GI NO: 7447933 NR Description: auxin-induced protein - common sunflower
  misc_feature (32)..(368): NCBI GI NO: 30696451 NR Description: aldo/keto reductase family [Arabidopsis thaliana]
  misc_feature (32)..(367): NCBI GI NO: 30696459 NR Description: aldo/keto reductase family [Arabidopsis thaliana]
  misc_feature (32)..(367): NCBI GI NO: 6562980 NR Description: auxin-induced atb2 [Arabidopsis thaliana]
LEHPNRKQTYLLIHQSSVHHSTNDMAAAPVVVPRMKLGSQGLEVSAQGLGCMGMSAAYGERKPDQDMIALLRHAVAAGVTFLDTSDIYGPHTNELLLGKALQGGVREQVQLATKFGITATWEVHGDPAYVRAACEGSLARLGVDCIDLYYQHRIDKNVPVEITMGEIKKLVQEGKVKYVGLSEASASTIRRAHAVHPITAVQLEWSLWSRDVEEDIIPTCRELGIGIVAYSPLGRGFLSTGPKLVDTLPEDDFRKNLPRFQPENMKKNAEIFERVSEMAARKGCTSSQLVLAWVHHQGSDVCPIPGTTKVENFNQNLRALSVELTAEEMAELESYAAMDAVQGDRYHNTFLNTWKDSETPSLSSWKAT

SEQ ID NO: 19759 - protein, 344 aa, Zea mays subsp. mays
  peptide (1)..(344): Ceres Seq. ID no. 13623734
  misc_feature (2)..(343): NCBI GI NO: 38345357 NR Description: OSJNBa0032I19.9
  misc_feature (2)..(343): NCBI GI NO: 38344997 NR Description: OSJNBa0008A08.11
  misc_feature (4)..(343): NCBI GI NO: 38344994 NR Description: OSJNBa0008A08.8
  misc_feature (8)..(344): NCBI GI NO: 30102704 NR Description: At1g60680 [Arabidopsis thaliana]
  misc_feature (8)..(343): NCBI GI NO: 15219786 NR Description: aldo/keto reductase family [Arabidopsis thaliana]
  misc_feature (8)..(343): NCBI GI NO: 18406861 NR Description: aldo/keto reductase family [Arabidopsis thaliana]
  misc_feature (8)..(343): NCBI GI NO: 7447933 NR Description: auxin-induced protein - common sunflower
  misc_feature (8)..(344): NCBI GI NO: 30696451 NR Description: aldo/keto reductase family [Arabidopsis thaliana]
  misc_feature (8)..(343): NCBI GI NO: 30696459 NR Description: aldo/keto reductase family [Arabidopsis thaliana]
  misc_feature (8)..(343): NCBI GI NO: 6562980 NR Description: auxin-induced atb2 [Arabidopsis thaliana]
MAAAPVVVPRMKLGSQGLEVSAQGLGCMGMSAAYGERKPDQDMIALLRHAVAAGVTFLDTSDIYGPHTNELLLGKALQGGVREQVQLATKFGITATWEVHGDPAYVRAACEGSLARLGVDCIDLYYQHRIDKNVPVEITMGEIKKLVQEGKVKYVGLSEASASTIRRAHAVHPITAVQLEWSLWSRDVEEDIIPTCRELGIGIVAYSPLGRGFLSTGPKLVDTLPEDDFRKNLPRFQPENMKKNAEIFERVSEMAARKGCTSSQLVLAWVHHQGSDVCPIPGTTKVENFNQNLRALSVELTAEEMAELESYAAMDAVQGDRYHNTFLNTWKDSETPSLSSWKAT

SEQ ID NO: 19760 - protein, 334 aa, Zea mays subsp. mays
  peptide (1)..(334): Ceres Seq. ID no. 13623735
  misc_feature (1)..(333): NCBI GI NO: 38345357 NR Description: OSJNBa0032I19.9
  misc_feature (1)..(333): NCBI GI NO: 38344997 NR Description: OSJNBa0008A08.11
  misc_feature (1)..(333): NCBI GI NO: 38344994 NR Description: OSJNBa0008A08.8
  misc_feature (1)..(334): NCBI GI NO: 30102704 NR Description: At1g60680 [Arabidopsis thaliana]
  misc_feature (1)..(333): NCBI GI NO: 15219786 NR Description: aldo/keto reductase family [Arabidopsis thaliana]
  misc_feature (1)..(333): NCBI GI NO: 18406861 NR Description: aldo/keto reductase family [Arabidopsis thaliana]
  misc_feature (1)..(333): NCBI GI NO: 7447933 NR Description: auxin-induced protein - common sunflower
  misc_feature (1)..(334): NCBI GI NO: 30696451 NR Description: aldo/keto reductase family [Arabidopsis thaliana]
  misc_feature (1)..(333): NCBI GI NO: 30696459 NR Description: aldo/keto reductase family [Arabidopsis thaliana]
  misc_feature (1)..(333): NCBI GI NO: 6562980 NR Description: auxin-induced atb2 [Arabidopsis thaliana]
MKLGSQGLEVSAQGLGCMGMSAAYGERKPDQDMIALLRHAVAAGVTFLDTSDIYGPHTNELLLGKALQGGVREQVQLATKFGITATWEVHGDPAYVRAACEGSLARLGVDCIDLYYQHRIDKNVPVEITMGEIKKLVQEGKVKYVGLSEASASTIRRAHAVHPITAVQLEWSLWSRDVEEDIIPTCRELGIGIVAYSPLGRGFLSTGPKLVDTLPEDDFRKNLPRFQPENMKKNAEIFERVSEMAARKGCTSSQLVLAWVHHQGSDVCPIPGTTKVENFNQNLRALSVELTAEEMAELESYAAMDAVQGDRYHNTFLNTWKDSETPSLSSWKAT

SEQ ID NO: 19761 - DNA, 1547 bp, Zea mays subsp. mays
  misc_feature (1)..(1547): Ceres Seq. ID no. 13623689
atataaatttggttaaatttgaattacttttgactcctcaaggaatgacttataataatttaggatggagggagtatttccatattactagagctcagactgacaaatttagactacagagttatcctaagaaattgagaaaccatatcaaaacataataactgaacaggtgcatactcaggcacttcctgacttaacactgacgctgcaacatgtctgacaccatgaacaactaaaaactcgacaccagatagataacaaaatcaagattcacctaccatgcttgagtaggtcatacaacatttgctggtaatcgatcatcagtgcacttaaataccataaaatagaattcttagatgatactcagctcagtccactgcatcactcagccaggtccatgagcgtcctggtcacttccttggtcaggtcgtggcgacgaagatgtaggttcatcagtgcacgcctctgcttcttgatcctctcgtccagtgtacgggccttgctgtcttcgatcatcccaaactcccgcttgaacaagcctgggtgtgccctctgaagcgccctcacctcctccgcaaggtatgggtacagctcacacatctcgtcaggctccctcccagcaccaccgttagccgacgccttggtaaccgccttggtaacaggcttggcattgctaacagaaggccagacgttcttgcagaggtcgaagagacggcgatcctgatccttgctcggtggcgcgcctttcttgaccgctttggcgtaccggctctgcaaactcctcaccttcctcttgagatcggagaggctgcagccactattgtcgagcttgccagcgagggcgtcggccagcacgtccgtttgaggcagcgcgccgtgctccaggcgttgagcagcgagggcctgcaggatgcggaagtggtcgtcaatcgaccaggtgcgctggaacggcgcgctcggccgctttgcacctttagcctacacctcttgatttggagcggggttcgtctgcggcatctcgtcgtgcgcctccctatccttttcttcgtcggaagcctcagaatcctcgccagtctgcggcggcggaggcgggttcttggtggcggaagaagggaccacgtggttggccttctcgtcctcttcgatatcctcctcttcgtcgtcttcatcctcatcggacgcttcgggttcctggaccttctgcggctcgtcatcttcatcgtcatactcatcctcgtcggacgcttcgggttcctggaccttctgcggcagcggagcaacgctcttgggagcgacgggaggcggtgagtgggcggtctccaaatcatcctcctcctcctcctcctcctcctcctcctcctcctcggagcccgaaccagaggcggtctcctcggaggaggcagccgggggcggaggcggcggaggtggagccgagcgcttgggggccatctccgccgctgcacctagggttagagatttggcaagctggtgaggcggcaccaagctagggttttcgcggcgtcgcggttttgttcatttttttatat

SEQ ID NO: 19762 - protein, 52 aa, Zea mays subsp. mays
  peptide (1)..(52): Ceres Seq. ID no. 13623690
  misc_feature (29)..(52): NCBI GI NO: 15901602 NR Description: cell wall surface anchor family protein
  misc_feature (29)..(52): NCBI GI NO: 13592175 NR Description: ppg3 [Leishmania major]
MSVLVTSLVRSWRRRCRFISARLCFLILSSSVRALLSSIIPNSRLNKPGCAL

SEQ ID NO: 19763 - protein, 51 aa, Zea mays subsp. mays
  peptide (1)..(51): Ceres Seq. ID no. 13623691
INLVKFELLLTPQGMTYNNLGWREYFHITRAQTDKFRLQSYPKKLRNHIKT

SEQ ID NO: 19764 - protein, 37 aa, Zea mays subsp. mays
  peptide (1)..(37): Ceres Seq. ID no. 13623692
MTYNNLGWREYFHITRAQTDKFRLQSYPKKLRNHIKT

SEQ ID NO: 19765 - DNA, 987 bp, Zea mays subsp. mays
  misc_feature (1)..(987): Ceres Seq. ID no. 13635585
aaaatcagtaattaatccgtcacctataatattttgagcattcagaaacacaccaagcgaagcacattagcaacaacctaacaacaatggctaccaagatattatccctccttgcgcttcttgcgctttttgcgagcgcaacaaatgcgttcattattccacaatgctcacttgctccaagttccattattacacagttcctcccaccagttacttcaatgggcttcgaacacccagctgtgcaagcctataggctacaacaagcaattgcggcgagcgtcttacaacaaccaatttcccagttgcaacaacaatccttggcacatctaacaatacaaaccatcgcaacgcaacagcaacaacagttcctaccagcactgagccacctagccatggtgaaccctgtcgcctacttgcaacagcagctgcttgcatccaacccacttgctctagcaaacgtagttgcaaaccagcaacaacaacagctgcaacagtttctgccagcgcttagtcaactagccatggtgaaccctgccgcctacctacaacagcaacaactgctttcatctagcccgctcgctgtggccaatgcacctacatacctgcaacaagaattgttgcaacagattgtaccagctctgactcagctagttgtggcaaaccctgttgcctacttgcaacagctgcttccattcaaccaactgactatgtcgaactctgctgcgtacctacaacagcgacaacagttacttaatccattggcagtggctaacccattggtcgctgccttcctacagcagcaacaattgctgccatacaaccagttctctttgataaaccctgtcttgtcgaggcagcaacccatcgttggaggtgccatcttttagattacatatgagatgtactcgataatggtgccctcattccggcatgtgtttcctagaaataatcaatatattgattgagatttatctcaatatatttctg

SEQ ID NO: 19766 - protein, 266 aa, Zea mays subsp. mays
  peptide (1)..(266): Ceres Seq. ID no. 13635586
  misc_feature (1)..(266): Pfam Name: Pfam Description:  Zein seed storage protein
  misc_feature (1)..(266): NCBI GI NO: 7442059 NR Description: alpha zein 4, 22K - maize
  misc_feature (1)..(266): NCBI GI NO: 13606088 NR Description: azs22-4 [Zea mays]
  misc_feature (1)..(266): NCBI GI NO: 7442056 NR Description: 22K zein precursor (clone ZSF4C1) - maize
  misc_feature (1)..(266): NCBI GI NO: 72307 NR Description: 22K zein precursor (clone pZ22.3) - maize
  misc_feature (1)..(266): NCBI GI NO: 13775591 NR Description: azs22-14 [Zea mays]
  misc_feature (1)..(266): NCBI GI NO: 141615 NR Description: Zein-alpha precursor (22 kDa) (Clone PZ22.3)
  misc_feature (1)..(266): NCBI GI NO: 100939 NR Description: zein precursor - maize
  misc_feature (1)..(266): NCBI GI NO: 468517 NR Description: zein [Zea mays]
  misc_feature (1)..(266): NCBI GI NO: 13606090 NR Description: azs22-10 [Zea mays]
  misc_feature (1)..(266): NCBI GI NO: 13606091 NR Description: zp22/6 [Zea mays]
MATKILSLLALLALFASATNAFIIPQCSLAPSSIITQFLPPVTSMGFEHPAVQAYRLQQAIAASVLQQPISQLQQQSLAHLTIQTIATQQQQQFLPALSHLAMVNPVAYLQQQLLASNPLALANVVANQQQQQLQQFLPALSQLAMVNPAAYLQQQQLLSSSPLAVANAPTYLQQELLQQIVPALTQLVVANPVAYLQQLLPFNQLTMSNSAAYLQQRQQLLNPLAVANPLVAAFLQQQQLLPYNQFSLINPVLSRQQPIVGGAIF

SEQ ID NO: 19767 - protein, 222 aa, Zea mays subsp. mays
  peptide (1)..(222): Ceres Seq. ID no. 13635587
  misc_feature (1)..(222): Pfam Name: Pfam Description:  Zein seed storage protein
  misc_feature (1)..(222): NCBI GI NO: 7442059 NR Description: alpha zein 4, 22K - maize
  misc_feature (1)..(222): NCBI GI NO: 13606088 NR Description: azs22-4 [Zea mays]
  misc_feature (1)..(222): NCBI GI NO: 7442056 NR Description: 22K zein precursor (clone ZSF4C1) - maize
  misc_feature (1)..(222): NCBI GI NO: 72307 NR Description: 22K zein precursor (clone pZ22.3) - maize
  misc_feature (1)..(222): NCBI GI NO: 13775591 NR Description: azs22-14 [Zea mays]
  misc_feature (1)..(222): NCBI GI NO: 141615 NR Description: Zein-alpha precursor (22 kDa) (Clone PZ22.3)
  misc_feature (1)..(222): NCBI GI NO: 100939 NR Description: zein precursor - maize
  misc_feature (1)..(222): NCBI GI NO: 468517 NR Description: zein [Zea mays]
  misc_feature (1)..(222): NCBI GI NO: 13606090 NR Description: azs22-10 [Zea mays]
  misc_feature (1)..(222): NCBI GI NO: 13606091 NR Description: zp22/6 [Zea mays]
MGFEHPAVQAYRLQQAIAASVLQQPISQLQQQSLAHLTIQTIATQQQQQFLPALSHLAMVNPVAYLQQQLLASNPLALANVVANQQQQQLQQFLPALSQLAMVNPAAYLQQQQLLSSSPLAVANAPTYLQQELLQQIVPALTQLVVANPVAYLQQLLPFNQLTMSNSAAYLQQRQQLLNPLAVANPLVAAFLQQQQLLPYNQFSLINPVLSRQQPIVGGAIF

SEQ ID NO: 19768 - protein, 164 aa, Zea mays subsp. mays
  peptide (1)..(164): Ceres Seq. ID no. 13635588
  misc_feature (1)..(164): Pfam Name: Pfam Description:  Zein seed storage protein
  misc_feature (1)..(164): NCBI GI NO: 7442059 NR Description: alpha zein 4, 22K - maize
  misc_feature (1)..(164): NCBI GI NO: 13606088 NR Description: azs22-4 [Zea mays]
  misc_feature (1)..(164): NCBI GI NO: 7442056 NR Description: 22K zein precursor (clone ZSF4C1) - maize
  misc_feature (1)..(164): NCBI GI NO: 72307 NR Description: 22K zein precursor (clone pZ22.3) - maize
  misc_feature (1)..(164): NCBI GI NO: 13775591 NR Description: azs22-14 [Zea mays]
  misc_feature (1)..(164): NCBI GI NO: 141615 NR Description: Zein-alpha precursor (22 kDa) (Clone PZ22.3)
  misc_feature (1)..(164): NCBI GI NO: 100939 NR Description: zein precursor - maize
  misc_feature (1)..(164): NCBI GI NO: 468517 NR Description: zein [Zea mays]
  misc_feature (1)..(164): NCBI GI NO: 13606090 NR Description: azs22-10 [Zea mays]
  misc_feature (1)..(164): NCBI GI NO: 13606091 NR Description: zp22/6 [Zea mays]
MVNPVAYLQQQLLASNPLALANVVANQQQQQLQQFLPALSQLAMVNPAAYLQQQQLLSSSPLAVANAPTYLQQELLQQIVPALTQLVVANPVAYLQQLLPFNQLTMSNSAAYLQQRQQLLNPLAVANPLVAAFLQQQQLLPYNQFSLINPVLSRQQPIVGGAIF

SEQ ID NO: 19769 - DNA, 1438 bp, Zea mays subsp. mays
  misc_feature (1)..(1438): Ceres Seq. ID no. 12783179
gaagccggacccctaatctgatgtgcacctgagttcgaagccgaattcacgactgcaattgcaaaaccctagctaccgcttcgccgaattccctgtcctccgcccgcttcgccgaattccctgtcctccgcccgcttcgccgaatttcctctcctccccgcccgccgcccgtcaccgcggcttcgtctgcgcttgtccctcccgttccaaggagcacgtgcttctcgccgcgccgttcgcccgccgccgccgccaccggttcatcgccagctatgtcttctcaggtcgacagccgcagccagtccgccgggaagcgcgcgcgcaccgacggcagccggcgtgaggacgactgggtttgccccagctgcaagaacgttaacttcgcctttcgcaccacttgcaacatgcgcaactgcaaccagtccaggccagcagatcacacggccatgcagaccccgcctcgctatcccacatcaggaggttacatgagcccagggacgccaccgtcgatgtaccttggtggtggtgctcccccatatggctcttcaatgtttaacgggcctgcaatgacgcgctatggtatcacacagttccctgggggttctgcgtatccatatggatatggtggccgcatatcaatggggagcccctacgggccaatgcaaatggctgggccaaccgcatactctggtggatctatgatgggagcaggtggaatgtatggaatgcccatggacaggtatgggctaatacctgctggttctggtccaatgggcacgagagctggctcatattctgatgaagattctcagaagaagtctgcaggagctggccgtgataatgattgggagtgtccaaattgccacaacatcaactttggcttccgcacagtctgtaatatgagaaagtgcaacacacctagacctgaaaaccagggatctaagcctgatggtttaagagggtcaaaaccaaagacaccagagggcagttggaagtgtgagcagtgcaataacataaactatcctttccgaacgaaatgcaatcgtccccaatgtggagcagaaaagccatcacagacgaacaatgcaaatgaatcagcggaagatcaggacaatcagtgagtcctagaacagtaatgagggtcaagaaggtccagcgtcgtcgtcaaggttcagtctgaatgtggggtacatctgtgtcagtagtcgccgttacaagtttcttccccttgagaacttagttgagtcggggccttggagttggcaatggagtcttgccttccttaatcactgcggataatggtcaagaacatcaatttgttatgtggtttgtcaagaacatccatcttgcctttcctggctgaacttggttacttgtctttgttactggtactctggataaattaccatatgttatatgaatgtcttttatatgtgtc

SEQ ID NO: 19770 - protein, 282 aa, Zea mays subsp. mays
  peptide (1)..(282): Ceres Seq. ID no. 12783180
  misc_feature (48)..(151): Pfam Name: Pfam Description:  Keratin
  misc_feature (1)..(282): NCBI GI NO: 27817857 NR Description: OJ1081_B12.5
  misc_feature (3)..(281): NCBI GI NO: 22330480 NR Description: similar to RRM-containing RNA-binding protein
  misc_feature (45)..(281): NCBI GI NO: 25404955 NR Description: protein F1N21.14 [imported] - Arabidopsis thaliana
  misc_feature (2)..(267): NCBI GI NO: 33146999 NR Description: putative p53 binding protein
  misc_feature (179)..(267): NCBI GI NO: 18698995 NR Description: p53 binding protein [Oryza sativa]
  misc_feature (170)..(265): NCBI GI NO: 15865325 NR Description: putative non-ribosomal nucleolar protein
  misc_feature (70)..(227): NCBI GI NO: 15029724 NR Description: Similar to fusion, derived from t
  misc_feature (6)..(54): NCBI GI NO: 18698995 NR Description: p53 binding protein [Oryza sativa]
  misc_feature (123)..(225): NCBI GI NO: 33604057 NR Description: Unknown (protein for IMAGE:6789697) [Danio rerio]
  misc_feature (109)..(223): NCBI GI NO: 10177024 NR Description: gene_id:MQJ2.7~unknown protein
MSSQVDSRSQSAGKRARTDGSRREDDWVCPSCKNVNFAFRTTCNMRNCNQSRPADHTAMQTPPRYPTSGGYMSPGTPPSMYLGGGAPPYGSSMFNGPAMTRYGITQFPGGSAYPYGYGGRISMGSPYGPMQMAGPTAYSGGSMMGAGGMYGMPMDRYGLIPAGSGPMGTRAGSYSDEDSQKKSAGAGRDNDWECPNCHNINFGFRTVCNMRKCNTPRPENQGSKPDGLRGSKPKTPEGSWKCEQCNNINYPFRTKCNRPQCGAEKPSQTNNANESAEDQDNQ

SEQ ID NO: 19771 - protein, 238 aa, Zea mays subsp. mays
  peptide (1)..(238): Ceres Seq. ID no. 12783181
  misc_feature (4)..(107): Pfam Name: Pfam Description:  Keratin
  misc_feature (1)..(238): NCBI GI NO: 27817857 NR Description: OJ1081_B12.5
  misc_feature (1)..(237): NCBI GI NO: 22330480 NR Description: similar to RRM-containing RNA-binding protein
  misc_feature (1)..(237): NCBI GI NO: 25404955 NR Description: protein F1N21.14 [imported] - Arabidopsis thaliana
  misc_feature (1)..(223): NCBI GI NO: 33146999 NR Description: putative p53 binding protein
  misc_feature (135)..(223): NCBI GI NO: 18698995 NR Description: p53 binding protein [Oryza sativa]
  misc_feature (126)..(221): NCBI GI NO: 15865325 NR Description: putative non-ribosomal nucleolar protein
  misc_feature (26)..(183): NCBI GI NO: 15029724 NR Description: Similar to fusion, derived from t
  misc_feature (79)..(181): NCBI GI NO: 33604057 NR Description: Unknown (protein for IMAGE:6789697) [Danio rerio]
  misc_feature (65)..(179): NCBI GI NO: 10177024 NR Description: gene_id:MQJ2.7~unknown protein
  misc_feature (141)..(221): NCBI GI NO: 15227939 NR Description: similar to putative zinc finger protein
MRNCNQSRPADHTAMQTPPRYPTSGGYMSPGTPPSMYLGGGAPPYGSSMFNGPAMTRYGITQFPGGSAYPYGYGGRISMGSPYGPMQMAGPTAYSGGSMMGAGGMYGMPMDRYGLIPAGSGPMGTRAGSYSDEDSQKKSAGAGRDNDWECPNCHNINFGFRTVCNMRKCNTPRPENQGSKPDGLRGSKPKTPEGSWKCEQCNNINYPFRTKCNRPQCGAEKPSQTNNANESAEDQDNQ

SEQ ID NO: 19772 - protein, 224 aa, Zea mays subsp. mays
  peptide (1)..(224): Ceres Seq. ID no. 12783182
  misc_feature (1)..(93): Pfam Name: Pfam Description:  Keratin
  misc_feature (1)..(224): NCBI GI NO: 27817857 NR Description: OJ1081_B12.5
  misc_feature (1)..(223): NCBI GI NO: 22330480 NR Description: similar to RRM-containing RNA-binding protein
  misc_feature (1)..(223): NCBI GI NO: 25404955 NR Description: protein F1N21.14 [imported] - Arabidopsis thaliana
  misc_feature (1)..(209): NCBI GI NO: 33146999 NR Description: putative p53 binding protein
  misc_feature (121)..(209): NCBI GI NO: 18698995 NR Description: p53 binding protein [Oryza sativa]
  misc_feature (112)..(207): NCBI GI NO: 15865325 NR Description: putative non-ribosomal nucleolar protein
  misc_feature (12)..(169): NCBI GI NO: 15029724 NR Description: Similar to fusion, derived from t
  misc_feature (65)..(167): NCBI GI NO: 33604057 NR Description: Unknown (protein for IMAGE:6789697) [Danio rerio]
  misc_feature (51)..(165): NCBI GI NO: 10177024 NR Description: gene_id:MQJ2.7~unknown protein
  misc_feature (127)..(207): NCBI GI NO: 15227939 NR Description: similar to putative zinc finger protein
MQTPPRYPTSGGYMSPGTPPSMYLGGGAPPYGSSMFNGPAMTRYGITQFPGGSAYPYGYGGRISMGSPYGPMQMAGPTAYSGGSMMGAGGMYGMPMDRYGLIPAGSGPMGTRAGSYSDEDSQKKSAGAGRDNDWECPNCHNINFGFRTVCNMRKCNTPRPENQGSKPDGLRGSKPKTPEGSWKCEQCNNINYPFRTKCNRPQCGAEKPSQTNNANESAEDQDNQ

SEQ ID NO: 19773 - DNA, 598 bp, Zea mays subsp. mays
  misc_feature (1)..(598): Ceres Seq. ID no. 15226580
aattttgagtgaacctcctgctggacgcaccaagaaagcacaagggagctctatggctacacatagaaaaccagttgctaccgagatggcttctgcagcattccatgacgccacgccagctaaccaaaacatcgaagaggatcaggacgcgtgctccatatccatactactactcccattcgttctgcatctggccttcatggcattcacagccttgttcgtgatgcacgtccaggtgtccacacggttcctatccgctagccccccggtttactgggctgccgcgcacgttctggcttctccgagccgcgccaacagacgatggggctacctgatctgtgtctatttcatcgcgtacattcttctaggtagcctgctcttctccaacttctaccctttcacgtaacgtaagaacggcggtggattttctcgaccagctttgcctgaaggtttccctaggttggtagtggtaggtgtttcctttggttcagtaattgagcgttggctactcgaatcgcttggaatctgctcggctgatgtatcttggggggtcgatcttctccaattattcaatggcactatctatctccatttgacg

SEQ ID NO: 19774 - protein, 134 aa, Zea mays subsp. mays
  peptide (1)..(134): Ceres Seq. ID no. 15226581
  misc_feature (53)..(134): Pfam Name: DUF409 Pfam Description: Protein of unknown function
  misc_feature (53)..(134): NCBI GI NO: 15221122 NR Description: hypothetical protein [Arabidopsis thaliana]
  misc_feature (58)..(134): NCBI GI NO: 31242749 NR Description: ENSANGP00000009757 [Anopheles gambiae]
  misc_feature (59)..(134): NCBI GI NO: 16197911 NR Description: GM14315p [Drosophila melanogaster]
ILSEPPAGRTKKAQGSSMATHRKPVATEMASAAFHDATPANQNIEEDQDACSISILLLPFVLHLAFMAFTALFVMHVQVSTRFLSASPPVYWAAAHVLASPSRANRRWGYLICVYFIAYILLGSLLFSNFYPFT

SEQ ID NO: 19775 - protein, 117 aa, Zea mays subsp. mays
  peptide (1)..(117): Ceres Seq. ID no. 15226582
  misc_feature (36)..(117): Pfam Name: DUF409 Pfam Description: Protein of unknown function
  misc_feature (36)..(117): NCBI GI NO: 15221122 NR Description: hypothetical protein [Arabidopsis thaliana]
  misc_feature (41)..(117): NCBI GI NO: 31242749 NR Description: ENSANGP00000009757 [Anopheles gambiae]
  misc_feature (42)..(117): NCBI GI NO: 16197911 NR Description: GM14315p [Drosophila melanogaster]
MATHRKPVATEMASAAFHDATPANQNIEEDQDACSISILLLPFVLHLAFMAFTALFVMHVQVSTRFLSASPPVYWAAAHVLASPSRANRRWGYLICVYFIAYILLGSLLFSNFYPFT

SEQ ID NO: 19776 - protein, 106 aa, Zea mays subsp. mays
  peptide (1)..(106): Ceres Seq. ID no. 15226583
  misc_feature (25)..(106): Pfam Name: DUF409 Pfam Description: Protein of unknown function
  misc_feature (25)..(106): NCBI GI NO: 15221122 NR Description: hypothetical protein [Arabidopsis thaliana]
  misc_feature (30)..(106): NCBI GI NO: 31242749 NR Description: ENSANGP00000009757 [Anopheles gambiae]
  misc_feature (31)..(106): NCBI GI NO: 16197911 NR Description: GM14315p [Drosophila melanogaster]
MASAAFHDATPANQNIEEDQDACSISILLLPFVLHLAFMAFTALFVMHVQVSTRFLSASPPVYWAAAHVLASPSRANRRWGYLICVYFIAYILLGSLLFSNFYPFT

SEQ ID NO: 19777 - DNA, 740 bp, Zea mays subsp. mays
  misc_feature (1)..(740): Ceres Seq. ID no. 13600066
aaattcccaatcccaaccccaagtcacactccacctccgcaaccaaacgcgctagggtttccgcaccgcacctctagtcctccacccaccccaccccactaccggcgatggccaccgcggcggcacagggcggtagcgacaagccggcgctccggaagcccgtcttcaccaaggtcgaccagctcaagccgggcactaacgggcacaccctcaccgtcaaggtcgtcagcgccacccccgtgccgggccgcgcgcgcccgggcgcacccgccgccgcctcgtcccgcgcgccgcgcatcgccgagtgcctcgtcggagacgagaccggcgtcatcgtattcaccgcccgcaacgaccaagttgatttgctgaagcccgatgccacggtgatcttgcgcaatgccaaaatcgacatgttcaaaggatcaatgaggcttgcagtggacaaatgggggcggattgaggctacagagccagccagcttcacagtgaaggaagacaacaacttgtcccttgtagagtatgaattggttaacgtggctgaataaccgtcgaagcgtttctgcccccctttcttctttttcacgcacgccataagatgataagaaaacgaacagcatctcgaagctgagtttatttgttacggtggtcgataaggtcaaggcttctgctgttacacctttggatccaatccattaagatgaattacccttgcatctattgtaattgtgtggttatcc

SEQ ID NO: 19778 - protein, 146 aa, Zea mays subsp. mays
  peptide (1)..(146): Ceres Seq. ID no. 13600067
  misc_feature (1)..(146): NCBI GI NO: 34904470 NR Description: OSJNBa0086P08.14
  misc_feature (1)..(146): NCBI GI NO: 18403397 NR Description: expressed protein [Arabidopsis thaliana]
  misc_feature (1)..(144): NCBI GI NO: 34909622 NR Description: P0435B05.31
  misc_feature (3)..(144): NCBI GI NO: 15235304 NR Description: expressed protein [Arabidopsis thaliana]
  misc_feature (10)..(146): NCBI GI NO: 18395285 NR Description: expressed protein [Arabidopsis thaliana]
  misc_feature (14)..(144): NCBI GI NO: 18391179 NR Description: expressed protein [Arabidopsis thaliana]
  misc_feature (14)..(144): NCBI GI NO: 30681801 NR Description: expressed protein [Arabidopsis thaliana]
  misc_feature (14)..(84): NCBI GI NO: 6573753 NR Description: F20B24.1 [Arabidopsis thaliana]
  misc_feature (85)..(144): NCBI GI NO: 6573753 NR Description: F20B24.1 [Arabidopsis thaliana]
  misc_feature (1)..(142): NCBI GI NO: 15219562 NR Description: hypothetical protein [Arabidopsis thaliana]
MATAAAQGGSDKPALRKPVFTKVDQLKPGTNGHTLTVKVVSATPVPGRARPGAPAAASSRAPRIAECLVGDETGVIVFTARNDQVDLLKPDATVILRNAKIDMFKGSMRLAVDKWGRIEATEPASFTVKEDNNLSLVEYELVNVAE

SEQ ID NO: 19779 - protein, 123 aa, Zea mays subsp. mays
  peptide (1)..(123): Ceres Seq. ID no. 13600068
  misc_feature (3)..(118): NCBI GI NO: 30387315 NR Description: unknown [Choristoneura fumiferana MNPV]
  misc_feature (6)..(123): NCBI GI NO: 5032119 NR Description: Ser/Arg-related nuclear matrix protein
  misc_feature (6)..(123): NCBI GI NO: 7949115 NR Description: Ser/Arg-related nuclear matrix protein
  misc_feature (3)..(123): NCBI GI NO: 1076211 NR Description: hypothetical protein VSP-3 - Chlamydomonasreinhardtii
  misc_feature (3)..(119): NCBI GI NO: 12697907 NR Description: KIAA1681 protein [Homo sapiens]
  misc_feature (3)..(123): NCBI GI NO: 30387315 NR Description: unknown [Choristoneura fumiferana MNPV]
  misc_feature (3)..(120): NCBI GI NO: 81286 NR Description: extensin - Volvox carteri (fragment)
  misc_feature (3)..(118): NCBI GI NO: 1076205 NR Description: hypothetical protein WP6 - Chlamydomonas eugametos
  misc_feature (5)..(115): NCBI GI NO: 25989119 NR Description: unknown [Streptomyces aureofaciens]
  misc_feature (11)..(123): NCBI GI NO: 31227421 NR Description: ENSANGP00000004917 [Anopheles gambiae]
KFPIPTPSHTPPPQPNALGFPHRTSSPPPTPPHYRRWPPRRHRAVATSRRSGSPSSPRSTSSSRALTGTPSPSRSSAPPPCRAARARAHPPPPRPARRASPSASSETRPASSYSPPATTKLIC

SEQ ID NO: 19780 - DNA, 1387 bp, Zea mays subsp. mays
  misc_feature (1)..(1387): Ceres Seq. ID no. 14313491
aatcaaatcccccagcaagtcagccccgccccgccccgcgccgacgcctctccccgatcccgatctgtgtgcctggctgcctgcaacctccgtgggatggaggcggcgcggcagcagcaggaggagtgcccgtgcggcggggccgaggccgctgaccagttcgagcggctgcacgacgcggtgctgctcgacgtcctcaatcgcatcggcgacgtcaaggcgctcggccgctgcgccctcgtctcgcgccgcttccacgcgctcgtgccgctcgtcgactccgtcttcgtccgcgtcgactgcgtcatccctgacgacccgccgccctcgtcctcctcctcctcctcctcctcttccgccgcaccaggcaccccgccgcggcaggcgccagccccaaccgcgcgcgggcgcggcgcgctcgcgcacatcgtgcgcgtcctgctcggcggcatcgccaggcccatccacgcgctcggccagatcctctcccccgccgccgcggccgtctcccggcgctccgaggcactgcccgcttccccgcgcgcgcccgtcgcggacgtctctcaccactccccctccgaggtgctccgctccttcaaggagctgcggcgccttcacatcgagctgcccacgggcgagctcggcattgacgacggtgtgctccttaagtggaaggccgacttcggctccaccctcgtcagctgcgtcatcctcggcgcctcgtcgatctcgtccaagccgccgacagggtacactcaggcggaatcggaaactgctacggccgccactcccgataccagtcgggagactgaagagccggggagcctacctgattctctttatacaaatggaggactcaagcttcgcgttgtctggaccatcagctccctgattgccgcgtcggcgaggcattacttgctgcagccgattatctggaatcacgaattgctggagagcttggacctgacagatgctgacgggcaaggggtgctcaccatggacaagaggcagctgcaggaactgcgggtgcggcccgtctttccgtcagggagctcgcaccgcaccctcatgccggctctcagtatgcgtctgcactacgcaccgctcattgagctgcctgggggaacgctgctgaagggtgcgacactagtggcgatcaaaccaagcgaagatgccttgagggagggccaaggggctggggctgcaggtcctgttggtacatgctggatttcagaggcctttgaggagccatatcggactgcggcaaaggtgcttctcaagagaagggcatattgtcttgaaatgaactcgttctgagcactagggggtttacttccacagagttctacccttctgacaggtgaaatgccactttacagttctaaat

SEQ ID NO: 19781 - protein, 438 aa, Zea mays subsp. mays
  peptide (1)..(438): Ceres Seq. ID no. 14313492
  misc_feature (54)..(100): Pfam Name: Pfam Description:  F-box domain
  misc_feature (46)..(438): NCBI GI NO: 34909910 NR Description: P0665A11.15
  misc_feature (52)..(438): NCBI GI NO: 15237391 NR Description: F-box protein family [Arabidopsis thaliana]
  misc_feature (114)..(438): NCBI GI NO: 15236865 NR Description: F-box protein family [Arabidopsis thaliana]
  misc_feature (183)..(436): NCBI GI NO: 34909194 NR Description: P0425G02.20
  misc_feature (52)..(158): NCBI GI NO: 34909194 NR Description: P0425G02.20
  misc_feature (111)..(438): NCBI GI NO: 18397400 NR Description: expressed protein [Arabidopsis thaliana]
  misc_feature (285)..(438): NCBI GI NO: 15219845 NR Description: F-box protein family [Arabidopsis thaliana]
  misc_feature (177)..(260): NCBI GI NO: 15219845 NR Description: F-box protein family [Arabidopsis thaliana]
  misc_feature (52)..(111): NCBI GI NO: 15219845 NR Description: F-box protein family [Arabidopsis thaliana]
  misc_feature (188)..(438): NCBI GI NO: 18411823 NR Description: F-box protein family [Arabidopsis thaliana]
NQIPQQVSPAPPRADASPRSRSVCLAACNLRGMEAARQQQEECPCGGAEAADQFERLHDAVLLDVLNRIGDVKALGRCALVSRRFHALVPLVDSVFVRVDCVIPDDPPPSSSSSSSSSSAAPGTPPRQAPAPTARGRGALAHIVRVLLGGIARPIHALGQILSPAAAAVSRRSEALPASPRAPVADVSHHSPSEVLRSFKELRRLHIELPTGELGIDDGVLLKWKADFGSTLVSCVILGASSISSKPPTGYTQAESETATAATPDTSRETEEPGSLPDSLYTNGGLKLRVVWTISSLIAASARHYLLQPIIWNHELLESLDLTDADGQGVLTMDKRQLQELRVRPVFPSGSSHRTLMPALSMRLHYAPLIELPGGTLLKGATLVAIKPSEDALREGQGAGAAGPVGTCWISEAFEEPYRTAAKVLLKRRAYCLEMNSF

SEQ ID NO: 19782 - protein, 406 aa, Zea mays subsp. mays
  peptide (1)..(406): Ceres Seq. ID no. 14313493
  misc_feature (22)..(68): Pfam Name: Pfam Description:  F-box domain
  misc_feature (14)..(406): NCBI GI NO: 34909910 NR Description: P0665A11.15
  misc_feature (20)..(406): NCBI GI NO: 15237391 NR Description: F-box protein family [Arabidopsis thaliana]
  misc_feature (82)..(406): NCBI GI NO: 15236865 NR Description: F-box protein family [Arabidopsis thaliana]
  misc_feature (151)..(404): NCBI GI NO: 34909194 NR Description: P0425G02.20
  misc_feature (20)..(126): NCBI GI NO: 34909194 NR Description: P0425G02.20
  misc_feature (79)..(406): NCBI GI NO: 18397400 NR Description: expressed protein [Arabidopsis thaliana]
  misc_feature (253)..(406): NCBI GI NO: 15219845 NR Description: F-box protein family [Arabidopsis thaliana]
  misc_feature (145)..(228): NCBI GI NO: 15219845 NR Description: F-box protein family [Arabidopsis thaliana]
  misc_feature (20)..(79): NCBI GI NO: 15219845 NR Description: F-box protein family [Arabidopsis thaliana]
  misc_feature (156)..(406): NCBI GI NO: 18411823 NR Description: F-box protein family [Arabidopsis thaliana]
MEAARQQQEECPCGGAEAADQFERLHDAVLLDVLNRIGDVKALGRCALVSRRFHALVPLVDSVFVRVDCVIPDDPPPSSSSSSSSSSAAPGTPPRQAPAPTARGRGALAHIVRVLLGGIARPIHALGQILSPAAAAVSRRSEALPASPRAPVADVSHHSPSEVLRSFKELRRLHIELPTGELGIDDGVLLKWKADFGSTLVSCVILGASSISSKPPTGYTQAESETATAATPDTSRETEEPGSLPDSLYTNGGLKLRVVWTISSLIAASARHYLLQPIIWNHELLESLDLTDADGQGVLTMDKRQLQELRVRPVFPSGSSHRTLMPALSMRLHYAPLIELPGGTLLKGATLVAIKPSEDALREGQGAGAAGPVGTCWISEAFEEPYRTAAKVLLKRRAYCLEMNSF

SEQ ID NO: 19783 - protein, 296 aa, Zea mays subsp. mays
  peptide (1)..(296): Ceres Seq. ID no. 14313494
  misc_feature (79)..(248): Pfam Name: Pfam Description:  Formin Homology 2 Domain
  misc_feature (37)..(250): NCBI GI NO: 32699068 NR Description: hypothetical protein FLJ35107 [Homo sapiens]
  misc_feature (3)..(239): NCBI GI NO: 11359723 NR Description: proteophosphoglycan, membrane-associated
  misc_feature (33)..(246): NCBI GI NO: 32699068 NR Description: hypothetical protein FLJ35107 [Homo sapiens]
  misc_feature (3)..(246): NCBI GI NO: 13592175 NR Description: ppg3 [Leishmania major]
  misc_feature (3)..(243): NCBI GI NO: 13592175 NR Description: ppg3 [Leishmania major]
  misc_feature (5)..(246): NCBI GI NO: 13592175 NR Description: ppg3 [Leishmania major]
  misc_feature (28)..(213): NCBI GI NO: 32699068 NR Description: hypothetical protein FLJ35107 [Homo sapiens]
  misc_feature (20)..(246): NCBI GI NO: 5420387 NR Description: proteophosphoglycan [Leishmania major]
  misc_feature (3)..(245): NCBI GI NO: 23017082 NR Description: hypothetical protein [Thermobifida fusca]
  misc_feature (3)..(246): NCBI GI NO: 13592175 NR Description: ppg3 [Leishmania major]
IKSPSKSAPPRPAPTPLPDPDLCAWLPATSVGWRRRGSSRRSARAAGPRPLTSSSGCTTRCCSTSSIASATSRRSAAAPSSRAASTRSCRSSTPSSSASTASSLTTRRPRPPPPPPPLPPHQAPRRGRRQPQPRAGAARSRTSCASCSAASPGPSTRSARSSPPPPRPSPGAPRHCPLPRARPSRTSLTTPPPRCSAPSRSCGAFTSSCPRASSALTTVCSLSGRPTSAPPSSAASSSAPRRSRPSRRQGTLRRNRKLLRPPLPIPVGRLKSRGAYLILFIQMEDSSFALSGPSAP

SEQ ID NO: 19784 - DNA, 1303 bp, Zea mays subsp. mays
  misc_feature (1)..(1303): Ceres Seq. ID no. 14313495
aatgctgctgttccctcccccgtttcaatgccttggcttcaagtgaccgtggtaaaagaaaatttgacgccacaacacacgtcggttgcttgtttacttgctgtggctttaattcgactgcagctgctgcggcttttattttgtcattagagagcagccgagcgccaccgtccatcacgagcttccatgttcaagccctgctctctgctcttataataaataaaagtcggcacatgattgcatcgcccccccgcctacagactccaaacaaaatcaagactgagagcaaaaccgtctcatctgatctagcgagcactccagctttctgcaatggcgattcaccgtctgatgcttcccatttctatccttctgatgagctcactctccggtacgccgccgcccctcgatggcacgcgcgataattaatcctgatccttccttacgatgccgtgtttgctgccttgtgcaggggccgtgtcgacgacgttcacgctggccaactcctgcggctacacggtgtggcctgggctgctgtcgagcgcgggctcggcgccgctgcccaccacgggcttcgcgctggcaccgggggagtcgcgcgtcgtggacgcgcccgcggcgtggtccggccgcatatggggccgcacgcgctgcgccgcggacaaccaggcctccggccggttcgcctgcgccacgggcgagtgcggctcgggggcggtggagtgcgcgggcggcggggccgcgccgcccaccacgctcgcggagttcacgctggacggcgccggcgggaacgacttctacgacgtgagcctggtggacgggtcgaacctgccgatggccgtggtgccgcagggcggcgccgggaccagctgcggcgccacgggctgcctggcggacctgaacgggccgtgccccgccgacctcagggtggtgggctccgacggcgccggcatcgcctgcaagagcgcgtgcggggcgtacgggcggccccaggactgctgcagcggcgactacggcacccccgcgacgtgccagccgtccgccagctcgcagttcttcaagaacgcgtgcccgcgcgcctacagttacgcctacgatgacgccacctccaccttcacctgcacgtccggcaccgccagttacctcgtcacgttctgcccaagcatctccaggtaacaagatcacagttgacctcacctacctagctagtggagatgcgagttgatcattttggcatgaataatggaacgaatgatcgatcagagatgatttcatgcccaagtaaacgttgcatgcaaactcacct

SEQ ID NO: 19785 - protein, 242 aa, Zea mays subsp. mays
  peptide (1)..(242): Ceres Seq. ID no. 14313496
  misc_feature (19)..(238): Pfam Name: Pfam Description:  Thaumatin family
  misc_feature (1)..(239): NCBI GI NO: 37531042 NR Description: putative thaumatin-like protein
  misc_feature (9)..(239): NCBI GI NO: 15233437 NR Description: thaumatin family [Arabidopsis thaliana]
  misc_feature (8)..(239): NCBI GI NO: 25296204 NR Description: hypothetical protein T20H2.19
  misc_feature (11)..(239): NCBI GI NO: 30686652 NR Description: thaumatin family [Arabidopsis thaliana]
  misc_feature (9)..(242): NCBI GI NO: 15227907 NR Description: thaumatin family [Arabidopsis thaliana]
  misc_feature (8)..(239): NCBI GI NO: 15222875 NR Description: thaumatin family [Arabidopsis thaliana]
  misc_feature (8)..(239): NCBI GI NO: 4105697 NR Description: thaumatin-like protein [Arabidopsis thaliana]
  misc_feature (1)..(239): NCBI GI NO: 6273383 NR Description: SCUTL1 [Vitis vinifera]
  misc_feature (14)..(238): NCBI GI NO: 7442169 NR Description: pathogenesis-related protein F20M13
  misc_feature (14)..(238): NCBI GI NO: 30692042 NR Description: thaumatin family [Arabidopsis thaliana]
MPCLLPCAGAVSTTFTLANSCGYTVWPGLLSSAGSAPLPTTGFALAPGESRVVDAPAAWSGRIWGRTRCAADNQASGRFACATGECGSGAVECAGGGAAPPTTLAEFTLDGAGGNDFYDVSLVDGSNLPMAVVPQGGAGTSCGATGCLADLNGPCPADLRVVGSDGAGIACKSACGAYGRPQDCCSGDYGTPATCQPSASSQFFKNACPRAYSYAYDDATSTFTCTSGTASYLVTFCPSISR

SEQ ID NO: 19786 - protein, 154 aa, Zea mays subsp. mays
  peptide (1)..(154): Ceres Seq. ID no. 14313497
MGPHALRRGQPGLRPVRLRHGRVRLGGGGVRGRRGRAAHHARGVHAGRRRRERLLRREPGGRVEPADGRGAAGRRRDQLRRHGLPGGPERAVPRRPQGGGLRRRRHRLQERVRGVRAAPGLLQRRLRHPRDVPAVRQLAVLQERVPARLQLRLR

SEQ ID NO: 19787 - protein, 139 aa, Zea mays subsp. mays
  peptide (1)..(139): Ceres Seq. ID no. 14313498
CCCSLPRFNALASSDRGKRKFDATTHVGCLFTCCGFNSTAAAAAFILSLESSRAPPSITSFHVQALLSALIINKSRHMIASPPRLQTPNKIKTESKTVSSDLASTPAFCNGDSPSDASHFYPSDELTLRYAAAPRWHAR

SEQ ID NO: 19788 - DNA, 613 bp, Zea mays subsp. mays
  misc_feature (1)..(613): Ceres Seq. ID no. 12594788
ctcatgtcggtacagccgagaaccgggaccgtgcatttctgggatggggctgctcttccttgagcggctcgagggggagggcgtgttcaggtgccggcgctgccgcgtggacgccgcctccaaggacgccatcatctccagggacttctacggccgcagcggccgcgcctacctcttcgaccacgttgtgaacatatgcctaggccctaatgaggatcggtatcttgtaaccgggctccatactgtgaatgacatctactgtagctgctgccaacagattcttggctggagatataaatggcaggagctctgcctaatcattaaaaggagagtccagaaaacacactgtacaggtccgaggaccgagacaagacaagacagactagcaaacacgacgtgaggaacgctcctaacagacccgtacaaagcagctaaaccactgcagcagccctaatactggggaacgtagctctcttgaaagtgaacacatcctctttatttcaattcgccttatgtcatttctgctaaaatggtggatgaacggtatacctttatattttcaacccagcatcgtgttatgacttctactgttatatccagaaatgcaacaatt

SEQ ID NO: 19789 - protein, 132 aa, Zea mays subsp. mays
  peptide (1)..(132): Ceres Seq. ID no. 12594789
  misc_feature (15)..(99): Pfam Name: Pfam Description:  Yippee putative zinc-binding protein
  misc_feature (15)..(99): NCBI GI NO: 37533560 NR Description: hypothetical protein
  misc_feature (15)..(99): NCBI GI NO: 34393694 NR Description: Yippee-like protein
  misc_feature (15)..(99): NCBI GI NO: 15238881 NR Description: zinc-binding protein-like; protein id: At5g53940
  misc_feature (15)..(100): NCBI GI NO: 18399156 NR Description: expressed protein; protein id: At3g11230
  misc_feature (15)..(100): NCBI GI NO: 21617953 NR Description: yippee-like protein [Arabidopsis thaliana]
  misc_feature (15)..(99): NCBI GI NO: 28273361 NR Description: putative zinc binding protein
  misc_feature (15)..(99): NCBI GI NO: 27923880 NR Description: Yippee-like protein
  misc_feature (29)..(99): NCBI GI NO: 31201993 NR Description: ENSANGP00000019801 [Anopheles gambiae]
  misc_feature (15)..(99): NCBI GI NO: 15225631 NR Description: unknown protein; protein id: At2g40110
  misc_feature (15)..(99): NCBI GI NO: 15232001 NR Description: Yippee-like protein; protein id: At3g08990.1
SCRYSREPGPCISGMGLLFLERLEGEGVFRCRRCRVDAASKDAIISRDFYGRSGRAYLFDHVVNICLGPNEDRYLVTGLHTVNDIYCSCCQQILGWRYKWQELCLIIKRRVQKTHCTGPRTETRQDRLANTT

SEQ ID NO: 19790 - protein, 118 aa, Zea mays subsp. mays
  peptide (1)..(118): Ceres Seq. ID no. 12594790
  misc_feature (1)..(85): Pfam Name: Pfam Description:  Yippee putative zinc-binding protein
  misc_feature (1)..(85): NCBI GI NO: 37533560 NR Description: hypothetical protein
  misc_feature (1)..(85): NCBI GI NO: 34393694 NR Description: Yippee-like protein
  misc_feature (1)..(85): NCBI GI NO: 15238881 NR Description: zinc-binding protein-like; protein id: At5g53940
  misc_feature (1)..(86): NCBI GI NO: 18399156 NR Description: expressed protein; protein id: At3g11230
  misc_feature (1)..(86): NCBI GI NO: 21617953 NR Description: yippee-like protein [Arabidopsis thaliana]
  misc_feature (1)..(85): NCBI GI NO: 28273361 NR Description: putative zinc binding protein
  misc_feature (1)..(85): NCBI GI NO: 27923880 NR Description: Yippee-like protein
  misc_feature (15)..(85): NCBI GI NO: 31201993 NR Description: ENSANGP00000019801 [Anopheles gambiae]
  misc_feature (1)..(85): NCBI GI NO: 15225631 NR Description: unknown protein; protein id: At2g40110
  misc_feature (1)..(85): NCBI GI NO: 15232001 NR Description: Yippee-like protein; protein id: At3g08990.1
MGLLFLERLEGEGVFRCRRCRVDAASKDAIISRDFYGRSGRAYLFDHVVNICLGPNEDRYLVTGLHTVNDIYCSCCQQILGWRYKWQELCLIIKRRVQKTHCTGPRTETRQDRLANTT

SEQ ID NO: 19791 - DNA, 815 bp, Zea mays subsp. mays
  misc_feature (1)..(815): Ceres Seq. ID no. 12636863
agaaaacactagtactgtcccctcccggacatcagagacagacacagtagagacgaggcagaggcttctagatctactgccagctcggcagcaacaaagccgaagcgtctcgcgtgcgcggccgccaccggggattagggatggcggcgaagaaggtgctcatgctctgcggcgactacatggaggactacgaggtcatggtcccgttccaagcgctgcaagcgtatggggtgtccgtggacgccgtctgccctagcaagaaggccggcgacatctgccgcaccgccgtccatcagctgaccggtcaccagacatactctgagacaaaaggccataatttcacactgaatgcttcatttgatgagattactgctagtgaatatgatggattggtaattcctggagggcgtgcaccagaataccttgcgatggatgaaaaggtgcttgacctagtcagaatgttctctggtgctaagaagcctattgcatcagtttgtcatggacagttgattttagcggcagcaagagtagtcgagaaccgtacctgcacagcatttccggctgttaaaccagttttggttgctgctggtgccaagtgggaagagcctgacacaatggcaaaatgcactgttgatggcaatctcatcacagcagcgacttataattctcatcccgaattcatcagcctatttgtcaaagcactcggaggttcagtggcaggctcagataagagaatactgttcctatgtggggactacatggaggattatgaggtcatggtcccattccaggctctccaagctcgtgggtgccat

SEQ ID NO: 19792 - protein, 225 aa, Zea mays subsp. mays
  peptide (1)..(225): Ceres Seq. ID no. 12636864
  misc_feature (3)..(224): NCBI GI NO: 15232958 NR Description: expressed protein; protein id: At3g02720.1
  misc_feature (2)..(193): NCBI GI NO: 15232958 NR Description: expressed protein; protein id: At3g02720.1
  misc_feature (2)..(193): NCBI GI NO: 21954064 NR Description: unknown protein [Arabidopsis thaliana]
  misc_feature (64)..(224): NCBI GI NO: 21954064 NR Description: unknown protein [Arabidopsis thaliana]
  misc_feature (1)..(192): NCBI GI NO: 17987076 NR Description: PROTEASE I [Brucella melitensis]
  misc_feature (1)..(192): NCBI GI NO: 23502074 NR Description: ThiJ/PfpI family protein [Brucella suis 1330]
  misc_feature (1)..(189): NCBI GI NO: 23475025 NR Description: hypothetical protein
  misc_feature (3)..(189): NCBI GI NO: 22978710 NR Description: hypothetical protein [Ralstonia metallidurans]
  misc_feature (1)..(193): NCBI GI NO: 22298105 NR Description: ORF_ID:tll0562~hypothetical protein
  misc_feature (1)..(193): NCBI GI NO: 15599532 NR Description: conserved hypothetical protein
MAAKKVLMLCGDYMEDYEVMVPFQALQAYGVSVDAVCPSKKAGDICRTAVHQLTGHQTYSETKGHNFTLNASFDEITASEYDGLVIPGGRAPEYLAMDEKVLDLVRMFSGAKKPIASVCHGQLILAAARVVENRTCTAFPAVKPVLVAAGAKWEEPDTMAKCTVDGNLITAATYNSHPEFISLFVKALGGSVAGSDKRILFLCGDYMEDYEVMVPFQALQARGCH

SEQ ID NO: 19793 - protein, 218 aa, Zea mays subsp. mays
  peptide (1)..(218): Ceres Seq. ID no. 12636865
  misc_feature (1)..(217): NCBI GI NO: 15232958 NR Description: expressed protein; protein id: At3g02720.1
  misc_feature (1)..(186): NCBI GI NO: 15232958 NR Description: expressed protein; protein id: At3g02720.1
  misc_feature (1)..(186): NCBI GI NO: 21954064 NR Description: unknown protein [Arabidopsis thaliana]
  misc_feature (57)..(217): NCBI GI NO: 21954064 NR Description: unknown protein [Arabidopsis thaliana]
  misc_feature (1)..(185): NCBI GI NO: 17987076 NR Description: PROTEASE I [Brucella melitensis]
  misc_feature (1)..(185): NCBI GI NO: 23502074 NR Description: ThiJ/PfpI family protein [Brucella suis 1330]
  misc_feature (1)..(182): NCBI GI NO: 23475025 NR Description: hypothetical protein
  misc_feature (1)..(182): NCBI GI NO: 22978710 NR Description: hypothetical protein [Ralstonia metallidurans]
  misc_feature (1)..(186): NCBI GI NO: 22298105 NR Description: ORF_ID:tll0562~hypothetical protein
  misc_feature (1)..(186): NCBI GI NO: 15599532 NR Description: conserved hypothetical protein
MLCGDYMEDYEVMVPFQALQAYGVSVDAVCPSKKAGDICRTAVHQLTGHQTYSETKGHNFTLNASFDEITASEYDGLVIPGGRAPEYLAMDEKVLDLVRMFSGAKKPIASVCHGQLILAAARVVENRTCTAFPAVKPVLVAAGAKWEEPDTMAKCTVDGNLITAATYNSHPEFISLFVKALGGSVAGSDKRILFLCGDYMEDYEVMVPFQALQARGCH

SEQ ID NO: 19794 - protein, 212 aa, Zea mays subsp. mays
  peptide (1)..(212): Ceres Seq. ID no. 12636866
  misc_feature (1)..(211): NCBI GI NO: 15232958 NR Description: expressed protein; protein id: At3g02720.1
  misc_feature (1)..(180): NCBI GI NO: 15232958 NR Description: expressed protein; protein id: At3g02720.1
  misc_feature (1)..(180): NCBI GI NO: 21954064 NR Description: unknown protein [Arabidopsis thaliana]
  misc_feature (51)..(211): NCBI GI NO: 21954064 NR Description: unknown protein [Arabidopsis thaliana]
  misc_feature (1)..(179): NCBI GI NO: 17987076 NR Description: PROTEASE I [Brucella melitensis]
  misc_feature (1)..(179): NCBI GI NO: 23502074 NR Description: ThiJ/PfpI family protein [Brucella suis 1330]
  misc_feature (1)..(176): NCBI GI NO: 23475025 NR Description: hypothetical protein
  misc_feature (1)..(176): NCBI GI NO: 22978710 NR Description: hypothetical protein [Ralstonia metallidurans]
  misc_feature (1)..(180): NCBI GI NO: 22298105 NR Description: ORF_ID:tll0562~hypothetical protein
  misc_feature (1)..(180): NCBI GI NO: 15599532 NR Description: conserved hypothetical protein
MEDYEVMVPFQALQAYGVSVDAVCPSKKAGDICRTAVHQLTGHQTYSETKGHNFTLNASFDEITASEYDGLVIPGGRAPEYLAMDEKVLDLVRMFSGAKKPIASVCHGQLILAAARVVENRTCTAFPAVKPVLVAAGAKWEEPDTMAKCTVDGNLITAATYNSHPEFISLFVKALGGSVAGSDKRILFLCGDYMEDYEVMVPFQALQARGCH

SEQ ID NO: 19795 - DNA, 1534 bp, Zea mays subsp. mays
  misc_feature (1)..(1534): Ceres Seq. ID no. 13624112
aaagacacacgttcacatcaatccaccattgaccaattcctcccacactgaagccaccacaccaccacaacagcagcctttgtagcaagcacacactcgccacaatgcgcacgcccttcgtggatcctcacagcgccgccggccggctcaagcagcgcctggcaaggatcctcacgcgctccacctgcaccaccaataacgccgctgccgccagctcgggcggcacggccacggccacggccttcgtcagcctcgccaagaccaacaacgcccacaccgccgcctcctcatctcacccggagccggaagcgccgccctccccgtacttctgcacgccctgcacctacgactacgagcgccccaaggccgaccgcgggacgcgcccgcgccgcacccgcagcgcctcgctcatacacatctccgtcgactgcacgggcggggccgcctccggccgccgctccgcccactccgacgcgccgcttctgcagcacctcttgtcggaacaggtgccggcgagggacgtcgtcggcggcacgaagcagagcaagagcggcggcaggagcaagctgacgacgacgcggtcgtctccgtcggcgtcgaggcggcactgctcgtcgtcgtcctcctcctggggccgcgcccgcgcgcgccggcccagcagcacgcccacgccctacagctggtcgtcgtcgtcgtcgtcgcggtcgtccgccaccgcgacggacgacgagctcgcgccgttcagcggcagcgacgacgaggagggcggcggcggcggcgaggcggccgacatgcgggcgctcttctcgtccctcagcttctcgtccgaccccacatcatccgagttctaccgcaccaacggcggccgcagcggcaacggcaacgccagcaggaggagccacaggaacacggcgagtcgtcgtcgcggccgccgcgcgcgcgcgccacggcgtgcgctgtcgagatccagcggcggcgacccggcagcaccgcccgacgccttccggccgctggtgtccgtggagacgacgaggcgcactacggagcgcagcgagaggagcaaggaagacaagggtctcaataacgccaagaagctgacgatgacgatgctgggcgcggccgcagccgcggaggaggaggccgccggcgcgggcatggctgtggtgaagcgctcgagcaacccttacctggacttccgcagctccatggtggagatggtggtggagcggcgcatcgccagcgtggggaagatggaggagctcctgggctcgtacctctcgctcaactcgccgcgccaccacccggccatcctcgctgccttcgaggacgtctgggaggccgtcttcggcgaggagtgactcgactgggagcgtcaagcgtgatctctttcagagtactgtttcaaaacttctacgtacatgccaatgtataaattggcaccgttttgccacgccgagatgctgtggtgctcatcgtatgtaacgagcttcatatacatggtgataattgagcgcctgagtggctgagttgttct

SEQ ID NO: 19796 - protein, 417 aa, Zea mays subsp. mays
  peptide (1)..(417): Ceres Seq. ID no. 13624113
  misc_feature (357)..(416): Pfam Name: Pfam Description:  Protein of unknown function, DUF623
  misc_feature (1)..(209): NCBI GI NO: 34912854 NR Description: P0006C01.11
  misc_feature (149)..(417): NCBI GI NO: 34912854 NR Description: P0006C01.11
  misc_feature (253)..(415): NCBI GI NO: 34904220 NR Description: P0443E07.26
  misc_feature (252)..(414): NCBI GI NO: 15224185 NR Description: expressed protein [Arabidopsis thaliana]
  misc_feature (233)..(410): NCBI GI NO: 34908542 NR Description: P0423B08.21
  misc_feature (314)..(414): NCBI GI NO: 15241148 NR Description: hypothetical protein [Arabidopsis thaliana]
  misc_feature (34)..(257): NCBI GI NO: 13592175 NR Description: ppg3 [Leishmania major]
MRTPFVDPHSAAGRLKQRLARILTRSTCTTNNAAAASSGGTATATAFVSLAKTNNAHTAASSSHPEPEAPPSPYFCTPCTYDYERPKADRGTRPRRTRSASLIHISVDCTGGAASGRRSAHSDAPLLQHLLSEQVPARDVVGGTKQSKSGGRSKLTTTRSSPSASRRHCSSSSSSWGRARARRPSSTPTPYSWSSSSSSRSSATATDDELAPFSGSDDEEGGGGGEAADMRALFSSLSFSSDPTSSEFYRTNGGRSGNGNASRRSHRNTASRRRGRRARAPRRALSRSSGGDPAAPPDAFRPLVSVETTRRTTERSERSKEDKGLNNAKKLTMTMLGAAAAAEEEAAGAGMAVVKRSSNPYLDFRSSMVEMVVERRIASVGKMEELLGSYLSLNSPRHHPAILAAFEDVWEAVFGEE

SEQ ID NO: 19797 - DNA, 890 bp, Zea mays subsp. mays
  misc_feature (1)..(890): Ceres Seq. ID no. 13600020
atccaccacactacaactcgacaccgagaaaagcgcagcaaagcaacgcaaagcccacgccgctacagtgctacagcgagcgagcctcttgcctgccgctacgagccaacgactcgaacgcatacactccaatggcagcgacggtgatggcctccatgagccccctcgcctccgccaccccaggcgcgcgtcgcgctttccctgtacggctgctgctccaggcatctgcgctcgcgccgcgccagcgcgccttggccgtgaccgtgagggcccagagcgacgacgccgaggccgagccaaaggaggaggcggcggcggccaccaccccggcgccaaagtccaaggcggcggcgacggcgagccccgggctgtgggacgcgctggcgttcagcggcccggctcccgagcgcatcaacggccgcctcgccatggtgggcttcgtgtcggcgctcgccgtcgaggcgtcccgcggcgggggcctcctctcgcaggccggcagcgggtccgggctcgcctggttcgcggccacggctgctgtgctgtccgtggcctcgctggtgccgctgctcaggggcgacagcgccgaggccaggagcggcgccgtcatgagcgccgacgccgagctctggaacggccgcttcgccatgctcggcctcgtcgcgctcgccttcactgagtacctcaccggcgcaccgttcatcaacgcgtagatgtgttgtgtattttggaactgtgtatgctagtcaggcagtcagctagcggcaccatgcgcgtagtaggagcctagctacagttggacgagctactttttattgggatttactagtcttgggccatttacttctcttcttattaaagtccactcataaatcagaaatccaattttatct

SEQ ID NO: 19798 - protein, 235 aa, Zea mays subsp. mays
  peptide (1)..(235): Ceres Seq. ID no. 13600021
  misc_feature (44)..(234): NCBI GI NO: 28971958 NR Description: putative low molecular mass early light-inducedprotein
  misc_feature (44)..(234): NCBI GI NO: 34904610 NR Description: putative early light-inducible protein
  misc_feature (50)..(234): NCBI GI NO: 28971959 NR Description: putative low molecular mass early light-inducedprotein
  misc_feature (44)..(234): NCBI GI NO: 14029814 NR Description: early light-inducible protein ELIP [Zea mays]
  misc_feature (100)..(234): NCBI GI NO: 119286 NR Description: Low molecular mass early light-inducible proteinHV90
  misc_feature (27)..(234): NCBI GI NO: 119284 NR Description: High molecular mass early light-inducible proteinHV58
  misc_feature (100)..(234): NCBI GI NO: 119285 NR Description: Low molecular mass early light-inducible proteinHV60
  misc_feature (100)..(234): NCBI GI NO: 4521272 NR Description: early light-inducible protein [Triticum aestivum]
  misc_feature (44)..(229): NCBI GI NO: 28194659 NR Description: putative early light induced protein
  misc_feature (55)..(233): NCBI GI NO: 7447855 NR Description: early light-induced protein homolog SDi-1
PPHYNSTPRKAQQSNAKPTPLQCYSERASCLPLRANDSNAYTPMAATVMASMSPLASATPGARRAFPVRLLLQASALAPRQRALAVTVRAQSDDAEAEPKEEAAAATTPAPKSKAAATASPGLWDALAFSGPAPERINGRLAMVGFVSALAVEASRGGGLLSQAGSGSGLAWFAATAAVLSVASLVPLLRGDSAEARSGAVMSADAELWNGRFAMLGLVALAFTEYLTGAPFINA

SEQ ID NO: 19799 - protein, 224 aa, Zea mays subsp. mays
  peptide (1)..(224): Ceres Seq. ID no. 13600022
  misc_feature (131)..(201): NCBI GI NO: 7447858 NR Description: early light-induced protein
STTLQLDTEKSAAKQRKAHAATVLQRASLLPAATSQRLERIHSNGSDGDGLHEPPRLRHPRRASRFPCTAAAPGICARAAPARLGRDREGPERRRRGRAKGGGGGGHHPGAKVQGGGDGEPRAVGRAGVQRPGSRAHQRPPRHGGLRVGARRRGVPRRGPPLAGRQRVRARLVRGHGCCAVRGLAGAAAQGRQRRGQERRRHERRRRALERPLRHARPRRARLH

SEQ ID NO: 19800 - protein, 192 aa, Zea mays subsp. mays
  peptide (1)..(192): Ceres Seq. ID no. 13600023
  misc_feature (1)..(191): NCBI GI NO: 28971958 NR Description: putative low molecular mass early light-inducedprotein
  misc_feature (1)..(191): NCBI GI NO: 34904610 NR Description: putative early light-inducible protein
  misc_feature (7)..(191): NCBI GI NO: 28971959 NR Description: putative low molecular mass early light-inducedprotein
  misc_feature (1)..(191): NCBI GI NO: 14029814 NR Description: early light-inducible protein ELIP [Zea mays]
  misc_feature (57)..(191): NCBI GI NO: 119286 NR Description: Low molecular mass early light-inducible proteinHV90
  misc_feature (1)..(191): NCBI GI NO: 119284 NR Description: High molecular mass early light-inducible proteinHV58
  misc_feature (57)..(191): NCBI GI NO: 119285 NR Description: Low molecular mass early light-inducible proteinHV60
  misc_feature (57)..(191): NCBI GI NO: 4521272 NR Description: early light-inducible protein [Triticum aestivum]
  misc_feature (1)..(186): NCBI GI NO: 28194659 NR Description: putative early light induced protein
  misc_feature (12)..(190): NCBI GI NO: 7447855 NR Description: early light-induced protein homolog SDi-1
MAATVMASMSPLASATPGARRAFPVRLLLQASALAPRQRALAVTVRAQSDDAEAEPKEEAAAATTPAPKSKAAATASPGLWDALAFSGPAPERINGRLAMVGFVSALAVEASRGGGLLSQAGSGSGLAWFAATAAVLSVASLVPLLRGDSAEARSGAVMSADAELWNGRFAMLGLVALAFTEYLTGAPFINA

SEQ ID NO: 19801 - DNA, 893 bp, Zea mays subsp. mays
  misc_feature (1)..(893): Ceres Seq. ID no. 13624040
acagcgccaagggcaccaccagcaaggaccaagacagagcacagcgcagctcgtcggcctctcgacgccggttgctgcaaccaccgcctttattgcccacgcgggccgtgcggaagaagcaagaagacacgccaatggaggtcgccgcagcatcggcagcgggctacggattcaaggccgacgacgacgttgacagcctcagggcgacggagctcaggcttggcctgccgggcacggaggaggaggaggccgaggagtcccagaacaaggcgccgccgccgccgccgtcgacgcccagaggcaagaagcgcgacgtcgtcgccagcagcgggcccgaggatgcgcccaagaagcgcgactgcgagaccgacaccgatgccgcgccgccgccggccgccaaggctcagctggtgggatggccgccggtgaggtcgtacaggaagagctgcttccagcagcaggcggcggccaagaacaagccggcggcagcgctggcggaggaggccccggccgccggcgggctgttcgtgaaggtgagcatggacggcgccccctacctcaggaaggtggacctaaagatgtacaagggctaccgcgagctgcgggaggcgctggaggccatgttcctctgcttctccggcgccggcgccgccgacgcgcccgccgtcaacccctccgacttcgccgtcacctacgaggacaaggacggcgacctcatgctcgtcggcgacgtgcccttcggcatgttcatcagcacctgcaagaggctgaggatcatgaaggggtcagaagcgagagggctcggctcggccaagaacaactgatgatgattgatgaggcgtctatcgcatgcttgtgctgtgcgtgcgtgcatgcgccagcaaagcttatcg

SEQ ID NO: 19802 - protein, 273 aa, Zea mays subsp. mays
  peptide (1)..(273): Ceres Seq. ID no. 13624041
  misc_feature (65)..(270): Pfam Name: Pfam Description:  AUX/IAA family
  misc_feature (65)..(270): NCBI GI NO: 20269063 NR Description: aux/IAA protein
  misc_feature (59)..(265): NCBI GI NO: 34393534 NR Description: putative auxin-induced protein
  misc_feature (59)..(267): NCBI GI NO: 32400272 NR Description: IAA1 protein [Triticum aestivum]
  misc_feature (64)..(265): NCBI GI NO: 34897206 NR Description: putative auxin-induced protein
  misc_feature (111)..(268): NCBI GI NO: 15239950 NR Description: auxin-responsive protein IAA4
  misc_feature (61)..(93): NCBI GI NO: 15239950 NR Description: auxin-responsive protein IAA4
  misc_feature (111)..(268): NCBI GI NO: 99663 NR Description: auxin-induced protein AUX2-11
  misc_feature (61)..(93): NCBI GI NO: 99663 NR Description: auxin-induced protein AUX2-11
  misc_feature (44)..(267): NCBI GI NO: 34904314 NR Description: unnamed protein product
  misc_feature (64)..(268): NCBI GI NO: 11131103 NR Description: Auxin-induced protein 22D
SAKGTTSKDQDRAQRSSSASRRRLLQPPPLLPTRAVRKKQEDTPMEVAAASAAGYGFKADDDVDSLRATELRLGLPGTEEEEAEESQNKAPPPPPSTPRGKKRDVVASSGPEDAPKKRDCETDTDAAPPPAAKAQLVGWPPVRSYRKSCFQQQAAAKNKPAAALAEEAPAAGGLFVKVSMDGAPYLRKVDLKMYKGYRELREALEAMFLCFSGAGAADAPAVNPSDFAVTYEDKDGDLMLVGDVPFGMFISTCKRLRIMKGSEARGLGSAKNN

SEQ ID NO: 19803 - protein, 229 aa, Zea mays subsp. mays
  peptide (1)..(229): Ceres Seq. ID no. 13624042
  misc_feature (21)..(226): Pfam Name: Pfam Description:  AUX/IAA family
  misc_feature (21)..(226): NCBI GI NO: 20269063 NR Description: aux/IAA protein
  misc_feature (15)..(221): NCBI GI NO: 34393534 NR Description: putative auxin-induced protein
  misc_feature (15)..(223): NCBI GI NO: 32400272 NR Description: IAA1 protein [Triticum aestivum]
  misc_feature (20)..(221): NCBI GI NO: 34897206 NR Description: putative auxin-induced protein
  misc_feature (67)..(224): NCBI GI NO: 15239950 NR Description: auxin-responsive protein IAA4
  misc_feature (17)..(49): NCBI GI NO: 15239950 NR Description: auxin-responsive protein IAA4
  misc_feature (67)..(224): NCBI GI NO: 99663 NR Description: auxin-induced protein AUX2-11
  misc_feature (17)..(49): NCBI GI NO: 99663 NR Description: auxin-induced protein AUX2-11
  misc_feature (1)..(223): NCBI GI NO: 34904314 NR Description: unnamed protein product
  misc_feature (20)..(224): NCBI GI NO: 11131103 NR Description: Auxin-induced protein 22D
MEVAAASAAGYGFKADDDVDSLRATELRLGLPGTEEEEAEESQNKAPPPPPSTPRGKKRDVVASSGPEDAPKKRDCETDTDAAPPPAAKAQLVGWPPVRSYRKSCFQQQAAAKNKPAAALAEEAPAAGGLFVKVSMDGAPYLRKVDLKMYKGYRELREALEAMFLCFSGAGAADAPAVNPSDFAVTYEDKDGDLMLVGDVPFGMFISTCKRLRIMKGSEARGLGSAKNN

SEQ ID NO: 19804 - protein, 159 aa, Zea mays subsp. mays
  peptide (1)..(159): Ceres Seq. ID no. 13624043
  misc_feature (1)..(148): NCBI GI NO: 93505 NR Description: ORF5 protein - Orf virus (strain NZ2)
MAAGEVVQEELLPAAGGGQEQAGGSAGGGGPGRRRAVREGEHGRRPLPQEGGPKDVQGLPRAAGGAGGHVPLLLRRRRRRRARRQPLRLRRHLRGQGRRPHARRRRALRHVHQHLQEAEDHEGVRSERARLGQEQLMMIDEASIACLCCACVHAPAKLI

SEQ ID NO: 19805 - DNA, 974 bp, Zea mays subsp. mays
  misc_feature (1)..(974): Ceres Seq. ID no. 14302646
accctttccatgaccatgagtccatgaccataactgcactgcatgcatggttgcacatccttctgccatcaaagaaaccatgtgaccgatcgacccatcaggttcccggaggtggtgaagctgcaggacgtgtgctggctggagatcagcgggaagctcagtctgtcgctgctgtctccggggacgacctacgcggcgcacctcgtcttcgccatagccgacgactcgtacggcctcgagtgccacgtcgggatgccggcgcttaaggccacggtcaccgtcaccgtctccggcaagacaacgatggcggagcacgacatctgcctgcaccacatgcagggcgaggcggaggccgcggcgcaccggcggacgcagcagtacgtgcgcctccgcaggggctacggcggcggagggaaggcgacggtgctgacgacgacgagggaggccgaccccgacatcaggtgcccccggcggaggggcgacgggtgggccgaggtcgaggtgggcgagttcgccgtggcgggcgacgagggcgacgccgcggacgtggaggtgacggtgcaggaggatagcctgcgctggaagaggggcctcgtggtgctgggcgtcgacatccggcccaagcagcacacgccaacgccatgctagctagctagcgcaatggccggtgcccgctgcccggtggattttattttttatacaaaaatctagggagaaattaacaagctaagtgctgatcaaattagatccagtcaggaacaggtaggcgatgtgcccactgctcaataaggccaagctttaaaacctgtatcttttatggacagactagtgcacttttaaaacggccgtccatttcttagcgctttagcttctctgaatatgcgcatggtgtattatttattattgtgtcagttgcttgcatgcaggctacgtacgtagcccataaaaccgtgatgaaattataggtgtgtttt

SEQ ID NO: 19806 - protein, 201 aa, Zea mays subsp. mays
  peptide (1)..(201): Ceres Seq. ID no. 14302647
  misc_feature (20)..(195): NCBI GI NO: 38454184 NR Description: At2g02230 [Arabidopsis thaliana]
  misc_feature (20)..(195): NCBI GI NO: 15226908 NR Description: F-box protein (SKP1 interacting partner 3-related)
  misc_feature (20)..(78): NCBI GI NO: 15226939 NR Description: F-box protein (SKP1 interacting partner 3-related)
  misc_feature (142)..(193): NCBI GI NO: 15226939 NR Description: F-box protein (SKP1 interacting partner 3-related)
  misc_feature (20)..(112): NCBI GI NO: 21592660 NR Description: phloem-specific lectin PP2-like protein
  misc_feature (140)..(194): NCBI GI NO: 21592660 NR Description: phloem-specific lectin PP2-like protein
  misc_feature (20)..(112): NCBI GI NO: 25366264 NR Description: hypothetical protein
  misc_feature (140)..(194): NCBI GI NO: 25366264 NR Description: hypothetical protein
  misc_feature (20)..(112): NCBI GI NO: 18390986 NR Description: expressed protein [Arabidopsis thaliana]
  misc_feature (140)..(194): NCBI GI NO: 18390986 NR Description: expressed protein [Arabidopsis thaliana]
MHGCTSFCHQRNHVTDRPIRFPEVVKLQDVCWLEISGKLSLSLLSPGTTYAAHLVFAIADDSYGLECHVGMPALKATVTVTVSGKTTMAEHDICLHHMQGEAEAAAHRRTQQYVRLRRGYGGGGKATVLTTTREADPDIRCPRRRGDGWAEVEVGEFAVAGDEGDAADVEVTVQEDSLRWKRGLVVLGVDIRPKQHTPTPC

SEQ ID NO: 19807 - protein, 131 aa, Zea mays subsp. mays
  peptide (1)..(131): Ceres Seq. ID no. 14302648
  misc_feature (1)..(125): NCBI GI NO: 38454184 NR Description: At2g02230 [Arabidopsis thaliana]
  misc_feature (1)..(125): NCBI GI NO: 15226908 NR Description: F-box protein (SKP1 interacting partner 3-related)
  misc_feature (72)..(123): NCBI GI NO: 15226939 NR Description: F-box protein (SKP1 interacting partner 3-related)
  misc_feature (1)..(42): NCBI GI NO: 21592660 NR Description: phloem-specific lectin PP2-like protein
  misc_feature (70)..(124): NCBI GI NO: 21592660 NR Description: phloem-specific lectin PP2-like protein
  misc_feature (1)..(42): NCBI GI NO: 25366264 NR Description: hypothetical protein
  misc_feature (70)..(124): NCBI GI NO: 25366264 NR Description: hypothetical protein
  misc_feature (1)..(42): NCBI GI NO: 18390986 NR Description: expressed protein [Arabidopsis thaliana]
  misc_feature (70)..(124): NCBI GI NO: 18390986 NR Description: expressed protein [Arabidopsis thaliana]
  misc_feature (72)..(126): NCBI GI NO: 30677987 NR Description: F-box protein (SKP1 interacting partner 3-related)
MPALKATVTVTVSGKTTMAEHDICLHHMQGEAEAAAHRRTQQYVRLRRGYGGGGKATVLTTTREADPDIRCPRRRGDGWAEVEVGEFAVAGDEGDAADVEVTVQEDSLRWKRGLVVLGVDIRPKQHTPTPC

SEQ ID NO: 19808 - protein, 114 aa, Zea mays subsp. mays
  peptide (1)..(114): Ceres Seq. ID no. 14302649
  misc_feature (1)..(108): NCBI GI NO: 38454184 NR Description: At2g02230 [Arabidopsis thaliana]
  misc_feature (1)..(108): NCBI GI NO: 15226908 NR Description: F-box protein (SKP1 interacting partner 3-related)
  misc_feature (55)..(106): NCBI GI NO: 15226939 NR Description: F-box protein (SKP1 interacting partner 3-related)
  misc_feature (1)..(25): NCBI GI NO: 21592660 NR Description: phloem-specific lectin PP2-like protein
  misc_feature (53)..(107): NCBI GI NO: 21592660 NR Description: phloem-specific lectin PP2-like protein
  misc_feature (1)..(25): NCBI GI NO: 25366264 NR Description: hypothetical protein
  misc_feature (53)..(107): NCBI GI NO: 25366264 NR Description: hypothetical protein
  misc_feature (1)..(25): NCBI GI NO: 18390986 NR Description: expressed protein [Arabidopsis thaliana]
  misc_feature (53)..(107): NCBI GI NO: 18390986 NR Description: expressed protein [Arabidopsis thaliana]
  misc_feature (55)..(109): NCBI GI NO: 30677987 NR Description: F-box protein (SKP1 interacting partner 3-related)
MAEHDICLHHMQGEAEAAAHRRTQQYVRLRRGYGGGGKATVLTTTREADPDIRCPRRRGDGWAEVEVGEFAVAGDEGDAADVEVTVQEDSLRWKRGLVVLGVDIRPKQHTPTPC

SEQ ID NO: 19809 - DNA, 935 bp, Zea mays subsp. mays
  misc_feature (1)..(935): Ceres Seq. ID no. 12636872
aaaacttcgcagtcagcatctggactctggagtctgttgtctgcgtgtgtgcggctggttctctctgccaccgcacgagtcgcagcagagagggaaaaaccctagcagcctcccttcgtcccaactcccaaccccgcgaccccatggccgcatctaacggcggcggcggccccggcccgatctccgcagaggcggcgcttggagaggctatcaagctggtgttcgggcggtggacggcgctgcagatggcggtggagaaccagtggggcggccgcgactcccgcgccaaggccgaccagttgggcgagtccatcctattctggttctgccgcactaagggtccatattatttcgaagacttggttgatatgatgtatgacaaaatttctgaatcttttaatgcctactttgaggataatagtattgaggaggttgctgaacagtttttgatcatacatgaagaatgcctgcaaaacaacttttcgtctatagagaagctaaggaattctcgtgttccggggaatgctgtttctcaaagtagacagatagtgggcgatgacgacgatgacagtgatagctcagatgacggtgatgacacatcgatggtggctgatgaagaggctgggccagaagagatggcagtggacagaccaaggccccccaagcctactccagacgccgatgggtggactgttgtgcctcctaggcgtggtggtcgcagcaagaaatagagtacaatggtagctgctggctttctcgcggaatgtttgttgagtgctgcggttccatattcacttgtatcgctcgatatttgacacgacatggatgttgagtgtgtagtatgatgcttggtttgccaccgcccaccaatttggtgtaaacaaggtaattattatagatgcatcctgtgatcaggttttgagtgttgcagagtc

SEQ ID NO: 19810 - protein, 242 aa, Zea mays subsp. mays
  peptide (1)..(242): Ceres Seq. ID no. 12636873
  misc_feature (60)..(236): NCBI GI NO: 15241108 NR Description: putative protein; protein id: At5g27990
  misc_feature (64)..(211): NCBI GI NO: 23613422 NR Description: hypothetical protein [Plasmodium falciparum 3D7]
  misc_feature (61)..(232): NCBI GI NO: 27545344 NR Description: hypothetical protein DT1P1A10 (human) - like
  misc_feature (77)..(232): NCBI GI NO: 24308388 NR Description: hypothetical protein DT1P1A10 [Homo sapiens]
  misc_feature (45)..(216): NCBI GI NO: 40745755 NR Description: hypothetical protein AN2079.2
  misc_feature (67)..(232): NCBI GI NO: 19483873 NR Description: Similar to hypothetical protein DT1P1A10
  misc_feature (67)..(232): NCBI GI NO: 30424736 NR Description: RIKEN cDNA 2310007F12 [Mus musculus]
  misc_feature (67)..(232): NCBI GI NO: 27708338 NR Description: similar to hypothetical protein DT1P1A10
NFAVSIWTLESVVCVCAAGSLCHRTSRSREGKTLAASLRPNSQPRDPMAASNGGGGPGPISAEAALGEAIKLVFGRWTALQMAVENQWGGRDSRAKADQLGESILFWFCRTKGPYYFEDLVDMMYDKISESFNAYFEDNSIEEVAEQFLIIHEECLQNNFSSIEKLRNSRVPGNAVSQSRQIVGDDDDDSDSSDDGDDTSMVADEEAGPEEMAVDRPRPPKPTPDADGWTVVPPRRGGRSKK

SEQ ID NO: 19811 - protein, 195 aa, Zea mays subsp. mays
  peptide (1)..(195): Ceres Seq. ID no. 12636874
  misc_feature (13)..(189): NCBI GI NO: 15241108 NR Description: putative protein; protein id: At5g27990
  misc_feature (17)..(164): NCBI GI NO: 23613422 NR Description: hypothetical protein [Plasmodium falciparum 3D7]
  misc_feature (14)..(185): NCBI GI NO: 27545344 NR Description: hypothetical protein DT1P1A10 (human) - like
  misc_feature (30)..(185): NCBI GI NO: 24308388 NR Description: hypothetical protein DT1P1A10 [Homo sapiens]
  misc_feature (1)..(169): NCBI GI NO: 40745755 NR Description: hypothetical protein AN2079.2
  misc_feature (20)..(185): NCBI GI NO: 19483873 NR Description: Similar to hypothetical protein DT1P1A10
  misc_feature (20)..(185): NCBI GI NO: 30424736 NR Description: RIKEN cDNA 2310007F12 [Mus musculus]
  misc_feature (20)..(185): NCBI GI NO: 27708338 NR Description: similar to hypothetical protein DT1P1A10
MAASNGGGGPGPISAEAALGEAIKLVFGRWTALQMAVENQWGGRDSRAKADQLGESILFWFCRTKGPYYFEDLVDMMYDKISESFNAYFEDNSIEEVAEQFLIIHEECLQNNFSSIEKLRNSRVPGNAVSQSRQIVGDDDDDSDSSDDGDDTSMVADEEAGPEEMAVDRPRPPKPTPDADGWTVVPPRRGGRSKK

SEQ ID NO: 19812 - protein, 161 aa, Zea mays subsp. mays
  peptide (1)..(161): Ceres Seq. ID no. 12636875
  misc_feature (1)..(155): NCBI GI NO: 15241108 NR Description: putative protein; protein id: At5g27990
  misc_feature (1)..(130): NCBI GI NO: 23613422 NR Description: hypothetical protein [Plasmodium falciparum 3D7]
  misc_feature (1)..(151): NCBI GI NO: 27545344 NR Description: hypothetical protein DT1P1A10 (human) - like
  misc_feature (1)..(151): NCBI GI NO: 24308388 NR Description: hypothetical protein DT1P1A10 [Homo sapiens]
  misc_feature (1)..(135): NCBI GI NO: 40745755 NR Description: hypothetical protein AN2079.2
  misc_feature (1)..(151): NCBI GI NO: 19483873 NR Description: Similar to hypothetical protein DT1P1A10
  misc_feature (1)..(151): NCBI GI NO: 30424736 NR Description: RIKEN cDNA 2310007F12 [Mus musculus]
  misc_feature (1)..(151): NCBI GI NO: 27708338 NR Description: similar to hypothetical protein DT1P1A10
MAVENQWGGRDSRAKADQLGESILFWFCRTKGPYYFEDLVDMMYDKISESFNAYFEDNSIEEVAEQFLIIHEECLQNNFSSIEKLRNSRVPGNAVSQSRQIVGDDDDDSDSSDDGDDTSMVADEEAGPEEMAVDRPRPPKPTPDADGWTVVPPRRGGRSKK

SEQ ID NO: 19813 - DNA, 1654 bp, Zea mays subsp. mays
  misc_feature (1)..(1654): Ceres Seq. ID no. 13600071
gaattcgcgctcttcacccatttccccatctccgacctcccccttcctctcccccctgccgctccccgcgccgagaaggagaaccccagccgccgcgcagcgcgccgcccatggcctcctcgtcggagaacgcggctgtgccgccggaggaggagccccaggccccgccgccgccggacacagagcctaccgaggcggcgcccggcgaggcggaggatgagccgcaaaccctagagcgggcgcaggagctcttcgacaggggttccaaggccatcgaggatgaggacttcgtcgacgccgtagactgcctcagccgagcgctcgagatcagggcttcacattatggagagctcgcgccggagtgtgccagcacatacttcaaatatggatgtgccctgctatacaaagctcaggaggagagtgatgttttgggaaatgttcccaagagcttgccaaatgaagactcagtgaagagtacagctactaaagatgacagtggaacctcaaaggtctctggtaccaatgtggaggatgctgcgtcatcagaaaaagttgatgctgaagaaggtcaaaactcaaatggcaaaaatcaggagaatgggaatggtgaagttgagagagatgatgatgacgacgacgatgatgagaagatgggagatgaagaggataatgatttggatctttcttggaaaatgttggacattgctagggcaatagttgagaagagccaagataacactatggagaaagtaaaaatatattctgctcttgctgaagtggcaacagaaagagaggacatggacaactcactcagtgactatatgaaagctttatccatgttggagcatttggttgagcctgaccatcgtcgagttgtggaattaaattttcgcatttgtttggtttatgaactagtttccaagatcggagatgcagtttcatactgtgcaaaagcaatttcactatgcaagtcacgcatacagagcctgaaaagttccaaggatgctttgttggctggtatagatggtgatgcatctgctgctgcagctgaaggaggctcagaaaaatctgccgttgaaaaagagctagagcagcttactagtatattgcctgatcttgagaagaagcttgaggacctgtctgaagcaaacccaagcgctgacatggatgagatggtgaaggcaattgcgtccagggtaactgaagtgatgccaaaagctgcatcttttacttcttcccagatggcaacctcaagcaatggattcgactcctcggttatgtctacggcagcgacaaccggaagctctggaagcacggtgactgaccttggggttgtaggcagaggcgtcaaacgagctagcatcaagccgatctctgctgaacctgctgctaagaaacctgcacttgattcaccatctctccaaggtgacagcagcatcaactctgaggttgtccctgcaacgcagactggagacgagtccgtatctaagtaaattacaatttcattagccctactgtaatgttaacttgctggaacatattagctgctatgtaaacgcttaagaagggactgctggagccatagactcatcgtgagctgacaattgaaatgttaaattgctgaggagatcaaaaaaaaaaaaaaaaaagctta

SEQ ID NO: 19814 - protein, 496 aa, Zea mays subsp. mays
  peptide (1)..(496): Ceres Seq. ID no. 15218642
  misc_feature (80)..(113): Pfam Name: Pfam Description:  TPR Domain
  misc_feature (37)..(496): NCBI GI NO: 38175649 NR Description: tetratricopeptide repeat-containing protein-like
  misc_feature (145)..(496): NCBI GI NO: 32352192 NR Description: hypothetical protein
  misc_feature (59)..(437): NCBI GI NO: 18419996 NR Description: tetratricopeptide repeat (TPR)-containing protein
  misc_feature (59)..(380): NCBI GI NO: 25407799 NR Description: hypothetical protein AT4g37210
  misc_feature (66)..(335): NCBI GI NO: 4104353 NR Description: nuclear autoantigenic sperm protein autosomalvariant
  misc_feature (64)..(141): NCBI GI NO: 18129310 NR Description: hypothetical protein [Pinus pinaster]
  misc_feature (37)..(335): NCBI GI NO: 13435642 NR Description: Nasp protein [Mus musculus]
  misc_feature (66)..(335): NCBI GI NO: 27262630 NR Description: nuclear autoantigenic sperm protein isoform 3
  misc_feature (66)..(335): NCBI GI NO: 30584691 NR Description: Homo sapiens nuclear autoantigenic sperm protein
  misc_feature (57)..(428): NCBI GI NO: 123127 NR Description: HISTONE-BINDING PROTEIN N1/N2
IRALHPFPHLRPPPSSPPCRSPRREGEPQPPRSAPPMASSSENAAVPPEEEPQAPPPPDTEPTEAAPGEAEDEPQTLERAQELFDRGSKAIEDEDFVDAVDCLSRALEIRASHYGELAPECASTYFKYGCALLYKAQEESDVLGNVPKSLPNEDSVKSTATKDDSGTSKVSGTNVEDAASSEKVDAEEGQNSNGKNQENGNGEVERDDDDDDDDEKMGDEEDNDLDLSWKMLDIARAIVEKSQDNTMEKVKIYSALAEVATEREDMDNSLSDYMKALSMLEHLVEPDHRRVVELNFRICLVYELVSKIGDAVSYCAKAISLCKSRIQSLKSSKDALLAGIDGDASAAAAEGGSEKSAVEKELEQLTSILPDLEKKLEDLSEANPSADMDEMVKAIASRVTEVMPKAASFTSSQMATSSNGFDSSVMSTAATTGSSGSTVTDLGVVGRGVKRASIKPISAEPAAKKPALDSPSLQGDSSINSEVVPATQTGDESVSK

SEQ ID NO: 19815 - protein, 460 aa, Zea mays subsp. mays
  peptide (1)..(460): Ceres Seq. ID no. 15218643
  misc_feature (44)..(77): Pfam Name: Pfam Description:  TPR Domain
  misc_feature (1)..(460): NCBI GI NO: 38175649 NR Description: tetratricopeptide repeat-containing protein-like
  misc_feature (109)..(460): NCBI GI NO: 32352192 NR Description: hypothetical protein
  misc_feature (23)..(401): NCBI GI NO: 18419996 NR Description: tetratricopeptide repeat (TPR)-containing protein
  misc_feature (23)..(344): NCBI GI NO: 25407799 NR Description: hypothetical protein AT4g37210
  misc_feature (30)..(299): NCBI GI NO: 4104353 NR Description: nuclear autoantigenic sperm protein autosomalvariant
  misc_feature (28)..(105): NCBI GI NO: 18129310 NR Description: hypothetical protein [Pinus pinaster]
  misc_feature (1)..(299): NCBI GI NO: 13435642 NR Description: Nasp protein [Mus musculus]
  misc_feature (30)..(299): NCBI GI NO: 27262630 NR Description: nuclear autoantigenic sperm protein isoform 3
  misc_feature (30)..(299): NCBI GI NO: 30584691 NR Description: Homo sapiens nuclear autoantigenic sperm protein
  misc_feature (21)..(392): NCBI GI NO: 123127 NR Description: HISTONE-BINDING PROTEIN N1/N2
MASSSENAAVPPEEEPQAPPPPDTEPTEAAPGEAEDEPQTLERAQELFDRGSKAIEDEDFVDAVDCLSRALEIRASHYGELAPECASTYFKYGCALLYKAQEESDVLGNVPKSLPNEDSVKSTATKDDSGTSKVSGTNVEDAASSEKVDAEEGQNSNGKNQENGNGEVERDDDDDDDDEKMGDEEDNDLDLSWKMLDIARAIVEKSQDNTMEKVKIYSALAEVATEREDMDNSLSDYMKALSMLEHLVEPDHRRVVELNFRICLVYELVSKIGDAVSYCAKAISLCKSRIQSLKSSKDALLAGIDGDASAAAAEGGSEKSAVEKELEQLTSILPDLEKKLEDLSEANPSADMDEMVKAIASRVTEVMPKAASFTSSQMATSSNGFDSSVMSTAATTGSSGSTVTDLGVVGRGVKRASIKPISAEPAAKKPALDSPSLQGDSSINSEVVPATQTGDESVSK

SEQ ID NO: 19816 - protein, 280 aa, Zea mays subsp. mays
  peptide (1)..(280): Ceres Seq. ID no. 15218644
  misc_feature (1)..(280): NCBI GI NO: 38175649 NR Description: tetratricopeptide repeat-containing protein-like
  misc_feature (1)..(280): NCBI GI NO: 32352192 NR Description: hypothetical protein
  misc_feature (1)..(221): NCBI GI NO: 18419996 NR Description: tetratricopeptide repeat (TPR)-containing protein
  misc_feature (1)..(164): NCBI GI NO: 25407799 NR Description: hypothetical protein AT4g37210
  misc_feature (1)..(119): NCBI GI NO: 4104353 NR Description: nuclear autoantigenic sperm protein autosomalvariant
  misc_feature (1)..(119): NCBI GI NO: 13435642 NR Description: Nasp protein [Mus musculus]
  misc_feature (1)..(119): NCBI GI NO: 27262630 NR Description: nuclear autoantigenic sperm protein isoform 3
  misc_feature (1)..(119): NCBI GI NO: 30584691 NR Description: Homo sapiens nuclear autoantigenic sperm protein
  misc_feature (1)..(212): NCBI GI NO: 123127 NR Description: HISTONE-BINDING PROTEIN N1/N2
  misc_feature (1)..(268): NCBI GI NO: 28277791 NR Description: Unknown (protein for MGC:56007) [Danio rerio]
MGDEEDNDLDLSWKMLDIARAIVEKSQDNTMEKVKIYSALAEVATEREDMDNSLSDYMKALSMLEHLVEPDHRRVVELNFRICLVYELVSKIGDAVSYCAKAISLCKSRIQSLKSSKDALLAGIDGDASAAAAEGGSEKSAVEKELEQLTSILPDLEKKLEDLSEANPSADMDEMVKAIASRVTEVMPKAASFTSSQMATSSNGFDSSVMSTAATTGSSGSTVTDLGVVGRGVKRASIKPISAEPAAKKPALDSPSLQGDSSINSEVVPATQTGDESVSK

SEQ ID NO: 19817 - DNA, 677 bp, Zea mays subsp. mays
  misc_feature (1)..(677): Ceres Seq. ID no. 12594284
  misc_feature (154)..(154): n is a, c, t, g, unknown, or other
atcaacgacagccccagacaacactcaccgatagcaagtagcgccgccgacgtttcgagagcagagtatccaagctagccaagcgcgcacctcggtgacctaagctagttcaggcgacgatatggcgtcaggtcaggaaaagcagggaaggagntggaccgcaagggcccgcgaggggcggagaccgtcggttcccccggcggggaccggcgggcaaggaagcgtcgaggcccaggagcacccttcgccggaagggcgcagccgcggaggccagactcgcagggagcagctggggcagcaggggtacagcgagatggggaagaagggcggtgtgagcaccacggacgagtccggcggcgagcgcgccgccagggagggcgtcagcatcgacgagtccaagttcaccaagtagtcctatcgcgtgcgtgcgtacgcagcgttcgtagctgtctgcgtagtgtaccttggccgtagctagtgctactctgtactttggagtagctgaatgataataatgtagctagcagcatgcatgtaggcgatcatacatacgtacgtacacaggtacgtgtgtgtgatcatgtatgcttccagaagggtatcctagcttaatcagtcacgtcgtcaagtcgtcaatatggcaggttcgcgtcagggctttgtagtttgatagcctg

SEQ ID NO: 19818 - protein, 96 aa, Zea mays subsp. mays
  peptide (1)..(96): Ceres Seq. ID no. 12594285
  misc_feature (1)..(96): Pfam Name: Pfam Description:  Small hydrophilic plant seed protein
  misc_feature (1)..(96): NCBI GI NO: 1169520 NR Description: LATE EMBRYOGENESIS ABUNDANT PROTEIN EMB564
  misc_feature (1)..(96): NCBI GI NO: 1169521 NR Description: Embryonic abundant protein 1
  misc_feature (1)..(96): NCBI GI NO: 119315 NR Description: EM PROTEIN CS41
  misc_feature (1)..(96): NCBI GI NO: 7594641 NR Description: Early-methionine-labelled polypeptide
  misc_feature (1)..(96): NCBI GI NO: 547817 NR Description: Late embryogenesis abundant protein B19.1A (B19.1)
  misc_feature (1)..(96): NCBI GI NO: 1169516 NR Description: EM PROTEIN H2
  misc_feature (1)..(96): NCBI GI NO: 119313 NR Description: EM PROTEIN
  misc_feature (1)..(96): NCBI GI NO: 7594645 NR Description: Early-methionine-labelled polypeptide
  misc_feature (1)..(96): NCBI GI NO: 1170723 NR Description: Late embryogenesis abundant protein B19.1B
  misc_feature (1)..(96): NCBI GI NO: 7594647 NR Description: Early-methionine-labelled polypeptide
  misc_feature (11)..(11): Xaa is any aa, unknown or other
MASGQEKQGRXWTARAREGRRPSVPPAGTGGQGSVEAQEHPSPEGRSRGGQTRREQLGQQGYSEMGKKGGVSTTDESGGERAAREGVSIDESKFTK

SEQ ID NO: 19819 - DNA, 664 bp, Zea mays subsp. mays
  misc_feature (1)..(664): Ceres Seq. ID no. 13600689
acccctacccgcgacttcgctcagcttccgccgatcggcttgccccgtcgatttcgccaacccctcgacccgatcggctccattgatcgtacctcgtcgtccggttgtcgatggccaggacctctttcaaaatggagcacgacctcgagaaaaggcagtccgaatctgccaggatcagggataagtatcccgacagaattcctgtgattgttgagaaagctggcaaaactgatgtccccgagattgataagaagaagtaccttgtccctgctgatctcactgtcggccagtttgtctatgtggtgaggaagagaatcaagctgagcccagagaaggccatctttgtctttgtgaagaacaccttgccaccaactgcctctttgatgtctgcaatctacgaagagaacaaggacgaggatggcttcctttacatgacctacagtggtgaaaacaccttcggctctgcctagagcaatcgcccctgccactgtaaataaacgagcatgatggggctgctgctattgtaaacctgtgtatatacctcagtctctagtatgctgctgccggattgcttcaatggcttcaatgacacccttagctttcaactgtttggatttctcctgtgacattgaattccttcggtatcgaaacatttgatcatttc

SEQ ID NO: 19820 - protein, 119 aa, Zea mays subsp. mays
  peptide (1)..(119): Ceres Seq. ID no. 13600690
  misc_feature (15)..(117): Pfam Name: Pfam Description:  Microtubule associated protein 1A/1B
  misc_feature (1)..(119): NCBI GI NO: 33146967 NR Description: putative microtubule associated protein
  misc_feature (1)..(119): NCBI GI NO: 32401365 NR Description: autophagy [Triticum aestivum]
  misc_feature (7)..(119): NCBI GI NO: 37776903 NR Description: putative microtubule-associated protein
  misc_feature (1)..(117): NCBI GI NO: 40253647 NR Description: putative microtubial binding protein
  misc_feature (1)..(118): NCBI GI NO: 34595981 NR Description: microtubule-associated protein 1 light chain 3
  misc_feature (1)..(117): NCBI GI NO: 38344173 NR Description: OSJNBa0053K19.12
  misc_feature (1)..(117): NCBI GI NO: 15220686 NR Description: symbiosis-related protein -related
  misc_feature (1)..(118): NCBI GI NO: 18415813 NR Description: symbiosis-related like protein
  misc_feature (1)..(117): NCBI GI NO: 21592920 NR Description: putative microtubule-associated protein
  misc_feature (1)..(118): NCBI GI NO: 21553487 NR Description: symbiosis-related like protein
MARTSFKMEHDLEKRQSESARIRDKYPDRIPVIVEKAGKTDVPEIDKKKYLVPADLTVGQFVYVVRKRIKLSPEKAIFVFVKNTLPPTASLMSAIYEENKDEDGFLYMTYSGENTFGSA

SEQ ID NO: 19821 - protein, 112 aa, Zea mays subsp. mays
  peptide (1)..(112): Ceres Seq. ID no. 13600691
  misc_feature (8)..(110): Pfam Name: Pfam Description:  Microtubule associated protein 1A/1B
  misc_feature (1)..(112): NCBI GI NO: 33146967 NR Description: putative microtubule associated protein
  misc_feature (1)..(112): NCBI GI NO: 32401365 NR Description: autophagy [Triticum aestivum]
  misc_feature (1)..(112): NCBI GI NO: 37776903 NR Description: putative microtubule-associated protein
  misc_feature (1)..(110): NCBI GI NO: 40253647 NR Description: putative microtubial binding protein
  misc_feature (1)..(111): NCBI GI NO: 34595981 NR Description: microtubule-associated protein 1 light chain 3
  misc_feature (1)..(110): NCBI GI NO: 38344173 NR Description: OSJNBa0053K19.12
  misc_feature (1)..(110): NCBI GI NO: 15220686 NR Description: symbiosis-related protein -related
  misc_feature (1)..(111): NCBI GI NO: 18415813 NR Description: symbiosis-related like protein
  misc_feature (1)..(110): NCBI GI NO: 21592920 NR Description: putative microtubule-associated protein
  misc_feature (1)..(111): NCBI GI NO: 21553487 NR Description: symbiosis-related like protein
MEHDLEKRQSESARIRDKYPDRIPVIVEKAGKTDVPEIDKKKYLVPADLTVGQFVYVVRKRIKLSPEKAIFVFVKNTLPPTASLMSAIYEENKDEDGFLYMTYSGENTFGSA

SEQ ID NO: 19822 - protein, 68 aa, Zea mays subsp. mays
  peptide (1)..(68): Ceres Seq. ID no. 13600692
TPTRDFAQLPPIGLPRRFRQPLDPIGSIDRTSSSGCRWPGPLSKWSTTSRKGSPNLPGSGISIPTEFL

SEQ ID NO: 19823 - DNA, 1723 bp, Zea mays subsp. mays
  misc_feature (1)..(1723): Ceres Seq. ID no. 12782785
actgtcttgactcttcctcgtctccactctccaccaccatcattgattcctgtctccgcagcttgacccacagacgcgactagggcagtcaccgcggcgtagctgccgcgtcttgccccgaaacacagccgtcaacgccgccccggaccgcagcagcgcggcgcaaccccaatcggagccggagccagcgaagcgagcgcctcgcttccacaagtcgctagctgcatctggagcgccgccggcccgaccaacgcccgagccaaccgtgggcgttcggccgccgattcctctgggctctggtggatgtcttgtaggaacacacttggatgaggttacaatacgcgtgaaacgccatacccttcatcttgctattttgtgctatctcaacaaataaaatcttctccaacaacaaacctttcagcttcaccatagtgtctgctaggtcgttgcttgagatcgaccccaattcaggactcgttcaggacaaggtaaaagttggacaaactttggaagaggacacccaaaacattatcaatatgactatgaatgtgtcgtctggatggagcattgtgaaagaagaattcatacttcctgctagaggtgcccctttcaatagttgccatgcttctactattgtacagattgaggaagacaattttttggtagcatattttggtggatccagggaaggtgctccggatgttaaaatctggttacagagatatagtgatggtcactggcatcctccagtggtggctgatgaacaagatggggtgcccatgtggaatcctgttttgtttcagcttccctcccgtgagctgcttctcttctacaagattggtcaagaagttcagaagtggagcggtgccatgaaaagatcgttagatggcggtgtaacctggtcaccgagagagcagttacctcctggcatccttggtcctattaaaaataagcctttcttgcttgaagatgggcgcctactgtgtggatcatcagttgaaagttggaattcttggggtgcatggcttgaggttacgaaagatgccggatggacctggagaaagtatggccctatatgtataaaaggtcaaccacttggggtaattcagccagttccctacaggactgacgatggaactattcgagtgttgctgcgatcatttgaaacaattggtcatgtatgtatggccgattccattgatgaaggtgtgacatggagttatgtccgtgagactgagcttccaaacccaaattctgggattgatggagttaagatgaaggatggaagagtactgcttgcctacaacaccttctccagaggaacgctcaagcttgcagtatccttaaacgacggtgattcatgggacgaagtaatgacactagaggacacgaaaggtatggagttttcgtatcctgcagtgatccagtctatggatgagctcatacatgttacctatacatacaatcggacacaggttaagcatgttgttcttcgacctagttcgatggtgaagttgtgagcctgctgcaactgatgaaggcctatggctggcaacttcaggacacccaaatttatcaccaaatgtttaggagaggggggtcattgcatcggattggctagattatgctcagttgatgtcaaataaatgctttcaggtgctacttaatggactttttccgaggttcatctaaaaaggtatatactgtttaaaatgttctgctc

SEQ ID NO: 19824 - protein, 327 aa, Zea mays subsp. mays
  peptide (1)..(327): Ceres Seq. ID no. 12782786
  misc_feature (1)..(326): NCBI GI NO: 34393670 NR Description: alpha-rhamnosidase-like protein
  misc_feature (9)..(323): NCBI GI NO: 30696915 NR Description: expressed protein [Arabidopsis thaliana]
  misc_feature (9)..(323): NCBI GI NO: 30696919 NR Description: expressed protein [Arabidopsis thaliana]
  misc_feature (9)..(323): NCBI GI NO: 21536870 NR Description: unknown [Arabidopsis thaliana]
  misc_feature (136)..(323): NCBI GI NO: 9759267 NR Description: gene_id:MRI1
  misc_feature (9)..(139): NCBI GI NO: 9759267 NR Description: gene_id:MRI1
  misc_feature (5)..(319): NCBI GI NO: 23617011 NR Description: hypothetial protein~similar to Arabidopsis thalianachromosome 5
  misc_feature (9)..(312): NCBI GI NO: 26452755 NR Description: unknown protein [Arabidopsis thaliana]
  misc_feature (11)..(322): NCBI GI NO: 21243816 NR Description: conserved hypothetical protein
  misc_feature (11)..(324): NCBI GI NO: 21232340 NR Description: conserved hypothetical protein
MTMNVSSGWSIVKEEFILPARGAPFNSCHASTIVQIEEDNFLVAYFGGSREGAPDVKIWLQRYSDGHWHPPVVADEQDGVPMWNPVLFQLPSRELLLFYKIGQEVQKWSGAMKRSLDGGVTWSPREQLPPGILGPIKNKPFLLEDGRLLCGSSVESWNSWGAWLEVTKDAGWTWRKYGPICIKGQPLGVIQPVPYRTDDGTIRVLLRSFETIGHVCMADSIDEGVTWSYVRETELPNPNSGIDGVKMKDGRVLLAYNTFSRGTLKLAVSLNDGDSWDEVMTLEDTKGMEFSYPAVIQSMDELIHVTYTYNRTQVKHVVLRPSSMVKL

SEQ ID NO: 19825 - protein, 325 aa, Zea mays subsp. mays
  peptide (1)..(325): Ceres Seq. ID no. 12782787
  misc_feature (1)..(324): NCBI GI NO: 34393670 NR Description: alpha-rhamnosidase-like protein
  misc_feature (7)..(321): NCBI GI NO: 30696915 NR Description: expressed protein [Arabidopsis thaliana]
  misc_feature (7)..(321): NCBI GI NO: 30696919 NR Description: expressed protein [Arabidopsis thaliana]
  misc_feature (7)..(321): NCBI GI NO: 21536870 NR Description: unknown [Arabidopsis thaliana]
  misc_feature (134)..(321): NCBI GI NO: 9759267 NR Description: gene_id:MRI1
  misc_feature (7)..(137): NCBI GI NO: 9759267 NR Description: gene_id:MRI1
  misc_feature (3)..(317): NCBI GI NO: 23617011 NR Description: hypothetial protein~similar to Arabidopsis thalianachromosome 5
  misc_feature (7)..(310): NCBI GI NO: 26452755 NR Description: unknown protein [Arabidopsis thaliana]
  misc_feature (9)..(320): NCBI GI NO: 21243816 NR Description: conserved hypothetical protein
  misc_feature (9)..(322): NCBI GI NO: 21232340 NR Description: conserved hypothetical protein
MNVSSGWSIVKEEFILPARGAPFNSCHASTIVQIEEDNFLVAYFGGSREGAPDVKIWLQRYSDGHWHPPVVADEQDGVPMWNPVLFQLPSRELLLFYKIGQEVQKWSGAMKRSLDGGVTWSPREQLPPGILGPIKNKPFLLEDGRLLCGSSVESWNSWGAWLEVTKDAGWTWRKYGPICIKGQPLGVIQPVPYRTDDGTIRVLLRSFETIGHVCMADSIDEGVTWSYVRETELPNPNSGIDGVKMKDGRVLLAYNTFSRGTLKLAVSLNDGDSWDEVMTLEDTKGMEFSYPAVIQSMDELIHVTYTYNRTQVKHVVLRPSSMVKL

SEQ ID NO: 19826 - protein, 246 aa, Zea mays subsp. mays
  peptide (1)..(246): Ceres Seq. ID no. 12782788
  misc_feature (1)..(245): NCBI GI NO: 34393670 NR Description: alpha-rhamnosidase-like protein
  misc_feature (1)..(242): NCBI GI NO: 30696915 NR Description: expressed protein [Arabidopsis thaliana]
  misc_feature (1)..(242): NCBI GI NO: 30696919 NR Description: expressed protein [Arabidopsis thaliana]
  misc_feature (1)..(242): NCBI GI NO: 21536870 NR Description: unknown [Arabidopsis thaliana]
  misc_feature (55)..(242): NCBI GI NO: 9759267 NR Description: gene_id:MRI1
  misc_feature (1)..(58): NCBI GI NO: 9759267 NR Description: gene_id:MRI1
  misc_feature (1)..(238): NCBI GI NO: 23617011 NR Description: hypothetial protein~similar to Arabidopsis thalianachromosome 5
  misc_feature (1)..(231): NCBI GI NO: 26452755 NR Description: unknown protein [Arabidopsis thaliana]
  misc_feature (1)..(241): NCBI GI NO: 21243816 NR Description: conserved hypothetical protein
  misc_feature (1)..(243): NCBI GI NO: 21232340 NR Description: conserved hypothetical protein
MWNPVLFQLPSRELLLFYKIGQEVQKWSGAMKRSLDGGVTWSPREQLPPGILGPIKNKPFLLEDGRLLCGSSVESWNSWGAWLEVTKDAGWTWRKYGPICIKGQPLGVIQPVPYRTDDGTIRVLLRSFETIGHVCMADSIDEGVTWSYVRETELPNPNSGIDGVKMKDGRVLLAYNTFSRGTLKLAVSLNDGDSWDEVMTLEDTKGMEFSYPAVIQSMDELIHVTYTYNRTQVKHVVLRPSSMVKL

SEQ ID NO: 19827 - DNA, 722 bp, Zea mays subsp. mays
  misc_feature (1)..(722): Ceres Seq. ID no. 12636917
atcacaattcactccactcatcttttctcgtttagaacctctaaaatttcccccactcgccagtcgcagcagcacctgtagcagtcatggacgccagcggagccggtagcaaggggaagaagggggcggccgggcgcaaggcaggcggccccaggaagaagtcggtgacgcggtccgtcaaggccgggctgcagttccccgtcggccggatcgggcgctacctcaagaagggccggtacgcgcagcgcgtgggcactggcgcccccgtctacctcgccgccgtcctggagtacctcgccgccgaggttctggagttggcagggaacgcggcgaaagacaacaagaagacgcgcatcatcccgcgccacgtgctcctggcgatccgcaacgacgaggagctcgggaagctgctggccggcgtcaccatcgcgcacggcggcgtcctccccaacatccactccgtgctcctgcccaagaaggcggcggagaaggcggccagcggcggcagcaaggagcccaagtcccccaagaagggcgccaagtcccccaagaaggcttagaaagtagggtcttcatttgcgctgtgtgctgtagcatgttcgtgtctagatctgtggatgggatgtgtcctgctctagtatcgtccttgtgtcttattgtatgttcgtcttcatcgagaagatcttcagcagtcagagctcgttgtgtactaatgttccccc

SEQ ID NO: 19828 - protein, 157 aa, Zea mays subsp. mays
  peptide (1)..(157): Ceres Seq. ID no. 12636918
  misc_feature (9)..(131): Pfam Name: Pfam Description:  Core histone H2A/H2B/H3/H4
  misc_feature (1)..(157): NCBI GI NO: 729671 NR Description: Histone H2A
  misc_feature (1)..(157): NCBI GI NO: 34914498 NR Description: putative histone H2A
  misc_feature (6)..(157): NCBI GI NO: 122007 NR Description: Histone H2A
  misc_feature (7)..(157): NCBI GI NO: 7649159 NR Description: histone H2A [Euphorbia esula]
  misc_feature (7)..(157): NCBI GI NO: 121974 NR Description: HISTONE H2A.2.1
  misc_feature (8)..(157): NCBI GI NO: 121982 NR Description: HISTONE H2A.2.2
  misc_feature (1)..(157): NCBI GI NO: 122006 NR Description: HISTONE H2A
  misc_feature (6)..(157): NCBI GI NO: 15241857 NR Description: putative protein; protein id: At5g02560
  misc_feature (1)..(157): NCBI GI NO: 729669 NR Description: Histone H2A
  misc_feature (8)..(157): NCBI GI NO: 122003 NR Description: HISTONE H2A
MDASGAGSKGKKGAAGRKAGGPRKKSVTRSVKAGLQFPVGRIGRYLKKGRYAQRVGTGAPVYLAAVLEYLAAEVLELAGNAAKDNKKTRIIPRHVLLAIRNDEELGKLLAGVTIAHGGVLPNIHSVLLPKKAAEKAASGGSKEPKSPKKGAKSPKKA

SEQ ID NO: 19829 - DNA, 808 bp, Zea mays subsp. mays
  misc_feature (1)..(808): Ceres Seq. ID no. 13623785
aaaaaaaaaaaaggatacatcaaaccctcaaaagtgaaaagcccgtgtctactaaaacccaagacacttgggcggttcacggcggcccagactgcggcgcctcaccaaccaacgagaccacgaagcagaccatgtcatcctacggtcccgccggcgccgcggcggacgcgatggaagctgccggcggcggcagctaccgtgtgtgcgacacggtggtgctcgtctgcctcgcctgcgcctccgccctcatcgtctctacgatggccgtctgcttccgccgcgccttcgccaacgggtacacggccagcgcgggggccaccgctgcgaacggcagaagccagtgtgggctggcgccgtccgcgctgtcggcgatccccaagctcgcctaccggaggggcgctggcgctggcgctgggtgggcgcagtgcgcgatctgcctcgccttggtgcgggacggcgagacggtgcggttgctgccggcgtgtggccacctattccacgttgagtgcatcgacctgtggctgcgctctcacgctacgtgcccgctttgccggcgtgacgtcggggaggagccacatgaaaaagtttgagctcgccgctggtggaccaggatgacacacgccggctactggttcaaccgccggcctctagagtctagactctagttcaacttttgtttcctgccatgatgttgggcattcatccaaagaattgtacatcctagggtttaggcgtagtttcattttttttcggtggaatggaacctttattctgccatccaaaaaaaaaaaaaaaaaagcttatcgat

SEQ ID NO: 19830 - protein, 204 aa, Zea mays subsp. mays
  peptide (1)..(204): Ceres Seq. ID no. 13623786
KKKKGYIKPSKVKSPCLLKPKTLGRFTAAQTAAPHQPTRPRSRPCHPTVPPAPRRTRWKLPAAAATVCATRWCSSASPAPPPSSSLRWPSASAAPSPTGTRPARGPPLRTAEASVGWRRPRCRRSPSSPTGGALALALGGRSARSASPWCGTARRCGCCRRVATYSTLSASTCGCALTLRARFAGVTSGRSHMKKFELAAGGPG

SEQ ID NO: 19831 - protein, 195 aa, Zea mays subsp. mays
  peptide (1)..(195): Ceres Seq. ID no. 13623787
  misc_feature (142)..(183): Pfam Name: RING finger Pfam Description: Zinc finger, C3HC4 type
  misc_feature (29)..(187): NCBI GI NO: 7489432 NR Description: probable ring finger protein - barley
  misc_feature (51)..(191): NCBI GI NO: 34909640 NR Description: P0503C12.20
  misc_feature (93)..(191): NCBI GI NO: 34903920 NR Description: OSJNBa0038J17.5
  misc_feature (46)..(187): NCBI GI NO: 34907826 NR Description: P0485B12.26
  misc_feature (53)..(187): NCBI GI NO: 34903926 NR Description: OSJNBa0038J17.8
  misc_feature (92)..(191): NCBI GI NO: 34903936 NR Description: OSJNBa0038J17.13
  misc_feature (115)..(187): NCBI GI NO: 21740712 NR Description: OSJNBa0086B14.5
  misc_feature (71)..(187): NCBI GI NO: 34903928 NR Description: OSJNBa0038J17.9
  misc_feature (65)..(195): NCBI GI NO: 28558782 NR Description: RING/C3HC4/PHD zinc finger-like protein
  misc_feature (107)..(189): NCBI GI NO: 21645888 NR Description: ring-H2 zinc finger protein [Zea mays]
KKKRIHQTLKSEKPVSTKTQDTWAVHGGPDCGASPTNETTKQTMSSYGPAGAAADAMEAAGGGSYRVCDTVVLVCLACASALIVSTMAVCFRRAFANGYTASAGATAANGRSQCGLAPSALSAIPKLAYRRGAGAGAGWAQCAICLALVRDGETVRLLPACGHLFHVECIDLWLRSHATCPLCRRDVGEEPHEKV

SEQ ID NO: 19832 - protein, 152 aa, Zea mays subsp. mays
  peptide (1)..(152): Ceres Seq. ID no. 13623788
  misc_feature (99)..(140): Pfam Name: RING finger Pfam Description: Zinc finger, C3HC4 type
  misc_feature (1)..(144): NCBI GI NO: 7489432 NR Description: probable ring finger protein - barley
  misc_feature (8)..(148): NCBI GI NO: 34909640 NR Description: P0503C12.20
  misc_feature (50)..(148): NCBI GI NO: 34903920 NR Description: OSJNBa0038J17.5
  misc_feature (3)..(144): NCBI GI NO: 34907826 NR Description: P0485B12.26
  misc_feature (10)..(144): NCBI GI NO: 34903926 NR Description: OSJNBa0038J17.8
  misc_feature (49)..(148): NCBI GI NO: 34903936 NR Description: OSJNBa0038J17.13
  misc_feature (72)..(144): NCBI GI NO: 21740712 NR Description: OSJNBa0086B14.5
  misc_feature (28)..(144): NCBI GI NO: 34903928 NR Description: OSJNBa0038J17.9
  misc_feature (22)..(152): NCBI GI NO: 28558782 NR Description: RING/C3HC4/PHD zinc finger-like protein
  misc_feature (64)..(146): NCBI GI NO: 21645888 NR Description: ring-H2 zinc finger protein [Zea mays]
MSSYGPAGAAADAMEAAGGGSYRVCDTVVLVCLACASALIVSTMAVCFRRAFANGYTASAGATAANGRSQCGLAPSALSAIPKLAYRRGAGAGAGWAQCAICLALVRDGETVRLLPACGHLFHVECIDLWLRSHATCPLCRRDVGEEPHEKV

SEQ ID NO: 19833 - DNA, 755 bp, Zea mays subsp. mays
  misc_feature (1)..(755): Ceres Seq. ID no. 13600397
gcacactaaccgaagtcccaatcccaatggcgccaacctgccgtcctcggccggatgcggcgctcctgctgctgctgctgacggcgagtagcgtcggcgtcgcacgggcggcgccgcgggtgccggcggtgatcgtgttcggggactcgacggtggacacgggcaacaacaaccagatccccaccccgctgcgcgccgacttcccgccctacggtcgcgacatgccgggcgggccgcgcgccaccggccggttcggcaacgggcggctgcccccggacctcatctccgaggcgctcggcctgccgccgctggtgccggcctacctcgacccggcctacggcatcgacgacttcgcgcgcggcgtctgcttcgcgtccgcgggcaccggcatcgacaacgccaccgccggagtcttggtaagtctccgccgtacgcctccagccgatacttgctgttctttgtcgatccatcatctgtgctcgttaagtcttcactgccgaatagtatcgccacacaagcatttctgcagaacagaattgtgcacggcccatccgcattccaaagcagagaagtgtgtggcttacctgcgtacacttcagtttgattgagtgtaggtgttgctcgcgcattagaccgtctcaacaagagttttatcagagtttggtggcattaaatatgttgatatggtatggaataaacgataagagatgatgaaagttttacgatatcaaatgaatttgagcaggatgaaacct

SEQ ID NO: 19834 - protein, 201 aa, Zea mays subsp. mays
  peptide (1)..(201): Ceres Seq. ID no. 13600398
  misc_feature (43)..(140): Pfam Name: Pfam Description:  GDSL-like Lipase/Acylhydrolase
  misc_feature (21)..(137): NCBI GI NO: 40641607 NR Description: putative GDSL-motif lipase [Triticum aestivum]
  misc_feature (21)..(140): NCBI GI NO: 7485330 NR Description: hypothetical protein F10M23
  misc_feature (21)..(138): NCBI GI NO: 18416824 NR Description: GDSL-motif lipase/hydrolase protein
  misc_feature (23)..(138): NCBI GI NO: 15228157 NR Description: GDSL-motif lipase/hydrolase protein
  misc_feature (23)..(138): NCBI GI NO: 21593518 NR Description: putative GDSL-motif lipase/hydrolase
  misc_feature (21)..(138): NCBI GI NO: 15229719 NR Description: lipase, putative [Arabidopsis thaliana]
  misc_feature (20)..(138): NCBI GI NO: 18406327 NR Description: lipase, putative [Arabidopsis thaliana]
  misc_feature (20)..(138): NCBI GI NO: 15217977 NR Description: lipase, putative [Arabidopsis thaliana]
  misc_feature (21)..(138): NCBI GI NO: 15229307 NR Description: lipase, putative [Arabidopsis thaliana]
  misc_feature (41)..(148): NCBI GI NO: 18390708 NR Description: GDSL-motif lipase/hydrolase protein
TLTEVPIPMAPTCRPRPDAALLLLLLTASSVGVARAAPRVPAVIVFGDSTVDTGNNNQIPTPLRADFPPYGRDMPGGPRATGRFGNGRLPPDLISEALGLPPLVPAYLDPAYGIDDFARGVCFASAGTGIDNATAGVLVSLRRTPPADTCCSLSIHHLCSLSLHCRIVSPHKHFCRTELCTAHPHSKAEKCVAYLRTLQFD

SEQ ID NO: 19835 - protein, 193 aa, Zea mays subsp. mays
  peptide (1)..(193): Ceres Seq. ID no. 13600399
  misc_feature (35)..(132): Pfam Name: Pfam Description:  GDSL-like Lipase/Acylhydrolase
  misc_feature (13)..(129): NCBI GI NO: 40641607 NR Description: putative GDSL-motif lipase [Triticum aestivum]
  misc_feature (13)..(132): NCBI GI NO: 7485330 NR Description: hypothetical protein F10M23
  misc_feature (13)..(130): NCBI GI NO: 18416824 NR Description: GDSL-motif lipase/hydrolase protein
  misc_feature (15)..(130): NCBI GI NO: 15228157 NR Description: GDSL-motif lipase/hydrolase protein
  misc_feature (15)..(130): NCBI GI NO: 21593518 NR Description: putative GDSL-motif lipase/hydrolase
  misc_feature (13)..(130): NCBI GI NO: 15229719 NR Description: lipase, putative [Arabidopsis thaliana]
  misc_feature (12)..(130): NCBI GI NO: 18406327 NR Description: lipase, putative [Arabidopsis thaliana]
  misc_feature (12)..(130): NCBI GI NO: 15217977 NR Description: lipase, putative [Arabidopsis thaliana]
  misc_feature (13)..(130): NCBI GI NO: 15229307 NR Description: lipase, putative [Arabidopsis thaliana]
  misc_feature (33)..(140): NCBI GI NO: 18390708 NR Description: GDSL-motif lipase/hydrolase protein
MAPTCRPRPDAALLLLLLTASSVGVARAAPRVPAVIVFGDSTVDTGNNNQIPTPLRADFPPYGRDMPGGPRATGRFGNGRLPPDLISEALGLPPLVPAYLDPAYGIDDFARGVCFASAGTGIDNATAGVLVSLRRTPPADTCCSLSIHHLCSLSLHCRIVSPHKHFCRTELCTAHPHSKAEKCVAYLRTLQFD

SEQ ID NO: 19836 - protein, 128 aa, Zea mays subsp. mays
  peptide (1)..(128): Ceres Seq. ID no. 13600400
  misc_feature (1)..(67): Pfam Name: Pfam Description:  GDSL-like Lipase/Acylhydrolase
  misc_feature (1)..(64): NCBI GI NO: 40641607 NR Description: putative GDSL-motif lipase [Triticum aestivum]
  misc_feature (1)..(67): NCBI GI NO: 7485330 NR Description: hypothetical protein F10M23
  misc_feature (1)..(65): NCBI GI NO: 18416824 NR Description: GDSL-motif lipase/hydrolase protein
  misc_feature (1)..(65): NCBI GI NO: 15228157 NR Description: GDSL-motif lipase/hydrolase protein
  misc_feature (1)..(65): NCBI GI NO: 21593518 NR Description: putative GDSL-motif lipase/hydrolase
  misc_feature (1)..(65): NCBI GI NO: 15229719 NR Description: lipase, putative [Arabidopsis thaliana]
  misc_feature (1)..(65): NCBI GI NO: 18406327 NR Description: lipase, putative [Arabidopsis thaliana]
  misc_feature (1)..(65): NCBI GI NO: 15217977 NR Description: lipase, putative [Arabidopsis thaliana]
  misc_feature (1)..(65): NCBI GI NO: 15229307 NR Description: lipase, putative [Arabidopsis thaliana]
  misc_feature (1)..(75): NCBI GI NO: 18390708 NR Description: GDSL-motif lipase/hydrolase protein
MPGGPRATGRFGNGRLPPDLISEALGLPPLVPAYLDPAYGIDDFARGVCFASAGTGIDNATAGVLVSLRRTPPADTCCSLSIHHLCSLSLHCRIVSPHKHFCRTELCTAHPHSKAEKCVAYLRTLQFD

SEQ ID NO: 19837 - DNA, 729 bp, Zea mays subsp. mays
  misc_feature (1)..(729): Ceres Seq. ID no. 14302679
tccgttggttgattctgattcgtctcctgttggctgttgccttcgaccgcctccacctcgtctccgacgatgtcctccgtcgccggtgagggagaaggagagggaggaggacggcgccgacgggaggagccaaggagccaacaacatgaggacggggtcgaggtggccgacggaaaactggatttgggtgacctttacggcgcggcggcggggtgggtagaggcgcggaccagctgcccgcacctcggcaccatgccgcccgctggtgctgaattgctgatgaccttgctcgcgtgcctccgcccgactctccgtgctccagatgtcatgaccctgctgaaaactgattatgcttgatatgcaaagatgtgatgtgcagtcgttttatcaacaaacatatgttgtgccatcatgaagaagaaactggtcactgtcttgctttgagcttcagtgatctttcagtttggtgtttctcatgtgactcgtacctagatgttcaagccattttagaattgcgcccaagttgcacatttgttgaagtttggagaacaccttttcaatcacttgaagtactggatttcagcactggtgaaagtggaagttcatcaaggacttagttgtttgtattcaagtgatgagtttcttttcatgatgcttcaatcagatcaagacagacagttgtgtagtatcctggcactttttaagcttcagtatgttctagttatattt

SEQ ID NO: 19838 - protein, 95 aa, Zea mays subsp. mays
  peptide (1)..(95): Ceres Seq. ID no. 14302680
  misc_feature (31)..(64): NCBI GI NO: 26984073 NR Description: hypothetical protein [Arabidopsis thaliana]
MSSVAGEGEGEGGGRRRREEPRSQQHEDGVEVADGKLDLGDLYGAAAGWVEARTSCPHLGTMPPAGAELLMTLLACLRPTLRAPDVMTLLKTDYA

SEQ ID NO: 19839 - protein, 81 aa, Zea mays subsp. mays
  peptide (1)..(81): Ceres Seq. ID no. 14302681
  misc_feature (1)..(50): NCBI GI NO: 26984073 NR Description: hypothetical protein [Arabidopsis thaliana]
  misc_feature (1)..(45): NCBI GI NO: 31203211 NR Description: ENSANGP00000007396 [Anopheles gambiae]
  misc_feature (1)..(45): NCBI GI NO: 27882614 NR Description: Similar to histone deacetylase 6 [Xenopus laevis]
  misc_feature (1)..(49): NCBI GI NO: 11360193 NR Description: hypothetical protein DKFZp566E044.1 - human
  misc_feature (1)..(49): NCBI GI NO: 15489272 NR Description: histone deacetylase 6 [Homo sapiens]
  misc_feature (1)..(49): NCBI GI NO: 7108921 NR Description: GR AF-1 specific histone deacetylase
  misc_feature (1)..(49): NCBI GI NO: 10720024 NR Description: Histone deacetylase 6 (HD6)
  misc_feature (1)..(49): NCBI GI NO: 13128864 NR Description: histone deacetylase 6 [Homo sapiens]
  misc_feature (1)..(49): NCBI GI NO: 40788979 NR Description: KIAA0901 protein [Homo sapiens]
  misc_feature (1)..(49): NCBI GI NO: 34933421 NR Description: histone deacetylase 6 [Rattus norvegicus]
MCSRFINKHMLCHHEEETGHCLALSFSDLSVWCFSCDSYLDVQAILELRPSCTFVEVWRTPFQSLEVLDFSTGESGSSSRT

SEQ ID NO: 19840 - protein, 72 aa, Zea mays subsp. mays
  peptide (1)..(72): Ceres Seq. ID no. 14302682
PLVDSDSSPVGCCLRPPPPRLRRCPPSPVREKEREEDGADGRSQGANNMRTGSRWPTENWIWVTFTARRRGG

SEQ ID NO: 19841 - DNA, 1452 bp, Zea mays subsp. mays
  misc_feature (1)..(1452): Ceres Seq. ID no. 13623850
atccaatatccactgcaccacttctgctaatcccttgttcttgtgcctccgatccggagctctcaccattgtcatcgtcaatcgatcaatataaagcgagccaattaccccaaggagctaccgcttgcgacggtatggcgatcccggtgattgacttctccaagctggacggccctgagagggccgagaccatggcggccctcgctgccgggttcgagcacgtggggttcttccagctggtgaacaccggcatctccgacgacctgctggagcgggtgaagaaggtgtgcagcgactcctacaagctgcgggacgaggcgttcaaggactccaaccccgcggtgaaggcgctcacagagctcgtggacaaggagatcgaggacggcctccccgcgaggaagataaaggacatggactgggaggacgtcttcaccctccatgacgacctgccatggccttccaaccctcccgccttcaaggagacgatgatggagtaccgcagggagctgaagaagctggcggagaagatgctgggcgtgatggaggagctgctggggttggaggagggccacatcaggaaggccttcagcaacgacggcgagttcgagcccttctacggcaccaaggtcagccactacccgccgtgcccgcggccggacctcatcgacggcctgcgcgcgcacaccgacgccggcggcctcatccttctgttccaggatgaccgcttcggcggcctgcaggcgcagcttccggacggcagctgggtcgacgtccagcccctcgagaacgccatcgtcatcaacaccggcgaccagatcgaggtgctgagcaatggccggtacaagagcgcatggcaccgcatcctggcgacccgcgacggcaaccggcgctccatcgcctccttctacaacccagcgcgcctggccaccatcgctccggcgatccccgccgcaggggtcggcgacgacgactacccgagcttcgtgttcggcaactacatggaggtgtacgtcaagcagaagttccagcctaaggcgcccagatttgaagccatggccacgacgacgaccaagtgatgacctagcagcgactcagcgagagcctaaataaatattaattcacagtcgtcaagttaatcttgtggttatacggtacgggcggggcttgtacttatgtaggttgctaagtcttaagtgtgtagtttaattaacgtgtgtgtggaatgtacgcgtcatacaaatgtgttggtgtgtgccctgccgcaagattgcggtgagcggtggatctatggtcaacgggtgcctaaatgatttgtgcttttgtagcataaaatggcacatctcctctgcttttgttacatctccaccttttctttttgcacttttcacctcaagtaaaacatgtggcggctttcactaagtacaaagaagctctacagagctatttctattg

SEQ ID NO: 19842 - protein, 357 aa, Zea mays subsp. mays
  peptide (1)..(357): Ceres Seq. ID no. 13623851
  misc_feature (203)..(304): Pfam Name: II Pfam Description: 2OG-Fe
  misc_feature (45)..(357): NCBI GI NO: 7433217 NR Description: 1-aminocyclopropane-1-carboxylate oxidase (EC1
  misc_feature (45)..(351): NCBI GI NO: 12001828 NR Description: 1-aminocyclopropane-1-carboxylate oxidase
  misc_feature (45)..(351): NCBI GI NO: 25452792 NR Description: 1-aminocyclopropane-1-carboxylate oxidase
  misc_feature (45)..(351): NCBI GI NO: 28949891 NR Description: 1-aminocyclopropane-1-carboxylic acid oxidase
  misc_feature (45)..(351): NCBI GI NO: 27371996 NR Description: 1-aminocyclopropane-1-carboxylic acid oxidase
  misc_feature (45)..(351): NCBI GI NO: 18411485 NR Description: 1-aminocyclopropane-1-carboxylate oxidase
  misc_feature (45)..(351): NCBI GI NO: 21555054 NR Description: 1-aminocyclopropane-1-carboxylate oxidase
  misc_feature (45)..(351): NCBI GI NO: 25285689 NR Description: hypothetical protein F2P24.4
  misc_feature (48)..(355): NCBI GI NO: 7433206 NR Description: probable 1-aminocyclopropane-1-carboxylate oxidase
  misc_feature (48)..(351): NCBI GI NO: 2385371 NR Description: ACC oxidase [Malus x domestica]
PISTAPLLLIPCSCASDPELSPLSSSIDQYKASQLPQGATACDGMAIPVIDFSKLDGPERAETMAALAAGFEHVGFFQLVNTGISDDLLERVKKVCSDSYKLRDEAFKDSNPAVKALTELVDKEIEDGLPARKIKDMDWEDVFTLHDDLPWPSNPPAFKETMMEYRRELKKLAEKMLGVMEELLGLEEGHIRKAFSNDGEFEPFYGTKVSHYPPCPRPDLIDGLRAHTDAGGLILLFQDDRFGGLQAQLPDGSWVDVQPLENAIVINTGDQIEVLSNGRYKSAWHRILATRDGNRRSIASFYNPARLATIAPAIPAAGVGDDDYPSFVFGNYMEVYVKQKFQPKAPRFEAMATTTTK

SEQ ID NO: 19843 - protein, 313 aa, Zea mays subsp. mays
  peptide (1)..(313): Ceres Seq. ID no. 13623852
  misc_feature (159)..(260): Pfam Name: II Pfam Description: 2OG-Fe
  misc_feature (1)..(313): NCBI GI NO: 7433217 NR Description: 1-aminocyclopropane-1-carboxylate oxidase (EC1
  misc_feature (1)..(307): NCBI GI NO: 12001828 NR Description: 1-aminocyclopropane-1-carboxylate oxidase
  misc_feature (1)..(307): NCBI GI NO: 25452792 NR Description: 1-aminocyclopropane-1-carboxylate oxidase
  misc_feature (1)..(307): NCBI GI NO: 28949891 NR Description: 1-aminocyclopropane-1-carboxylic acid oxidase
  misc_feature (1)..(307): NCBI GI NO: 27371996 NR Description: 1-aminocyclopropane-1-carboxylic acid oxidase
  misc_feature (1)..(307): NCBI GI NO: 18411485 NR Description: 1-aminocyclopropane-1-carboxylate oxidase
  misc_feature (1)..(307): NCBI GI NO: 21555054 NR Description: 1-aminocyclopropane-1-carboxylate oxidase
  misc_feature (1)..(307): NCBI GI NO: 25285689 NR Description: hypothetical protein F2P24.4
  misc_feature (4)..(311): NCBI GI NO: 7433206 NR Description: probable 1-aminocyclopropane-1-carboxylate oxidase
  misc_feature (4)..(307): NCBI GI NO: 2385371 NR Description: ACC oxidase [Malus x domestica]
MAIPVIDFSKLDGPERAETMAALAAGFEHVGFFQLVNTGISDDLLERVKKVCSDSYKLRDEAFKDSNPAVKALTELVDKEIEDGLPARKIKDMDWEDVFTLHDDLPWPSNPPAFKETMMEYRRELKKLAEKMLGVMEELLGLEEGHIRKAFSNDGEFEPFYGTKVSHYPPCPRPDLIDGLRAHTDAGGLILLFQDDRFGGLQAQLPDGSWVDVQPLENAIVINTGDQIEVLSNGRYKSAWHRILATRDGNRRSIASFYNPARLATIAPAIPAAGVGDDDYPSFVFGNYMEVYVKQKFQPKAPRFEAMATTTTK

SEQ ID NO: 19844 - protein, 294 aa, Zea mays subsp. mays
  peptide (1)..(294): Ceres Seq. ID no. 13623853
  misc_feature (140)..(241): Pfam Name: II Pfam Description: 2OG-Fe
  misc_feature (1)..(294): NCBI GI NO: 7433217 NR Description: 1-aminocyclopropane-1-carboxylate oxidase (EC1
  misc_feature (1)..(288): NCBI GI NO: 12001828 NR Description: 1-aminocyclopropane-1-carboxylate oxidase
  misc_feature (1)..(288): NCBI GI NO: 25452792 NR Description: 1-aminocyclopropane-1-carboxylate oxidase
  misc_feature (1)..(288): NCBI GI NO: 28949891 NR Description: 1-aminocyclopropane-1-carboxylic acid oxidase
  misc_feature (1)..(288): NCBI GI NO: 27371996 NR Description: 1-aminocyclopropane-1-carboxylic acid oxidase
  misc_feature (1)..(288): NCBI GI NO: 18411485 NR Description: 1-aminocyclopropane-1-carboxylate oxidase
  misc_feature (1)..(288): NCBI GI NO: 21555054 NR Description: 1-aminocyclopropane-1-carboxylate oxidase
  misc_feature (1)..(288): NCBI GI NO: 25285689 NR Description: hypothetical protein F2P24.4
  misc_feature (1)..(292): NCBI GI NO: 7433206 NR Description: probable 1-aminocyclopropane-1-carboxylate oxidase
  misc_feature (1)..(288): NCBI GI NO: 2385371 NR Description: ACC oxidase [Malus x domestica]
MAALAAGFEHVGFFQLVNTGISDDLLERVKKVCSDSYKLRDEAFKDSNPAVKALTELVDKEIEDGLPARKIKDMDWEDVFTLHDDLPWPSNPPAFKETMMEYRRELKKLAEKMLGVMEELLGLEEGHIRKAFSNDGEFEPFYGTKVSHYPPCPRPDLIDGLRAHTDAGGLILLFQDDRFGGLQAQLPDGSWVDVQPLENAIVINTGDQIEVLSNGRYKSAWHRILATRDGNRRSIASFYNPARLATIAPAIPAAGVGDDDYPSFVFGNYMEVYVKQKFQPKAPRFEAMATTTTK

SEQ ID NO: 19845 - DNA, 1657 bp, Zea mays subsp. mays
  misc_feature (1)..(1657): Ceres Seq. ID no. 13600140
aaatcacttcttcccggactcccagactcctcccaaaaccctcgcatcctctcccacgcatgtcacaatcgccatgaccgacagaaaccccgccgccgcctcaagcaagcgtcactgtgacctctccctcgacgatcccacgccgtcggccaagctccagcggtgctccgagccgtcagaaccaacgccggcggggaaaccgaacggcggcgcggcgacgggagaggagagcgagatgatggccggcgcacggaaccctagggcgcagaggtacctggtcgccgtggagtacattggcacccgcttctccggctcacagaagcagcccaaccagcgcaccgtcactggggtcctcgaggaggcatttcaccgatttattgggcagccagtttcaataatcttttctagccgaacggatgcaggtgttcatgctttatcaaatgtttgtcatgttgatgttgagcggataagtaaaaggaagcctggcgaagttttaacacctcatgagcctggagttgtaaaacgtgctgtgaaccactttctactgaagagtgaaggtgacataatggtgactgatgtctgctgtgttgcaccagattttcatgctagatacaaatctctagagcgcacatatcactatcgcttgcttgctggacctgaatcaacatctgtttttgagaaaaactctgtttggcatatatctgaagatttggatattcagtcaatgaagaaagcatgcagcatacttgttgggcatcatgatttcagttcatttcgagcggctggatgtcaggcaaactctccagtgcgaactctggatgaacttagtgttacagaagtattccctttcatgttttttccttcaagtgtagaaagatcagagttggaattatcaaatgtctctcttgtttattcaaggaaaccagacatggaatcttctgggaaaggatctgatggttcctgtaccagtagtgtgaaatcagattttgagaatggaaaagattttggaaagcggtcaaggcaccgttgctttgttgttactgcaagggcacggtcttttctttaccaccaggtaaggttgatggtcggtcttctaaaatctgttgggactggagatctaacaactgcagatgttgagagaattctggatgcaaagacggttactgctgcacccagtatggcaccttcttgtggtctgtaccttgctaacgttaaatatgatctgaatacctgaagacaagttttatcaagtggcttctgttggtgggcctccagattttgtcagctgttggctatcaaaggaattatatgctgccacttgccaaagctttcagttgcctgttttgtccactgaatcttgcatggtgattgaaaacctagaattaagtttatctgtcagcacaagagccggcttcattctcttcttgtacacagagctcttctgcatgttcagaaacaaaataggtagcttcattttagttaagttcaactatccactctttaaatttcagctggatccacccgattttgttgggtgtacgtagatttgacctggtaggggcaaaattttatttcttggttttctcatgactgtacttggttcttgatatataattaattagccaaaaaaaaaaaaaaaaaagcttatcgataccgt

SEQ ID NO: 19846 - protein, 410 aa, Zea mays subsp. mays
  peptide (1)..(410): Ceres Seq. ID no. 15218648
  misc_feature (139)..(205): Pfam Name: Pfam Description:  tRNA pseudouridine synthase
  misc_feature (264)..(377): NCBI GI NO: 15218280 NR Description: hypothetical protein [Arabidopsis thaliana]
  misc_feature (175)..(243): NCBI GI NO: 15218280 NR Description: hypothetical protein [Arabidopsis thaliana]
  misc_feature (85)..(119): NCBI GI NO: 15218280 NR Description: hypothetical protein [Arabidopsis thaliana]
  misc_feature (90)..(278): NCBI GI NO: 15887719 NR Description: AGR_C_644p [Agrobacterium tumefaciens]
  misc_feature (346)..(406): NCBI GI NO: 15887719 NR Description: AGR_C_644p [Agrobacterium tumefaciens]
  misc_feature (90)..(307): NCBI GI NO: 13474062 NR Description: tRNA-pseudouridine synthase (EC 5.4.99.12)
  misc_feature (346)..(406): NCBI GI NO: 13474062 NR Description: tRNA-pseudouridine synthase (EC 5.4.99.12)
  misc_feature (90)..(280): NCBI GI NO: 22965972 NR Description: hypothetical protein [Rhodospirillum rubrum]
  misc_feature (346)..(406): NCBI GI NO: 22965972 NR Description: hypothetical protein [Rhodospirillum rubrum]
  misc_feature (90)..(280): NCBI GI NO: 23016535 NR Description: hypothetical protein
NHFFPDSQTPPKTLASSPTHVTIAMTDRNPAAASSKRHCDLSLDDPTPSAKLQRCSEPSEPTPAGKPNGGAATGEESEMMAGARNPRAQRYLVAVEYIGTRFSGSQKQPNQRTVTGVLEEAFHRFIGQPVSIIFSSRTDAGVHALSNVCHVDVERISKRKPGEVLTPHEPGVVKRAVNHFLLKSEGDIMVTDVCCVAPDFHARYKSLERTYHYRLLAGPESTSVFEKNSVWHISEDLDIQSMKKACSILVGHHDFSSFRAAGCQANSPVRTLDELSVTEVFPFMFFPSSVERSELELSNVSLVYSRKPDMESSGKGSDGSCTSSVKSDFENGKDFGKRSRHRCFVVTARARSFLYHQVRLMVGLLKSVGTGDLTTADVERILDAKTVTAAPSMAPSCGLYLANVKYDLNT

SEQ ID NO: 19847 - protein, 386 aa, Zea mays subsp. mays
  peptide (1)..(386): Ceres Seq. ID no. 15218649
  misc_feature (115)..(181): Pfam Name: Pfam Description:  tRNA pseudouridine synthase
  misc_feature (240)..(353): NCBI GI NO: 15218280 NR Description: hypothetical protein [Arabidopsis thaliana]
  misc_feature (151)..(219): NCBI GI NO: 15218280 NR Description: hypothetical protein [Arabidopsis thaliana]
  misc_feature (61)..(95): NCBI GI NO: 15218280 NR Description: hypothetical protein [Arabidopsis thaliana]
  misc_feature (66)..(254): NCBI GI NO: 15887719 NR Description: AGR_C_644p [Agrobacterium tumefaciens]
  misc_feature (322)..(382): NCBI GI NO: 15887719 NR Description: AGR_C_644p [Agrobacterium tumefaciens]
  misc_feature (66)..(283): NCBI GI NO: 13474062 NR Description: tRNA-pseudouridine synthase (EC 5.4.99.12)
  misc_feature (322)..(382): NCBI GI NO: 13474062 NR Description: tRNA-pseudouridine synthase (EC 5.4.99.12)
  misc_feature (66)..(256): NCBI GI NO: 22965972 NR Description: hypothetical protein [Rhodospirillum rubrum]
  misc_feature (322)..(382): NCBI GI NO: 22965972 NR Description: hypothetical protein [Rhodospirillum rubrum]
  misc_feature (66)..(256): NCBI GI NO: 23016535 NR Description: hypothetical protein
MTDRNPAAASSKRHCDLSLDDPTPSAKLQRCSEPSEPTPAGKPNGGAATGEESEMMAGARNPRAQRYLVAVEYIGTRFSGSQKQPNQRTVTGVLEEAFHRFIGQPVSIIFSSRTDAGVHALSNVCHVDVERISKRKPGEVLTPHEPGVVKRAVNHFLLKSEGDIMVTDVCCVAPDFHARYKSLERTYHYRLLAGPESTSVFEKNSVWHISEDLDIQSMKKACSILVGHHDFSSFRAAGCQANSPVRTLDELSVTEVFPFMFFPSSVERSELELSNVSLVYSRKPDMESSGKGSDGSCTSSVKSDFENGKDFGKRSRHRCFVVTARARSFLYHQVRLMVGLLKSVGTGDLTTADVERILDAKTVTAAPSMAPSCGLYLANVKYDLNT

SEQ ID NO: 19848 - protein, 332 aa, Zea mays subsp. mays
  peptide (1)..(332): Ceres Seq. ID no. 15218650
  misc_feature (61)..(127): Pfam Name: Pfam Description:  tRNA pseudouridine synthase
  misc_feature (186)..(299): NCBI GI NO: 15218280 NR Description: hypothetical protein [Arabidopsis thaliana]
  misc_feature (97)..(165): NCBI GI NO: 15218280 NR Description: hypothetical protein [Arabidopsis thaliana]
  misc_feature (7)..(41): NCBI GI NO: 15218280 NR Description: hypothetical protein [Arabidopsis thaliana]
  misc_feature (12)..(200): NCBI GI NO: 15887719 NR Description: AGR_C_644p [Agrobacterium tumefaciens]
  misc_feature (268)..(328): NCBI GI NO: 15887719 NR Description: AGR_C_644p [Agrobacterium tumefaciens]
  misc_feature (12)..(229): NCBI GI NO: 13474062 NR Description: tRNA-pseudouridine synthase (EC 5.4.99.12)
  misc_feature (268)..(328): NCBI GI NO: 13474062 NR Description: tRNA-pseudouridine synthase (EC 5.4.99.12)
  misc_feature (12)..(202): NCBI GI NO: 22965972 NR Description: hypothetical protein [Rhodospirillum rubrum]
  misc_feature (268)..(328): NCBI GI NO: 22965972 NR Description: hypothetical protein [Rhodospirillum rubrum]
  misc_feature (12)..(202): NCBI GI NO: 23016535 NR Description: hypothetical protein
MMAGARNPRAQRYLVAVEYIGTRFSGSQKQPNQRTVTGVLEEAFHRFIGQPVSIIFSSRTDAGVHALSNVCHVDVERISKRKPGEVLTPHEPGVVKRAVNHFLLKSEGDIMVTDVCCVAPDFHARYKSLERTYHYRLLAGPESTSVFEKNSVWHISEDLDIQSMKKACSILVGHHDFSSFRAAGCQANSPVRTLDELSVTEVFPFMFFPSSVERSELELSNVSLVYSRKPDMESSGKGSDGSCTSSVKSDFENGKDFGKRSRHRCFVVTARARSFLYHQVRLMVGLLKSVGTGDLTTADVERILDAKTVTAAPSMAPSCGLYLANVKYDLNT

SEQ ID NO: 19849 - DNA, 1316 bp, Zea mays subsp. mays
  misc_feature (1)..(1316): Ceres Seq. ID no. 13600141
accatcgccacccgtcagtccgtcacccctcgcgcccatagtccccttccccataccatgtccgacctccacccgccggagcaccaagtcgccggccaccgcgcctccgccagcaagctgggcccgctcatcgacggctccggcctcttctacaagccgctccaggccggcgaccgtggggagcacgaggtcgccttctatgaggcgttctccgcccacgccgccgtcccggcccgcatccgagacaccttcttcccccggttccacggcacgcgactcctccccaccgaggcgcagcccggggagccgcatcctcacctcgtcctcgacgacctcctcgcggggtttcaggcgccctgcgtcgcagacatcaagatcggcgccatcacgtggccaccgagttcgccggagccctacatcgccaagtgcctcgccaaggaccgcgggaccacgagcgttctgctcggattccgcgtctccggcgtccgagtcgtcggccccgagggcgccgtgtggcggacggagcgcccggaggtgaaggccatggacaccgccggcgtccgccgcgtgctccggcgctacgtgtcatccgttgccgacgaggggatggactgtgcgctcgccgcggcggtgtacggaggaaaaggtggagtcttgtcacagctgcgcgagctcaaggcgtggttcgaggagcagactctgttccacttctactcggcgtcgattcttctgggctatgatgctgctgcagtcgcagcaggcggagatgggggtggggtgacggtgaagctggtggactttgcccatgtggccgagggtgatggggtgattgaccacaacttcctgggcgggctctgctcgctgatcaagttcgtttctgacattgttccggagactcctcatacgcagcctttgggtccttcttaagagaggatcctggcatttcgatttgataacaaagccctacaagttttgtctggaaaaagaagcgcctccgagttgtgctgggtgtggagatccgtgagacggtcgtcgccccacgtggttgccttgccttcccttccctgcaaacatacggcaacctgctccttttttcgcaacccctttcttcggaagaaacctttttctcacttttggggggttcgattacgttggattggaactggttgtgccactcggtcagaggttgtaagcatggaggcgtgttgatccggcaactgcctgtaccgctgctactagtcagtcttttgcctgctgtagctgcacatatggatggatgtgtatgggttatcagcagtgttccaaagcttatcgat

SEQ ID NO: 19850 - protein, 308 aa, Zea mays subsp. mays
  peptide (1)..(308): Ceres Seq. ID no. 13600142
  misc_feature (40)..(293): Pfam Name: Pfam Description:  Inositol polyphosphate kinase
  misc_feature (26)..(304): NCBI GI NO: 13509208 NR Description: hypothetical protein [Linum usitatissimum]
  misc_feature (23)..(296): NCBI GI NO: 15240350 NR Description: inositol polyphosphate 6-/3-/5-kinase 2b (IPK2b)
  misc_feature (23)..(296): NCBI GI NO: 21553994 NR Description: putative inositol hexaphosphate kinase
  misc_feature (23)..(300): NCBI GI NO: 21592823 NR Description: putative inositol hexaphosphate kinase
  misc_feature (23)..(300): NCBI GI NO: 15240776 NR Description: inositol polyphosphate 6-/3-/5-kinase 2a (IPK2a)
  misc_feature (23)..(294): NCBI GI NO: 13509210 NR Description: hypothetical protein [Linum usitatissimum]
  misc_feature (23)..(300): NCBI GI NO: 8919088 NR Description: putative inositol hexaphosphate kinase
  misc_feature (29)..(296): NCBI GI NO: 21430778 NR Description: SD14726p [Drosophila melanogaster]
  misc_feature (29)..(296): NCBI GI NO: 24580674 NR Description: CG13688-PA [Drosophila melanogaster]
  misc_feature (102)..(302): NCBI GI NO: 32564658 NR Description: inositol polyphosphate kinase (37.2 kD) (1K70)
TIATRQSVTPRAHSPLPHTMSDLHPPEHQVAGHRASASKLGPLIDGSGLFYKPLQAGDRGEHEVAFYEAFSAHAAVPARIRDTFFPRFHGTRLLPTEAQPGEPHPHLVLDDLLAGFQAPCVADIKIGAITWPPSSPEPYIAKCLAKDRGTTSVLLGFRVSGVRVVGPEGAVWRTERPEVKAMDTAGVRRVLRRYVSSVADEGMDCALAAAVYGGKGGVLSQLRELKAWFEEQTLFHFYSASILLGYDAAAVAAGGDGGGVTVKLVDFAHVAEGDGVIDHNFLGGLCSLIKFVSDIVPETPHTQPLGPS

SEQ ID NO: 19851 - protein, 289 aa, Zea mays subsp. mays
  peptide (1)..(289): Ceres Seq. ID no. 13600143
  misc_feature (21)..(274): Pfam Name: Pfam Description:  Inositol polyphosphate kinase
  misc_feature (7)..(285): NCBI GI NO: 13509208 NR Description: hypothetical protein [Linum usitatissimum]
  misc_feature (4)..(277): NCBI GI NO: 15240350 NR Description: inositol polyphosphate 6-/3-/5-kinase 2b (IPK2b)
  misc_feature (4)..(277): NCBI GI NO: 21553994 NR Description: putative inositol hexaphosphate kinase
  misc_feature (4)..(281): NCBI GI NO: 21592823 NR Description: putative inositol hexaphosphate kinase
  misc_feature (4)..(281): NCBI GI NO: 15240776 NR Description: inositol polyphosphate 6-/3-/5-kinase 2a (IPK2a)
  misc_feature (4)..(275): NCBI GI NO: 13509210 NR Description: hypothetical protein [Linum usitatissimum]
  misc_feature (4)..(281): NCBI GI NO: 8919088 NR Description: putative inositol hexaphosphate kinase
  misc_feature (10)..(277): NCBI GI NO: 21430778 NR Description: SD14726p [Drosophila melanogaster]
  misc_feature (10)..(277): NCBI GI NO: 24580674 NR Description: CG13688-PA [Drosophila melanogaster]
  misc_feature (83)..(283): NCBI GI NO: 32564658 NR Description: inositol polyphosphate kinase (37.2 kD) (1K70)
MSDLHPPEHQVAGHRASASKLGPLIDGSGLFYKPLQAGDRGEHEVAFYEAFSAHAAVPARIRDTFFPRFHGTRLLPTEAQPGEPHPHLVLDDLLAGFQAPCVADIKIGAITWPPSSPEPYIAKCLAKDRGTTSVLLGFRVSGVRVVGPEGAVWRTERPEVKAMDTAGVRRVLRRYVSSVADEGMDCALAAAVYGGKGGVLSQLRELKAWFEEQTLFHFYSASILLGYDAAAVAAGGDGGGVTVKLVDFAHVAEGDGVIDHNFLGGLCSLIKFVSDIVPETPHTQPLGPS

SEQ ID NO: 19852 - protein, 178 aa, Zea mays subsp. mays
  peptide (1)..(178): Ceres Seq. ID no. 13600144
  misc_feature (2)..(178): Pfam Name: Pfam Description:  Glycoprotein GG/GX
  misc_feature (1)..(167): NCBI GI NO: 1076211 NR Description: hypothetical protein VSP-3 - Chlamydomonasreinhardtii
  misc_feature (1)..(178): NCBI GI NO: 27375632 NR Description: blr0521 [Bradyrhizobium japonicum]
  misc_feature (3)..(178): NCBI GI NO: 15233976 NR Description: leucine-rich repeat extensin family
  misc_feature (2)..(178): NCBI GI NO: 23017082 NR Description: hypothetical protein [Thermobifida fusca]
  misc_feature (1)..(178): NCBI GI NO: 188864 NR Description: mucin
  misc_feature (2)..(178): NCBI GI NO: 13592175 NR Description: ppg3 [Leishmania major]
  misc_feature (1)..(173): NCBI GI NO: 14017929 NR Description: KIAA1856 protein [Homo sapiens]
  misc_feature (2)..(178): NCBI GI NO: 11359723 NR Description: proteophosphoglycan, membrane-associated
  misc_feature (1)..(178): NCBI GI NO: 186396 NR Description: mucin
  misc_feature (2)..(178): NCBI GI NO: 13592175 NR Description: ppg3 [Leishmania major]
PSPPVSPSPLAPIVPFPIPCPTSTRRSTKSPATAPPPASWARSSTAPASSTSRSRPATVGSTRSPSMRRSPPTPPSRPASETPSSPGSTARDSSPPRRSPGSRILTSSSTTSSRGFRRPASQTSRSAPSRGHRVRRSPTSPSASPRTAGPRAFCSDSASPASESSAPRAPCGGRSARR

SEQ ID NO: 19853 - DNA, 859 bp, Zea mays subsp. mays
  misc_feature (1)..(859): Ceres Seq. ID no. 14302675
atttttcgaccgccgccgcccccagtccccgatccgaagctgtgcctcgtaccatttcgatccaatggcgccgacgtcgaagctgtcgacgggcatcaagcgcgcttcgcggtcgcacacgtaccatcgccgtgggctgtgggccatcaaggccaagaacggcggcgccttccccaaggccgacaaggccgccgccgccgtggaacccaagttctaccctgccgacgacgtcaagccccgcgttcccagcacccgcaagcctaagcctaccaagctcaggtcgagcatcacgcctgggacggtgctgatcctcctcgcagggcgcttcatggggaagagagtggtgtttctcaagcagctcaagtctggcctgctccttatctctgggcctttcaagatcaatggagtaccgatccgccgtgtgaaccagacctatgtcattgctacatcaaccaaagttgacatctctggtgttgatgtcgccaagtttgatgacaagtactttgccagggagaagaagcagaaggtgaagaagaccgagggcgagctttttgagacagaaaaggaggcatccaagtcactgcctgacttcaagaaggatgaccagaaggctgtggattctgctctgatcaaggctatcgaggctgtcctggagctgaaaacctatcttggcgcccggttctctctcagggatggtgacaagccccatgagatggtattctaagtttctagttttggagttcgtaggaagctgttttgtctgtgttcttgtacttctgagttttgtaccagtagcgaacgtttcattgtgattgaagtcttcctgcccaaatattataagatctaagaaagttctatc

SEQ ID NO: 19854 - protein, 240 aa, Zea mays subsp. mays
  peptide (1)..(240): Ceres Seq. ID no. 14302676
  misc_feature (133)..(240): Pfam Name: Pfam Description:  Ribosomal protein L6e
  misc_feature (22)..(240): NCBI GI NO: 38344818 NR Description: OSJNBb0022F23.11
  misc_feature (28)..(240): NCBI GI NO: 15221126 NR Description: 60S ribosomal protein L6 (RPL6C)
  misc_feature (28)..(240): NCBI GI NO: 15221127 NR Description: 60S ribosomal protein L6 (RPL6B)
  misc_feature (27)..(240): NCBI GI NO: 464621 NR Description: 60S RIBOSOMAL PROTEIN L6 (YL16-LIKE)
  misc_feature (28)..(240): NCBI GI NO: 15221798 NR Description: 60S ribosomal protein L6 (RPL6A)
  misc_feature (28)..(240): NCBI GI NO: 21593910 NR Description: 60S ribosomal protein L6, putative
  misc_feature (28)..(240): NCBI GI NO: 7208784 NR Description: 60S ribosomal protein L6 [Cicer arietinum]
  misc_feature (69)..(240): NCBI GI NO: 6012952 NR Description: 60S ribosomal protein L6 (YL 16 like)
  misc_feature (67)..(240): NCBI GI NO: 7271018 NR Description: ribosomal protein L16 [Candida albicans]
  misc_feature (64)..(240): NCBI GI NO: 6323567 NR Description: Homology to rat L6 and human L6; Rpl6ap
FFDRRRPQSPIRSCASYHFDPMAPTSKLSTGIKRASRSHTYHRRGLWAIKAKNGGAFPKADKAAAAVEPKFYPADDVKPRVPSTRKPKPTKLRSSITPGTVLILLAGRFMGKRVVFLKQLKSGLLLISGPFKINGVPIRRVNQTYVIATSTKVDISGVDVAKFDDKYFAREKKQKVKKTEGELFETEKEASKSLPDFKKDDQKAVDSALIKAIEAVLELKTYLGARFSLRDGDKPHEMVF

SEQ ID NO: 19855 - protein, 219 aa, Zea mays subsp. mays
  peptide (1)..(219): Ceres Seq. ID no. 14302677
  misc_feature (112)..(219): Pfam Name: Pfam Description:  Ribosomal protein L6e
  misc_feature (1)..(219): NCBI GI NO: 38344818 NR Description: OSJNBb0022F23.11
  misc_feature (7)..(219): NCBI GI NO: 15221126 NR Description: 60S ribosomal protein L6 (RPL6C)
  misc_feature (7)..(219): NCBI GI NO: 15221127 NR Description: 60S ribosomal protein L6 (RPL6B)
  misc_feature (6)..(219): NCBI GI NO: 464621 NR Description: 60S RIBOSOMAL PROTEIN L6 (YL16-LIKE)
  misc_feature (7)..(219): NCBI GI NO: 15221798 NR Description: 60S ribosomal protein L6 (RPL6A)
  misc_feature (7)..(219): NCBI GI NO: 21593910 NR Description: 60S ribosomal protein L6, putative
  misc_feature (7)..(219): NCBI GI NO: 7208784 NR Description: 60S ribosomal protein L6 [Cicer arietinum]
  misc_feature (48)..(219): NCBI GI NO: 6012952 NR Description: 60S ribosomal protein L6 (YL 16 like)
  misc_feature (46)..(219): NCBI GI NO: 7271018 NR Description: ribosomal protein L16 [Candida albicans]
  misc_feature (43)..(219): NCBI GI NO: 6323567 NR Description: Homology to rat L6 and human L6; Rpl6ap
MAPTSKLSTGIKRASRSHTYHRRGLWAIKAKNGGAFPKADKAAAAVEPKFYPADDVKPRVPSTRKPKPTKLRSSITPGTVLILLAGRFMGKRVVFLKQLKSGLLLISGPFKINGVPIRRVNQTYVIATSTKVDISGVDVAKFDDKYFAREKKQKVKKTEGELFETEKEASKSLPDFKKDDQKAVDSALIKAIEAVLELKTYLGARFSLRDGDKPHEMVF

SEQ ID NO: 19856 - protein, 131 aa, Zea mays subsp. mays
  peptide (1)..(131): Ceres Seq. ID no. 14302678
  misc_feature (24)..(131): Pfam Name: Pfam Description:  Ribosomal protein L6e
  misc_feature (1)..(131): NCBI GI NO: 38344818 NR Description: OSJNBb0022F23.11
  misc_feature (1)..(131): NCBI GI NO: 15221126 NR Description: 60S ribosomal protein L6 (RPL6C)
  misc_feature (1)..(131): NCBI GI NO: 15221127 NR Description: 60S ribosomal protein L6 (RPL6B)
  misc_feature (1)..(131): NCBI GI NO: 464621 NR Description: 60S RIBOSOMAL PROTEIN L6 (YL16-LIKE)
  misc_feature (1)..(131): NCBI GI NO: 15221798 NR Description: 60S ribosomal protein L6 (RPL6A)
  misc_feature (1)..(131): NCBI GI NO: 21593910 NR Description: 60S ribosomal protein L6, putative
  misc_feature (1)..(131): NCBI GI NO: 7208784 NR Description: 60S ribosomal protein L6 [Cicer arietinum]
  misc_feature (1)..(131): NCBI GI NO: 6012952 NR Description: 60S ribosomal protein L6 (YL 16 like)
  misc_feature (1)..(131): NCBI GI NO: 7271018 NR Description: ribosomal protein L16 [Candida albicans]
  misc_feature (1)..(131): NCBI GI NO: 6323567 NR Description: Homology to rat L6 and human L6; Rpl6ap
MGKRVVFLKQLKSGLLLISGPFKINGVPIRRVNQTYVIATSTKVDISGVDVAKFDDKYFAREKKQKVKKTEGELFETEKEASKSLPDFKKDDQKAVDSALIKAIEAVLELKTYLGARFSLRDGDKPHEMVF

SEQ ID NO: 19857 - DNA, 728 bp, Zea mays subsp. mays
  misc_feature (1)..(728): Ceres Seq. ID no. 13600643
ataaattgggtacactctgatagcgagagaactcaccagacttgcagctccacaccagcaacagcgcgacgatagctagctagtagtagaagcaggcagcggctctagttgtcgagcgttccacaggtcatcaagcaccggcgtttaattagccatccgctccgatcgtcccctcccctattcccatggccagtttcgctgctcaggtcatggacatgttcttcgtgctcgtcgagcgcgtcaccggctacggcggccacgctgaggacgaccagaaggacgcttcaggtgcacatgagcccaccaagctgctgacatcgtctggcgtttctgaaaccgaacaaggagaagaagaggtggtcgttgcggtgcagaatgttcagataagagcaagagggggcggcgaaccctttgtgcaaggtggctcgatgcctcaggttaattagcactgcatgcatgcgggttttgtagaggttattagttgccgctgcctcaggtgatcgagcttcgcagacgatgatgcgtttaatttgcagccagtgttttaacctttttcatgcaaggatgtgtgtgtgtgtgttgtctggatcgtgtttcgtcgtttccttcttctgattgaattaagagtatgtctgtcgagttctatcaagttggttgtaattccagtatcctatgtgcaagcaatgtgtgagcttgctgtcaagtttgtggtgccatcgaatcagtcc

SEQ ID NO: 19858 - protein, 86 aa, Zea mays subsp. mays
  peptide (1)..(86): Ceres Seq. ID no. 13600644
  misc_feature (1)..(86): NCBI GI NO: 38345614 NR Description: OSJNBb0003B01.6
MASFAAQVMDMFFVLVERVTGYGGHAEDDQKDASGAHEPTKLLTSSGVSETEQGEEEVVVAVQNVQIRARGGGEPFVQGGSMPQVN

SEQ ID NO: 19859 - protein, 78 aa, Zea mays subsp. mays
  peptide (1)..(78): Ceres Seq. ID no. 13600645
  misc_feature (1)..(78): NCBI GI NO: 38345614 NR Description: OSJNBb0003B01.6
MDMFFVLVERVTGYGGHAEDDQKDASGAHEPTKLLTSSGVSETEQGEEEVVVAVQNVQIRARGGGEPFVQGGSMPQVN

SEQ ID NO: 19860 - protein, 76 aa, Zea mays subsp. mays
  peptide (1)..(76): Ceres Seq. ID no. 13600646
  misc_feature (1)..(76): NCBI GI NO: 38345614 NR Description: OSJNBb0003B01.6
MFFVLVERVTGYGGHAEDDQKDASGAHEPTKLLTSSGVSETEQGEEEVVVAVQNVQIRARGGGEPFVQGGSMPQVN

SEQ ID NO: 19861 - DNA, 1207 bp, Zea mays subsp. mays
  misc_feature (1)..(1207): Ceres Seq. ID no. 13600110
aattcgcttctctgtcaacttcacttcctcgtcgacgcctccggcccaccaaccatgccggcggctgcggcggcgcagaggctcctcgcggcgagcacgaaaatcatcggcgttgggcgcaactacatagcccactccaaggagctcggcaatccggtccccaaggagcccgtcctgttcctgaagccgacctcgtcgtttctccacgctggtgtggccaccgccgccgttgagatcccggagccgctcgagtcgctacaccacgaggtcgagctcgccgtcgtcatttcccggcgcctcctgtcgccgccgtccgccaccgcggccgctcggcgggccgcgccagttgccgctgaggctgtttccagcgggggtggcgtcctcctacctaggggtggtgtcgccggggtagcggccaacggatggagtggtagcggcccagggctccgcttggctcgaaggctctgcacctacgacgagagagatgacagggcactagaggaagaagttgagaagaaatttggatggatattgaagataatcttcctaggaactgctggcctagttggttaccaattctttccatacatgggtgataacctgcttcaacaatctatctcgcttttgcgtgtcaaggatcccttgttcaagcggatgggagcttctcgtttagctcgttttgcagtggatgaccaaagaagaatgaaggtggtagagatagggggagctcaggaactgcttaatgtattggaaggtgctaaagatgataaaacacgaaaagaaactctaaaagctcttgctgcgctttcaaaatctgaagaagctgcaggatttttggacaaggtcggcgcctacgctatagtcagttccactcccgactctcaagaatatgctgagatccaaacttacaagaccagtcttctgacggcatttgatcaactgaagtcatgatgtccaaatgccaatgggtatattaagcaacattttaactctgcactttgccgtggcggttaatgttctagtttcttgaatcgacgcaatttatctctagaacatgctggacctcctttgttgaccaagtgggttgctgatggaaatgcatgtctggttcatttgtttcaaacaggacagtacattctttccttctgtgggccaataacaagagctttaatttatttattttcttggtataaaaraaraaraaaar

SEQ ID NO: 19862 - protein, 316 aa, Zea mays subsp. mays
  peptide (1)..(316): Ceres Seq. ID no. 15218913
  misc_feature (49)..(108): Pfam Name: FAA Pfam Description: Fumarylacetoacetate
  misc_feature (92)..(316): NCBI GI NO: 40538927 NR Description: expressed protein
  misc_feature (152)..(308): NCBI GI NO: 30694398 NR Description: expressed protein [Arabidopsis thaliana]
  misc_feature (22)..(108): NCBI GI NO: 28372682 NR Description: putative isomerase
  misc_feature (22)..(108): NCBI GI NO: 34897304 NR Description: putative hydroxylase [Oryza sativa]
  misc_feature (219)..(308): NCBI GI NO: 11281187 NR Description: hypothetical protein F18O21
  misc_feature (21)..(108): NCBI GI NO: 15234757 NR Description: isomerase like protein [Arabidopsis thaliana]
  misc_feature (21)..(108): NCBI GI NO: 16209656 NR Description: AT4g15940/dl4011w [Arabidopsis thaliana]
  misc_feature (21)..(108): NCBI GI NO: 15228286 NR Description: decarboxilase -related [Arabidopsis thaliana]
  misc_feature (21)..(108): NCBI GI NO: 7485073 NR Description: hypothetical protein - Arabidopsis thaliana
  misc_feature (34)..(99): NCBI GI NO: 28829830 NR Description: similar to Arabidopsis thaliana (Mouse-ear cress)
NSLLCQLHFLVDASGPPTMPAAAAAQRLLAASTKIIGVGRNYIAHSKELGNPVPKEPVLFLKPTSSFLHAGVATAAVEIPEPLESLHHEVELAVVISRRLLSPPSATAAARRAAPVAAEAVSSGGGVLLPRGGVAGVAANGWSGSGPGLRLARRLCTYDERDDRALEEEVEKKFGWILKIIFLGTAGLVGYQFFPYMGDNLLQQSISLLRVKDPLFKRMGASRLARFAVDDQRRMKVVEIGGAQELLNVLEGAKDDKTRKETLKALAALSKSEEAAGFLDKVGAYAIVSSTPDSQEYAEIQTYKTSLLTAFDQLKS

SEQ ID NO: 19863 - protein, 298 aa, Zea mays subsp. mays
  peptide (1)..(298): Ceres Seq. ID no. 15218914
  misc_feature (31)..(90): Pfam Name: FAA Pfam Description: Fumarylacetoacetate
  misc_feature (74)..(298): NCBI GI NO: 40538927 NR Description: expressed protein
  misc_feature (134)..(290): NCBI GI NO: 30694398 NR Description: expressed protein [Arabidopsis thaliana]
  misc_feature (4)..(90): NCBI GI NO: 28372682 NR Description: putative isomerase
  misc_feature (4)..(90): NCBI GI NO: 34897304 NR Description: putative hydroxylase [Oryza sativa]
  misc_feature (201)..(290): NCBI GI NO: 11281187 NR Description: hypothetical protein F18O21
  misc_feature (3)..(90): NCBI GI NO: 15234757 NR Description: isomerase like protein [Arabidopsis thaliana]
  misc_feature (3)..(90): NCBI GI NO: 16209656 NR Description: AT4g15940/dl4011w [Arabidopsis thaliana]
  misc_feature (3)..(90): NCBI GI NO: 15228286 NR Description: decarboxilase -related [Arabidopsis thaliana]
  misc_feature (3)..(90): NCBI GI NO: 7485073 NR Description: hypothetical protein - Arabidopsis thaliana
  misc_feature (16)..(81): NCBI GI NO: 28829830 NR Description: similar to Arabidopsis thaliana (Mouse-ear cress)
MPAAAAAQRLLAASTKIIGVGRNYIAHSKELGNPVPKEPVLFLKPTSSFLHAGVATAAVEIPEPLESLHHEVELAVVISRRLLSPPSATAAARRAAPVAAEAVSSGGGVLLPRGGVAGVAANGWSGSGPGLRLARRLCTYDERDDRALEEEVEKKFGWILKIIFLGTAGLVGYQFFPYMGDNLLQQSISLLRVKDPLFKRMGASRLARFAVDDQRRMKVVEIGGAQELLNVLEGAKDDKTRKETLKALAALSKSEEAAGFLDKVGAYAIVSSTPDSQEYAEIQTYKTSLLTAFDQLKS

SEQ ID NO: 19864 - DNA, 954 bp, Zea mays subsp. mays
  misc_feature (1)..(954): Ceres Seq. ID no. 12594806
aagcgttctacggctccaatttctctgacttctccctgagcctttgcggccggctggagctggacggtccccgggcagcgcaggcagccggactgcgggagtcacctccatggcctcggctgctactgcaaccctccccaaggttcagttgaggccaagatgcaacagctacttccaggtccgccccgtccttgcactccctctcccctcccgaaagttcagctcatcagttgccctgttgattcgttccaacatgccctcaaccctaaggtgaccggtcaagtccatgcccacaccaaaacatgcggtgcctgcaagtgtccgacccatatccacgggttgcttgtttcagctggaggaaggaggacattcctgccggtgtctgcagttggatcaggtcagggctcatcggtcactgaggccgacaggaagagcgatttgtcgctggagaacgtcaagacgtccgttgtatcccgcgacggtgaaaagattaatgtacgagtgcagttgcctggaaaggcgacgcaaaaggtgtttgatgaggctctgacgttcttggcccgtgatgcgccaccggttcctggttttagaaagtccaaaggagggaaaacatcaaatatacccagcagcatcctgctgcagatgcttggcaagagccgggtcaccaaattcgttcttcaggaaatactgagcatcaccattgaagaatttgtcaagaaggaaaacctgaaggtgaaacctgagatccagacaacccagtccgaaggcgagatggagtccgcgttcgcgccgggatcagcatttgggttcaatgttgtccttcagctcgagacacctgactctgatgatccagaggagaaacctggctctgatgacgatttacaggaggaatctggttcctcggagtagaaagaaatgcatatcgcctgcatgcatttatcaaccttcttcatg

SEQ ID NO: 19865 - protein, 249 aa, Zea mays subsp. mays
  peptide (1)..(249): Ceres Seq. ID no. 12594807
  misc_feature (110)..(224): Pfam Name: TF Pfam Description: Bacterial trigger factor protein
  misc_feature (113)..(245): NCBI GI NO: 34907590 NR Description: B1078G07.36
  misc_feature (55)..(224): NCBI GI NO: 18402430 NR Description: Expressed protein; protein id: At2g30695
MQQLLPGPPRPCTPSPLPKVQLISCPVDSFQHALNPKVTGQVHAHTKTCGACKCPTHIHGLLVSAGGRRTFLPVSAVGSGQGSSVTEADRKSDLSLENVKTSVVSRDGEKINVRVQLPGKATQKVFDEALTFLARDAPPVPGFRKSKGGKTSNIPSSILLQMLGKSRVTKFVLQEILSITIEEFVKKENLKVKPEIQTTQSEGEMESAFAPGSAFGFNVVLQLETPDSDDPEEKPGSDDDLQEESGSSE

SEQ ID NO: 19866 - DNA, 890 bp, Zea mays subsp. mays
  misc_feature (1)..(890): Ceres Seq. ID no. 12579223
cccggccgtctcgatcccagcatccgagagagctccacaggccaggtccccatcgccgcggcgcttgccccacctctcccccgcccggtagtagcctcgccgccgttgccgagatggggttcgtgtccttcgtcgggagggtgctcttcgtcgccgctttcctcctctccgcctaccaggagtttaatgaattcggtgctgatggtggaccagcagctaaggcccttcggcccaaattcaacgtgtttgtcaaaaatgtatctgctcatctgggagtagctgtgccacacattgagttgaagcatgtgattgctgctacaattggtcttaagggtcttggaagcctcctttttattttgagcagctctctcggtgcttatctcctgctgctgtaccttgctttgatcactcctatcatccatgacttctacaactacgatatggagaaggcagaatttgcaggcctctttgcgaagttcacccaggatttggcgctgatcggagctctgctcttctttctgggcatgaagaactccatcccgaagcggcagggcggcaagaagaaggcccccaaggcgaagacgaactagggctgcttagatagctgcacgcctcaggtggggtgtatcaggagacaggtctatttcgaagcaggctcagcgcgatgcagcgaatgccatcgagctgcgcttttacatgtttatcatcagattccattttgcggcccgaacaaaggtgtgaccggggtgggttaggcgactagattgcacgattatgtacttgagatttgtttgttgaactgggttgccgacggttaatcttctccatttgattttatcttgttagcagcgcaggaaccgttgctgattcagtggttggtagtttcttcc

SEQ ID NO: 19867 - protein, 195 aa, Zea mays subsp. mays
  peptide (1)..(195): Ceres Seq. ID no. 12579224
  misc_feature (38)..(175): Pfam Name: Pfam Description:  HR-like lesion-inducing
  misc_feature (38)..(195): NCBI GI NO: 27261473 NR Description: Unknown protein
  misc_feature (61)..(194): NCBI GI NO: 37534824 NR Description: putative RNA-binding protein
  misc_feature (38)..(61): NCBI GI NO: 37534824 NR Description: putative RNA-binding protein
  misc_feature (38)..(195): NCBI GI NO: 38346190 NR Description: OSJNBa0027O01.6
  misc_feature (38)..(195): NCBI GI NO: 7489144 NR Description: hypothetical protein (clone NF22) - common tobacco
  misc_feature (38)..(195): NCBI GI NO: 15236497 NR Description: elicitor like protein; protein id: At4g14420
  misc_feature (38)..(165): NCBI GI NO: 7489143 NR Description: hypothetical protein (clone ND1) - common tobacco
  misc_feature (38)..(193): NCBI GI NO: 15219714 NR Description: unknown protein; protein id: At1g04340
  misc_feature (38)..(193): NCBI GI NO: 21592798 NR Description: Nicotiana lesion-inducing like
  misc_feature (38)..(193): NCBI GI NO: 15239873 NR Description: Nicotiana lesion-inducing like
RPSRSQHPRELHRPGPHRRGACPTSPPPGSSLAAVAEMGFVSFVGRVLFVAAFLLSAYQEFNEFGADGGPAAKALRPKFNVFVKNVSAHLGVAVPHIELKHVIAATIGLKGLGSLLFILSSSLGAYLLLLYLALITPIIHDFYNYDMEKAEFAGLFAKFTQDLALIGALLFFLGMKNSIPKRQGGKKKAPKAKTN

SEQ ID NO: 19868 - protein, 158 aa, Zea mays subsp. mays
  peptide (1)..(158): Ceres Seq. ID no. 12579225
  misc_feature (1)..(138): Pfam Name: Pfam Description:  HR-like lesion-inducing
  misc_feature (1)..(158): NCBI GI NO: 27261473 NR Description: Unknown protein
  misc_feature (24)..(157): NCBI GI NO: 37534824 NR Description: putative RNA-binding protein
  misc_feature (1)..(24): NCBI GI NO: 37534824 NR Description: putative RNA-binding protein
  misc_feature (1)..(158): NCBI GI NO: 38346190 NR Description: OSJNBa0027O01.6
  misc_feature (1)..(158): NCBI GI NO: 7489144 NR Description: hypothetical protein (clone NF22) - common tobacco
  misc_feature (1)..(158): NCBI GI NO: 15236497 NR Description: elicitor like protein; protein id: At4g14420
  misc_feature (1)..(128): NCBI GI NO: 7489143 NR Description: hypothetical protein (clone ND1) - common tobacco
  misc_feature (1)..(156): NCBI GI NO: 15219714 NR Description: unknown protein; protein id: At1g04340
  misc_feature (1)..(156): NCBI GI NO: 21592798 NR Description: Nicotiana lesion-inducing like
  misc_feature (1)..(156): NCBI GI NO: 15239873 NR Description: Nicotiana lesion-inducing like
MGFVSFVGRVLFVAAFLLSAYQEFNEFGADGGPAAKALRPKFNVFVKNVSAHLGVAVPHIELKHVIAATIGLKGLGSLLFILSSSLGAYLLLLYLALITPIIHDFYNYDMEKAEFAGLFAKFTQDLALIGALLFFLGMKNSIPKRQGGKKKAPKAKTN

SEQ ID NO: 19869 - DNA, 1365 bp, Zea mays subsp. mays
  misc_feature (1)..(1365): Ceres Seq. ID no. 15179680
gtgctgtcgcggtgtcgccagccagccgcctcccgcatcgcctccaaggctctccaaccggggcgcctgcctaaccggccgatttccttccttgcgtagctccattccactgcacaaacagcgcgccactttcccaattcccgtcgcgtggcctccttccgatcctggccactttgtgcgtcctgtagcgagggggtgatcggtgatggactgggggaacaggaccaaggccgccgccgccgctgcggcgccggacgagagggccgggggaggggaagggctcggaggatacgtcaaggtcatgaccgacgaacagatggaggtgctccgcaagcagatctccatctacgccaccatctgcgagcagcttgtcgagatgcatcgcgtcctcaccgagcaccaggacaccattgcaggattgaggtttagcaatctgtactgtgaccctctaatcatcgccggcggtcacaagatcacggcaaggcagcggtggcaaccaacaccgatgcagctgcagatcctggagagcatcttcgaccagggcaacgggacaccgagcaagcagaagataaaggagatagcagcggagctctcgcagcacggccagatctcggagacgaacgtgtacaactggttccagaacaggcgggcacggtcgaagcggaagcaggccgctgcttccttaccgaacaacgccgaatccgaagccgaggcggacgaggagcctctcgccgacaagaagccgaagtcagacaggccgccgccgccgccgccgccgatccaggataataccaaggctacgggcgctctcagcgccgacagggtctctggtgggacgcgtcacttggacacgggtcatgaccagaccagtggcgtgatgtatgggtgcaacgacagtggcttgttgagatcgtccggcagttcgggccagatgtccttgtacgagaacttcatgtcgaatccaagaatcgatcgtttcccggcgaaggtggagagctcccggagcttcccccatctccaacaacacggggaaggctttggcatgtttggatgacatgcatgctgctgcgctgagttgccgtgtgaaaaatggaggtcgacacagcgtgcgttcgatttgctgacgtgaaagttttatcttggatggtacgtgttgcttatcacggtctggttgaccacctccgcggatggtagctagctagcttgaacgaacctgctcttttggagtagctgtaagaggttgatatatagtagtatttgcacgtagtctaattactctaaattatcagcatataattcttcatgtttgcagatttagcacgagaccagtcctacgctgctgctgctgagcagcaggttgtggtt

SEQ ID NO: 19870 - protein, 282 aa, Zea mays subsp. mays
  peptide (1)..(282): Ceres Seq. ID no. 15179681
  misc_feature (92)..(153): Pfam Name: Pfam Description:  Homeobox domain
  misc_feature (1)..(253): NCBI GI NO: 34909272 NR Description: putative HB2 homeodomain protein
  misc_feature (21)..(217): NCBI GI NO: 40233087 NR Description: homeodomain protein HB2 [Populus tomentosa]
  misc_feature (29)..(217): NCBI GI NO: 3955021 NR Description: HB2 homeodomain protein
  misc_feature (1)..(179): NCBI GI NO: 15237035 NR Description: homeodomain protein HB2, putative
  misc_feature (19)..(195): NCBI GI NO: 40233067 NR Description: homeodomain protein HB1 [Populus tomentosa]
  misc_feature (19)..(195): NCBI GI NO: 3955019 NR Description: HB1 homeodomain protein
  misc_feature (27)..(173): NCBI GI NO: 30686974 NR Description: homeodomain protein PALE-2, putative
  misc_feature (24)..(172): NCBI GI NO: 15218015 NR Description: homeodomain protein [Arabidopsis thaliana]
  misc_feature (119)..(183): NCBI GI NO: 18419580 NR Description: putative homeobox-containing protein
  misc_feature (86)..(191): NCBI GI NO: 8099120 NR Description: similar to a putative homeodomain transcriptionfactor of Arabidopsis thialiana
MDWGNRTKAAAAAAAPDERAGGGEGLGGYVKVMTDEQMEVLRKQISIYATICEQLVEMHRVLTEHQDTIAGLRFSNLYCDPLIIAGGHKITARQRWQPTPMQLQILESIFDQGNGTPSKQKIKEIAAELSQHGQISETNVYNWFQNRRARSKRKQAAASLPNNAESEAEADEEPLADKKPKSDRPPPPPPPIQDNTKATGALSADRVSGGTRHLDTGHDQTSGVMYGCNDSGLLRSSGSSGQMSLYENFMSNPRIDRFPAKVESSRSFPHLQQHGEGFGMFG

SEQ ID NO: 19871 - protein, 250 aa, Zea mays subsp. mays
  peptide (1)..(250): Ceres Seq. ID no. 15179682
  misc_feature (60)..(121): Pfam Name: Pfam Description:  Homeobox domain
  misc_feature (1)..(221): NCBI GI NO: 34909272 NR Description: putative HB2 homeodomain protein
  misc_feature (1)..(185): NCBI GI NO: 40233087 NR Description: homeodomain protein HB2 [Populus tomentosa]
  misc_feature (1)..(185): NCBI GI NO: 3955021 NR Description: HB2 homeodomain protein
  misc_feature (1)..(147): NCBI GI NO: 15237035 NR Description: homeodomain protein HB2, putative
  misc_feature (1)..(163): NCBI GI NO: 40233067 NR Description: homeodomain protein HB1 [Populus tomentosa]
  misc_feature (1)..(163): NCBI GI NO: 3955019 NR Description: HB1 homeodomain protein
  misc_feature (1)..(141): NCBI GI NO: 30686974 NR Description: homeodomain protein PALE-2, putative
  misc_feature (1)..(140): NCBI GI NO: 15218015 NR Description: homeodomain protein [Arabidopsis thaliana]
  misc_feature (87)..(151): NCBI GI NO: 18419580 NR Description: putative homeobox-containing protein
  misc_feature (54)..(159): NCBI GI NO: 8099120 NR Description: similar to a putative homeodomain transcriptionfactor of Arabidopsis thialiana
MTDEQMEVLRKQISIYATICEQLVEMHRVLTEHQDTIAGLRFSNLYCDPLIIAGGHKITARQRWQPTPMQLQILESIFDQGNGTPSKQKIKEIAAELSQHGQISETNVYNWFQNRRARSKRKQAAASLPNNAESEAEADEEPLADKKPKSDRPPPPPPPIQDNTKATGALSADRVSGGTRHLDTGHDQTSGVMYGCNDSGLLRSSGSSGQMSLYENFMSNPRIDRFPAKVESSRSFPHLQQHGEGFGMFG

SEQ ID NO: 19872 - protein, 245 aa, Zea mays subsp. mays
  peptide (1)..(245): Ceres Seq. ID no. 15179683
  misc_feature (55)..(116): Pfam Name: Pfam Description:  Homeobox domain
  misc_feature (1)..(216): NCBI GI NO: 34909272 NR Description: putative HB2 homeodomain protein
  misc_feature (1)..(180): NCBI GI NO: 40233087 NR Description: homeodomain protein HB2 [Populus tomentosa]
  misc_feature (1)..(180): NCBI GI NO: 3955021 NR Description: HB2 homeodomain protein
  misc_feature (1)..(142): NCBI GI NO: 15237035 NR Description: homeodomain protein HB2, putative
  misc_feature (1)..(158): NCBI GI NO: 40233067 NR Description: homeodomain protein HB1 [Populus tomentosa]
  misc_feature (1)..(158): NCBI GI NO: 3955019 NR Description: HB1 homeodomain protein
  misc_feature (1)..(136): NCBI GI NO: 30686974 NR Description: homeodomain protein PALE-2, putative
  misc_feature (1)..(135): NCBI GI NO: 15218015 NR Description: homeodomain protein [Arabidopsis thaliana]
  misc_feature (82)..(146): NCBI GI NO: 18419580 NR Description: putative homeobox-containing protein
  misc_feature (49)..(154): NCBI GI NO: 8099120 NR Description: similar to a putative homeodomain transcriptionfactor of Arabidopsis thialiana
MEVLRKQISIYATICEQLVEMHRVLTEHQDTIAGLRFSNLYCDPLIIAGGHKITARQRWQPTPMQLQILESIFDQGNGTPSKQKIKEIAAELSQHGQISETNVYNWFQNRRARSKRKQAAASLPNNAESEAEADEEPLADKKPKSDRPPPPPPPIQDNTKATGALSADRVSGGTRHLDTGHDQTSGVMYGCNDSGLLRSSGSSGQMSLYENFMSNPRIDRFPAKVESSRSFPHLQQHGEGFGMFG

SEQ ID NO: 19873 - DNA, 547 bp, Zea mays subsp. mays
  misc_feature (1)..(547): Ceres Seq. ID no. 13624647
ataccgatttgcagacccatggtgctgacgaagaatgcactccgcattctctacaaatagcttggcaccttgacacctagcttcacctccctcctcctggcccagtcgtcctagccatcaaaattcagttgagggttcttcagttcagccatgaagcttgagatgacagcagcggccatggtcttgatcctgctgacctcgggcgccgaggccaaggtctgctactcgcggagcaggaccttcaaggggtggtgctaccacagcatcaactgcatcgccatctgcatcaccgagggcgacaccagcgggttctgccaggccggggcctgcatgtgcacttatgagtgtctcaatggtgtcgtcgccggtggcggcggtggcggcggacagcatccatcggttggctcatcgcgtggtggtggtgctgaggctaaagcagccgtcccatcagtgtagagcttctgattctggcggggtgatggcagatggtgcactactactcttccgtgcacatgctaactcaaggtttcgagttgatgaataacac

SEQ ID NO: 19874 - protein, 101 aa, Zea mays subsp. mays
  peptide (1)..(101): Ceres Seq. ID no. 13624648
  misc_feature (22)..(66): Pfam Name: Pfam Description:  Gamma-thionins family
  misc_feature (5)..(79): NCBI GI NO: 34907150 NR Description: P0506E04.26
  misc_feature (2)..(66): NCBI GI NO: 17373811 NR Description: Defensin J1-2 precursor
  misc_feature (1)..(66): NCBI GI NO: 28624546 NR Description: defensin protein 1 [Prunus persica]
  misc_feature (1)..(66): NCBI GI NO: 7939581 NR Description: thionin like protein [Nicotiana tabacum]
  misc_feature (10)..(66): NCBI GI NO: 7451428 NR Description: proteinase inhibitor - rice
MKLEMTAAAMVLILLTSGAEAKVCYSRSRTFKGWCYHSINCIAICITEGDTSGFCQAGACMCTYECLNGVVAGGGGGGGQHPSVGSSRGGGAEAKAAVPSV

SEQ ID NO: 19875 - protein, 97 aa, Zea mays subsp. mays
  peptide (1)..(97): Ceres Seq. ID no. 13624649
  misc_feature (18)..(62): Pfam Name: Pfam Description:  Gamma-thionins family
  misc_feature (1)..(75): NCBI GI NO: 34907150 NR Description: P0506E04.26
  misc_feature (1)..(62): NCBI GI NO: 17373811 NR Description: Defensin J1-2 precursor
  misc_feature (1)..(62): NCBI GI NO: 28624546 NR Description: defensin protein 1 [Prunus persica]
  misc_feature (1)..(62): NCBI GI NO: 7939581 NR Description: thionin like protein [Nicotiana tabacum]
  misc_feature (6)..(62): NCBI GI NO: 7451428 NR Description: proteinase inhibitor - rice
MTAAAMVLILLTSGAEAKVCYSRSRTFKGWCYHSINCIAICITEGDTSGFCQAGACMCTYECLNGVVAGGGGGGGQHPSVGSSRGGGAEAKAAVPSV

SEQ ID NO: 19876 - protein, 92 aa, Zea mays subsp. mays
  peptide (1)..(92): Ceres Seq. ID no. 13624650
  misc_feature (13)..(57): Pfam Name: Pfam Description:  Gamma-thionins family
  misc_feature (1)..(70): NCBI GI NO: 34907150 NR Description: P0506E04.26
  misc_feature (1)..(57): NCBI GI NO: 17373811 NR Description: Defensin J1-2 precursor
  misc_feature (1)..(57): NCBI GI NO: 28624546 NR Description: defensin protein 1 [Prunus persica]
  misc_feature (1)..(57): NCBI GI NO: 7939581 NR Description: thionin like protein [Nicotiana tabacum]
  misc_feature (1)..(57): NCBI GI NO: 7451428 NR Description: proteinase inhibitor - rice
MVLILLTSGAEAKVCYSRSRTFKGWCYHSINCIAICITEGDTSGFCQAGACMCTYECLNGVVAGGGGGGGQHPSVGSSRGGGAEAKAAVPSV

SEQ ID NO: 19877 - DNA, 1133 bp, Zea mays subsp. mays
  misc_feature (1)..(1133): Ceres Seq. ID no. 13624283
acgcctgcacatccccactcctaaaaatagtagccggcggcatgcaaatacgataccccacgccttcttcccgttcatgatatggagctctcctcagatcaataatgggcctatatatgagacgcacgagcaacgccagttagcaaccagccaccactaccaaccctccagtctcagtctccgtctcctgctgagcaacaaggcttcagcagttcagagattctgctggagcctggaggaagcttctctacccaccactccgacgcggccgccgtcgacgagatcagccgcgccgtcgccaccaaaggcaaaagaagagatcgagctcgaggctcgagctcgagcaggcagcagggagggggcacccagatatatagatccccaaaaggtgcatgtaatcatcggctgcgtcgtcacgtcagtcgttcatgtgtttgtatctgattcgtggatgccagattaattgatggacctgtccccgaaccccgagagcccgggaagcggtggtgatggcggcggtggcggaggcggagccgggggatcgagcagcggcggggcgtctccgtcggggggcttcggcacgccgcagacgccgagccggtacgaggcgcagaagcggcgggactggaacacgttcgggcagtacctgcggaaccaccggccgccgctgagcctggcgcagtgcagcggtgcgcacgtgctggagttcctgcgctacctggaccagttcggcaagaccaaggtgcacacgccggcgtgccccttcttcggccacccgaacccgcccgcgccgtgcccctgcccgctgcgccaggcctggggtagcctcgacgcgctggtggcccgcctccgcgccgccttcgaggagaacggggtcctcccggagtccaaccccttcgcggcgcgcgccgtccgcctctacctccgcgaggtccgcgagcaccaggcccgcgcgcgcggcgtcagctacgagaagaagaagcgcaagaaggcgcagcggccggctgatcatgccagcggcagtggaggcggccaaggacctcaccacccgccgcccgccggcgcgtcgggctgaggaacccatggtatgccggccggactgagcatattttatgtaggtttcgatcgatttg

SEQ ID NO: 19878 - protein, 202 aa, Zea mays subsp. mays
  peptide (1)..(202): Ceres Seq. ID no. 13624284
  misc_feature (24)..(159): Pfam Name: DUF640 Pfam Description: Protein of unknown function
  misc_feature (1)..(202): NCBI GI NO: 38344650 NR Description: OSJNBb0072M01.12
  misc_feature (7)..(201): NCBI GI NO: 37535384 NR Description: hypothetical protein
  misc_feature (9)..(186): NCBI GI NO: 18402578 NR Description: expressed protein [Arabidopsis thaliana]
  misc_feature (20)..(202): NCBI GI NO: 34907938 NR Description: B1088C09.17
  misc_feature (30)..(175): NCBI GI NO: 18390725 NR Description: expressed protein [Arabidopsis thaliana]
  misc_feature (39)..(179): NCBI GI NO: 15241821 NR Description: expressed protein [Arabidopsis thaliana]
  misc_feature (29)..(188): NCBI GI NO: 15237680 NR Description: hypothetical protein [Arabidopsis thaliana]
  misc_feature (32)..(174): NCBI GI NO: 15229310 NR Description: hypothetical protein [Arabidopsis thaliana]
  misc_feature (34)..(175): NCBI GI NO: 18406012 NR Description: expressed protein [Arabidopsis thaliana]
  misc_feature (19)..(191): NCBI GI NO: 18412120 NR Description: expressed protein [Arabidopsis thaliana]
MDLSPNPESPGSGGDGGGGGGGAGGSSSGGASPSGGFGTPQTPSRYEAQKRRDWNTFGQYLRNHRPPLSLAQCSGAHVLEFLRYLDQFGKTKVHTPACPFFGHPNPPAPCPCPLRQAWGSLDALVARLRAAFEENGVLPESNPFAARAVRLYLREVREHQARARGVSYEKKKRKKAQRPADHASGSGGGQGPHHPPPAGASG

SEQ ID NO: 19879 - protein, 153 aa, Zea mays subsp. mays
  peptide (1)..(153): Ceres Seq. ID no. 13624285
RLHIPTPKNSSRRHANTIPHAFFPFMIWSSPQINNGPIYETHEQRQLATSHHYQPSSLSLRLLLSNKASAVQRFCWSLEEASLPTTPTRPPSTRSAAPSPPKAKEEIELEARARAGSREGAPRYIDPQKVHVIIGCVVTSVVHVFVSDSWMPD

SEQ ID NO: 19880 - protein, 128 aa, Zea mays subsp. mays
  peptide (1)..(128): Ceres Seq. ID no. 13624286
MIWSSPQINNGPIYETHEQRQLATSHHYQPSSLSLRLLLSNKASAVQRFCWSLEEASLPTTPTRPPSTRSAAPSPPKAKEEIELEARARAGSREGAPRYIDPQKVHVIIGCVVTSVVHVFVSDSWMPD

SEQ ID NO: 19881 - DNA, 906 bp, Zea mays subsp. mays
  misc_feature (1)..(906): Ceres Seq. ID no. 13600477
accgtgtctgcctcaaagctatgccaggacgccacgtccaagcaaagcacccgatgccattgccacctcccagcactcacgcgtgagcgtgactataaaaaacgcaccctctgcatccgcccccgtctgcctgccctatcgaatctttcgccgccccatcagcccagcaattcttcgctgttcgttgccgttggttccatcggttgatcgaccggccggaagcagagagagagagatgggcaagtcctgggcgctcatcagccacctccacaccgtcgccgggccgagcatcaccctgctgtaccctctgtacgcgtcggtgtgcgcgatggagagcccgtccaaggcggacgacgagcagtggctgtcctactggatcatacactccttcgtcaccctcctggagatgctcgccgagccgctcctccactgggtacccgtgtggtacccggccaaggtgctgttcgcggcgtggctggcgctgccgcagttcaagggcgcctccttcgtctacgagaagctcgtcagggaacagctccggaactaccgcgccaggtacccgcgcaagggcgccgccgccgccgccgccgtcggcgacgacgacgacgaccataaggtgcacatagccaaggtaggctgaggctgagcacgaccatgtgcagtgaaagcgtgtggagacgacgcaggagctgaccggagatcatcacaggaacttctgtagatctggtgttccaaggtgttcatttgatgtatcctacgtgtctctgtagctcttgtggactgccggtgtcgcgtaatgtatctgaactctcttcgcgagtgcgacggaaccccccctccccttgcagcacgagatgcttctgtaagaacgataacatgtagacaagccaagcgcctcagctcctt

SEQ ID NO: 19882 - protein, 212 aa, Zea mays subsp. mays
  peptide (1)..(212): Ceres Seq. ID no. 13600478
  misc_feature (82)..(179): Pfam Name: Pfam Description:  TB2/DP1, HVA22 family
  misc_feature (79)..(210): NCBI GI NO: 1076715 NR Description: abscisic acid-induced protein HVA22 - barley
  misc_feature (79)..(210): NCBI GI NO: 33342176 NR Description: hypothetical protein [Triticum aestivum]
  misc_feature (79)..(188): NCBI GI NO: 18423191 NR Description: expressed protein [Arabidopsis thaliana]
  misc_feature (79)..(182): NCBI GI NO: 18416458 NR Description: abscisic acid-induced - like protein
  misc_feature (99)..(188): NCBI GI NO: 8777395 NR Description: gene_id:MFB16
  misc_feature (99)..(182): NCBI GI NO: 7484787 NR Description: abscisic acid-induced protein homolog F13M23
  misc_feature (85)..(184): NCBI GI NO: 15221266 NR Description: AtHVA22a [Arabidopsis thaliana]
  misc_feature (85)..(179): NCBI GI NO: 4884934 NR Description: AtHVA22b [Arabidopsis thaliana]
  misc_feature (85)..(179): NCBI GI NO: 15241840 NR Description: AtHVA22b-related protein [Arabidopsis thaliana]
  misc_feature (85)..(181): NCBI GI NO: 15222421 NR Description: AtHVA22c [Arabidopsis thaliana]
PCLPQSYARTPRPSKAPDAIATSQHSRVSVTIKNAPSASAPVCLPYRIFRRPISPAILRCSLPLVPSVDRPAGSREREMGKSWALISHLHTVAGPSITLLYPLYASVCAMESPSKADDEQWLSYWIIHSFVTLLEMLAEPLLHWVPVWYPAKVLFAAWLALPQFKGASFVYEKLVREQLRNYRARYPRKGAAAAAAVGDDDDDHKVHIAKVG

SEQ ID NO: 19883 - protein, 134 aa, Zea mays subsp. mays
  peptide (1)..(134): Ceres Seq. ID no. 13600479
  misc_feature (4)..(101): Pfam Name: Pfam Description:  TB2/DP1, HVA22 family
  misc_feature (1)..(132): NCBI GI NO: 1076715 NR Description: abscisic acid-induced protein HVA22 - barley
  misc_feature (1)..(132): NCBI GI NO: 33342176 NR Description: hypothetical protein [Triticum aestivum]
  misc_feature (1)..(110): NCBI GI NO: 18423191 NR Description: expressed protein [Arabidopsis thaliana]
  misc_feature (1)..(104): NCBI GI NO: 18416458 NR Description: abscisic acid-induced - like protein
  misc_feature (21)..(110): NCBI GI NO: 8777395 NR Description: gene_id:MFB16
  misc_feature (21)..(104): NCBI GI NO: 7484787 NR Description: abscisic acid-induced protein homolog F13M23
  misc_feature (7)..(106): NCBI GI NO: 15221266 NR Description: AtHVA22a [Arabidopsis thaliana]
  misc_feature (7)..(101): NCBI GI NO: 4884934 NR Description: AtHVA22b [Arabidopsis thaliana]
  misc_feature (7)..(101): NCBI GI NO: 15241840 NR Description: AtHVA22b-related protein [Arabidopsis thaliana]
  misc_feature (7)..(103): NCBI GI NO: 15222421 NR Description: AtHVA22c [Arabidopsis thaliana]
MGKSWALISHLHTVAGPSITLLYPLYASVCAMESPSKADDEQWLSYWIIHSFVTLLEMLAEPLLHWVPVWYPAKVLFAAWLALPQFKGASFVYEKLVREQLRNYRARYPRKGAAAAAAVGDDDDDHKVHIAKVG

SEQ ID NO: 19884 - DNA, 511 bp, Zea mays subsp. mays
  misc_feature (1)..(511): Ceres Seq. ID no. 13624271
  misc_feature (436)..(436): n is a, c, t, g, unknown, or other
accaccgcatcccacaacccccgagctcagcttagctccactccagctccaatcgcagtcgtgaccagagcgcgagagctagctagagggccgtgaaaatgccgatcaataggatcgccctggggagccaccaggaggtgtaccacccgggcgccctcaaggcggcgttcgctgagttcatctccaccctcatcttcgtcttcgccggccagggctccggcatggccttcagcaagctgaccggcggcggcccgacgaccccggcgggcctgatcgcggcggcggtggcgcacgcgttcgcgctgtttcgtggcggtgtctgtgggcgcgaacaatctccggcgggcacgtgaaaccctgccgtggaccttcggcgccttcgtgggcggcaacatcacccttgttccgggggctcctggtactggggtggcgcagnctgctggggtccaaccgtggcgtgcttcctgctccggcttctcgacgggcgggcaggccacgggcacctttcggg

SEQ ID NO: 19885 - protein, 84 aa, Zea mays subsp. mays
  peptide (1)..(84): Ceres Seq. ID no. 13624272
  misc_feature (13)..(84): Pfam Name: Pfam Description:  Major intrinsic protein
  misc_feature (1)..(84): NCBI GI NO: 3004950 NR Description: tonoplast intrinsic protein; ZmTIP1 [Zea mays]
  misc_feature (1)..(84): NCBI GI NO: 1729971 NR Description: TONOPLAST INTRINSIC PROTEIN, GAMMA
  misc_feature (1)..(84): NCBI GI NO: 629784 NR Description: tonoplast intrinsic protein gamma - barley
  misc_feature (1)..(84): NCBI GI NO: 4099406 NR Description: gamma-type tonoplast intrinsic protein
  misc_feature (1)..(84): NCBI GI NO: 1200161 NR Description: tonoplast intrinsic protein [Tulipa gesneriana]
  misc_feature (1)..(84): NCBI GI NO: 17940748 NR Description: aquaporin-like protein [Petunia x hybrida]
  misc_feature (1)..(84): NCBI GI NO: 13447819 NR Description: tonoplast membrane integral protein ZmTIP1-2
  misc_feature (1)..(84): NCBI GI NO: 8699604 NR Description: putative aquaporin TIP3
  misc_feature (1)..(84): NCBI GI NO: 23957320 NR Description: tonoplast intrinsic protein [Kandelia candel]
  misc_feature (1)..(84): NCBI GI NO: 6478150 NR Description: putative gamma tonoplast intrinsic protein (TIP)
MPINRIALGSHQEVYHPGALKAAFAEFISTLIFVFAGQGSGMAFSKLTGGGPTTPAGLIAAAVAHAFALFRGGVCGREQSPAGT

SEQ ID NO: 19886 - protein, 43 aa, Zea mays subsp. mays
  peptide (1)..(43): Ceres Seq. ID no. 13624273
  misc_feature (1)..(43): NCBI GI NO: 3004950 NR Description: tonoplast intrinsic protein; ZmTIP1 [Zea mays]
  misc_feature (1)..(43): NCBI GI NO: 1729971 NR Description: TONOPLAST INTRINSIC PROTEIN, GAMMA
  misc_feature (1)..(43): NCBI GI NO: 629784 NR Description: tonoplast intrinsic protein gamma - barley
  misc_feature (1)..(43): NCBI GI NO: 4099406 NR Description: gamma-type tonoplast intrinsic protein
  misc_feature (1)..(43): NCBI GI NO: 1200161 NR Description: tonoplast intrinsic protein [Tulipa gesneriana]
  misc_feature (1)..(43): NCBI GI NO: 17940748 NR Description: aquaporin-like protein [Petunia x hybrida]
  misc_feature (1)..(43): NCBI GI NO: 13447819 NR Description: tonoplast membrane integral protein ZmTIP1-2
  misc_feature (1)..(43): NCBI GI NO: 8699604 NR Description: putative aquaporin TIP3
  misc_feature (1)..(43): NCBI GI NO: 23957320 NR Description: tonoplast intrinsic protein [Kandelia candel]
  misc_feature (1)..(43): NCBI GI NO: 6478150 NR Description: putative gamma tonoplast intrinsic protein (TIP)
MAFSKLTGGGPTTPAGLIAAAVAHAFALFRGGVCGREQSPAGT

SEQ ID NO: 19887 - DNA, 1619 bp, Zea mays subsp. mays
  misc_feature (1)..(1619): Ceres Seq. ID no. 12637085
aaaagcccccttcccctcccccctctccgccttggcgcatattatattcgcgcaccatcgccgcaacttgcacgggcgccgatgactagttgcgccagatgcactgcatctgctcggcgtggtgcctccaacgtccaacccctcttgtctcttgtctacctctcttctgcccctctgcgtccgtgtctccctcgtcgtcgctgcgtgaggttgacgacgaccagtcacaggatctgttcgttcctcatgcgacccagctagctaaaactggcatgcatggacatgctacgctgctgcgtcaatccatctcaccagcaggtacgctgctgtacatgctgctacgagcctacgatcgatagcagtctatgcctttgctcgatgccgatgtttatctgcatgtgatcgtattcgtatgcacggccctctcaagctgagtgctttttggtgggtccatcgtcctatatatacgctcatcagttcactgacgacgatataacgattgttggggttcagaaactacatatggtggtgctcgcccgatctctttcttgtatattcttcttattattagtctacttctctctctctctctctctttctgaaagaacaaggaactagatgtcttgtcttgtgcctcctactatacctttacgtgtttttcttccttttgtcgtccatggcttttcaccggtctgctgggtgaagtgaagtaatttacacgcatgtcttacgcacgcgctccttcagttgtccgcatatctgatcataacatcgcttcattcatgtgctgacgagatatttttcgccgccgagactgcagtgctagctagctagatctggcctgattcgccgatcgagcggtcgccggtcagagactcagagttcatgagacggagtgcttcagctcaaagactgctagtggtagctaggtagctgcgtgcactgcatgcgcggcgccttggacttgaagaaaccgagcgctccgatagtccgatccggaaacgatgagtgccgggccggaggacacccagcagctgatcaacagtgccgccgctagccccaaccgcagcgcaccgtccgccgcgcccagcgatatggagaggggcagcggaaccgccgcgtcctcgtcgcgcgcttcgacgacgtcccactcccaccagagggccacccacagggtggtggaggaggaggaggaggagcctagtagcagccgtggcgccggcagcctctgctccgggtacctgtcgcttccggctctgctgctcgtcggcgtcaccgcgtcgctggtgatcctcccgctcgtcctgcccccgctgccgccgccgccgtcgttgctgatgctggtccccgtggcaatgctgctcctgctgctcgtgctggcgttcatgcccacgtcgtccaccggcggccgcggtggaaccggaccgacctacatgtagataatcacatcggttttttttttcctttctttctcttgtcgtcctttcgtttggattttgtgacagagggaggtcttgcgatggatcagttagtcctcagcttctgctcttctcgatcgtacgatgtctctgttcggctaattaatttgcataggggtatatatatgctgcctagatctt

SEQ ID NO: 19888 - protein, 144 aa, Zea mays subsp. mays
  peptide (1)..(144): Ceres Seq. ID no. 12637086
  misc_feature (53)..(131): NCBI GI NO: 11282356 NR Description: hypothetical protein F24G16
  misc_feature (53)..(131): NCBI GI NO: 30695081 NR Description: expressed protein [Arabidopsis thaliana]
  misc_feature (75)..(133): NCBI GI NO: 7486480 NR Description: hypothetical protein At2g44080
  misc_feature (75)..(133): NCBI GI NO: 30689607 NR Description: expressed protein [Arabidopsis thaliana]
  misc_feature (11)..(129): NCBI GI NO: 34907496 NR Description: B1099D03.18
  misc_feature (85)..(129): NCBI GI NO: 20161874 NR Description: B1139B11.15
MSAGPEDTQQLINSAAASPNRSAPSAAPSDMERGSGTAASSSRASTTSHSHQRATHRVVEEEEEEPSSSRGAGSLCSGYLSLPALLLVGVTASLVILPLVLPPLPPPPSLLMLVPVAMLLLLLVLAFMPTSSTGGRGGTGPTYM

SEQ ID NO: 19889 - protein, 114 aa, Zea mays subsp. mays
  peptide (1)..(114): Ceres Seq. ID no. 12637087
  misc_feature (23)..(101): NCBI GI NO: 11282356 NR Description: hypothetical protein F24G16
  misc_feature (23)..(101): NCBI GI NO: 30695081 NR Description: expressed protein [Arabidopsis thaliana]
  misc_feature (45)..(103): NCBI GI NO: 7486480 NR Description: hypothetical protein At2g44080
  misc_feature (45)..(103): NCBI GI NO: 30689607 NR Description: expressed protein [Arabidopsis thaliana]
  misc_feature (1)..(99): NCBI GI NO: 34907496 NR Description: B1099D03.18
  misc_feature (55)..(99): NCBI GI NO: 20161874 NR Description: B1139B11.15
MERGSGTAASSSRASTTSHSHQRATHRVVEEEEEEPSSSRGAGSLCSGYLSLPALLLVGVTASLVILPLVLPPLPPPPSLLMLVPVAMLLLLLVLAFMPTSSTGGRGGTGPTYM

SEQ ID NO: 19890 - protein, 86 aa, Zea mays subsp. mays
  peptide (1)..(86): Ceres Seq. ID no. 12637088
MHCICSAWCLQRPTPLVSCLPLFCPSASVSPSSSLREVDDDQSQDLFVPHATQLAKTGMHGHATLLRQSISPAGTLLYMLLRAYDR

SEQ ID NO: 19891 - DNA, 612 bp, Zea mays subsp. mays
  misc_feature (1)..(612): Ceres Seq. ID no. 13600175
aatcgaaaaaggagatcgcgagactgttgaaaacatactcagaaatatggtggatgttcgtgatgttgctgacgctcttcttctggcttacgaaaagccagaagcgtctggacgatacatctgcagttcacatgcaataaaagttgctgatatgataaacatactgaagaccttgtatccatcttacccttatcccaaaaattttgtggaagatgatgtcaactctgtatacagctctgagaaactgcagaagctggggtggagcttcaagcctatagaggaatccctccgcgacactgttgaatcctacaaagcatttggcatcctgaattgaacatccagctacgactgttccatctgctgtttttgcctccgaactctttctgaataataatgtatgtaggcagtgaaacagcattgccagcaggttaatcctggcatcatgctggagcagcactgtagttctctctttttttttcatccccaatactatctagtggttcaggaccaaataagtaggccccgtgctgactggtttatggcttgtggcctattgtcgctgctaaaactagaagcgttcgtactatcttgcactgctgcacttgatttctc

SEQ ID NO: 19892 - protein, 110 aa, Zea mays subsp. mays
  peptide (1)..(110): Ceres Seq. ID no. 13600176
  misc_feature (7)..(104): NCBI GI NO: 15226134 NR Description: cinnamoyl-CoA reductase family
  misc_feature (7)..(104): NCBI GI NO: 15226135 NR Description: cinnamoyl-CoA reductase family
  misc_feature (16)..(109): NCBI GI NO: 6554472 NR Description: putative cinnamoyl-CoA reductase; 14056-15506
  misc_feature (16)..(109): NCBI GI NO: 15223068 NR Description: cinnamoyl-CoA reductase family
  misc_feature (4)..(109): NCBI GI NO: 9964087 NR Description: cinnamoyl CoA reductase [Lolium perenne]
  misc_feature (4)..(109): NCBI GI NO: 3341511 NR Description: cinnamoyl-CoA reductase [Saccharum officinarum]
  misc_feature (4)..(109): NCBI GI NO: 3242328 NR Description: cinnamoyl-CoA reductase [Zea mays]
  misc_feature (4)..(109): NCBI GI NO: 7431410 NR Description: cinnamoyl CoA reductase - maize
  misc_feature (4)..(109): NCBI GI NO: 25140432 NR Description: cinnamoyl CoA reductase [Hordeum vulgare]
  misc_feature (4)..(109): NCBI GI NO: 16580096 NR Description: cinnamoyl-CoA reductase [Prunus persica]
IEKGDRETVENILRNMVDVRDVADALLLAYEKPEASGRYICSSHAIKVADMINILKTLYPSYPYPKNFVEDDVNSVYSSEKLQKLGWSFKPIEESLRDTVESYKAFGILN

SEQ ID NO: 19893 - protein, 95 aa, Zea mays subsp. mays
  peptide (1)..(95): Ceres Seq. ID no. 13600177
  misc_feature (1)..(89): NCBI GI NO: 15226134 NR Description: cinnamoyl-CoA reductase family
  misc_feature (1)..(89): NCBI GI NO: 15226135 NR Description: cinnamoyl-CoA reductase family
  misc_feature (1)..(94): NCBI GI NO: 6554472 NR Description: putative cinnamoyl-CoA reductase; 14056-15506
  misc_feature (1)..(94): NCBI GI NO: 15223068 NR Description: cinnamoyl-CoA reductase family
  misc_feature (1)..(94): NCBI GI NO: 9964087 NR Description: cinnamoyl CoA reductase [Lolium perenne]
  misc_feature (1)..(94): NCBI GI NO: 3341511 NR Description: cinnamoyl-CoA reductase [Saccharum officinarum]
  misc_feature (1)..(94): NCBI GI NO: 3242328 NR Description: cinnamoyl-CoA reductase [Zea mays]
  misc_feature (1)..(94): NCBI GI NO: 7431410 NR Description: cinnamoyl CoA reductase - maize
  misc_feature (1)..(94): NCBI GI NO: 25140432 NR Description: cinnamoyl CoA reductase [Hordeum vulgare]
  misc_feature (1)..(94): NCBI GI NO: 16580096 NR Description: cinnamoyl-CoA reductase [Prunus persica]
MVDVRDVADALLLAYEKPEASGRYICSSHAIKVADMINILKTLYPSYPYPKNFVEDDVNSVYSSEKLQKLGWSFKPIEESLRDTVESYKAFGILN

SEQ ID NO: 19894 - protein, 60 aa, Zea mays subsp. mays
  peptide (1)..(60): Ceres Seq. ID no. 13600178
  misc_feature (1)..(54): NCBI GI NO: 15226134 NR Description: cinnamoyl-CoA reductase family
  misc_feature (1)..(54): NCBI GI NO: 15226135 NR Description: cinnamoyl-CoA reductase family
  misc_feature (1)..(59): NCBI GI NO: 6554472 NR Description: putative cinnamoyl-CoA reductase; 14056-15506
  misc_feature (1)..(59): NCBI GI NO: 15223068 NR Description: cinnamoyl-CoA reductase family
  misc_feature (1)..(59): NCBI GI NO: 9964087 NR Description: cinnamoyl CoA reductase [Lolium perenne]
  misc_feature (1)..(59): NCBI GI NO: 3341511 NR Description: cinnamoyl-CoA reductase [Saccharum officinarum]
  misc_feature (1)..(59): NCBI GI NO: 3242328 NR Description: cinnamoyl-CoA reductase [Zea mays]
  misc_feature (1)..(59): NCBI GI NO: 7431410 NR Description: cinnamoyl CoA reductase - maize
  misc_feature (1)..(59): NCBI GI NO: 25140432 NR Description: cinnamoyl CoA reductase [Hordeum vulgare]
  misc_feature (1)..(59): NCBI GI NO: 16580096 NR Description: cinnamoyl-CoA reductase [Prunus persica]
MINILKTLYPSYPYPKNFVEDDVNSVYSSEKLQKLGWSFKPIEESLRDTVESYKAFGILN

SEQ ID NO: 19895 - DNA, 1253 bp, Zea mays subsp. mays
  misc_feature (1)..(1253): Ceres Seq. ID no. 13600098
atatgttcatccattgtattcttccgatttaaactgaaaagcttaggtgacgtacgttgtcccttcgtttgaaggtcaagatcatcagatacgcgccttgcggggagatcgtcaagcacgcatcggtgccgtacaatctcactgaagataacggttggggcctagagatctttgaagtcaagaggtgcttggaagaggctcgttcggctggcctcactgttagagctatggtggtaataaatcccggcaaccctactggacaggtgctatccgtcacaaaccaggaggagatagtagagttttgtcggaaggaaggtctggttatacttgctgatgaggtataccaggaaaatatctacgcagagaacaagaagttccattccttcaagaaagtggccagatcacttgcttacgacgaaaatgacctcaccctagtatcacttcattccgtttcaatgagctatggggagagtggcagaagaggaggctacatggaggtgtctggtgttgcagctaatgtgaaggatcagatttacaaggtggcttctttaacactctgccccaacattgctggccagattctcgtcagccttgcaatggatccaccgaagctaggagatgaatctttcgagtcatttgataaggagaaggaacagatccgttcatccttctgcaagcgagccaagaccctggagaaagctttcagcggcctggagggcgtgacttgcaacaagttagagggtgcgctgtacttgttcccacggctccacctcccctccgctgcgatcagggccgccgatttcgagggagtttcacctgacatattctacgctcaccgcctgcttgatgccaccgggattgccgttgtgccgggctctgggttccaccaggcctctgggacgatccatatccgatgcacgatccttcctgacgaaagaaaaatcgaggcgatggtcgcacgcttgagggcgttccataaggcgttcatgaacgagttccggggctctcagcaggtcatgaacgatctccgtcgctgatggtgtcgatgcatggcacggttaggcctgtgcgtgtgcccatgggcaatcaagacaacttctgagctctggagttgttgtttgttgttctgtgttcttgcttcctcgttgagctgtgcccgtttgtcctcacttatgcagtcagtggtctgtctgtagtctgtactgcttaaagataagctgtgctttcaggaataaaaagtctgcagcttgtgc

SEQ ID NO: 19896 - protein, 269 aa, Zea mays subsp. mays
  peptide (1)..(269): Ceres Seq. ID no. 13600099
  misc_feature (1)..(250): Pfam Name: Pfam Description:  Aminotransferase class I and II
  misc_feature (1)..(258): NCBI GI NO: 34906732 NR Description: alanine aminotransferase
  misc_feature (1)..(258): NCBI GI NO: 33146868 NR Description: putative alanine aminotransferase
  misc_feature (1)..(258): NCBI GI NO: 21954071 NR Description: putative alanine aminotransferase
  misc_feature (1)..(258): NCBI GI NO: 22329623 NR Description: alanine aminotransferase, putative
  misc_feature (1)..(258): NCBI GI NO: 25287212 NR Description: hypothetical protein T13M22.3
  misc_feature (1)..(258): NCBI GI NO: 9082270 NR Description: alanine aminotransferase [Arabidopsis thaliana]
  misc_feature (1)..(258): NCBI GI NO: 30698866 NR Description: alanine aminotransferase, putative
  misc_feature (1)..(258): NCBI GI NO: 21954069 NR Description: putative alanine aminotransferase
  misc_feature (1)..(258): NCBI GI NO: 3694807 NR Description: alanine aminotransferase [Zea mays]
  misc_feature (1)..(258): NCBI GI NO: 461498 NR Description: ALANINE AMINOTRANSFERASE 2
MVVINPGNPTGQVLSVTNQEEIVEFCRKEGLVILADEVYQENIYAENKKFHSFKKVARSLAYDENDLTLVSLHSVSMSYGESGRRGGYMEVSGVAANVKDQIYKVASLTLCPNIAGQILVSLAMDPPKLGDESFESFDKEKEQIRSSFCKRAKTLEKAFSGLEGVTCNKLEGALYLFPRLHLPSAAIRAADFEGVSPDIFYAHRLLDATGIAVVPGSGFHQASGTIHIRCTILPDERKIEAMVARLRAFHKAFMNEFRGSQQVMNDLRR

SEQ ID NO: 19897 - protein, 193 aa, Zea mays subsp. mays
  peptide (1)..(193): Ceres Seq. ID no. 13600100
  misc_feature (1)..(174): Pfam Name: Pfam Description:  Aminotransferase class I and II
  misc_feature (1)..(182): NCBI GI NO: 34906732 NR Description: alanine aminotransferase
  misc_feature (1)..(182): NCBI GI NO: 33146868 NR Description: putative alanine aminotransferase
  misc_feature (1)..(182): NCBI GI NO: 21954071 NR Description: putative alanine aminotransferase
  misc_feature (1)..(182): NCBI GI NO: 25287212 NR Description: hypothetical protein T13M22.3
  misc_feature (1)..(182): NCBI GI NO: 22329623 NR Description: alanine aminotransferase, putative
  misc_feature (1)..(182): NCBI GI NO: 9082270 NR Description: alanine aminotransferase [Arabidopsis thaliana]
  misc_feature (1)..(182): NCBI GI NO: 30698866 NR Description: alanine aminotransferase, putative
  misc_feature (1)..(182): NCBI GI NO: 21954069 NR Description: putative alanine aminotransferase
  misc_feature (1)..(182): NCBI GI NO: 3694807 NR Description: alanine aminotransferase [Zea mays]
  misc_feature (1)..(182): NCBI GI NO: 461498 NR Description: ALANINE AMINOTRANSFERASE 2
MSYGESGRRGGYMEVSGVAANVKDQIYKVASLTLCPNIAGQILVSLAMDPPKLGDESFESFDKEKEQIRSSFCKRAKTLEKAFSGLEGVTCNKLEGALYLFPRLHLPSAAIRAADFEGVSPDIFYAHRLLDATGIAVVPGSGFHQASGTIHIRCTILPDERKIEAMVARLRAFHKAFMNEFRGSQQVMNDLRR

SEQ ID NO: 19898 - protein, 181 aa, Zea mays subsp. mays
  peptide (1)..(181): Ceres Seq. ID no. 13600101
  misc_feature (1)..(162): Pfam Name: Pfam Description:  Aminotransferase class I and II
  misc_feature (1)..(170): NCBI GI NO: 34906732 NR Description: alanine aminotransferase
  misc_feature (1)..(170): NCBI GI NO: 33146868 NR Description: putative alanine aminotransferase
  misc_feature (1)..(170): NCBI GI NO: 21954071 NR Description: putative alanine aminotransferase
  misc_feature (1)..(170): NCBI GI NO: 25287212 NR Description: hypothetical protein T13M22.3
  misc_feature (1)..(170): NCBI GI NO: 22329623 NR Description: alanine aminotransferase, putative
  misc_feature (1)..(170): NCBI GI NO: 9082270 NR Description: alanine aminotransferase [Arabidopsis thaliana]
  misc_feature (1)..(170): NCBI GI NO: 30698866 NR Description: alanine aminotransferase, putative
  misc_feature (1)..(170): NCBI GI NO: 21954069 NR Description: putative alanine aminotransferase
  misc_feature (1)..(170): NCBI GI NO: 3694807 NR Description: alanine aminotransferase [Zea mays]
  misc_feature (1)..(170): NCBI GI NO: 461498 NR Description: ALANINE AMINOTRANSFERASE 2
MEVSGVAANVKDQIYKVASLTLCPNIAGQILVSLAMDPPKLGDESFESFDKEKEQIRSSFCKRAKTLEKAFSGLEGVTCNKLEGALYLFPRLHLPSAAIRAADFEGVSPDIFYAHRLLDATGIAVVPGSGFHQASGTIHIRCTILPDERKIEAMVARLRAFHKAFMNEFRGSQQVMNDLRR

SEQ ID NO: 19899 - DNA, 963 bp, Zea mays subsp. mays
  misc_feature (1)..(963): Ceres Seq. ID no. 12637705
agcagtccgatagccagcaagccagcgcacgtcggtaggcacgccaccatgccggggctcaccatcggcgacaccgtccccaacctggagctggactccacccacggcaagatccgcatccacgactacgtcggcgacggctacgccatcatcttctcccacccagccgacttcacgcccgtgtgcacaacggagatggcggcgatggcggggtacgccaaggagttcgagaagcgtggcgtgaagctgctgggcatctcgtgcgacgacgtggagtcgcacaggcagtggaccaaggacgtggaggcgtacggcgggaagcagcagcagcagcaggcgacgacgacgaaggtgacgttcccgatcctggcggacccggcgcgggacgccatccggcagctgaacatggtggaccccgacgagaaggacgcggcggggcggagcatgccgtcccgcgcgctccacgtcgtcgggcccgacaaggccgtcaagctgagcttcctgtacccggccaccacggggcggaacatggacgaggtgctgcgcgctgtcgactcgctgctcaccgccgccaagcatggcgggaaggtggccacgcccgccaactggaagcccggggagtgcgccgtcatcgcgcccggcgtctccgacgaggaggccaggaagatgttcccgcaggggttcgagaccgccgacctgccctccaagaagggctacctccgtttcaccaaggtttagctagccgacgtacggcacggacatctagctcgtctgtcagtccgcgtcgaccggggtgcgcggatcttttgtgcctgctggtggtttctctgactagtactagtatatatataggctctatgtatgtgcgtactatgccgtgccgtgttgtctcgtgtagtggtggcaaccggttcgtggcactaccgcgctagtattgtccacccatatcaatgtcctcttctg

SEQ ID NO: 19900 - protein, 245 aa, Zea mays subsp. mays
  peptide (1)..(245): Ceres Seq. ID no. 12637706
  misc_feature (22)..(182): Pfam Name: Pfam Description:  AhpC/TSA family
  misc_feature (17)..(245): NCBI GI NO: 1710077 NR Description: Peroxiredoxin (Rehydrin homolog) (B15C)
  misc_feature (17)..(245): NCBI GI NO: 34539782 NR Description: 1-Cys-peroxiredoxine [Triticum aestivum]
  misc_feature (17)..(245): NCBI GI NO: 12247762 NR Description: 1-Cys peroxiredoxin
  misc_feature (17)..(245): NCBI GI NO: 27261084 NR Description: putative RAB24 protein
  misc_feature (17)..(245): NCBI GI NO: 1710078 NR Description: RAB24 protein
  misc_feature (33)..(245): NCBI GI NO: 1710076 NR Description: Rehydrin homolog
  misc_feature (17)..(245): NCBI GI NO: 27261085 NR Description: putative RAB24 protein
  misc_feature (17)..(245): NCBI GI NO: 19423862 NR Description: 1-cys peroxiredoxin [Xerophyta viscosa]
  misc_feature (17)..(245): NCBI GI NO: 6466096 NR Description: 1-Cys peroxiredoxin [Fagopyrum esculentum]
  misc_feature (17)..(245): NCBI GI NO: 15221082 NR Description: peroxiredoxin; protein id: At1g48130.1
SSPIASKPAHVGRHATMPGLTIGDTVPNLELDSTHGKIRIHDYVGDGYAIIFSHPADFTPVCTTEMAAMAGYAKEFEKRGVKLLGISCDDVESHRQWTKDVEAYGGKQQQQQATTTKVTFPILADPARDAIRQLNMVDPDEKDAAGRSMPSRALHVVGPDKAVKLSFLYPATTGRNMDEVLRAVDSLLTAAKHGGKVATPANWKPGECAVIAPGVSDEEARKMFPQGFETADLPSKKGYLRFTKV

SEQ ID NO: 19901 - protein, 229 aa, Zea mays subsp. mays
  peptide (1)..(229): Ceres Seq. ID no. 12637707
  misc_feature (6)..(166): Pfam Name: Pfam Description:  AhpC/TSA family
  misc_feature (1)..(229): NCBI GI NO: 1710077 NR Description: Peroxiredoxin (Rehydrin homolog) (B15C)
  misc_feature (1)..(229): NCBI GI NO: 34539782 NR Description: 1-Cys-peroxiredoxine [Triticum aestivum]
  misc_feature (1)..(229): NCBI GI NO: 12247762 NR Description: 1-Cys peroxiredoxin
  misc_feature (1)..(229): NCBI GI NO: 27261084 NR Description: putative RAB24 protein
  misc_feature (1)..(229): NCBI GI NO: 1710078 NR Description: RAB24 protein
  misc_feature (17)..(229): NCBI GI NO: 1710076 NR Description: Rehydrin homolog
  misc_feature (1)..(229): NCBI GI NO: 27261085 NR Description: putative RAB24 protein
  misc_feature (1)..(229): NCBI GI NO: 19423862 NR Description: 1-cys peroxiredoxin [Xerophyta viscosa]
  misc_feature (1)..(229): NCBI GI NO: 6466096 NR Description: 1-Cys peroxiredoxin [Fagopyrum esculentum]
  misc_feature (1)..(229): NCBI GI NO: 15221082 NR Description: peroxiredoxin; protein id: At1g48130.1
MPGLTIGDTVPNLELDSTHGKIRIHDYVGDGYAIIFSHPADFTPVCTTEMAAMAGYAKEFEKRGVKLLGISCDDVESHRQWTKDVEAYGGKQQQQQATTTKVTFPILADPARDAIRQLNMVDPDEKDAAGRSMPSRALHVVGPDKAVKLSFLYPATTGRNMDEVLRAVDSLLTAAKHGGKVATPANWKPGECAVIAPGVSDEEARKMFPQGFETADLPSKKGYLRFTKV

SEQ ID NO: 19902 - protein, 180 aa, Zea mays subsp. mays
  peptide (1)..(180): Ceres Seq. ID no. 12637708
  misc_feature (1)..(117): Pfam Name: Pfam Description:  AhpC/TSA family
  misc_feature (1)..(180): NCBI GI NO: 1710077 NR Description: Peroxiredoxin (Rehydrin homolog) (B15C)
  misc_feature (1)..(180): NCBI GI NO: 34539782 NR Description: 1-Cys-peroxiredoxine [Triticum aestivum]
  misc_feature (1)..(180): NCBI GI NO: 12247762 NR Description: 1-Cys peroxiredoxin
  misc_feature (1)..(180): NCBI GI NO: 27261084 NR Description: putative RAB24 protein
  misc_feature (1)..(180): NCBI GI NO: 1710078 NR Description: RAB24 protein
  misc_feature (1)..(180): NCBI GI NO: 1710076 NR Description: Rehydrin homolog
  misc_feature (1)..(180): NCBI GI NO: 27261085 NR Description: putative RAB24 protein
  misc_feature (1)..(180): NCBI GI NO: 19423862 NR Description: 1-cys peroxiredoxin [Xerophyta viscosa]
  misc_feature (1)..(180): NCBI GI NO: 6466096 NR Description: 1-Cys peroxiredoxin [Fagopyrum esculentum]
  misc_feature (1)..(180): NCBI GI NO: 15221082 NR Description: peroxiredoxin; protein id: At1g48130.1
MAAMAGYAKEFEKRGVKLLGISCDDVESHRQWTKDVEAYGGKQQQQQATTTKVTFPILADPARDAIRQLNMVDPDEKDAAGRSMPSRALHVVGPDKAVKLSFLYPATTGRNMDEVLRAVDSLLTAAKHGGKVATPANWKPGECAVIAPGVSDEEARKMFPQGFETADLPSKKGYLRFTKV

SEQ ID NO: 19903 - DNA, 713 bp, Zea mays subsp. mays
  misc_feature (1)..(713): Ceres Seq. ID no. 13580204
aacgccgctcgcgcatcctattgccctcgcgccaccgtcgccgccgctgcagcgagccaccgccctgccgtcgcctgaggtagacaccaagccaccgccatggggcgtatgcacagccgcgggaagggtatctcttcatcggcgctgccgtacaagaggactcctccgatctggctcaagacagctaccaccgaggtggaggagatgattaccaaggctgcgaagaagggccagatgccgtcgcagattggtgttctgctccgtgaccagcacggcatcccgcttgtcaagagcgtgactggtagcaagatcctccgcatcctcaaggcccatgggttggcgccggagatcccggaggatctctacttcctcattaagaaggcggtggcgattaggaagcatttggagaggaacaggaaggacaaggactccaaattcagactcattcttgttgagagcaggatccaccgccttgcccgctactacaagcgtaccaagaagctcccacccacctggaagtacgagtcaactacggcgagcactctggtggcctaagtgatatcctccgatggcttggtctttagcacctatgagcttgttctagatatggatttatgtaattcttgttatgtctggagctggttagatggacaaggaacctcaactttttctatgtttacttggagaatcccataaaccatttttggtttcgc

SEQ ID NO: 19904 - protein, 151 aa, Zea mays subsp. mays
  peptide (1)..(151): Ceres Seq. ID no. 13580205
  misc_feature (1)..(151): NCBI GI NO: 464705 NR Description: 40S RIBOSOMAL PROTEIN S13
  misc_feature (1)..(151): NCBI GI NO: 18411224 NR Description: 40S ribosomal protein S13 (RPS13B)
  misc_feature (1)..(151): NCBI GI NO: 18411716 NR Description: 40S ribosomal protein S13 (RPS13A)
  misc_feature (1)..(151): NCBI GI NO: 14190367 NR Description: AT3g60770/T4C21_180 [Arabidopsis thaliana]
  misc_feature (1)..(151): NCBI GI NO: 8131699 NR Description: cytoplasmic ribosomal protein S13 [Panax ginseng]
  misc_feature (1)..(151): NCBI GI NO: 7440402 NR Description: ribosomal protein S13
  misc_feature (1)..(151): NCBI GI NO: 11276609 NR Description: ribosomal protein S13-like - Arabidopsis thaliana
  misc_feature (1)..(151): NCBI GI NO: 1173198 NR Description: 40S RIBOSOMAL PROTEIN S13
  misc_feature (1)..(151): NCBI GI NO: 34393549 NR Description: putative 40S RIBOSOMAL PROTEIN S13
  misc_feature (1)..(151): NCBI GI NO: 19114812 NR Description: 40s ribosomal protein s13
MGRMHSRGKGISSSALPYKRTPPIWLKTATTEVEEMITKAAKKGQMPSQIGVLLRDQHGIPLVKSVTGSKILRILKAHGLAPEIPEDLYFLIKKAVAIRKHLERNRKDKDSKFRLILVESRIHRLARYYKRTKKLPPTWKYESTTASTLVA

SEQ ID NO: 19905 - protein, 148 aa, Zea mays subsp. mays
  peptide (1)..(148): Ceres Seq. ID no. 13580206
  misc_feature (1)..(148): NCBI GI NO: 464705 NR Description: 40S RIBOSOMAL PROTEIN S13
  misc_feature (1)..(148): NCBI GI NO: 18411224 NR Description: 40S ribosomal protein S13 (RPS13B)
  misc_feature (1)..(148): NCBI GI NO: 18411716 NR Description: 40S ribosomal protein S13 (RPS13A)
  misc_feature (1)..(148): NCBI GI NO: 14190367 NR Description: AT3g60770/T4C21_180 [Arabidopsis thaliana]
  misc_feature (1)..(148): NCBI GI NO: 8131699 NR Description: cytoplasmic ribosomal protein S13 [Panax ginseng]
  misc_feature (1)..(148): NCBI GI NO: 7440402 NR Description: ribosomal protein S13
  misc_feature (1)..(148): NCBI GI NO: 11276609 NR Description: ribosomal protein S13-like - Arabidopsis thaliana
  misc_feature (1)..(148): NCBI GI NO: 1173198 NR Description: 40S RIBOSOMAL PROTEIN S13
  misc_feature (1)..(148): NCBI GI NO: 34393549 NR Description: putative 40S RIBOSOMAL PROTEIN S13
  misc_feature (1)..(148): NCBI GI NO: 19114812 NR Description: 40s ribosomal protein s13
MHSRGKGISSSALPYKRTPPIWLKTATTEVEEMITKAAKKGQMPSQIGVLLRDQHGIPLVKSVTGSKILRILKAHGLAPEIPEDLYFLIKKAVAIRKHLERNRKDKDSKFRLILVESRIHRLARYYKRTKKLPPTWKYESTTASTLVA

SEQ ID NO: 19906 - protein, 116 aa, Zea mays subsp. mays
  peptide (1)..(116): Ceres Seq. ID no. 13580207
  misc_feature (1)..(116): NCBI GI NO: 464705 NR Description: 40S RIBOSOMAL PROTEIN S13
  misc_feature (1)..(116): NCBI GI NO: 18411224 NR Description: 40S ribosomal protein S13 (RPS13B)
  misc_feature (1)..(116): NCBI GI NO: 18411716 NR Description: 40S ribosomal protein S13 (RPS13A)
  misc_feature (1)..(116): NCBI GI NO: 14190367 NR Description: AT3g60770/T4C21_180 [Arabidopsis thaliana]
  misc_feature (1)..(116): NCBI GI NO: 8131699 NR Description: cytoplasmic ribosomal protein S13 [Panax ginseng]
  misc_feature (1)..(116): NCBI GI NO: 7440402 NR Description: ribosomal protein S13
  misc_feature (1)..(116): NCBI GI NO: 11276609 NR Description: ribosomal protein S13-like - Arabidopsis thaliana
  misc_feature (1)..(116): NCBI GI NO: 1173198 NR Description: 40S RIBOSOMAL PROTEIN S13
  misc_feature (1)..(116): NCBI GI NO: 34393549 NR Description: putative 40S RIBOSOMAL PROTEIN S13
  misc_feature (1)..(116): NCBI GI NO: 19114812 NR Description: 40s ribosomal protein s13
MITKAAKKGQMPSQIGVLLRDQHGIPLVKSVTGSKILRILKAHGLAPEIPEDLYFLIKKAVAIRKHLERNRKDKDSKFRLILVESRIHRLARYYKRTKKLPPTWKYESTTASTLVA

SEQ ID NO: 19907 - DNA, 767 bp, Zea mays subsp. mays
  misc_feature (1)..(767): Ceres Seq. ID no. 13600184
ctccgtctccggtctccagtctcgctgcttccacaagtccacaaccgtaccagcaccaccgcgccatggcgtcctccgccgatcccgatgccgccacgccaccatccgcgccgcagccggagcccgcacggaaggcagtccgcgtggtggtgaaggggagcgtcacgggggtggggttccgcgactggacggcgtccacggccgagtcgctcggtctcgccggctgggtccgcaaccgccgtgacggcagtgtggaggccctcctctccggagaccccgcgaagatcgaagacatgataacccgccgcctccccgtcggccccccagccgccaccgtcaccgccgtcgtcccgtccggccgagcccgtggatccgtccaccgggttcgagatcaagttcaccgtctgatccccccgtcccgcgacaggttcgcgtctcgccgcgcgttcttggacggtctattcgtgcactactactgcgaatctgcgattaaagatcagaggcgacatctaatgtaccgtagtctgtttacctgaaaagctccgctatctgcttgggttggaattcatgccagattgtgggtgcaaacctgtttccttactacctagtgtccaagtcggaatattaataagctatgccaggattcagatcgaaatatttctgtctctgagagatgtgttgcgtgacaacttttcgaagactgttgcctgaacaatatctgtgtgtttatccctagactctaatgtacaaacagagtcttatacagt

SEQ ID NO: 19908 - protein, 177 aa, Zea mays subsp. mays
  peptide (1)..(177): Ceres Seq. ID no. 13600185
  misc_feature (44)..(108): Pfam Name: Pfam Description:  Acylphosphatase
  misc_feature (1)..(132): NCBI GI NO: 15242739 NR Description: expressed protein [Arabidopsis thaliana]
  misc_feature (1)..(132): NCBI GI NO: 21593449 NR Description: unknown [Arabidopsis thaliana]
  misc_feature (38)..(132): NCBI GI NO: 29028786 NR Description: At5g03370 [Arabidopsis thaliana]
  misc_feature (47)..(116): NCBI GI NO: 22965084 NR Description: hypothetical protein [Rhodopseudomonas palustris]
  misc_feature (42)..(115): NCBI GI NO: 27380376 NR Description: bsl5265 [Bradyrhizobium japonicum]
  misc_feature (43)..(115): NCBI GI NO: 13476419 NR Description: acylphosphatase [Mesorhizobium loti]
  misc_feature (44)..(112): NCBI GI NO: 22966087 NR Description: hypothetical protein [Rhodospirillum rubrum]
  misc_feature (33)..(115): NCBI GI NO: 17228372 NR Description: probable acylphosphatase [Nostoc sp. PCC 7120]
  misc_feature (36)..(127): NCBI GI NO: 22985847 NR Description: hypothetical protein [Burkholderia fungorum]
  misc_feature (43)..(115): NCBI GI NO: 16265250 NR Description: HYPOTHETICAL PROTEIN [Sinorhizobium meliloti]
PSPVSSLAASTSPQPYQHHRAMASSADPDAATPPSAPQPEPARKAVRVVVKGSVTGVGFRDWTASTAESLGLAGWVRNRRDGSVEALLSGDPAKIEDMITRRLPVGPPAATVTAVVPSGRARGSVHRVRDQVHRLIPPSRDRFASRRAFLDGLFVHYYCESAIKDQRRHLMYRSLFT

SEQ ID NO: 19909 - protein, 156 aa, Zea mays subsp. mays
  peptide (1)..(156): Ceres Seq. ID no. 13600186
  misc_feature (23)..(87): Pfam Name: Pfam Description:  Acylphosphatase
  misc_feature (1)..(111): NCBI GI NO: 15242739 NR Description: expressed protein [Arabidopsis thaliana]
  misc_feature (1)..(111): NCBI GI NO: 21593449 NR Description: unknown [Arabidopsis thaliana]
  misc_feature (17)..(111): NCBI GI NO: 29028786 NR Description: At5g03370 [Arabidopsis thaliana]
  misc_feature (26)..(95): NCBI GI NO: 22965084 NR Description: hypothetical protein [Rhodopseudomonas palustris]
  misc_feature (21)..(94): NCBI GI NO: 27380376 NR Description: bsl5265 [Bradyrhizobium japonicum]
  misc_feature (22)..(94): NCBI GI NO: 13476419 NR Description: acylphosphatase [Mesorhizobium loti]
  misc_feature (23)..(91): NCBI GI NO: 22966087 NR Description: hypothetical protein [Rhodospirillum rubrum]
  misc_feature (12)..(94): NCBI GI NO: 17228372 NR Description: probable acylphosphatase [Nostoc sp. PCC 7120]
  misc_feature (15)..(106): NCBI GI NO: 22985847 NR Description: hypothetical protein [Burkholderia fungorum]
  misc_feature (22)..(94): NCBI GI NO: 16265250 NR Description: HYPOTHETICAL PROTEIN [Sinorhizobium meliloti]
MASSADPDAATPPSAPQPEPARKAVRVVVKGSVTGVGFRDWTASTAESLGLAGWVRNRRDGSVEALLSGDPAKIEDMITRRLPVGPPAATVTAVVPSGRARGSVHRVRDQVHRLIPPSRDRFASRRAFLDGLFVHYYCESAIKDQRRHLMYRSLFT

SEQ ID NO: 19910 - DNA, 818 bp, Zea mays subsp. mays
  misc_feature (1)..(818): Ceres Seq. ID no. 14301952
aaatcgtacaaacaccgtttctatacaggccaaggcgacaagcttcgtccagctctgcatcaaagaaggaaggaagttatggaccgcacctactacaagggcggcatcaaggcgtactggaagcgccggggctactaccgcatcgacgccaccgccgcgcagcgccgcccgccgttccccaccgcggagctcggaggtggcgtgggcgtcgcccaggcccagccgccgcaggcgccgccgccggagggtggctcgggccggcgccgttgccgcgggtggcgcgtgcgctgcggccagctgcggcggcggctgctccgcgcgctgtcgccgcgccggtggctcgtgcggctccgcgacgcgtacgtgtccgccatgctgcggctggcgtcctcccccgccgtcgggtacggcgccggcgcgccctactgcggcacggcggccttcgcgcggccggcgcagctcaaggagtacgaacagaaggtgctggtggagatctacaggtccatactcgcgggcggcgggcctggccccatcgccgtcactaccggcagcaacggcgccggtgcgcctgccgccgccacactacggctaccgacggctgctgcttgagcttgagcggcagatgaagcatgtatttattcttcttgcttttactctttatgtcgcgacgttgtaacttcggtgcgcctcacaagcatttcatttcttcttcgtaaattaaggttcctctgaccatggtgtgaaaatgtttgatgaagagggtcattagcatctctacttgctagcaaggcaagatttagtattgattagccgtacac

SEQ ID NO: 19911 - protein, 224 aa, Zea mays subsp. mays
  peptide (1)..(224): Ceres Seq. ID no. 14301953
  misc_feature (24)..(75): Pfam Name: Pfam Description:  Herpesvirus alkaline exonuclease
  misc_feature (19)..(189): NCBI GI NO: 13376335 NR Description: hypothetical protein FLJ14280 [Homo sapiens]
NRTNTVSIQAKATSFVQLCIKEGRKLWTAPTTRAASRRTGSAGATTASTPPPRSAARRSPPRSSEVAWASPRPSRRRRRRRRVARAGAVAAGGACAAASCGGGCSARCRRAGGSCGSATRTCPPCCGWRPPPPSGTAPARPTAARRPSRGRRSSRSTNRRCWWRSTGPYSRAAGLAPSPSLPAATAPVRLPPPHYGYRRLLLELERQMKHVFILLAFTLYVATL

SEQ ID NO: 19912 - protein, 207 aa, Zea mays subsp. mays
  peptide (1)..(207): Ceres Seq. ID no. 14301954
IVQTPFLYRPRRQASSSSASKKEGSYGPHLLQGRHQGVLEAPGLLPHRRHRRAAPPAVPHRGARRWRGRRPGPAAAGAAAGGWLGPAPLPRVARALRPAAAAAAPRAVAAPVARAAPRRVRVRHAAAGVLPRRRVRRRRALLRHGGLRAAGAAQGVRTEGAGGDLQVHTRGRRAWPHRRHYRQQRRRCACRRHTTATDGCCLSLSGR

SEQ ID NO: 19913 - protein, 202 aa, Zea mays subsp. mays
  peptide (1)..(202): Ceres Seq. ID no. 14301955
  misc_feature (88)..(170): NCBI GI NO: 15228820 NR Description: expressed protein [Arabidopsis thaliana]
  misc_feature (88)..(174): NCBI GI NO: 7487567 NR Description: probable mitochondrial carrier protein
KSYKHRFYTGQGDKLRPALHQRRKEVMDRTYYKGGIKAYWKRRGYYRIDATAAQRRPPFPTAELGGGVGVAQAQPPQAPPPEGGSGRRRCRGWRVRCGQLRRRLLRALSPRRWLVRLRDAYVSAMLRLASSPAVGYGAGAPYCGTAAFARPAQLKEYEQKVLVEIYRSILAGGGPGPIAVTTGSNGAGAPAAATLRLPTAAA

SEQ ID NO: 19914 - protein, 176 aa, Zea mays subsp. mays
  peptide (1)..(176): Ceres Seq. ID no. 14301956
  misc_feature (62)..(144): NCBI GI NO: 15228820 NR Description: expressed protein [Arabidopsis thaliana]
  misc_feature (62)..(148): NCBI GI NO: 7487567 NR Description: probable mitochondrial carrier protein
MDRTYYKGGIKAYWKRRGYYRIDATAAQRRPPFPTAELGGGVGVAQAQPPQAPPPEGGSGRRRCRGWRVRCGQLRRRLLRALSPRRWLVRLRDAYVSAMLRLASSPAVGYGAGAPYCGTAAFARPAQLKEYEQKVLVEIYRSILAGGGPGPIAVTTGSNGAGAPAAATLRLPTAAA

SEQ ID NO: 19915 - DNA, 1222 bp, Zea mays subsp. mays
  misc_feature (1)..(1222): Ceres Seq. ID no. 14301961
cccctctcggcccggctcgatggggtccggcgtgtcgtcgagcatggcgctggcgctggcgggcttctgcttcagcgtcctcttcatcgtcttcgtctgcacgcgcctcgcctgcgcgctcgtccgccggcgccggcgccaggcccgcgcccgcctcgcggccgccccgccgctcccgcactacgcccacggctacgccgaccccgaccctttcccgtcgttccgcgccgcccgccaccaccaccacgccccgggcctcgatcccgccgccttccccacccgcgcctacgccgccgcacaagcctccgactccgacgacggctcccagtgcgtcatctgtctggcggaatacgaagagggagacgagctccgcgtgctgcctccctgcagccacaccttccacacgggctgtatcagcctgtggctggcgcagaactcgacgtgcccggtctgtagagtctcgctgctcgtgcctgatactagtactacccctgaaagcgaacactctgcaccccatcctcctcctcctcctcatcatcatcatcatctgtccagcatagtgataataagcccaccaagctcccccgaaccgtcgagatcggacccgtgccgatgcctgttcgccagcggtggtgggcactcgtcaagggcggcagaggctcctcctcctcctcctcctcccagacacgagcccgaccaggtcgtatctggtccaccaccggcagcagatggggctagcggctacagctcgccgttgcctgaagttattcaccccgctcctgctcctgaaaccaacgggcagacagtacggaagcaggcgggcagcagatctactaccccgctaggcccctgcaaatagcggccgctcactctgtgtgggtgggtggggtgaacaggtggtgcgtggtaaaagcgaagtagagagaaacaagcgacttgaagaggcctgggttcgttcgtgtacatacgatcgagaaatcgtttcaggtcattcattcatccattcattcatccatgggcacatactgtggtattacggagtattacggtgtacgtgtagtgtgccgcaggagagacgacgcgacggcagcagtgcgttttccatatgcgacgggacgggagcattcgaggagatgatggcaatggcatggttttgtgtactgtacggtaacatttgtcgctgggaattaataataaaaaacccgtggctggctgatgcagc

SEQ ID NO: 19916 - protein, 285 aa, Zea mays subsp. mays
  peptide (1)..(285): Ceres Seq. ID no. 14301962
  misc_feature (110)..(151): Pfam Name: RING finger Pfam Description: Zinc finger, C3HC4 type
  misc_feature (7)..(177): NCBI GI NO: 38567907 NR Description: OSJNBa0088I22.3
  misc_feature (5)..(172): NCBI GI NO: 28071301 NR Description: P0705A05.3
  misc_feature (6)..(164): NCBI GI NO: 34909314 NR Description: OSJNBb0021A09.3
  misc_feature (3)..(158): NCBI GI NO: 34909640 NR Description: P0503C12.20
  misc_feature (25)..(155): NCBI GI NO: 15221638 NR Description: zinc finger
  misc_feature (29)..(195): NCBI GI NO: 15237013 NR Description: RING-H2 finger protein RHA3b
  misc_feature (85)..(267): NCBI GI NO: 27261477 NR Description: Hypothetical protein
  misc_feature (88)..(189): NCBI GI NO: 8698833 NR Description: EL5 [Oryza sativa (japonica cultivar-group)]
  misc_feature (85)..(165): NCBI GI NO: 34907968 NR Description: P0446G04.15
  misc_feature (4)..(243): NCBI GI NO: 18092342 NR Description: ring-H2 zinc finger protein [Zea mays]
PSRPGSMGSGVSSSMALALAGFCFSVLFIVFVCTRLACALVRRRRRQARARLAAAPPLPHYAHGYADPDPFPSFRAARHHHHAPGLDPAAFPTRAYAAAQASDSDDGSQCVICLAEYEEGDELRVLPPCSHTFHTGCISLWLAQNSTCPVCRVSLLVPDTSTTPESEHSAPHPPPPPHHHHHLSSIVIISPPSSPEPSRSDPCRCLFASGGGHSSRAAEAPPPPPPPRHEPDQVVSGPPPAADGASGYSSPLPEVIHPAPAPETNGQTVRKQAGSRSTTPLGPCK

SEQ ID NO: 19917 - protein, 279 aa, Zea mays subsp. mays
  peptide (1)..(279): Ceres Seq. ID no. 14301963
  misc_feature (104)..(145): Pfam Name: RING finger Pfam Description: Zinc finger, C3HC4 type
  misc_feature (1)..(171): NCBI GI NO: 38567907 NR Description: OSJNBa0088I22.3
  misc_feature (1)..(166): NCBI GI NO: 28071301 NR Description: P0705A05.3
  misc_feature (1)..(158): NCBI GI NO: 34909314 NR Description: OSJNBb0021A09.3
  misc_feature (1)..(152): NCBI GI NO: 34909640 NR Description: P0503C12.20
  misc_feature (19)..(149): NCBI GI NO: 15221638 NR Description: zinc finger
  misc_feature (23)..(189): NCBI GI NO: 15237013 NR Description: RING-H2 finger protein RHA3b
  misc_feature (79)..(261): NCBI GI NO: 27261477 NR Description: Hypothetical protein
  misc_feature (82)..(183): NCBI GI NO: 8698833 NR Description: EL5 [Oryza sativa (japonica cultivar-group)]
  misc_feature (79)..(159): NCBI GI NO: 34907968 NR Description: P0446G04.15
  misc_feature (1)..(237): NCBI GI NO: 18092342 NR Description: ring-H2 zinc finger protein [Zea mays]
MGSGVSSSMALALAGFCFSVLFIVFVCTRLACALVRRRRRQARARLAAAPPLPHYAHGYADPDPFPSFRAARHHHHAPGLDPAAFPTRAYAAAQASDSDDGSQCVICLAEYEEGDELRVLPPCSHTFHTGCISLWLAQNSTCPVCRVSLLVPDTSTTPESEHSAPHPPPPPHHHHHLSSIVIISPPSSPEPSRSDPCRCLFASGGGHSSRAAEAPPPPPPPRHEPDQVVSGPPPAADGASGYSSPLPEVIHPAPAPETNGQTVRKQAGSRSTTPLGPCK

SEQ ID NO: 19918 - protein, 271 aa, Zea mays subsp. mays
  peptide (1)..(271): Ceres Seq. ID no. 14301964
  misc_feature (96)..(137): Pfam Name: RING finger Pfam Description: Zinc finger, C3HC4 type
  misc_feature (1)..(163): NCBI GI NO: 38567907 NR Description: OSJNBa0088I22.3
  misc_feature (1)..(158): NCBI GI NO: 28071301 NR Description: P0705A05.3
  misc_feature (1)..(150): NCBI GI NO: 34909314 NR Description: OSJNBb0021A09.3
  misc_feature (1)..(144): NCBI GI NO: 34909640 NR Description: P0503C12.20
  misc_feature (11)..(141): NCBI GI NO: 15221638 NR Description: zinc finger
  misc_feature (15)..(181): NCBI GI NO: 15237013 NR Description: RING-H2 finger protein RHA3b
  misc_feature (71)..(253): NCBI GI NO: 27261477 NR Description: Hypothetical protein
  misc_feature (74)..(175): NCBI GI NO: 8698833 NR Description: EL5 [Oryza sativa (japonica cultivar-group)]
  misc_feature (71)..(151): NCBI GI NO: 34907968 NR Description: P0446G04.15
  misc_feature (1)..(229): NCBI GI NO: 18092342 NR Description: ring-H2 zinc finger protein [Zea mays]
MALALAGFCFSVLFIVFVCTRLACALVRRRRRQARARLAAAPPLPHYAHGYADPDPFPSFRAARHHHHAPGLDPAAFPTRAYAAAQASDSDDGSQCVICLAEYEEGDELRVLPPCSHTFHTGCISLWLAQNSTCPVCRVSLLVPDTSTTPESEHSAPHPPPPPHHHHHLSSIVIISPPSSPEPSRSDPCRCLFASGGGHSSRAAEAPPPPPPPRHEPDQVVSGPPPAADGASGYSSPLPEVIHPAPAPETNGQTVRKQAGSRSTTPLGPCK

SEQ ID NO: 19919 - DNA, 492 bp, Zea mays subsp. mays
  misc_feature (1)..(492): Ceres Seq. ID no. 13635728
  misc_feature (391)..(391): n is a, c, t, g, unknown, or other
  misc_feature (237)..(237): n is a, c, t, g, unknown, or other
  misc_feature (217)..(217): n is a, c, t, g, unknown, or other
  misc_feature (206)..(206): n is a, c, t, g, unknown, or other
  misc_feature (239)..(239): n is a, c, t, g, unknown, or other
  misc_feature (208)..(208): n is a, c, t, g, unknown, or other
  misc_feature (420)..(420): n is a, c, t, g, unknown, or other
  misc_feature (322)..(322): n is a, c, t, g, unknown, or other
  misc_feature (269)..(269): n is a, c, t, g, unknown, or other
  misc_feature (212)..(212): n is a, c, t, g, unknown, or other
  misc_feature (380)..(380): n is a, c, t, g, unknown, or other
  misc_feature (378)..(378): n is a, c, t, g, unknown, or other
  misc_feature (325)..(325): n is a, c, t, g, unknown, or other
  misc_feature (410)..(410): n is a, c, t, g, unknown, or other
  misc_feature (297)..(297): n is a, c, t, g, unknown, or other
  misc_feature (339)..(339): n is a, c, t, g, unknown, or other
  misc_feature (261)..(261): n is a, c, t, g, unknown, or other
  misc_feature (213)..(213): n is a, c, t, g, unknown, or other
  misc_feature (218)..(218): n is a, c, t, g, unknown, or other
  misc_feature (396)..(396): n is a, c, t, g, unknown, or other
  misc_feature (308)..(308): n is a, c, t, g, unknown, or other
  misc_feature (243)..(243): n is a, c, t, g, unknown, or other
  misc_feature (312)..(312): n is a, c, t, g, unknown, or other
  misc_feature (256)..(256): n is a, c, t, g, unknown, or other
  misc_feature (229)..(229): n is a, c, t, g, unknown, or other
  misc_feature (216)..(216): n is a, c, t, g, unknown, or other
  misc_feature (423)..(423): n is a, c, t, g, unknown, or other
atacattttttccatcggaatgtctgatactatgttgggtgaatcctaatggatggttgagcattattggtgtcatattttgtccggtctatgtgtcaaccgtgaagcttttaatccaaatcctttcactctttctgcctctgtcaagtctggggcaggcaaagaagaagaccaaagaagattcgcacatctgcacatattattgngnccanntannnacatagaacgnacaatagngnaccnccaatggcagccnaaatnttttgccnccttatgctccttggcctttctgcaagngctgctacggngacnattttcccanaangctcacgagctccnatagcttcccttcttcccccgtacctcttcaccagcggngncttcggaatgngaaancccaattcttcaancctatagganccnacaggaaatcgcagctggtgatcttacctttatcacccttgttcctcccacaatcatcagccctattac

SEQ ID NO: 19920 - protein, 96 aa, Zea mays subsp. mays
  peptide (1)..(96): Ceres Seq. ID no. 13635729
  misc_feature (52)..(52): Xaa is any aa, unknown or other
  misc_feature (54)..(54): Xaa is any aa, unknown or other
  misc_feature (55)..(55): Xaa is any aa, unknown or other
  misc_feature (56)..(56): Xaa is any aa, unknown or other
  misc_feature (59)..(59): Xaa is any aa, unknown or other
  misc_feature (62)..(62): Xaa is any aa, unknown or other
  misc_feature (63)..(63): Xaa is any aa, unknown or other
  misc_feature (64)..(64): Xaa is any aa, unknown or other
  misc_feature (68)..(68): Xaa is any aa, unknown or other
  misc_feature (70)..(70): Xaa is any aa, unknown or other
  misc_feature (73)..(73): Xaa is any aa, unknown or other
  misc_feature (82)..(82): Xaa is any aa, unknown or other
  misc_feature (86)..(86): Xaa is any aa, unknown or other
  misc_feature (87)..(87): Xaa is any aa, unknown or other
  misc_feature (90)..(90): Xaa is any aa, unknown or other
  misc_feature (91)..(91): Xaa is any aa, unknown or other
  misc_feature (96)..(96): Xaa is any aa, unknown or other
MVEHYWCHILSGLCVNREAFNPNPFTLSASVKSGAGKEEDQRRFAHLHILLXPXXXIEXTIXXXQWQXKXFAXLCSLAFLQXLLRXXFSXXAHELX

SEQ ID NO: 19921 - protein, 73 aa, Zea mays subsp. mays
  peptide (1)..(73): Ceres Seq. ID no. 13635730
  misc_feature (68)..(68): Xaa is any aa, unknown or other
  misc_feature (69)..(69): Xaa is any aa, unknown or other
  misc_feature (70)..(70): Xaa is any aa, unknown or other
  misc_feature (71)..(71): Xaa is any aa, unknown or other
  misc_feature (72)..(72): Xaa is any aa, unknown or other
TFFPSECLILCWVNPNGWLSIIGVIFCPVYVSTVKLLIQILSLFLPLSSLGQAKKKTKEDSHICTYYXXXXXT

SEQ ID NO: 19922 - protein, 56 aa, Zea mays subsp. mays
  peptide (1)..(56): Ceres Seq. ID no. 13635731
  misc_feature (1)..(40): NCBI GI NO: 224509 NR Description: zein E19
  misc_feature (1)..(40): NCBI GI NO: 141597 NR Description: ZEIN-ALPHA PRECURSOR (19 KD) (CLONE A30)
  misc_feature (1)..(40): NCBI GI NO: 141600 NR Description: ZEIN-ALPHA PRECURSOR (19 KD) (CLONE 19B1)
  misc_feature (1)..(40): NCBI GI NO: 141608 NR Description: ZEIN-ALPHA PRECURSOR (19 KD) (PMS1)
  misc_feature (1)..(40): NCBI GI NO: 16305125 NR Description: 19kD alpha zein B1 [Zea mays]
  misc_feature (1)..(40): NCBI GI NO: 168691 NR Description: zein
  misc_feature (1)..(40): NCBI GI NO: 168693 NR Description: zein
  misc_feature (1)..(40): NCBI GI NO: 16073 NR Description: zein protein [Acetabularia mediterranea]
  misc_feature (1)..(40): NCBI GI NO: 629862 NR Description: zein Zd1, 19K - maize
  misc_feature (1)..(40): NCBI GI NO: 629861 NR Description: zein Zd1, 19K - maize
  misc_feature (4)..(4): Xaa is any aa, unknown or other
  misc_feature (5)..(5): Xaa is any aa, unknown or other
  misc_feature (8)..(8): Xaa is any aa, unknown or other
  misc_feature (17)..(17): Xaa is any aa, unknown or other
  misc_feature (21)..(21): Xaa is any aa, unknown or other
  misc_feature (22)..(22): Xaa is any aa, unknown or other
  misc_feature (26)..(26): Xaa is any aa, unknown or other
  misc_feature (27)..(27): Xaa is any aa, unknown or other
  misc_feature (31)..(31): Xaa is any aa, unknown or other
  misc_feature (44)..(44): Xaa is any aa, unknown or other
  misc_feature (45)..(45): Xaa is any aa, unknown or other
  misc_feature (49)..(49): Xaa is any aa, unknown or other
  misc_feature (50)..(50): Xaa is any aa, unknown or other
  misc_feature (55)..(55): Xaa is any aa, unknown or other
MAAXXFCXLMLLGLSAXAATXXIFPXXSRAXIASLLPPYLFTSXXFGMXXPNSSXL

SEQ ID NO: 19923 - DNA, 583 bp, Zea mays subsp. mays
  misc_feature (1)..(583): Ceres Seq. ID no. 12594265
atattcccttcttcttcttcttcttgtcctcctccttcgtcttctccatcttcccgtccttcgatccatcaaaagctggccggccgagacgacgtgcatagctataaataatagcccatagcatcctcaacaaccagacaagaagaaccacgccgccggttgtttgttaatttcttccatggagagcacggagctgaaagtggagatggtggcgttgcatgagaagcgggtacgcagatgcctgtccaaagtgaaagggatcgagcgggtggaggtggaggcgagcctgcagaaggtggtggtgacggggtgcgtgaaccggagcaagatcctcaaggcgctccgccgggtggggctgcgcgccgagccgtggtcaccgcacaacgagctgctcagcgcctacgccgccaccaccaccctcgtcttcaacaactcctacgccttcttctgatcaagtcatctcatcctttatagctagatagctactgtaatctctctctctgcgtgcttggcttgcttggagtttgttgggaacgtgaacgacggacggcgttccacatgtacacaacatgaatggcatttt

SEQ ID NO: 19924 - protein, 90 aa, Zea mays subsp. mays
  peptide (1)..(90): Ceres Seq. ID no. 12594266
  misc_feature (5)..(63): Pfam Name: Pfam Description:  Heavy-metal-associated domain
  misc_feature (1)..(89): NCBI GI NO: 34902222 NR Description: Hypothetical protein
  misc_feature (1)..(69): NCBI GI NO: 15221451 NR Description: hypothetical protein; protein id: At1g06330.1
  misc_feature (1)..(69): NCBI GI NO: 25406916 NR Description: hypothetical protein
  misc_feature (1)..(79): NCBI GI NO: 15223925 NR Description: copper chaperone
  misc_feature (1)..(65): NCBI GI NO: 37536458 NR Description: hypothetical protein
  misc_feature (15)..(90): NCBI GI NO: 30680279 NR Description: copper chaperone (CCH)-related
  misc_feature (2)..(76): NCBI GI NO: 21397273 NR Description: Putative atfp6-like protein
MESTELKVEMVALHEKRVRRCLSKVKGIERVEVEASLQKVVVTGCVNRSKILKALRRVGLRAEPWSPHNELLSAYAATTTLVFNNSYAFF

SEQ ID NO: 19925 - protein, 81 aa, Zea mays subsp. mays
  peptide (1)..(81): Ceres Seq. ID no. 12594267
  misc_feature (1)..(54): Pfam Name: Pfam Description:  Heavy-metal-associated domain
  misc_feature (1)..(80): NCBI GI NO: 34902222 NR Description: Hypothetical protein
  misc_feature (1)..(60): NCBI GI NO: 15221451 NR Description: hypothetical protein; protein id: At1g06330.1
  misc_feature (1)..(60): NCBI GI NO: 25406916 NR Description: hypothetical protein
  misc_feature (1)..(70): NCBI GI NO: 15223925 NR Description: copper chaperone
  misc_feature (1)..(56): NCBI GI NO: 37536458 NR Description: hypothetical protein
  misc_feature (6)..(81): NCBI GI NO: 30680279 NR Description: copper chaperone (CCH)-related
  misc_feature (1)..(67): NCBI GI NO: 21397273 NR Description: Putative atfp6-like protein
MVALHEKRVRRCLSKVKGIERVEVEASLQKVVVTGCVNRSKILKALRRVGLRAEPWSPHNELLSAYAATTTLVFNNSYAFF

SEQ ID NO: 19926 - protein, 78 aa, Zea mays subsp. mays
  peptide (1)..(78): Ceres Seq. ID no. 12594268
MPVQSERDRAGGGGGEPAEGGGDGVREPEQDPQGAPPGGAARRAVVTAQRAAQRLRRHHHPRLQQLLRLLLIKSSHPL

SEQ ID NO: 19927 - DNA, 923 bp, Zea mays subsp. mays
  misc_feature (1)..(923): Ceres Seq. ID no. 12636928
ctagaacatcctaatcgaaaatttacattcatcatttcatcagtttgtttatccacacagccattcatgccttgcgtatgttttctctgaaagaacagatgctttcgtaccaatattattcacatatcagtcatgctgtgtgtgtatatctacgtaccattcacctttcagaccattccgatgctgtcaagttatatgcaacacgtacgtgtgtgtcacgcagggggataaagtgtcgataatagcggacgcgtcatcgtacatcaaggaactaaagcagaagatcgcgaagctaagccaagagatggcatcgtcgtctccgcagcacgccactactggtgtctgccaacaacaaccgtcgtcgtcgtcggtgagtgtgggagtcctgctggacaagaagggccgtttcctcgtcagtgtgttcatggacgagagctgcggcccgccgccggccgggctactcgcttccgtcctcgaggccttcgacgacatcggactcacggtgctcgaggctagggctacctgcgctggttcctttcggctagaagctgtaggagaggtgcgatgcgactgcgaacgagtacacattattacaccgcgcgtaccgccgcaaacgcggtagtacgcatgcatgatttaatcacttctttgtcttgcttctttaatctctcttggtttatttgctgctttgtttgttgtcattccaggaagtagtagtagatgggggcctcatcatcgacgcgcacgcggtggagcaagcagtagttcaggcaatcaagaattgccctgcaaattaaactaatcgacctagtcctccaattcgatcgatcgagttgacgatgcgctggtggtggaccacaaagttcatgccaagctagagactccgagctatatatacatactgattcgcatcgtactttttg

SEQ ID NO: 19928 - protein, 105 aa, Zea mays subsp. mays
  peptide (1)..(105): Ceres Seq. ID no. 12636929
  misc_feature (1)..(84): NCBI GI NO: 22296306 NR Description: hypothetical protein~similar to Arabidopsisthaliana chromosome 2
  misc_feature (1)..(84): NCBI GI NO: 18405384 NR Description: unknown protein; protein id: At2g40435.1
  misc_feature (1)..(89): NCBI GI NO: 15228867 NR Description: putative protein; protein id: At3g56220.1
MASSSPQHATTGVCQQQPSSSSVSVGVLLDKKGRFLVSVFMDESCGPPPAGLLASVLEAFDDIGLTVLEARATCAGSFRLEAVGEVRCDCERVHIITPRVPPQTR

SEQ ID NO: 19929 - protein, 65 aa, Zea mays subsp. mays
  peptide (1)..(65): Ceres Seq. ID no. 12636930
  misc_feature (1)..(44): NCBI GI NO: 22296306 NR Description: hypothetical protein~similar to Arabidopsisthaliana chromosome 2
  misc_feature (1)..(44): NCBI GI NO: 18405384 NR Description: unknown protein; protein id: At2g40435.1
  misc_feature (1)..(49): NCBI GI NO: 15228867 NR Description: putative protein; protein id: At3g56220.1
MDESCGPPPAGLLASVLEAFDDIGLTVLEARATCAGSFRLEAVGEVRCDCERVHIITPRVPPQTR

SEQ ID NO: 19930 - protein, 54 aa, Zea mays subsp. mays
  peptide (1)..(54): Ceres Seq. ID no. 12636931
MFSLKEQMLSYQYYSHISHAVCVYLRTIHLSDHSDAVKLYATRTCVSRRGIKCR

SEQ ID NO: 19931 - DNA, 934 bp, Zea mays subsp. mays
  misc_feature (1)..(934): Ceres Seq. ID no. 12368601
tactctctctctctgcctgcaaagctgcttgatccatcatcgatcacatcactccaccagccgcagcgcacgtaacgtacgactcatggcagatcgcgaccgcagcggcatctacggcggacgagcgcctacgggcagcagcaggggggcggccgcccgatgggtgagcaggtgaagggcatgatccacgacaaggggccgacggcgtcccaggcgctgacggtggcgacgctgttccctctgggcgggctgctcctggtgctgtcgggcctggcgctggcggcctccacggtggggctggccctggccacgcccgtgttcctgctcttcagccccgtgctcgtccccgccgcgctgctcatcggcacggccgtcgcggggttcctcacgtcgggcgcgctggggctcggcggcctgtcctcgctcacgtgcctcgccaacacggcgcggcaggcgttccagcgcaccccggactacgtcgaggaggcgcgccgcaggatggcggaggccgcggcgcacgcgggccacaagaccgcgcaggccgggcacggcatccagagcaaggcgcaggaggccggtgctggcactggcgccggcggcggcaggacttcctcgtaaataagcaaatcatccatggatgcgtgcgtgtcaatgtcagcagggtcgtcgtggaatgctcttctctgtacgtgggtaaccgtcttttggtcgtcttccccgagtgcgtgataaatatcctggtgttcgtcgtgtgtggtgctgccctaggctggggcctggggtcggctgtgtaccggtatctgttcatcgccgctccgtcgcgttcggagatgtgaataagtgatgtgaaggttaagtttcagctttgctattgctattgtggcttgtgcatcagcggtttgctcgttgactgttatggaaataagcattgggg

SEQ ID NO: 19932 - protein, 152 aa, Zea mays subsp. mays
  peptide (1)..(152): Ceres Seq. ID no. 12368602
  misc_feature (15)..(132): Pfam Name: Pfam Description:  Oleosin
  misc_feature (1)..(152): NCBI GI NO: 1076818 NR Description: oleosin 17 - maize
  misc_feature (1)..(152): NCBI GI NO: 129081 NR Description: Oleosin Zm-II
  misc_feature (1)..(152): NCBI GI NO: 28273373 NR Description: oleosin [Oryza sativa (japonica cultivar-group)]
  misc_feature (1)..(152): NCBI GI NO: 3334279 NR Description: OLEOSIN 18 KD (OSE721)
  misc_feature (1)..(152): NCBI GI NO: 1362166 NR Description: oleosin 1 - barley
  misc_feature (1)..(152): NCBI GI NO: 82051 NR Description: lipid body-associated membrane protein - carrot
  misc_feature (1)..(150): NCBI GI NO: 9963897 NR Description: oleosin [Perilla frutescens]
  misc_feature (1)..(150): NCBI GI NO: 10880961 NR Description: 19 kDa oleosin [Perilla frutescens]
  misc_feature (1)..(150): NCBI GI NO: 22651523 NR Description: oleosin [Olea europaea subsp. europaea]
  misc_feature (1)..(138): NCBI GI NO: 13161008 NR Description: oleosin variant B [Arachis hypogaea]
MGEQVKGMIHDKGPTASQALTVATLFPLGGLLLVLSGLALAASTVGLALATPVFLLFSPVLVPAALLIGTAVAGFLTSGALGLGGLSSLTCLANTARQAFQRTPDYVEEARRRMAEAAAHAGHKTAQAGHGIQSKAQEAGAGTGAGGGRTSS

SEQ ID NO: 19933 - protein, 145 aa, Zea mays subsp. mays
  peptide (1)..(145): Ceres Seq. ID no. 12368603
  misc_feature (8)..(125): Pfam Name: Pfam Description:  Oleosin
  misc_feature (1)..(145): NCBI GI NO: 1076818 NR Description: oleosin 17 - maize
  misc_feature (1)..(145): NCBI GI NO: 129081 NR Description: Oleosin Zm-II
  misc_feature (1)..(145): NCBI GI NO: 28273373 NR Description: oleosin [Oryza sativa (japonica cultivar-group)]
  misc_feature (1)..(145): NCBI GI NO: 3334279 NR Description: OLEOSIN 18 KD (OSE721)
  misc_feature (1)..(145): NCBI GI NO: 1362166 NR Description: oleosin 1 - barley
  misc_feature (1)..(145): NCBI GI NO: 82051 NR Description: lipid body-associated membrane protein - carrot
  misc_feature (1)..(143): NCBI GI NO: 9963897 NR Description: oleosin [Perilla frutescens]
  misc_feature (1)..(143): NCBI GI NO: 10880961 NR Description: 19 kDa oleosin [Perilla frutescens]
  misc_feature (1)..(143): NCBI GI NO: 22651523 NR Description: oleosin [Olea europaea subsp. europaea]
  misc_feature (1)..(131): NCBI GI NO: 13161008 NR Description: oleosin variant B [Arachis hypogaea]
MIHDKGPTASQALTVATLFPLGGLLLVLSGLALAASTVGLALATPVFLLFSPVLVPAALLIGTAVAGFLTSGALGLGGLSSLTCLANTARQAFQRTPDYVEEARRRMAEAAAHAGHKTAQAGHGIQSKAQEAGAGTGAGGGRTSS

SEQ ID NO: 19934 - DNA, 789 bp, Zea mays subsp. mays
  misc_feature (1)..(789): Ceres Seq. ID no. 15179603
gagaaatcaatcaatcacagatctgttttcgcatctgcatcttcttcgaaacatcaaacaccatggcgatccccttagctaagcttctgatctccgccgttgcggttttcatgctcgtctccgcttcgttcgcgacctctgaaatgccgttcatggtggttcacaagaaagctactctcaacaggctcaaatctggcgccgagcgtgtcctcgtttccttcgatatctataaccaaggatctgcggcggcgtatgatgtgactctgactgacaatacctgggataagaaaacttttgaagttgtgaatggaaacacttcaagaacatgggagagacttgatgcaggaggtattctgtctcactctttcgaattagaggccagggttaaaggacgcttccatggtgctcctgctcttgttactttccacatccccacaaaggcaactctacagcaagcgtactcaactccattactacctctagacatcctcgcagacgtgcctccaacagacctgcttgctctggcaaagaggatgttggcaaaatatggatcactcgtttcagtgatctccatggtggttttgttcgtacacttggtagcaacaccttcatcgaagtccaatgcagcaaaagggagcagcaagaagaaacgctaaattagtgaaacgatggtgagaaaggtttgcatggtgctttgttgtgtttagcagttaagcactgtttcagaacttgtacgaattagagaatatactttaattttggtgtttcagaggactatcttaaagagtt

SEQ ID NO: 19935 - protein, 217 aa, Zea mays subsp. mays
  peptide (1)..(217): Ceres Seq. ID no. 15179604
  misc_feature (33)..(214): Pfam Name: TRAPB Pfam Description: Translocon-associated protein beta
  misc_feature (21)..(217): NCBI GI NO: 18417271 NR Description: expressed protein [Arabidopsis thaliana]
  misc_feature (21)..(217): NCBI GI NO: 9757784 NR Description: gene_id:MUA22
  misc_feature (31)..(216): NCBI GI NO: 34894034 NR Description: P0672D08.29
  misc_feature (29)..(216): NCBI GI NO: 9945068 NR Description: rice EST BE041002 corresponds to a region of thepredicated gene
  misc_feature (33)..(141): NCBI GI NO: 12860639 NR Description: unnamed protein product [Mus musculus]
  misc_feature (33)..(141): NCBI GI NO: 13384850 NR Description: signal sequence receptor, beta [Mus musculus]
  misc_feature (33)..(141): NCBI GI NO: 16307352 NR Description: Ssr2 protein [Mus musculus]
  misc_feature (17)..(141): NCBI GI NO: 34366445 NR Description: hypothetical protein [Homo sapiens]
  misc_feature (32)..(141): NCBI GI NO: 27692921 NR Description: similar to RIKEN cDNA 1500032E05
  misc_feature (27)..(141): NCBI GI NO: 40643038 NR Description: signal sequence receptor beta-like protein
EINQSQICFRICIFFETSNTMAIPLAKLLISAVAVFMLVSASFATSEMPFMVVHKKATLNRLKSGAERVLVSFDIYNQGSAAAYDVTLTDNTWDKKTFEVVNGNTSRTWERLDAGGILSHSFELEARVKGRFHGAPALVTFHIPTKATLQQAYSTPLLPLDILADVPPTDLLALAKRMLAKYGSLVSVISMVVLFVHLVATPSSKSNAAKGSSKKKR

SEQ ID NO: 19936 - protein, 197 aa, Zea mays subsp. mays
  peptide (1)..(197): Ceres Seq. ID no. 15179605
  misc_feature (13)..(194): Pfam Name: TRAPB Pfam Description: Translocon-associated protein beta
  misc_feature (1)..(197): NCBI GI NO: 18417271 NR Description: expressed protein [Arabidopsis thaliana]
  misc_feature (1)..(197): NCBI GI NO: 9757784 NR Description: gene_id:MUA22
  misc_feature (11)..(196): NCBI GI NO: 34894034 NR Description: P0672D08.29
  misc_feature (9)..(196): NCBI GI NO: 9945068 NR Description: rice EST BE041002 corresponds to a region of thepredicated gene
  misc_feature (13)..(121): NCBI GI NO: 12860639 NR Description: unnamed protein product [Mus musculus]
  misc_feature (13)..(121): NCBI GI NO: 16307352 NR Description: Ssr2 protein [Mus musculus]
  misc_feature (13)..(121): NCBI GI NO: 13384850 NR Description: signal sequence receptor, beta [Mus musculus]
  misc_feature (1)..(121): NCBI GI NO: 34366445 NR Description: hypothetical protein [Homo sapiens]
  misc_feature (12)..(121): NCBI GI NO: 27692921 NR Description: similar to RIKEN cDNA 1500032E05
  misc_feature (7)..(121): NCBI GI NO: 40643038 NR Description: signal sequence receptor beta-like protein
MAIPLAKLLISAVAVFMLVSASFATSEMPFMVVHKKATLNRLKSGAERVLVSFDIYNQGSAAAYDVTLTDNTWDKKTFEVVNGNTSRTWERLDAGGILSHSFELEARVKGRFHGAPALVTFHIPTKATLQQAYSTPLLPLDILADVPPTDLLALAKRMLAKYGSLVSVISMVVLFVHLVATPSSKSNAAKGSSKKKR

SEQ ID NO: 19937 - protein, 181 aa, Zea mays subsp. mays
  peptide (1)..(181): Ceres Seq. ID no. 15179606
  misc_feature (1)..(178): Pfam Name: TRAPB Pfam Description: Translocon-associated protein beta
  misc_feature (1)..(181): NCBI GI NO: 18417271 NR Description: expressed protein [Arabidopsis thaliana]
  misc_feature (1)..(181): NCBI GI NO: 9757784 NR Description: gene_id:MUA22
  misc_feature (1)..(180): NCBI GI NO: 34894034 NR Description: P0672D08.29
  misc_feature (1)..(180): NCBI GI NO: 9945068 NR Description: rice EST BE041002 corresponds to a region of thepredicated gene
  misc_feature (1)..(105): NCBI GI NO: 12860639 NR Description: unnamed protein product [Mus musculus]
  misc_feature (1)..(105): NCBI GI NO: 13384850 NR Description: signal sequence receptor, beta [Mus musculus]
  misc_feature (1)..(105): NCBI GI NO: 16307352 NR Description: Ssr2 protein [Mus musculus]
  misc_feature (1)..(105): NCBI GI NO: 34366445 NR Description: hypothetical protein [Homo sapiens]
  misc_feature (1)..(105): NCBI GI NO: 27692921 NR Description: similar to RIKEN cDNA 1500032E05
  misc_feature (1)..(105): NCBI GI NO: 40643038 NR Description: signal sequence receptor beta-like protein
MLVSASFATSEMPFMVVHKKATLNRLKSGAERVLVSFDIYNQGSAAAYDVTLTDNTWDKKTFEVVNGNTSRTWERLDAGGILSHSFELEARVKGRFHGAPALVTFHIPTKATLQQAYSTPLLPLDILADVPPTDLLALAKRMLAKYGSLVSVISMVVLFVHLVATPSSKSNAAKGSSKKKR

SEQ ID NO: 19938 - DNA, 853 bp, Zea mays subsp. mays
  misc_feature (1)..(853): Ceres Seq. ID no. 14309542
gttccccaaggatttcaatctcaaagtctctctctccctcttaagacccaaaaaaaatcatcatctttctaatacggaattatttagggtttattgtcgtttgaatcttcttctactattgccatggatatagaagaaactaatataattgaagttgaaacgaaggtgatgaatctagcgctaaacatggagtctatgaacattctctcaatccgtgtacacaatctgattgaagattttaccgaagacgtgattttacatataagatcacgttacatccgcttggagccacacggcttcacgccaagtcatatctctgaactccttcgtggccaacaagttgatgaatctcaacacataggtgaaaagatcgctaatgaaatcaatcgttcacttagcaatgataaaactctccgagagcctgtcttcgtgaacgtcgaagttgaattcgtcaaagagaggcgtttggttgtgccgtctgatgttcctgcttcgattgaagttttacagaggttggtggaagaacatatagtggatttgaacggaaataaagaagctatgtgttcaatttgcatcgaggatttgtccaagagtcaacaaagcatcattgagatgcctaactgtttgcatatgtttcatcaaaactgtctttttgagtggcttggtcggaaaaactcgtgtccgttgtgccggagattcgtacgacctaggaataggatcaagaaacagaaactcgaaaacgttacagcttcaggggtttcgattatgttgcgaattgttgacactcatccttatgttaattagttcttataagatgaaattgtttacaagtatcatgaattattgactgact

SEQ ID NO: 19939 - protein, 226 aa, Zea mays subsp. mays
  peptide (1)..(226): Ceres Seq. ID no. 14309543
  misc_feature (147)..(189): Pfam Name: RING finger Pfam Description: Zinc finger, C3HC4 type
  misc_feature (1)..(191): NCBI GI NO: 15240137 NR Description: zinc finger
  misc_feature (32)..(191): NCBI GI NO: 15240174 NR Description: zinc finger
  misc_feature (9)..(191): NCBI GI NO: 15240173 NR Description: zinc finger
  misc_feature (9)..(191): NCBI GI NO: 15240166 NR Description: zinc finger
  misc_feature (9)..(191): NCBI GI NO: 9758711 NR Description: contains similarity to RING zinc fingerprotein~gene_id:MNJ8
  misc_feature (99)..(191): NCBI GI NO: 15240170 NR Description: zinc finger
  misc_feature (9)..(178): NCBI GI NO: 9758709 NR Description: gb|AAD18119
  misc_feature (9)..(178): NCBI GI NO: 15240161 NR Description: zinc finger
  misc_feature (105)..(190): NCBI GI NO: 15223650 NR Description: zinc finger
  misc_feature (52)..(191): NCBI GI NO: 15239807 NR Description: zinc finger
MDIEETNIIEVETKVMNLALNMESMNILSIRVHNLIEDFTEDVILHIRSRYIRLEPHGFTPSHISELLRGQQVDESQHIGEKIANEINRSLSNDKTLREPVFVNVEVEFVKERRLVVPSDVPASIEVLQRLVEEHIVDLNGNKEAMCSICIEDLSKSQQSIIEMPNCLHMFHQNCLFEWLGRKNSCPLCRRFVRPRNRIKKQKLENVTASGVSIMLRIVDTHPYVN

SEQ ID NO: 19940 - protein, 211 aa, Zea mays subsp. mays
  peptide (1)..(211): Ceres Seq. ID no. 14309544
  misc_feature (132)..(174): Pfam Name: RING finger Pfam Description: Zinc finger, C3HC4 type
  misc_feature (1)..(176): NCBI GI NO: 15240137 NR Description: zinc finger
  misc_feature (17)..(176): NCBI GI NO: 15240174 NR Description: zinc finger
  misc_feature (1)..(176): NCBI GI NO: 15240173 NR Description: zinc finger
  misc_feature (1)..(176): NCBI GI NO: 15240166 NR Description: zinc finger
  misc_feature (1)..(176): NCBI GI NO: 9758711 NR Description: contains similarity to RING zinc fingerprotein~gene_id:MNJ8
  misc_feature (84)..(176): NCBI GI NO: 15240170 NR Description: zinc finger
  misc_feature (1)..(163): NCBI GI NO: 9758709 NR Description: gb|AAD18119
  misc_feature (1)..(163): NCBI GI NO: 15240161 NR Description: zinc finger
  misc_feature (90)..(175): NCBI GI NO: 15223650 NR Description: zinc finger
  misc_feature (37)..(176): NCBI GI NO: 15239807 NR Description: zinc finger
MNLALNMESMNILSIRVHNLIEDFTEDVILHIRSRYIRLEPHGFTPSHISELLRGQQVDESQHIGEKIANEINRSLSNDKTLREPVFVNVEVEFVKERRLVVPSDVPASIEVLQRLVEEHIVDLNGNKEAMCSICIEDLSKSQQSIIEMPNCLHMFHQNCLFEWLGRKNSCPLCRRFVRPRNRIKKQKLENVTASGVSIMLRIVDTHPYVN

SEQ ID NO: 19941 - protein, 205 aa, Zea mays subsp. mays
  peptide (1)..(205): Ceres Seq. ID no. 14309545
  misc_feature (126)..(168): Pfam Name: RING finger Pfam Description: Zinc finger, C3HC4 type
  misc_feature (1)..(170): NCBI GI NO: 15240137 NR Description: zinc finger
  misc_feature (11)..(170): NCBI GI NO: 15240174 NR Description: zinc finger
  misc_feature (1)..(170): NCBI GI NO: 15240173 NR Description: zinc finger
  misc_feature (1)..(170): NCBI GI NO: 15240166 NR Description: zinc finger
  misc_feature (1)..(170): NCBI GI NO: 9758711 NR Description: contains similarity to RING zinc fingerprotein~gene_id:MNJ8
  misc_feature (78)..(170): NCBI GI NO: 15240170 NR Description: zinc finger
  misc_feature (1)..(157): NCBI GI NO: 9758709 NR Description: gb|AAD18119
  misc_feature (1)..(157): NCBI GI NO: 15240161 NR Description: zinc finger
  misc_feature (84)..(169): NCBI GI NO: 15223650 NR Description: zinc finger
  misc_feature (31)..(170): NCBI GI NO: 15239807 NR Description: zinc finger
MESMNILSIRVHNLIEDFTEDVILHIRSRYIRLEPHGFTPSHISELLRGQQVDESQHIGEKIANEINRSLSNDKTLREPVFVNVEVEFVKERRLVVPSDVPASIEVLQRLVEEHIVDLNGNKEAMCSICIEDLSKSQQSIIEMPNCLHMFHQNCLFEWLGRKNSCPLCRRFVRPRNRIKKQKLENVTASGVSIMLRIVDTHPYVN

SEQ ID NO: 19942 - DNA, 711 bp, Zea mays subsp. mays
  misc_feature (1)..(711): Ceres Seq. ID no. 14309546
atctattattactcacactagtcacaaaccttatcggagtgaagtgaagattggtgggggtagtagcgaaaatggcgtcgattacagcttcttctactttccgctccttgtcaacaaccaaaagccctaacctttcttcgacccatctccttcctctttccaaaaaccacagcagagtttgcatctttacgaaacagaacccccttgggctgaggaagctttcgtcccttggccaaggaggagaagctgtcgcagtcgcagtcgcagtcgcagatgaagagcaacaacagcagcaagaggctgtctctgtccctgtctctccttcagacatgctcaccatgttttttcaggctgatggaactttgaatgacgcagctattcctaatgtcacaaaggccttacaggacatcgacggagtttccaatttaaaggttcaagttgctgaaggtgttgccgttgttgagctttcaaagcaaacaacggttcaagcaacaggagtggcgtcaagcttggtggagactatacaaggagctggctttaagttacaaaccttgaatctgagctttgaagacgaagatgaagttcttgtctaattaaatcatctttctcctcctccatttttgtgattaaagaaacacattaatgttcaattattatttaaaaatgacaatgtgccatattacaaaagtaatgaactctcacttttcttac

SEQ ID NO: 19943 - protein, 173 aa, Zea mays subsp. mays
  peptide (1)..(173): Ceres Seq. ID no. 14309547
  misc_feature (1)..(173): NCBI GI NO: 18417512 NR Description: heavy-metal-associated domain-containing protein
  misc_feature (1)..(173): NCBI GI NO: 11346179 NR Description: hypothetical protein F2G14_30 - Arabidopsisthaliana
MASITASSTFRSLSTTKSPNLSSTHLLPLSKNHSRVCIFTKQNPLGLRKLSSLGQGGEAVAVAVAVADEEQQQQQEAVSVPVSPSDMLTMFFQADGTLNDAAIPNVTKALQDIDGVSNLKVQVAEGVAVVELSKQTTVQATGVASSLVETIQGAGFKLQTLNLSFEDEDEVLV

SEQ ID NO: 19944 - protein, 87 aa, Zea mays subsp. mays
  peptide (1)..(87): Ceres Seq. ID no. 14309548
  misc_feature (1)..(87): NCBI GI NO: 18417512 NR Description: heavy-metal-associated domain-containing protein
  misc_feature (1)..(87): NCBI GI NO: 11346179 NR Description: hypothetical protein F2G14_30 - Arabidopsisthaliana
MLTMFFQADGTLNDAAIPNVTKALQDIDGVSNLKVQVAEGVAVVELSKQTTVQATGVASSLVETIQGAGFKLQTLNLSFEDEDEVLV

SEQ ID NO: 19945 - DNA, 530 bp, Zea mays subsp. mays
  misc_feature (1)..(530): Ceres Seq. ID no. 14309595
atccaaagtccaaaacatttaaagaaaccttggactccccagccagaagaagaaccaacatggcacccacaatctataatttttcgtattctaaaaggttttcagagtcattcaattcttcaacatcaaaaaaggagtcatccagttcgaacatccttgctttccactccatagctcaatggaatgctcattataaagccaccaaagaaactaacaagctgatggtacttgatttcacagccacatggtgtggaccttgcaaactcatggaccctgttatcctagagtttgctggaaattacacagatgttgagttcatcaagattgatgtggaggagttaacggaagtgtctcaagcactccaggtccaccaattgccaacattcgtactcgttcagaaaggcaaagttgctgatagagtggtgggggtgaagaaggaggagctgaaaaggtcgattgagaagcacataaaataaataaatatgattatgcactgtaataaaatcaaaatgctcaacaaccaattcaag

SEQ ID NO: 19946 - protein, 157 aa, Zea mays subsp. mays
  peptide (1)..(157): Ceres Seq. ID no. 14309596
  misc_feature (51)..(155): Pfam Name: Pfam Description:  Thioredoxin
  misc_feature (39)..(155): NCBI GI NO: 33621080 NR Description: thioredoxin H2 [Ipomoea batatas]
  misc_feature (45)..(155): NCBI GI NO: 27466896 NR Description: thioredoxin h [Pisum sativum]
  misc_feature (48)..(155): NCBI GI NO: 19548654 NR Description: thioredoxin H
  misc_feature (33)..(154): NCBI GI NO: 15242525 NR Description: thioredoxin H-type 2 (TRX-H-2)
  misc_feature (33)..(154): NCBI GI NO: 1388078 NR Description: thioredoxin h
  misc_feature (33)..(154): NCBI GI NO: 21595244 NR Description: thioredoxin [Arabidopsis thaliana]
  misc_feature (33)..(152): NCBI GI NO: 34394553 NR Description: putative thioredoxin
  misc_feature (47)..(155): NCBI GI NO: 25990392 NR Description: thioredoxin h [Brassica rapa]
  misc_feature (33)..(156): NCBI GI NO: 34897150 NR Description: putative thioredoxin
  misc_feature (46)..(156): NCBI GI NO: 40287476 NR Description: thioredoxin [Capsicum annuum]
PKSKTFKETLDSPARRRTNMAPTIYNFSYSKRFSESFNSSTSKKESSSSNILAFHSIAQWNAHYKATKETNKLMVLDFTATWCGPCKLMDPVILEFAGNYTDVEFIKIDVEELTEVSQALQVHQLPTFVLVQKGKVADRVVGVKKEELKRSIEKHIK

SEQ ID NO: 19947 - protein, 138 aa, Zea mays subsp. mays
  peptide (1)..(138): Ceres Seq. ID no. 14309597
  misc_feature (32)..(136): Pfam Name: Pfam Description:  Thioredoxin
  misc_feature (20)..(136): NCBI GI NO: 33621080 NR Description: thioredoxin H2 [Ipomoea batatas]
  misc_feature (26)..(136): NCBI GI NO: 27466896 NR Description: thioredoxin h [Pisum sativum]
  misc_feature (29)..(136): NCBI GI NO: 19548654 NR Description: thioredoxin H
  misc_feature (14)..(135): NCBI GI NO: 15242525 NR Description: thioredoxin H-type 2 (TRX-H-2)
  misc_feature (14)..(135): NCBI GI NO: 1388078 NR Description: thioredoxin h
  misc_feature (14)..(135): NCBI GI NO: 21595244 NR Description: thioredoxin [Arabidopsis thaliana]
  misc_feature (14)..(133): NCBI GI NO: 34394553 NR Description: putative thioredoxin
  misc_feature (28)..(136): NCBI GI NO: 25990392 NR Description: thioredoxin h [Brassica rapa]
  misc_feature (14)..(137): NCBI GI NO: 34897150 NR Description: putative thioredoxin
  misc_feature (27)..(137): NCBI GI NO: 40287476 NR Description: thioredoxin [Capsicum annuum]
MAPTIYNFSYSKRFSESFNSSTSKKESSSSNILAFHSIAQWNAHYKATKETNKLMVLDFTATWCGPCKLMDPVILEFAGNYTDVEFIKIDVEELTEVSQALQVHQLPTFVLVQKGKVADRVVGVKKEELKRSIEKHIK

SEQ ID NO: 19948 - protein, 84 aa, Zea mays subsp. mays
  peptide (1)..(84): Ceres Seq. ID no. 14309598
  misc_feature (1)..(82): Pfam Name: Pfam Description:  Thioredoxin
  misc_feature (1)..(82): NCBI GI NO: 33621080 NR Description: thioredoxin H2 [Ipomoea batatas]
  misc_feature (1)..(82): NCBI GI NO: 27466896 NR Description: thioredoxin h [Pisum sativum]
  misc_feature (1)..(82): NCBI GI NO: 19548654 NR Description: thioredoxin H
  misc_feature (1)..(81): NCBI GI NO: 15242525 NR Description: thioredoxin H-type 2 (TRX-H-2)
  misc_feature (1)..(81): NCBI GI NO: 1388078 NR Description: thioredoxin h
  misc_feature (1)..(81): NCBI GI NO: 21595244 NR Description: thioredoxin [Arabidopsis thaliana]
  misc_feature (1)..(79): NCBI GI NO: 34394553 NR Description: putative thioredoxin
  misc_feature (1)..(82): NCBI GI NO: 25990392 NR Description: thioredoxin h [Brassica rapa]
  misc_feature (1)..(83): NCBI GI NO: 34897150 NR Description: putative thioredoxin
  misc_feature (1)..(83): NCBI GI NO: 40287476 NR Description: thioredoxin [Capsicum annuum]
MVLDFTATWCGPCKLMDPVILEFAGNYTDVEFIKIDVEELTEVSQALQVHQLPTFVLVQKGKVADRVVGVKKEELKRSIEKHIK

SEQ ID NO: 19949 - DNA, 883 bp, Zea mays subsp. mays
  misc_feature (1)..(883): Ceres Seq. ID no. 14309611
aacctaaattaagggatttgttctaacaaatctctctagaatccaaaagtaagaatcccgtctctctctcatcttcttctcgggaagatcagaaaacagctttttgtgaaattccatccccaagctttgaagatcgcaggaaaattctcgttttgatctgaccgtttctggtgaagaagacaggattctaaaagacaacaacaatgagctctgagcaaaacaacagcacaagcttcccaccaacagagccaaagctctgcgacaacgggtgcggattcttcgggtcaccctccaacatgaacctctgttccaaatgttaccgaagcctacgtgccgaggaagatcaaaccgcagttgcaaaagctgcggtggagaaatcacttaagcttccatcttgcaatctcatcaccgcaccagagccaaaacagcctctggagaccaaaccagcctcgttggaaaccgttgtgattgctgggacgtcttctgttcctcctgtagctacgggacaggacgagggagagccttcgaaacccacacggccgaacaggtgtttcagctgtaacaagaaggttggagttatggggttcaagtgcaagtgcggtagcacgttttgcgggagccataggtacccggagaagcatgagtgtagcttcgatttcaaagaggttggacgcggtgcaatcgcaaaggcgaatcctgtggtcaaggcggataaagtccagaggatttgatttgatgtgatgtgatctgtctatctttcagtttattccgagaatgttgatgtgatgtggtcatgttccatgttgggtttctatgaatcaaaatgaaaattgctgctattggttttctcatgaatcctttttagtgctttttaagtctattg

SEQ ID NO: 19950 - protein, 175 aa, Zea mays subsp. mays
  peptide (1)..(175): Ceres Seq. ID no. 14309612
  misc_feature (116)..(156): Pfam Name: Pfam Description:  AN1-like Zinc finger
  misc_feature (1)..(175): NCBI GI NO: 15234402 NR Description: expressed protein [Arabidopsis thaliana]
  misc_feature (1)..(174): NCBI GI NO: 15235819 NR Description: zinc finger -related protein
  misc_feature (1)..(175): NCBI GI NO: 8778645 NR Description: F5O11.17 [Arabidopsis thaliana]
  misc_feature (1)..(175): NCBI GI NO: 15221329 NR Description: expressed protein [Arabidopsis thaliana]
  misc_feature (15)..(175): NCBI GI NO: 15225894 NR Description: zinc finger protein -related
  misc_feature (12)..(175): NCBI GI NO: 18403408 NR Description: expressed protein [Arabidopsis thaliana]
  misc_feature (13)..(175): NCBI GI NO: 18404102 NR Description: expressed protein [Arabidopsis thaliana]
  misc_feature (12)..(175): NCBI GI NO: 25082726 NR Description: expressed protein [Arabidopsis thaliana]
  misc_feature (13)..(175): NCBI GI NO: 15231686 NR Description: zinc finger - like protein [Arabidopsis thaliana]
  misc_feature (13)..(175): NCBI GI NO: 14596167 NR Description: zinc finger-like protein [Arabidopsis thaliana]
MSSEQNNSTSFPPTEPKLCDNGCGFFGSPSNMNLCSKCYRSLRAEEDQTAVAKAAVEKSLKLPSCNLITAPEPKQPLETKPASLETVVIAGTSSVPPVATGQDEGEPSKPTRPNRCFSCNKKVGVMGFKCKCGSTFCGSHRYPEKHECSFDFKEVGRGAIAKANPVVKADKVQRI

SEQ ID NO: 19951 - protein, 144 aa, Zea mays subsp. mays
  peptide (1)..(144): Ceres Seq. ID no. 14309613
  misc_feature (85)..(125): Pfam Name: Pfam Description:  AN1-like Zinc finger
  misc_feature (1)..(144): NCBI GI NO: 15234402 NR Description: expressed protein [Arabidopsis thaliana]
  misc_feature (1)..(143): NCBI GI NO: 15235819 NR Description: zinc finger -related protein
  misc_feature (1)..(144): NCBI GI NO: 8778645 NR Description: F5O11.17 [Arabidopsis thaliana]
  misc_feature (1)..(144): NCBI GI NO: 15221329 NR Description: expressed protein [Arabidopsis thaliana]
  misc_feature (1)..(144): NCBI GI NO: 15225894 NR Description: zinc finger protein -related
  misc_feature (1)..(144): NCBI GI NO: 18403408 NR Description: expressed protein [Arabidopsis thaliana]
  misc_feature (1)..(144): NCBI GI NO: 18404102 NR Description: expressed protein [Arabidopsis thaliana]
  misc_feature (1)..(144): NCBI GI NO: 25082726 NR Description: expressed protein [Arabidopsis thaliana]
  misc_feature (1)..(144): NCBI GI NO: 15231686 NR Description: zinc finger - like protein [Arabidopsis thaliana]
  misc_feature (1)..(144): NCBI GI NO: 14596167 NR Description: zinc finger-like protein [Arabidopsis thaliana]
MNLCSKCYRSLRAEEDQTAVAKAAVEKSLKLPSCNLITAPEPKQPLETKPASLETVVIAGTSSVPPVATGQDEGEPSKPTRPNRCFSCNKKVGVMGFKCKCGSTFCGSHRYPEKHECSFDFKEVGRGAIAKANPVVKADKVQRI

SEQ ID NO: 19952 - DNA, 1438 bp, Zea mays subsp. mays
  misc_feature (1)..(1438): Ceres Seq. ID no. 15179613
attacttaacccattttgccaatcaatcactcttcacttcttcccactcctacttttttcctttctaagcaatctctctctctcatactatctgcacagcactactaacagagctatttgctatattgtaaaaggaagatgtttggacaaagcttcgcggaggatcttgattgtggcaacttctttgacaacatggacgatcttcttgattttcccggtggtgatatcgatgtcggtttcggcataggtgactccgactcttttcctaacatctggactactcatcaggacacatggcctgcagcttctgatcctctcttcgcttccaacacaaactctgactcatcacctgagctctatgttccgtttgaagatattgttaaggtggaaagaccaaaatgctttgtagaggaatccttagttgagaagaaggaagattcgtttttcacaaacacggattcatcatcttctcatagccaattcaggagctcaagtccagtgtcggtactcgaaagcagctcctcatcgtctcatacaaccaacacaacctcacttgtcctccctggaaagcacggtcgtccacgcacaaaacgtcctcgtccacaggtccaggagaaagataaagtcaacgacaatgtctttggggcggattcgcgcctcatcattagaataccaaagcagtttctctctgaccacagcaagatgataaccaagaagaagaagaagaaggccaaggttgtttcttcatcttcttggtcggagattgatcttgaaaccaatggaaacaacaatgtagattcgtgttcttcagagcagaatcctgttaggaaatgtatgcactgtgaggtcaccaagaccccacaatggaggctcgggcctatgggcccaaagacgctttgcaatgcttgcgatgtacgttacaaatcgggaaggcttttcccggagtaccggccagctgctagcccaacgtttactccagctcttcactcaaactcccacaagaaggtggctgaaatgagaaacaagagatgcagcaatggaagctacacaaacgaagagaatgatctgcatgatctggttttgaacaatgcctacattggcataggagtaggaaagagtcagagagtagaaaagttttagctttagaagagatggatgaagaggagcaatcaattgaggaaggggtcaaagttagatgagagttgattgtgttgtattttgtattatttgtagtgtgaatgggcaaaactcttgaaacaaaggaagagtaagttggggaagagcagaagattttgaagatactagagagagagttaggtgttgaattttacattaaatcttcctctcctttttcttcctttcaattctttgtacttttattgtgaggattctttttgtagttgatttgtttagctaaattattatttttgtttttgtt

SEQ ID NO: 19953 - protein, 333 aa, Zea mays subsp. mays
  peptide (1)..(333): Ceres Seq. ID no. 15179614
  misc_feature (1)..(322): NCBI GI NO: 15233101 NR Description: GATA zinc finger protein [Arabidopsis thaliana]
  misc_feature (3)..(296): NCBI GI NO: 37572443 NR Description: AG-motif binding protein-1 [Nicotiana tabacum]
  misc_feature (3)..(296): NCBI GI NO: 37572451 NR Description: AG-motif binding protein-5 [Nicotiana tabacum]
  misc_feature (13)..(296): NCBI GI NO: 15223086 NR Description: GATA zinc finger protein [Arabidopsis thaliana]
  misc_feature (21)..(296): NCBI GI NO: 15451574 NR Description: Putative GATA-1 zinc finger protein [Oryza sativa]
  misc_feature (115)..(315): NCBI GI NO: 12711287 NR Description: GATA-1 zinc finger protein [Nicotiana tabacum]
  misc_feature (115)..(296): NCBI GI NO: 8778844 NR Description: T6D22.9 [Arabidopsis thaliana]
  misc_feature (38)..(296): NCBI GI NO: 15223085 NR Description: GATA zinc finger protein [Arabidopsis thaliana]
  misc_feature (19)..(297): NCBI GI NO: 15239503 NR Description: GATA zinc finger protein [Arabidopsis thaliana]
  misc_feature (79)..(297): NCBI GI NO: 37572447 NR Description: AG-motif binding protein-3 [Nicotiana tabacum]
MFGQSFAEDLDCGNFFDNMDDLLDFPGGDIDVGFGIGDSDSFPNIWTTHQDTWPAASDPLFASNTNSDSSPELYVPFEDIVKVERPKCFVEESLVEKKEDSFFTNTDSSSSHSQFRSSSPVSVLESSSSSSHTTNTTSLVLPGKHGRPRTKRPRPQVQEKDKVNDNVFGADSRLIIRIPKQFLSDHSKMITKKKKKKAKVVSSSSWSEIDLETNGNNNVDSCSSEQNPVRKCMHCEVTKTPQWRLGPMGPKTLCNACDVRYKSGRLFPEYRPAASPTFTPALHSNSHKKVAEMRNKRCSNGSYTNEENDLHDLVLNNAYIGIGVGKSQRVEKF

SEQ ID NO: 19954 - protein, 315 aa, Zea mays subsp. mays
  peptide (1)..(315): Ceres Seq. ID no. 15179615
  misc_feature (1)..(304): NCBI GI NO: 15233101 NR Description: GATA zinc finger protein [Arabidopsis thaliana]
  misc_feature (1)..(278): NCBI GI NO: 37572443 NR Description: AG-motif binding protein-1 [Nicotiana tabacum]
  misc_feature (1)..(278): NCBI GI NO: 37572451 NR Description: AG-motif binding protein-5 [Nicotiana tabacum]
  misc_feature (1)..(278): NCBI GI NO: 15223086 NR Description: GATA zinc finger protein [Arabidopsis thaliana]
  misc_feature (3)..(278): NCBI GI NO: 15451574 NR Description: Putative GATA-1 zinc finger protein [Oryza sativa]
  misc_feature (97)..(297): NCBI GI NO: 12711287 NR Description: GATA-1 zinc finger protein [Nicotiana tabacum]
  misc_feature (97)..(278): NCBI GI NO: 8778844 NR Description: T6D22.9 [Arabidopsis thaliana]
  misc_feature (20)..(278): NCBI GI NO: 15223085 NR Description: GATA zinc finger protein [Arabidopsis thaliana]
  misc_feature (1)..(279): NCBI GI NO: 15239503 NR Description: GATA zinc finger protein [Arabidopsis thaliana]
  misc_feature (61)..(279): NCBI GI NO: 37572447 NR Description: AG-motif binding protein-3 [Nicotiana tabacum]
MDDLLDFPGGDIDVGFGIGDSDSFPNIWTTHQDTWPAASDPLFASNTNSDSSPELYVPFEDIVKVERPKCFVEESLVEKKEDSFFTNTDSSSSHSQFRSSSPVSVLESSSSSSHTTNTTSLVLPGKHGRPRTKRPRPQVQEKDKVNDNVFGADSRLIIRIPKQFLSDHSKMITKKKKKKAKVVSSSSWSEIDLETNGNNNVDSCSSEQNPVRKCMHCEVTKTPQWRLGPMGPKTLCNACDVRYKSGRLFPEYRPAASPTFTPALHSNSHKKVAEMRNKRCSNGSYTNEENDLHDLVLNNAYIGIGVGKSQRVEKF

SEQ ID NO: 19955 - DNA, 1207 bp, Zea mays subsp. mays
  misc_feature (1)..(1207): Ceres Seq. ID no. 15179585
aacacaaacaagaagcttgcattgttcgtttgctcgatcgttgcagataatggagaaccctgctccgagtatcgtagtgccccccattgccgcacctgtatcagcgaacttcagcagactcgccttccgcaacctgtacatccgacggacgggtccagacagcagggagatggtgactgtggagggaagaagaggctctagtgatcagacaggcgacatgaggtacgtgagtgacttccccgtctacgatggccgtggctccgacgccgtcctggtggctcgcgtgcagggcgtcacaaccacgttcgggaactccaaccagttcttcaccgtcgccttcgaggccggcaggctcaagggctccacgctccttaccgaaggagtggtgacggatggatcagatgaatgggcaatctacggcgggaccggagagtttgctatggcgagaggtgtcgtcaaaagaaggtaccttgccgatagggatggcgccgggaacactgacgagctcagcatgcaggttttctgcccggtgtttggctcatcacagcaaccaaacaagcaggactccagcatctctgtcaccaagattgggttatggggtggcgaaggagggtcggcgcaggacatcacgacgacggagccaccgcagcgcctgcacagcctcaccgttcgtgccggtggcgccgtcgactccatcgagttcacgtatactgacagaggtggccagaggcgcgccgctgggcgatggggtggacttggcggcaaccttcgaacgatcgatcttggcgacgccgaggatgtcagggaggtctcaggaacgtacggcacatttgaaggcgccaccacgctgacctcgttcagaattctcaccagcagcaggacatgggggccatggggcgtcgagaacgggacgcggttctgcatcaccgcgccggtcggcagcagcatcgtggggttctatggacgcgcgaccagcaggctcgtcgctgcgcttggtgtttacctgcgccgactttgatttgatctgaacagcaggctacctactagcaattgcctgctcgatcaattatctttcgtaccctttattattaatataatctcgatcggtcatcgtcctcctatgtcaatgtcaaataaaggtcatgtggtcatcgatattgttggatttatgggcttggtctaattaagaaattcaattaatttctag

SEQ ID NO: 19956 - protein, 338 aa, Zea mays subsp. mays
  peptide (1)..(338): Ceres Seq. ID no. 15179586
  misc_feature (204)..(336): Pfam Name: Pfam Description:  Jacalin-like lectin domain
  misc_feature (26)..(338): NCBI GI NO: 7489383 NR Description: jacalin homolog - barley
  misc_feature (23)..(338): NCBI GI NO: 9313027 NR Description: beta-glucosidase aggregating factor precursor
  misc_feature (26)..(338): NCBI GI NO: 7489385 NR Description: jakalin homolog - barley
  misc_feature (26)..(322): NCBI GI NO: 7489384 NR Description: jacalin homolog - barley
  misc_feature (78)..(334): NCBI GI NO: 16151819 NR Description: VER2 [Triticum aestivum]
  misc_feature (77)..(335): NCBI GI NO: 7489661 NR Description: benzothiadiazole-induced protein
  misc_feature (41)..(336): NCBI GI NO: 21311647 NR Description: hessian fly response gene 1 protein
  misc_feature (188)..(334): NCBI GI NO: 38344523 NR Description: OSJNBa0016N04.16
  misc_feature (191)..(336): NCBI GI NO: 34915016 NR Description: putative Mannose-Binding Rice Lectin
  misc_feature (193)..(335): NCBI GI NO: 38344523 NR Description: OSJNBa0016N04.16
TQTRSLHCSFARSLQIMENPAPSIVVPPIAAPVSANFSRLAFRNLYIRRTGPDSREMVTVEGRRGSSDQTGDMRYVSDFPVYDGRGSDAVLVARVQGVTTTFGNSNQFFTVAFEAGRLKGSTLLTEGVVTDGSDEWAIYGGTGEFAMARGVVKRRYLADRDGAGNTDELSMQVFCPVFGSSQQPNKQDSSISVTKIGLWGGEGGSAQDITTTEPPQRLHSLTVRAGGAVDSIEFTYTDRGGQRRAAGRWGGLGGNLRTIDLGDAEDVREVSGTYGTFEGATTLTSFRILTSSRTWGPWGVENGTRFCITAPVGSSIVGFYGRATSRLVAALGVYLRRL

SEQ ID NO: 19957 - protein, 322 aa, Zea mays subsp. mays
  peptide (1)..(322): Ceres Seq. ID no. 15179587
  misc_feature (188)..(320): Pfam Name: Pfam Description:  Jacalin-like lectin domain
  misc_feature (10)..(322): NCBI GI NO: 7489383 NR Description: jacalin homolog - barley
  misc_feature (7)..(322): NCBI GI NO: 9313027 NR Description: beta-glucosidase aggregating factor precursor
  misc_feature (10)..(322): NCBI GI NO: 7489385 NR Description: jakalin homolog - barley
  misc_feature (10)..(306): NCBI GI NO: 7489384 NR Description: jacalin homolog - barley
  misc_feature (62)..(318): NCBI GI NO: 16151819 NR Description: VER2 [Triticum aestivum]
  misc_feature (61)..(319): NCBI GI NO: 7489661 NR Description: benzothiadiazole-induced protein
  misc_feature (25)..(320): NCBI GI NO: 21311647 NR Description: hessian fly response gene 1 protein
  misc_feature (172)..(318): NCBI GI NO: 38344523 NR Description: OSJNBa0016N04.16
  misc_feature (175)..(320): NCBI GI NO: 34915016 NR Description: putative Mannose-Binding Rice Lectin
  misc_feature (177)..(319): NCBI GI NO: 38344523 NR Description: OSJNBa0016N04.16
MENPAPSIVVPPIAAPVSANFSRLAFRNLYIRRTGPDSREMVTVEGRRGSSDQTGDMRYVSDFPVYDGRGSDAVLVARVQGVTTTFGNSNQFFTVAFEAGRLKGSTLLTEGVVTDGSDEWAIYGGTGEFAMARGVVKRRYLADRDGAGNTDELSMQVFCPVFGSSQQPNKQDSSISVTKIGLWGGEGGSAQDITTTEPPQRLHSLTVRAGGAVDSIEFTYTDRGGQRRAAGRWGGLGGNLRTIDLGDAEDVREVSGTYGTFEGATTLTSFRILTSSRTWGPWGVENGTRFCITAPVGSSIVGFYGRATSRLVAALGVYLRRL

SEQ ID NO: 19958 - protein, 282 aa, Zea mays subsp. mays
  peptide (1)..(282): Ceres Seq. ID no. 15179588
  misc_feature (148)..(280): Pfam Name: Pfam Description:  Jacalin-like lectin domain
  misc_feature (1)..(282): NCBI GI NO: 7489383 NR Description: jacalin homolog - barley
  misc_feature (1)..(282): NCBI GI NO: 9313027 NR Description: beta-glucosidase aggregating factor precursor
  misc_feature (1)..(282): NCBI GI NO: 7489385 NR Description: jakalin homolog - barley
  misc_feature (1)..(266): NCBI GI NO: 7489384 NR Description: jacalin homolog - barley
  misc_feature (22)..(278): NCBI GI NO: 16151819 NR Description: VER2 [Triticum aestivum]
  misc_feature (21)..(279): NCBI GI NO: 7489661 NR Description: benzothiadiazole-induced protein
  misc_feature (1)..(280): NCBI GI NO: 21311647 NR Description: hessian fly response gene 1 protein
  misc_feature (132)..(278): NCBI GI NO: 38344523 NR Description: OSJNBa0016N04.16
  misc_feature (135)..(280): NCBI GI NO: 34915016 NR Description: putative Mannose-Binding Rice Lectin
  misc_feature (137)..(279): NCBI GI NO: 38344523 NR Description: OSJNBa0016N04.16
MVTVEGRRGSSDQTGDMRYVSDFPVYDGRGSDAVLVARVQGVTTTFGNSNQFFTVAFEAGRLKGSTLLTEGVVTDGSDEWAIYGGTGEFAMARGVVKRRYLADRDGAGNTDELSMQVFCPVFGSSQQPNKQDSSISVTKIGLWGGEGGSAQDITTTEPPQRLHSLTVRAGGAVDSIEFTYTDRGGQRRAAGRWGGLGGNLRTIDLGDAEDVREVSGTYGTFEGATTLTSFRILTSSRTWGPWGVENGTRFCITAPVGSSIVGFYGRATSRLVAALGVYLRRL

SEQ ID NO: 19959 - DNA, 862 bp, Zea mays subsp. mays
  misc_feature (1)..(862): Ceres Seq. ID no. 14309561
aatcaatcaagccgagaccaaagttggtggtgtaatccgatcctagtcttcttgtgttcgatttcatctcttcctgtgaatttcagagatatgtcttcaagggagaggctaggttcatctaagcattatagccgaggcatgtcaactagtggttcatcatcatcccggcaccacgagaccatctcttccgcttctgaccaccgggtttcccattccgacgttcttgaaaacaagattgcagctcgagctgctgagattgaccgtctctctagtgacaaccgcaaacttgctgctagctacgtagctctcaaggaagacctatcccttgctgaccgcgaagtccagggactgagagctcacatcgtcaagacagagacagacggcgagattcagatccgaggtgcactcgagaagattgcgaaacttgagggtattgtcaacaacagggataacatcaggagggagctgcaatcagctcacattgaggctcatacattagccagagaacgcgaggagctagctgcacaggtgaaggcggcagtaaaggagttgaagaaggtttgcctcgagtcagagggtctagagtcttcagttcaagagcttgagcggttgaaagaagagcaccagagattaagggaagagtttgatgcagagaagagcggtaacgtagagaaacttgagcaattgaaagagatggagagtaacataatcggagcagtcaaagctattgagaagctgcgaagtgagatcgcaaccgcaaggagtagagcttgagactcaaaagagggtctttctatttagcaaaagaaacaaaactgtgttcctaattttcgcaatatatataacatgagtttattttttc

SEQ ID NO: 19960 - protein, 257 aa, Zea mays subsp. mays
  peptide (1)..(257): Ceres Seq. ID no. 14309562
  misc_feature (73)..(257): Pfam Name: DUF827 Pfam Description: Plant protein of unknown function
  misc_feature (31)..(257): NCBI GI NO: 15240385 NR Description: hypothetical protein [Arabidopsis thaliana]
  misc_feature (66)..(257): NCBI GI NO: 38605778 NR Description: OSJNBa0044K18.21
  misc_feature (73)..(250): NCBI GI NO: 25404669 NR Description: hypothetical protein F5A8.8
  misc_feature (73)..(250): NCBI GI NO: 30697468 NR Description: expressed protein [Arabidopsis thaliana]
  misc_feature (74)..(257): NCBI GI NO: 9294396 NR Description: gb|AAD10662
  misc_feature (74)..(257): NCBI GI NO: 18400511 NR Description: expressed protein [Arabidopsis thaliana]
  misc_feature (75)..(257): NCBI GI NO: 33146484 NR Description: myosin-like protein
  misc_feature (75)..(257): NCBI GI NO: 28876008 NR Description: hypothetical protein
  misc_feature (43)..(257): NCBI GI NO: 7487478 NR Description: hypothetical protein At2g30120
  misc_feature (74)..(256): NCBI GI NO: 18405242 NR Description: myosin -related [Arabidopsis thaliana]
NQSSRDQSWWCNPILVFLCSISSLPVNFRDMSSRERLGSSKHYSRGMSTSGSSSSRHHETISSASDHRVSHSDVLENKIAARAAEIDRLSSDNRKLAASYVALKEDLSLADREVQGLRAHIVKTETDGEIQIRGALEKIAKLEGIVNNRDNIRRELQSAHIEAHTLAREREELAAQVKAAVKELKKVCLESEGLESSVQELERLKEEHQRLREEFDAEKSGNVEKLEQLKEMESNIIGAVKAIEKLRSEIATARSRA

SEQ ID NO: 19961 - protein, 227 aa, Zea mays subsp. mays
  peptide (1)..(227): Ceres Seq. ID no. 14309563
  misc_feature (43)..(227): Pfam Name: DUF827 Pfam Description: Plant protein of unknown function
  misc_feature (1)..(227): NCBI GI NO: 15240385 NR Description: hypothetical protein [Arabidopsis thaliana]
  misc_feature (36)..(227): NCBI GI NO: 38605778 NR Description: OSJNBa0044K18.21
  misc_feature (43)..(220): NCBI GI NO: 25404669 NR Description: hypothetical protein F5A8.8
  misc_feature (43)..(220): NCBI GI NO: 30697468 NR Description: expressed protein [Arabidopsis thaliana]
  misc_feature (44)..(227): NCBI GI NO: 9294396 NR Description: gb|AAD10662
  misc_feature (44)..(227): NCBI GI NO: 18400511 NR Description: expressed protein [Arabidopsis thaliana]
  misc_feature (45)..(227): NCBI GI NO: 33146484 NR Description: myosin-like protein
  misc_feature (45)..(227): NCBI GI NO: 28876008 NR Description: hypothetical protein
  misc_feature (13)..(227): NCBI GI NO: 7487478 NR Description: hypothetical protein At2g30120
  misc_feature (44)..(226): NCBI GI NO: 18405242 NR Description: myosin -related [Arabidopsis thaliana]
MSSRERLGSSKHYSRGMSTSGSSSSRHHETISSASDHRVSHSDVLENKIAARAAEIDRLSSDNRKLAASYVALKEDLSLADREVQGLRAHIVKTETDGEIQIRGALEKIAKLEGIVNNRDNIRRELQSAHIEAHTLAREREELAAQVKAAVKELKKVCLESEGLESSVQELERLKEEHQRLREEFDAEKSGNVEKLEQLKEMESNIIGAVKAIEKLRSEIATARSRA

SEQ ID NO: 19962 - protein, 211 aa, Zea mays subsp. mays
  peptide (1)..(211): Ceres Seq. ID no. 14309564
  misc_feature (27)..(211): Pfam Name: DUF827 Pfam Description: Plant protein of unknown function
  misc_feature (1)..(211): NCBI GI NO: 15240385 NR Description: hypothetical protein [Arabidopsis thaliana]
  misc_feature (20)..(211): NCBI GI NO: 38605778 NR Description: OSJNBa0044K18.21
  misc_feature (27)..(204): NCBI GI NO: 25404669 NR Description: hypothetical protein F5A8.8
  misc_feature (27)..(204): NCBI GI NO: 30697468 NR Description: expressed protein [Arabidopsis thaliana]
  misc_feature (28)..(211): NCBI GI NO: 9294396 NR Description: gb|AAD10662
  misc_feature (28)..(211): NCBI GI NO: 18400511 NR Description: expressed protein [Arabidopsis thaliana]
  misc_feature (29)..(211): NCBI GI NO: 33146484 NR Description: myosin-like protein
  misc_feature (29)..(211): NCBI GI NO: 28876008 NR Description: hypothetical protein
  misc_feature (1)..(211): NCBI GI NO: 7487478 NR Description: hypothetical protein At2g30120
  misc_feature (28)..(210): NCBI GI NO: 18405242 NR Description: myosin -related [Arabidopsis thaliana]
MSTSGSSSSRHHETISSASDHRVSHSDVLENKIAARAAEIDRLSSDNRKLAASYVALKEDLSLADREVQGLRAHIVKTETDGEIQIRGALEKIAKLEGIVNNRDNIRRELQSAHIEAHTLAREREELAAQVKAAVKELKKVCLESEGLESSVQELERLKEEHQRLREEFDAEKSGNVEKLEQLKEMESNIIGAVKAIEKLRSEIATARSRA

SEQ ID NO: 19963 - DNA, 948 bp, Zea mays subsp. mays
  misc_feature (1)..(948): Ceres Seq. ID no. 15179239
atgaaaaccaccctttactgaaaaacaataaaatctaagagaatgaaattttcatattctctatccaaacgatttgtttcccctattttggctatgcagttcctcatcatacatagtgtttcttcattgaaccttaccaatgagtatctcaaccacaaatgcttccttgatcaagggatatataatactggaagtgagtacgaggacagcctcaacattattttacgtagtgttcgtactggtagttattataagaacggtttcatgcgcacaagcaagggtcgtgaacctgctcctgatgctgtcaccgtcatgttccagtgtcgtggtgactcttatgggtctaaatgccgtacatgtgccgacaccgcagtcgcagggtttcgtagaagatgtctaaggaacaaaggaggaataatatggtacgaccaatgttttctctgggttagtgcaatcggtgaagacatgccaatcaatactaattacaagaatattttttctatgtacaacccaaataacgtaagaggggatgcaaaattgtttgccaagagggtggtggattttttctctgagctaacacttaaggttgataaaaataccgaagtcgactctgtcgtcatattttacgcagaagggaaaaagaagcttgggaaaaatacattgtatgcaatggtgcagtgtgtagaactaacaatagattgtaaaagttgtttgacatggagtatcgcaaagcttttcaaaaacgacgacattaaacaaggagggagagttttgggttcgaactgtgaaataagatatgagctatacccttttattaggagttaagcattttttatggtggtgatgaatacatccgcttcataatttccaaattatgttttagttttgtttacttttttttttgctcaaatttaatacatatattaataaatagagtgtttaagaaac

SEQ ID NO: 19964 - protein, 260 aa, Zea mays subsp. mays
  peptide (1)..(260): Ceres Seq. ID no. 15179240
  misc_feature (89)..(138): Pfam Name: Pfam Description:  Domain of unknown function DUF26
  misc_feature (1)..(259): NCBI GI NO: 9279762 NR Description: emb|CAB45834
  misc_feature (1)..(260): NCBI GI NO: 15233241 NR Description: receptor-like protein kinase-related
  misc_feature (4)..(260): NCBI GI NO: 15233368 NR Description: receptor-like protein kinase-related
  misc_feature (43)..(260): NCBI GI NO: 9279760 NR Description: emb|CAB45834
  misc_feature (1)..(260): NCBI GI NO: 15233236 NR Description: receptor-like protein kinase-related
  misc_feature (1)..(260): NCBI GI NO: 15233238 NR Description: receptor-like protein kinase-related
  misc_feature (15)..(260): NCBI GI NO: 15233366 NR Description: pollen coat receptor kinase, putative
  misc_feature (15)..(260): NCBI GI NO: 15233235 NR Description: receptor-like kinase-related
  misc_feature (25)..(258): NCBI GI NO: 9279746 NR Description: contains similarity to receptor proteinkinase~gene_id:MZN24
  misc_feature (48)..(260): NCBI GI NO: 15233239 NR Description: hypothetical protein [Arabidopsis thaliana]
MKFSYSLSKRFVSPILAMQFLIIHSVSSLNLTNEYLNHKCFLDQGIYNTGSEYEDSLNIILRSVRTGSYYKNGFMRTSKGREPAPDAVTVMFQCRGDSYGSKCRTCADTAVAGFRRRCLRNKGGIIWYDQCFLWVSAIGEDMPINTNYKNIFSMYNPNNVRGDAKLFAKRVVDFFSELTLKVDKNTEVDSVVIFYAEGKKKLGKNTLYAMVQCVELTIDCKSCLTWSIAKLFKNDDIKQGGRVLGSNCEIRYELYPFIRS

SEQ ID NO: 19965 - protein, 243 aa, Zea mays subsp. mays
  peptide (1)..(243): Ceres Seq. ID no. 15179241
  misc_feature (72)..(121): Pfam Name: Pfam Description:  Domain of unknown function DUF26
  misc_feature (1)..(242): NCBI GI NO: 9279762 NR Description: emb|CAB45834
  misc_feature (1)..(243): NCBI GI NO: 15233241 NR Description: receptor-like protein kinase-related
  misc_feature (1)..(243): NCBI GI NO: 15233368 NR Description: receptor-like protein kinase-related
  misc_feature (26)..(243): NCBI GI NO: 9279760 NR Description: emb|CAB45834
  misc_feature (1)..(243): NCBI GI NO: 15233236 NR Description: receptor-like protein kinase-related
  misc_feature (1)..(243): NCBI GI NO: 15233238 NR Description: receptor-like protein kinase-related
  misc_feature (1)..(243): NCBI GI NO: 15233366 NR Description: pollen coat receptor kinase, putative
  misc_feature (1)..(243): NCBI GI NO: 15233235 NR Description: receptor-like kinase-related
  misc_feature (8)..(241): NCBI GI NO: 9279746 NR Description: contains similarity to receptor proteinkinase~gene_id:MZN24
  misc_feature (31)..(243): NCBI GI NO: 15233239 NR Description: hypothetical protein [Arabidopsis thaliana]
MQFLIIHSVSSLNLTNEYLNHKCFLDQGIYNTGSEYEDSLNIILRSVRTGSYYKNGFMRTSKGREPAPDAVTVMFQCRGDSYGSKCRTCADTAVAGFRRRCLRNKGGIIWYDQCFLWVSAIGEDMPINTNYKNIFSMYNPNNVRGDAKLFAKRVVDFFSELTLKVDKNTEVDSVVIFYAEGKKKLGKNTLYAMVQCVELTIDCKSCLTWSIAKLFKNDDIKQGGRVLGSNCEIRYELYPFIRS

SEQ ID NO: 19966 - protein, 186 aa, Zea mays subsp. mays
  peptide (1)..(186): Ceres Seq. ID no. 15179242
  misc_feature (15)..(64): Pfam Name: Pfam Description:  Domain of unknown function DUF26
  misc_feature (1)..(185): NCBI GI NO: 9279762 NR Description: emb|CAB45834
  misc_feature (1)..(186): NCBI GI NO: 15233241 NR Description: receptor-like protein kinase-related
  misc_feature (1)..(186): NCBI GI NO: 15233368 NR Description: receptor-like protein kinase-related
  misc_feature (1)..(186): NCBI GI NO: 9279760 NR Description: emb|CAB45834
  misc_feature (1)..(186): NCBI GI NO: 15233236 NR Description: receptor-like protein kinase-related
  misc_feature (1)..(186): NCBI GI NO: 15233238 NR Description: receptor-like protein kinase-related
  misc_feature (1)..(186): NCBI GI NO: 15233366 NR Description: pollen coat receptor kinase, putative
  misc_feature (1)..(186): NCBI GI NO: 15233235 NR Description: receptor-like kinase-related
  misc_feature (1)..(184): NCBI GI NO: 9279746 NR Description: contains similarity to receptor proteinkinase~gene_id:MZN24
  misc_feature (1)..(186): NCBI GI NO: 15233239 NR Description: hypothetical protein [Arabidopsis thaliana]
MRTSKGREPAPDAVTVMFQCRGDSYGSKCRTCADTAVAGFRRRCLRNKGGIIWYDQCFLWVSAIGEDMPINTNYKNIFSMYNPNNVRGDAKLFAKRVVDFFSELTLKVDKNTEVDSVVIFYAEGKKKLGKNTLYAMVQCVELTIDCKSCLTWSIAKLFKNDDIKQGGRVLGSNCEIRYELYPFIRS

SEQ ID NO: 19967 - DNA, 1004 bp, Zea mays subsp. mays
  misc_feature (1)..(1004): Ceres Seq. ID no. 15179607
aatatttgtgtgattcatccaaaccctaaaaagcgggtttaaaggaagggaccattttgtcgttatttctcagaagatgaactcactcgctatccgagtttccaagcttctgagatcctctccgatatctcctcctctaggcaatcaatcccctcttctttcacctaaatcatctgggagtgtagcagtcactgcttggaggtcttggttctcgactggtcccatcgacgaggaagggttggaagaagattttgaagaaaccatctcagaaagacccgccgagcttcagcctcatggtgttgatccccgtaaaggttggggctttcgcggtgtccacagggccatcatttgtgggaaggtagggcaagcaccattacagaagatcttgaggaacgggcggacagtgaccatcttcactgttggaacaggcggcatgtttgatcagaagcttatgggagcaactaaccagcctaaacctgctcagtggcatagaatcgctgtccacaacgaagtgcttggctcttacgctgtccaaaagctcgctaaaaactcgtcggtttatgtcgaaggtgatattgagactagagtgtataatgacagcatcagcagtgaagtgaagagtatccctgagatttgcattcgtcgtgatggcaagattcggctgatcaaatacggggaaagcgttagcaagatctctttcgatgagctaaaagaaggattgatttagtcggagcaagaatatccctgtggccggaggacacactgattcaacgttttggttgtccattgtgagagagcactgagttttttcttatgaatattaaggccatttatgtaattgtcgatcaaaactaagctagttctgcgtctgttccttagtataagctgctcgtcaccaaacacattttgtcgggatggtttttatcatagctgtactactgccgatcagtaatttagcctgctaaattacaaatttgatgaagactctttttttgttctcatac

SEQ ID NO: 19968 - protein, 216 aa, Zea mays subsp. mays
  peptide (1)..(216): Ceres Seq. ID no. 15179608
  misc_feature (86)..(192): Pfam Name: Pfam Description:  Single-strand binding protein family
  misc_feature (1)..(216): NCBI GI NO: 30681642 NR Description: expressed protein [Arabidopsis thaliana]
  misc_feature (1)..(192): NCBI GI NO: 7487337 NR Description: hypothetical protein T22B4
  misc_feature (192)..(213): NCBI GI NO: 7487337 NR Description: hypothetical protein T22B4
  misc_feature (120)..(192): NCBI GI NO: 3600051 NR Description: contains similarity to the single-strand bindingproteins family
  misc_feature (192)..(213): NCBI GI NO: 3600051 NR Description: contains similarity to the single-strand bindingproteins family
  misc_feature (60)..(212): NCBI GI NO: 15229675 NR Description: hypothetical protein [Arabidopsis thaliana]
  misc_feature (8)..(212): NCBI GI NO: 34911652 NR Description: P0510C12.16
  misc_feature (84)..(207): NCBI GI NO: 37525024 NR Description: hypothetical protein
  misc_feature (84)..(197): NCBI GI NO: 38638180 NR Description: Ssb [Erwinia amylovora]
  misc_feature (86)..(197): NCBI GI NO: 23014489 NR Description: hypothetical protein
MNSLAIRVSKLLRSSPISPPLGNQSPLLSPKSSGSVAVTAWRSWFSTGPIDEEGLEEDFEETISERPAELQPHGVDPRKGWGFRGVHRAIICGKVGQAPLQKILRNGRTVTIFTVGTGGMFDQKLMGATNQPKPAQWHRIAVHNEVLGSYAVQKLAKNSSVYVEGDIETRVYNDSISSEVKSIPEICIRRDGKIRLIKYGESVSKISFDELKEGLI

SEQ ID NO: 19969 - DNA, 901 bp, Zea mays subsp. mays
  misc_feature (1)..(901): Ceres Seq. ID no. 15179570
gtattagaaaaagatttgaacatgagtgagcatcatcattttgcgtttgtgcacggtgcagggcatggaggatggtgttggtacaagctcgccaattcactgagagagaatggacataaggccacctgcatcgacctcaagggcgctgggatcaacctaactgatccaaacactgtctcctctcttgatgactacaaccagcctctctatgacttcctctcccaacttcccctcgaccaaaaggtcattctggtgagccacagcgttggaggagggagcatgacggctgccatgtgccagtatccttccaaagtctccatggctgtttacgtcgcagcagccatggtcaaacctggtaccataattcccccaattctcaaggaagtactaaagatatgttcagggatgatagagacggaagctgagaagatatgggacttcacttttggaaatggacccgagaatctccccacaagtatgatgatgaaacctgagtatgtccgggacaagtattacaacgagagccccatggaggattacacactggctaccacacttctgcgtccagcccctgtcatggcatttgcaggcatagtggatatccctgcagcaccagaggctgacaaaatcccaagggtctacattaagacaggcaaggacaatatgttccagtcaagtcgtcaagacttaatggttaccctgtggcctcctgctcaatacttccttcttgaagagagtgatcactctgcatttttctcccaacctgaagctctctacaaaatcctccttgaagcagcctcctctatctctccctgattactctttacacatctatttggaactcctttaactcttatctttttaatagttacttgaataaactggatcatattcatatcat

SEQ ID NO: 19970 - protein, 271 aa, Zea mays subsp. mays
  peptide (1)..(271): Ceres Seq. ID no. 15179571
  misc_feature (42)..(264): Pfam Name: Pfam Description:  alpha/beta hydrolase fold
  misc_feature (8)..(271): NCBI GI NO: 15237165 NR Description: hydrolase, alpha/beta fold family
  misc_feature (13)..(267): NCBI GI NO: 15866583 NR Description: hypothetical protein [Capsella rubella]
  misc_feature (13)..(267): NCBI GI NO: 15235844 NR Description: esterase/lipase/thioesterase family
  misc_feature (13)..(269): NCBI GI NO: 15228391 NR Description: hydrolase, alpha/beta fold family
  misc_feature (14)..(266): NCBI GI NO: 15218463 NR Description: hydrolase, alpha/beta fold family
  misc_feature (14)..(266): NCBI GI NO: 21595837 NR Description: polyneuridine aldehyde esterase, putative
  misc_feature (14)..(266): NCBI GI NO: 25518661 NR Description: hypothetical protein F12G12
  misc_feature (10)..(271): NCBI GI NO: 15230077 NR Description: hydrolase, alpha/beta fold family
  misc_feature (14)..(266): NCBI GI NO: 7485010 NR Description: host response protein homolog T5L19
  misc_feature (14)..(266): NCBI GI NO: 30681236 NR Description: hydrolase family [Arabidopsis thaliana]
VLEKDLNMSEHHHFAFVHGAGHGGWCWYKLANSLRENGHKATCIDLKGAGINLTDPNTVSSLDDYNQPLYDFLSQLPLDQKVILVSHSVGGGSMTAAMCQYPSKVSMAVYVAAAMVKPGTIIPPILKEVLKICSGMIETEAEKIWDFTFGNGPENLPTSMMMKPEYVRDKYYNESPMEDYTLATTLLRPAPVMAFAGIVDIPAAPEADKIPRVYIKTGKDNMFQSSRQDLMVTLWPPAQYFLLEESDHSAFFSQPEALYKILLEAASSISP

SEQ ID NO: 19971 - protein, 264 aa, Zea mays subsp. mays
  peptide (1)..(264): Ceres Seq. ID no. 15179572
  misc_feature (35)..(257): Pfam Name: Pfam Description:  alpha/beta hydrolase fold
  misc_feature (1)..(264): NCBI GI NO: 15237165 NR Description: hydrolase, alpha/beta fold family
  misc_feature (6)..(260): NCBI GI NO: 15866583 NR Description: hypothetical protein [Capsella rubella]
  misc_feature (6)..(260): NCBI GI NO: 15235844 NR Description: esterase/lipase/thioesterase family
  misc_feature (6)..(262): NCBI GI NO: 15228391 NR Description: hydrolase, alpha/beta fold family
  misc_feature (7)..(259): NCBI GI NO: 15218463 NR Description: hydrolase, alpha/beta fold family
  misc_feature (7)..(259): NCBI GI NO: 21595837 NR Description: polyneuridine aldehyde esterase, putative
  misc_feature (7)..(259): NCBI GI NO: 25518661 NR Description: hypothetical protein F12G12
  misc_feature (3)..(264): NCBI GI NO: 15230077 NR Description: hydrolase, alpha/beta fold family
  misc_feature (7)..(259): NCBI GI NO: 7485010 NR Description: host response protein homolog T5L19
  misc_feature (7)..(259): NCBI GI NO: 30681236 NR Description: hydrolase family [Arabidopsis thaliana]
MSEHHHFAFVHGAGHGGWCWYKLANSLRENGHKATCIDLKGAGINLTDPNTVSSLDDYNQPLYDFLSQLPLDQKVILVSHSVGGGSMTAAMCQYPSKVSMAVYVAAAMVKPGTIIPPILKEVLKICSGMIETEAEKIWDFTFGNGPENLPTSMMMKPEYVRDKYYNESPMEDYTLATTLLRPAPVMAFAGIVDIPAAPEADKIPRVYIKTGKDNMFQSSRQDLMVTLWPPAQYFLLEESDHSAFFSQPEALYKILLEAASSISP

SEQ ID NO: 19972 - protein, 178 aa, Zea mays subsp. mays
  peptide (1)..(178): Ceres Seq. ID no. 15179573
  misc_feature (1)..(171): Pfam Name: Pfam Description:  alpha/beta hydrolase fold
  misc_feature (1)..(178): NCBI GI NO: 15237165 NR Description: hydrolase, alpha/beta fold family
  misc_feature (1)..(174): NCBI GI NO: 15866583 NR Description: hypothetical protein [Capsella rubella]
  misc_feature (1)..(174): NCBI GI NO: 15235844 NR Description: esterase/lipase/thioesterase family
  misc_feature (1)..(176): NCBI GI NO: 15228391 NR Description: hydrolase, alpha/beta fold family
  misc_feature (1)..(173): NCBI GI NO: 15218463 NR Description: hydrolase, alpha/beta fold family
  misc_feature (1)..(173): NCBI GI NO: 21595837 NR Description: polyneuridine aldehyde esterase, putative
  misc_feature (1)..(173): NCBI GI NO: 25518661 NR Description: hypothetical protein F12G12
  misc_feature (1)..(178): NCBI GI NO: 15230077 NR Description: hydrolase, alpha/beta fold family
  misc_feature (1)..(173): NCBI GI NO: 7485010 NR Description: host response protein homolog T5L19
  misc_feature (1)..(173): NCBI GI NO: 30681236 NR Description: hydrolase family [Arabidopsis thaliana]
MTAAMCQYPSKVSMAVYVAAAMVKPGTIIPPILKEVLKICSGMIETEAEKIWDFTFGNGPENLPTSMMMKPEYVRDKYYNESPMEDYTLATTLLRPAPVMAFAGIVDIPAAPEADKIPRVYIKTGKDNMFQSSRQDLMVTLWPPAQYFLLEESDHSAFFSQPEALYKILLEAASSISP

SEQ ID NO: 19973 - DNA, 1456 bp, Zea mays subsp. mays
  misc_feature (1)..(1456): Ceres Seq. ID no. 15179618
gcctctctcattaacgagtgctcttcgccactactctccgattcatataacctttatcttagatcgttgcataatgtcaaagactggctctctggatctcgcctccaaccttggtggaaacatcgataagtccgatgttctcaccgccgtcgaaaagtatgagcagtatcatgtcttccatggaggtgacgaggaagagcgaaaagccaattacactgacatggttaataagtactatgaccttgctactagcttttatgagtatggttggggagagtccttccactttgcacacagatggaagggcgaatcacttcgagagagtatcaaacgtcacgagcactttcttgctcttcagcttggcgttaaaccaggacaaaaggtactggatgtaggatgtggaattggtggaccactgagagaaattgcacgattcagcaattcatctgttactgggctcaacaataatgaataccagatcaccagaggcaaggaactaaaccgacttgcaggtgtcgacaagacatgtaactttgtcaaggctgacttcatgaagatgccattccctgaaaacacttttgatgcagtttatgctattgaggcaacctgccacgcacctgatgcatatggatgctacaaagagatattcagagtgctaaagcccggacaatgtttcgctgcctatgagtggtgcatgactgatgcatttgaccctgctaacgcccagcatcagaaaataaaggcagagatagagattggagatggtctccctgacattaggctgacttcaaaatgcctcgaagccctgaaacaggccggttttgaagtaagtatctgactacagatccctctctatttccaaacgtaaaacattttaactataattagtactattatcatcggctttggatataaggtgatatgggaaaaggatctggcggaggactcgccagtcccatggtacttacctctggacaaaaaccacttctcgctcagtagcttccgcctaacagctgttggacggttcataaccaaaaacatggtgaaggtccttgagtacataagacttgcacctaaaggaagccaaagggtgtcagattttctggagaaggccgcagaaggattagtcgacggtggaaggagggagattttcacgccaatgtatttcttcttggcccggaagccagagtgagcggatgagagatgctaagtgaagctgaccaaatttctcactttgctttttgtttgtttgttctagttcatgtccttttgttgcagtgtttttcgcatatcttttaatttcttaaaaaagaaaaccttgtcacaccaaacttgttctggatggttcttagtgtgtcacgtgccgctgcactctgttactgagtcacatgcacatgcgcatgcgcaaaagatctttgaatcccaatctctttcaattttagatctcagtaaactc

SEQ ID NO: 19974 - protein, 278 aa, Zea mays subsp. mays
  peptide (1)..(278): Ceres Seq. ID no. 15179619
  misc_feature (81)..(268): Pfam Name: Pfam Description:  ubiE/COQ5 methyltransferase family
  misc_feature (31)..(276): NCBI GI NO: 21434843 NR Description: cephalopod [Arabidopsis thaliana]
  misc_feature (31)..(276): NCBI GI NO: 15240691 NR Description: 24-sterol C-methyltransferase
  misc_feature (26)..(276): NCBI GI NO: 7443720 NR Description: probable sterol 24-C-methyltransferase (EC2
  misc_feature (25)..(276): NCBI GI NO: 7443719 NR Description: sterol 24-C-methyltransferase (EC 2
  misc_feature (25)..(276): NCBI GI NO: 7443716 NR Description: sterol 24-C-methyltransferase (EC 2
  misc_feature (25)..(276): NCBI GI NO: 7443715 NR Description: sterol 24-C-methyltransferase (EC 2
  misc_feature (25)..(276): NCBI GI NO: 3560474 NR Description: S-adenosyl-methionine-sterol-C- methyltransferase
  misc_feature (25)..(276): NCBI GI NO: 34393309 NR Description: cycloartenol-C24-methyltransferase
  misc_feature (49)..(278): NCBI GI NO: 6323635 NR Description: ergosterol synthesis; Erg6p
  misc_feature (65)..(276): NCBI GI NO: 40742208 NR Description: hypothetical protein AN7146.2
PLSLTSALRHYSPIHITFILDRCIMSKTGSLDLASNLGGNIDKSDVLTAVEKYEQYHVFHGGDEEERKANYTDMVNKYYDLATSFYEYGWGESFHFAHRWKGESLRESIKRHEHFLALQLGVKPGQKVLDVGCGIGGPLREIARFSNSSVTGLNNNEYQITRGKELNRLAGVDKTCNFVKADFMKMPFPENTFDAVYAIEATCHAPDAYGCYKEIFRVLKPGQCFAAYEWCMTDAFDPANAQHQKIKAEIEIGDGLPDIRLTSKCLEALKQAGFEVSI

SEQ ID NO: 19975 - protein, 254 aa, Zea mays subsp. mays
  peptide (1)..(254): Ceres Seq. ID no. 15179620
  misc_feature (57)..(244): Pfam Name: Pfam Description:  ubiE/COQ5 methyltransferase family
  misc_feature (7)..(252): NCBI GI NO: 21434843 NR Description: cephalopod [Arabidopsis thaliana]
  misc_feature (7)..(252): NCBI GI NO: 15240691 NR Description: 24-sterol C-methyltransferase
  misc_feature (2)..(252): NCBI GI NO: 7443720 NR Description: probable sterol 24-C-methyltransferase (EC2
  misc_feature (1)..(252): NCBI GI NO: 7443719 NR Description: sterol 24-C-methyltransferase (EC 2
  misc_feature (1)..(252): NCBI GI NO: 7443716 NR Description: sterol 24-C-methyltransferase (EC 2
  misc_feature (1)..(252): NCBI GI NO: 7443715 NR Description: sterol 24-C-methyltransferase (EC 2
  misc_feature (1)..(252): NCBI GI NO: 3560474 NR Description: S-adenosyl-methionine-sterol-C- methyltransferase
  misc_feature (1)..(252): NCBI GI NO: 34393309 NR Description: cycloartenol-C24-methyltransferase
  misc_feature (25)..(254): NCBI GI NO: 6323635 NR Description: ergosterol synthesis; Erg6p
  misc_feature (41)..(252): NCBI GI NO: 40742208 NR Description: hypothetical protein AN7146.2
MSKTGSLDLASNLGGNIDKSDVLTAVEKYEQYHVFHGGDEEERKANYTDMVNKYYDLATSFYEYGWGESFHFAHRWKGESLRESIKRHEHFLALQLGVKPGQKVLDVGCGIGGPLREIARFSNSSVTGLNNNEYQITRGKELNRLAGVDKTCNFVKADFMKMPFPENTFDAVYAIEATCHAPDAYGCYKEIFRVLKPGQCFAAYEWCMTDAFDPANAQHQKIKAEIEIGDGLPDIRLTSKCLEALKQAGFEVSI

SEQ ID NO: 19976 - protein, 205 aa, Zea mays subsp. mays
  peptide (1)..(205): Ceres Seq. ID no. 15179621
  misc_feature (8)..(195): Pfam Name: Pfam Description:  ubiE/COQ5 methyltransferase family
  misc_feature (1)..(203): NCBI GI NO: 21434843 NR Description: cephalopod [Arabidopsis thaliana]
  misc_feature (1)..(203): NCBI GI NO: 15240691 NR Description: 24-sterol C-methyltransferase
  misc_feature (1)..(203): NCBI GI NO: 7443720 NR Description: probable sterol 24-C-methyltransferase (EC2
  misc_feature (1)..(203): NCBI GI NO: 7443719 NR Description: sterol 24-C-methyltransferase (EC 2
  misc_feature (1)..(203): NCBI GI NO: 7443716 NR Description: sterol 24-C-methyltransferase (EC 2
  misc_feature (1)..(203): NCBI GI NO: 7443715 NR Description: sterol 24-C-methyltransferase (EC 2
  misc_feature (1)..(203): NCBI GI NO: 3560474 NR Description: S-adenosyl-methionine-sterol-C- methyltransferase
  misc_feature (1)..(203): NCBI GI NO: 34393309 NR Description: cycloartenol-C24-methyltransferase
  misc_feature (1)..(205): NCBI GI NO: 6323635 NR Description: ergosterol synthesis; Erg6p
  misc_feature (1)..(203): NCBI GI NO: 40742208 NR Description: hypothetical protein AN7146.2
MVNKYYDLATSFYEYGWGESFHFAHRWKGESLRESIKRHEHFLALQLGVKPGQKVLDVGCGIGGPLREIARFSNSSVTGLNNNEYQITRGKELNRLAGVDKTCNFVKADFMKMPFPENTFDAVYAIEATCHAPDAYGCYKEIFRVLKPGQCFAAYEWCMTDAFDPANAQHQKIKAEIEIGDGLPDIRLTSKCLEALKQAGFEVSI

SEQ ID NO: 19977 - DNA, 918 bp, Zea mays subsp. mays
  misc_feature (1)..(918): Ceres Seq. ID no. 15175175
aatcctttctcgtgtcctttcttcctcctctctctctagaaaattctcaatgaacatactgaacaggttcggtttaggatcaggcgggcaaaggagtacggatccgtctccgatcgctcaaggacccgacgacgactctccggcgccgggaaaccactttgcccaattcgccgccggatgcttctggggcgtggagctggcgtttcagaggctcccgggggtgactcagacagaggttggatacacacaagggatcacccacaatccttcgtacgaggacgtctgttccgaaaccacgggacacgccgaggtcgtcagggttcagtacgatcccaaagactgcacctttgagtctctccttgacttgttctggtccaggcatgatcccaccaccttgaatcgccaggggaatgatgtgggaacccgataccgatctgggatctacttctacacaccagagcaggagaaactagcgcgggagtcactagaacgccaccagcagaaaatggagaggaagatcatgactgagatcttacctgctaagaaattctacagagccgaggagcagcagcaacagtatctgtccaagagtggaaggtacggcatggggcagtcctgtgccaaaggctgcaccgacccaatccgctgctacggctaaaaacctgagctcctcgggttctgaggatgttatgaacttttgtgtaaaagctatgtaacgcataatttaccgtttgtacgattattttcttgatgtttctcaaattattgaatgaataagagaatcttatggacaaaagaaagagtccaatggatatagccatgggctaaatggtaggacacttggtttcttattgtcaaattgtgcatggttgtatacatcttgtaagaccatttgtaatgtatttagctgttttctct

SEQ ID NO: 19978 - protein, 218 aa, Zea mays subsp. mays
  peptide (1)..(218): Ceres Seq. ID no. 15175176
  misc_feature (53)..(205): Pfam Name: Pfam Description:  Peptide methionine sulfoxide reductase
  misc_feature (17)..(218): NCBI GI NO: 21592658 NR Description: peptide methionine sulfoxide reductase (msr)
  misc_feature (17)..(218): NCBI GI NO: 15240796 NR Description: peptide methionine sulfoxide reductase (msr)
  misc_feature (17)..(218): NCBI GI NO: 25308493 NR Description: protein-methionine-S-oxide reductase (EC 1
  misc_feature (17)..(218): NCBI GI NO: 18424492 NR Description: peptide methionine sulfoxide reductase
  misc_feature (34)..(218): NCBI GI NO: 26451744 NR Description: putative peptide methionine sulfoxide reductase msr
  misc_feature (6)..(218): NCBI GI NO: 12230349 NR Description: Peptide methionine sulfoxide reductase
  misc_feature (18)..(218): NCBI GI NO: 21593143 NR Description: protein-methionine-S-oxide reductase
  misc_feature (35)..(218): NCBI GI NO: 15240795 NR Description: peptide methionine sulfoxide reductase-related
  misc_feature (18)..(218): NCBI GI NO: 15234942 NR Description: protein-methionine-S-oxide reductase
  misc_feature (18)..(218): NCBI GI NO: 1709690 NR Description: Peptide methionine sulfoxide reductase
ILSRVLSSSSLSRKFSMNILNRFGLGSGGQRSTDPSPIAQGPDDDSPAPGNHFAQFAAGCFWGVELAFQRLPGVTQTEVGYTQGITHNPSYEDVCSETTGHAEVVRVQYDPKDCTFESLLDLFWSRHDPTTLNRQGNDVGTRYRSGIYFYTPEQEKLARESLERHQQKMERKIMTEILPAKKFYRAEEQQQQYLSKSGRYGMGQSCAKGCTDPIRCYG

SEQ ID NO: 19979 - protein, 202 aa, Zea mays subsp. mays
  peptide (1)..(202): Ceres Seq. ID no. 15175177
  misc_feature (37)..(189): Pfam Name: Pfam Description:  Peptide methionine sulfoxide reductase
  misc_feature (1)..(202): NCBI GI NO: 21592658 NR Description: peptide methionine sulfoxide reductase (msr)
  misc_feature (1)..(202): NCBI GI NO: 15240796 NR Description: peptide methionine sulfoxide reductase (msr)
  misc_feature (1)..(202): NCBI GI NO: 25308493 NR Description: protein-methionine-S-oxide reductase (EC 1
  misc_feature (1)..(202): NCBI GI NO: 18424492 NR Description: peptide methionine sulfoxide reductase
  misc_feature (18)..(202): NCBI GI NO: 26451744 NR Description: putative peptide methionine sulfoxide reductase msr
  misc_feature (1)..(202): NCBI GI NO: 12230349 NR Description: Peptide methionine sulfoxide reductase
  misc_feature (2)..(202): NCBI GI NO: 21593143 NR Description: protein-methionine-S-oxide reductase
  misc_feature (19)..(202): NCBI GI NO: 15240795 NR Description: peptide methionine sulfoxide reductase-related
  misc_feature (2)..(202): NCBI GI NO: 15234942 NR Description: protein-methionine-S-oxide reductase
  misc_feature (2)..(202): NCBI GI NO: 1709690 NR Description: Peptide methionine sulfoxide reductase
MNILNRFGLGSGGQRSTDPSPIAQGPDDDSPAPGNHFAQFAAGCFWGVELAFQRLPGVTQTEVGYTQGITHNPSYEDVCSETTGHAEVVRVQYDPKDCTFESLLDLFWSRHDPTTLNRQGNDVGTRYRSGIYFYTPEQEKLARESLERHQQKMERKIMTEILPAKKFYRAEEQQQQYLSKSGRYGMGQSCAKGCTDPIRCYG

SEQ ID NO: 19980 - DNA, 615 bp, Zea mays subsp. mays
  misc_feature (1)..(615): Ceres Seq. ID no. 15174151
aaaagttgggagaagaatcgaagatgggagattcgaggtcatttgcggatggattcaaggggttctgggaggagaggttgtcgttcctggagaattacacgaggttcaccaaacgcgatgcgcctcttccttcttggtcttcctccgacgtcgaggagtttatagcttccgatcccgttcatggacccaccctgaaaacagctagggaagctgcgacttatggtgttgctggagctgcacttggagctctatctaccgccgcttttgcctggaaatactctaggagtccgcatggtgctgcattgtccttcttaggaggaggtgtttttggttggacctttgggcaagaagtggcgaaccacagcttgcaactctataagctggacacaatggcggctcaaattaagttcatggaatggtgggagcgcaagactcagtgaaggggtcttgaatccagaataacaaagacgcgtgctatcttgcaaacagcttgaaatgcaataaatagtttaaatccatttccaaactttatcttttcaagctttttattacgttctcaatcttggaacatgtttgttttcctttgtctcaataatacaacatgccccagagtgt

SEQ ID NO: 19981 - protein, 145 aa, Zea mays subsp. mays
  peptide (1)..(145): Ceres Seq. ID no. 15174152
  misc_feature (8)..(145): NCBI GI NO: 18390902 NR Description: expressed protein [Arabidopsis thaliana]
KLGEESKMGDSRSFADGFKGFWEERLSFLENYTRFTKRDAPLPSWSSSDVEEFIASDPVHGPTLKTAREAATYGVAGAALGALSTAAFAWKYSRSPHGAALSFLGGGVFGWTFGQEVANHSLQLYKLDTMAAQIKFMEWWERKTQ

SEQ ID NO: 19982 - protein, 138 aa, Zea mays subsp. mays
  peptide (1)..(138): Ceres Seq. ID no. 15174153
  misc_feature (1)..(138): NCBI GI NO: 18390902 NR Description: expressed protein [Arabidopsis thaliana]
MGDSRSFADGFKGFWEERLSFLENYTRFTKRDAPLPSWSSSDVEEFIASDPVHGPTLKTAREAATYGVAGAALGALSTAAFAWKYSRSPHGAALSFLGGGVFGWTFGQEVANHSLQLYKLDTMAAQIKFMEWWERKTQ

SEQ ID NO: 19983 - DNA, 1541 bp, Zea mays subsp. mays
  misc_feature (1)..(1541): Ceres Seq. ID no. 15179578
agaactttcgggttgcgtgtccttatttataaatggttttcaactttttactcaccagagattttgattaatactttgagaaattcgaatgctctgttttgttttctcgggaaaattatcagagtgagataaagatcagaggaaagatgagagccggcgcgagtggaaacaacgtttcggagactataaacgcagccgctagtgcgtttgcttcctctgatgatcgtgttcatcaccaaccttctccgattcataagaagcgaagatggtgggatcgcttcatatgtttcagaccttcaacacaaagaagaaaacgaatagggaaagccgctcttgctcctgaaccggttcataccgattccacatccaattccggttatcgttcggttatgacggctcttcctttcatagctccaccttcatctcctgcttccttcttccaatcagaacctccttccgctacgcagtcgcctgtagggatcctctcctttagtcctctaccttctaacaacaacaacaacaacaacaacaacgagcgtccttcgatattcgccatcggaccttacgctcacgagcctcagctggtgtctcctccggttttctctacttacaccaccgaaccatcttccgctccggttacgccgcctctcgatgagtctttctacttaaccaccactactccttcttcgcctgaagtccctttcgctcagctctttaactccaacactaactatggtctcaggtctccagtgtctaactatgagtttcagttttaccaacttcctcctggtagtccactcgctcagcttatctcgcccagctcggttatgtccggttcgggtccagcttctccttttcctgacggagtcactcacttccaagtctctgatccaccaaagctgttgagccctggtaagctgcatttctccaaggctgttacgactcctaaagagcagaagaagattgcgagaccgaataaaccggtttcttttgatcttgatgcggatcatttcattagatgtgtagatcagaagctaagaacaacgttccctgaagcatctgcgtcgtctcatcaagaagcagcgcagtattcctctctcgggccgaataaggagttcgattttggtacggatgagaaacatttgagcgttgatgatgatgaacatagcgcttcgaccaagaacaacaacgattggtccttccctgtgatgcaatcaggtgcacttagctgacttctagttatatagattctgaatttcgaaatcgatttggacataagccagcacacaaagatcttgttcaagattcaagaacgaaaacgaaaacgagttagtgatcttattacccttgtttttaacagaagtatgatgttcttacatagaagcctttagatgattatgttcaggatcttatggatagtttctcgtctctctttttggttttgtaataaatagttgacgttgtcagttgttgtatttggctgtctttatgtagatttttttttttcaatttgtgcatataatatatttgatcgcatttat

SEQ ID NO: 19984 - protein, 361 aa, Zea mays subsp. mays
  peptide (1)..(361): Ceres Seq. ID no. 15179579
  misc_feature (1)..(361): NCBI GI NO: 18407879 NR Description: expressed protein [Arabidopsis thaliana]
  misc_feature (72)..(361): NCBI GI NO: 25404436 NR Description: hypothetical protein F24D7.9
  misc_feature (8)..(261): NCBI GI NO: 15237154 NR Description: expressed protein [Arabidopsis thaliana]
  misc_feature (6)..(261): NCBI GI NO: 30686949 NR Description: proline-rich protein family [Arabidopsis thaliana]
  misc_feature (37)..(261): NCBI GI NO: 7486810 NR Description: hypothetical protein M7J2
  misc_feature (37)..(287): NCBI GI NO: 15223134 NR Description: expressed protein [Arabidopsis thaliana]
  misc_feature (15)..(239): NCBI GI NO: 34894046 NR Description: P0436E04.7
MRAGASGNNVSETINAAASAFASSDDRVHHQPSPIHKKRRWWDRFICFRPSTQRRKRIGKAALAPEPVHTDSTSNSGYRSVMTALPFIAPPSSPASFFQSEPPSATQSPVGILSFSPLPSNNNNNNNNNERPSIFAIGPYAHEPQLVSPPVFSTYTTEPSSAPVTPPLDESFYLTTTTPSSPEVPFAQLFNSNTNYGLRSPVSNYEFQFYQLPPGSPLAQLISPSSVMSGSGPASPFPDGVTHFQVSDPPKLLSPGKLHFSKAVTTPKEQKKIARPNKPVSFDLDADHFIRCVDQKLRTTFPEASASSHQEAAQYSSLGPNKEFDFGTDEKHLSVDDDEHSASTKNNNDWSFPVMQSGALS

SEQ ID NO: 19985 - protein, 280 aa, Zea mays subsp. mays
  peptide (1)..(280): Ceres Seq. ID no. 15179580
  misc_feature (1)..(280): NCBI GI NO: 18407879 NR Description: expressed protein [Arabidopsis thaliana]
  misc_feature (1)..(280): NCBI GI NO: 25404436 NR Description: hypothetical protein F24D7.9
  misc_feature (1)..(180): NCBI GI NO: 15237154 NR Description: expressed protein [Arabidopsis thaliana]
  misc_feature (1)..(180): NCBI GI NO: 30686949 NR Description: proline-rich protein family [Arabidopsis thaliana]
  misc_feature (1)..(180): NCBI GI NO: 7486810 NR Description: hypothetical protein M7J2
  misc_feature (1)..(206): NCBI GI NO: 15223134 NR Description: expressed protein [Arabidopsis thaliana]
  misc_feature (1)..(158): NCBI GI NO: 34894046 NR Description: P0436E04.7
MTALPFIAPPSSPASFFQSEPPSATQSPVGILSFSPLPSNNNNNNNNNERPSIFAIGPYAHEPQLVSPPVFSTYTTEPSSAPVTPPLDESFYLTTTTPSSPEVPFAQLFNSNTNYGLRSPVSNYEFQFYQLPPGSPLAQLISPSSVMSGSGPASPFPDGVTHFQVSDPPKLLSPGKLHFSKAVTTPKEQKKIARPNKPVSFDLDADHFIRCVDQKLRTTFPEASASSHQEAAQYSSLGPNKEFDFGTDEKHLSVDDDEHSASTKNNNDWSFPVMQSGALS

SEQ ID NO: 19986 - DNA, 791 bp, Zea mays subsp. mays
  misc_feature (1)..(791): Ceres Seq. ID no. 14309426
gttccttcccatgctagctaagtaacaccaataacatttatttactaaagcttatattacaaagagagaaatgaagaaagctacggcattgatgaaacatgtcgttgcattgttgagttccgcagcaaaggcgaaatctatagccataaagaataaaacaagtgctttcaagacaagactcctcatgttgtcccttgtgaaacatgagaagctcgggttccgttcaatttccaacaagatccacaacctcctagggcattcagatcaagagcaagactacgaccatgaacaagacaatagcaaggctataatcctctacaacaacggggaagtggctcactgtgagagttatgacgtacaaggcgaggaatgtgacaagtatcctgatctgaggcacacgttgttcgaaggtgaggaggattttggggacttggaggaaggccaaggaagttctgtcatagatatggtgaggaactcgaagaaagaagaaggagagagtttcaagctagaagatgagatcgaccatgttgcggatctcttcatttcaaggtttcataagcagatgaagcttcagaaactcttgtcctttaagaggtatcaagaaatgctagcccgaggcacataaaatcacacacctatatatatttatacacgttggcatagatatgaagaatagattcatattacgatttgtgctaacgttcatattttgtgttgtcaatcataaatccttccagcctctcatttttaggataaaatatcatgatctatttaatatgatttcagttatt

SEQ ID NO: 19987 - protein, 184 aa, Zea mays subsp. mays
  peptide (1)..(184): Ceres Seq. ID no. 14309427
  misc_feature (1)..(184): NCBI GI NO: 15238843 NR Description: expressed protein [Arabidopsis thaliana]
  misc_feature (3)..(182): NCBI GI NO: 38346641 NR Description: OSJNBa0072D21.11
  misc_feature (1)..(174): NCBI GI NO: 10177654 NR Description: gene_id:MAC12.16~unknown protein
  misc_feature (1)..(174): NCBI GI NO: 18417222 NR Description: expressed protein [Arabidopsis thaliana]
  misc_feature (1)..(174): NCBI GI NO: 15215582 NR Description: AT5g13880/MAC12_16 [Arabidopsis thaliana]
  misc_feature (8)..(165): NCBI GI NO: 30060391 NR Description: P0666G10.9
MKKATALMKHVVALLSSAAKAKSIAIKNKTSAFKTRLLMLSLVKHEKLGFRSISNKIHNLLGHSDQEQDYDHEQDNSKAIILYNNGEVAHCESYDVQGEECDKYPDLRHTLFEGEEDFGDLEEGQGSSVIDMVRNSKKEEGESFKLEDEIDHVADLFISRFHKQMKLQKLLSFKRYQEMLARGT

SEQ ID NO: 19988 - protein, 177 aa, Zea mays subsp. mays
  peptide (1)..(177): Ceres Seq. ID no. 14309428
  misc_feature (1)..(177): NCBI GI NO: 15238843 NR Description: expressed protein [Arabidopsis thaliana]
  misc_feature (1)..(175): NCBI GI NO: 38346641 NR Description: OSJNBa0072D21.11
  misc_feature (1)..(167): NCBI GI NO: 10177654 NR Description: gene_id:MAC12.16~unknown protein
  misc_feature (1)..(167): NCBI GI NO: 18417222 NR Description: expressed protein [Arabidopsis thaliana]
  misc_feature (1)..(167): NCBI GI NO: 15215582 NR Description: AT5g13880/MAC12_16 [Arabidopsis thaliana]
  misc_feature (1)..(158): NCBI GI NO: 30060391 NR Description: P0666G10.9
MKHVVALLSSAAKAKSIAIKNKTSAFKTRLLMLSLVKHEKLGFRSISNKIHNLLGHSDQEQDYDHEQDNSKAIILYNNGEVAHCESYDVQGEECDKYPDLRHTLFEGEEDFGDLEEGQGSSVIDMVRNSKKEEGESFKLEDEIDHVADLFISRFHKQMKLQKLLSFKRYQEMLARGT

SEQ ID NO: 19989 - protein, 146 aa, Zea mays subsp. mays
  peptide (1)..(146): Ceres Seq. ID no. 14309429
  misc_feature (1)..(146): NCBI GI NO: 15238843 NR Description: expressed protein [Arabidopsis thaliana]
  misc_feature (1)..(144): NCBI GI NO: 38346641 NR Description: OSJNBa0072D21.11
  misc_feature (1)..(136): NCBI GI NO: 10177654 NR Description: gene_id:MAC12.16~unknown protein
  misc_feature (1)..(136): NCBI GI NO: 18417222 NR Description: expressed protein [Arabidopsis thaliana]
  misc_feature (1)..(136): NCBI GI NO: 15215582 NR Description: AT5g13880/MAC12_16 [Arabidopsis thaliana]
  misc_feature (1)..(127): NCBI GI NO: 30060391 NR Description: P0666G10.9
MLSLVKHEKLGFRSISNKIHNLLGHSDQEQDYDHEQDNSKAIILYNNGEVAHCESYDVQGEECDKYPDLRHTLFEGEEDFGDLEEGQGSSVIDMVRNSKKEEGESFKLEDEIDHVADLFISRFHKQMKLQKLLSFKRYQEMLARGT

SEQ ID NO: 19990 - DNA, 1085 bp, Zea mays subsp. mays
  misc_feature (1)..(1085): Ceres Seq. ID no. 15175178
agaactctctttctctcacaaagacactcgtctcaaaggatctctgaaacctaaaaaaacaagttggatctgagctatatttcttaaaagattcttctctcacgactaaaaaaatcaacacagtcatgtcggttttacttcctctgtgtctggttctctccatgattacctattcaaatgctgcgtattgtgtatgcaaagacgggaacgagcaagtgcttcagaaagccatagattatgcatgtggagcaggagctgactgctctcagatccagcagaacggagcttgtttccagcctaacaccgtcaaaaaccactgcgacgtcgccgtcaacagttactaccagaagaaagcttcctccggtgccacctgtgactttaacggcgccgccgttatctctacctcccctccgtcaactgcttcaagctgtttaactggttccagctctagtgggaccccgtccactgggactcccaccacaggaaccccaagcactggaacaccaaccacaggaaccccaagcactgggacaccaaccacggggactccaaccagtggcttcccatccaccgggactccgtcgaccgggacacctactgccggaatgccaaccacggggactccttccactggcatgccaaattccggcacgccagcaaacggaatgccaacttcgtcttcatcttccgtgttccctggcactactcttggaccgaccgggagcgggggattcggcgatccgaacgctggagagaagatctcagtccgaactaacactgccttcttctttctaaccggtgtagctattatgcttgtggtttaaaaaacagtcacggttgggctgagattttgccaacggcttatgggggttgcgcaaatcggatagagctgctatatctctttttttttcgttcacttttgtcttttgtagggttcgaactggggtttactattaggtttggccgagagacatcatgcaagtagctagctagtaatatttcttttattttgtaaattcggaggatgagatgcccttttgtttctttgaatcgtttatcttttagtacgtaccatcattctctcc

SEQ ID NO: 19991 - protein, 232 aa, Zea mays subsp. mays
  peptide (1)..(232): Ceres Seq. ID no. 15175179
  misc_feature (77)..(200): Pfam Name: Pfam Description:  Equine herpesvirus glycoprotein gp2
  misc_feature (1)..(232): NCBI GI NO: 18409239 NR Description: expressed protein [Arabidopsis thaliana]
  misc_feature (1)..(232): NCBI GI NO: 21553768 NR Description: unknown [Arabidopsis thaliana]
  misc_feature (1)..(215): NCBI GI NO: 25404810 NR Description: unknown protein, 45065-49536
  misc_feature (1)..(175): NCBI GI NO: 15222715 NR Description: glycosyl hydrolase family 17
  misc_feature (1)..(190): NCBI GI NO: 30683485 NR Description: expressed protein [Arabidopsis thaliana]
  misc_feature (1)..(160): NCBI GI NO: 18394637 NR Description: glycosyl hydrolase family 17
  misc_feature (1)..(175): NCBI GI NO: 22775658 NR Description: glycosyl hydrolase family 17-like protein
  misc_feature (16)..(190): NCBI GI NO: 8778409 NR Description: F16A14.5 [Arabidopsis thaliana]
  misc_feature (1)..(190): NCBI GI NO: 30697478 NR Description: glycosyl hydrolase family 17
  misc_feature (1)..(153): NCBI GI NO: 22325443 NR Description: glycosyl hydrolase family 17
MSVLLPLCLVLSMITYSNAAYCVCKDGNEQVLQKAIDYACGAGADCSQIQQNGACFQPNTVKNHCDVAVNSYYQKKASSGATCDFNGAAVISTSPPSTASSCLTGSSSSGTPSTGTPTTGTPSTGTPTTGTPSTGTPTTGTPTSGFPSTGTPSTGTPTAGMPTTGTPSTGMPNSGTPANGMPTSSSSSVFPGTTLGPTGSGGFGDPNAGEKISVRTNTAFFFLTGVAIMLVV

SEQ ID NO: 19992 - protein, 220 aa, Zea mays subsp. mays
  peptide (1)..(220): Ceres Seq. ID no. 15175180
  misc_feature (65)..(188): Pfam Name: Pfam Description:  Equine herpesvirus glycoprotein gp2
  misc_feature (1)..(220): NCBI GI NO: 18409239 NR Description: expressed protein [Arabidopsis thaliana]
  misc_feature (1)..(220): NCBI GI NO: 21553768 NR Description: unknown [Arabidopsis thaliana]
  misc_feature (1)..(203): NCBI GI NO: 25404810 NR Description: unknown protein, 45065-49536
  misc_feature (1)..(163): NCBI GI NO: 15222715 NR Description: glycosyl hydrolase family 17
  misc_feature (1)..(178): NCBI GI NO: 30683485 NR Description: expressed protein [Arabidopsis thaliana]
  misc_feature (1)..(148): NCBI GI NO: 18394637 NR Description: glycosyl hydrolase family 17
  misc_feature (1)..(163): NCBI GI NO: 22775658 NR Description: glycosyl hydrolase family 17-like protein
  misc_feature (4)..(178): NCBI GI NO: 8778409 NR Description: F16A14.5 [Arabidopsis thaliana]
  misc_feature (1)..(178): NCBI GI NO: 30697478 NR Description: glycosyl hydrolase family 17
  misc_feature (1)..(141): NCBI GI NO: 22325443 NR Description: glycosyl hydrolase family 17
MITYSNAAYCVCKDGNEQVLQKAIDYACGAGADCSQIQQNGACFQPNTVKNHCDVAVNSYYQKKASSGATCDFNGAAVISTSPPSTASSCLTGSSSSGTPSTGTPTTGTPSTGTPTTGTPSTGTPTTGTPTSGFPSTGTPSTGTPTAGMPTTGTPSTGMPNSGTPANGMPTSSSSSVFPGTTLGPTGSGGFGDPNAGEKISVRTNTAFFFLTGVAIMLVV

SEQ ID NO: 19993 - DNA, 925 bp, Zea mays subsp. mays
  misc_feature (1)..(925): Ceres Seq. ID no. 14309404
accttaccaagactgagctctcaatggcggccttctcgatgactctgtcaaatccgaaggctttctcagctgctccacgaagactttctccgatcaacgcctccgctccctcttccaccactttccgattgaacaccaaatctaccgtcaacttcatcaagtttccgtctttaaccgcatcatctctcctcctccatacatcttccaccaagagaaaccgccgcagctgcttatcggttcaatccagtgctgagcctttagcggagccacaatcgaagataacgcataaggtgtatttcgatataagtgttgggaacccagttgggaaattggctgggaggattgttattggtttgtttggtgatgatgttccccaaactgttgagaacttccgtgctctttgcacaggtgagaaggggtttggctacaagggctcaacattccaccgtgtcatccgagatttcatgattcagggtggagactttgacaagggcaatggaactggaggtaaaagtgtatatggtcggacatttaaggatgagaatttcaatttatcccatgtcggacccggagttgtgagtatggcaaatgctggccctaatacaaatggaagtcagttcttcatctgcactgttaagacttcatggttggacgggaggcatgtggtgttcgggcaagttatagaaggaatggatgtcgtgaggctgatagaggaacaagagacagatagaggagaccgtcccagaaagaaagtggtcattgcagactgtggtcaacttccaatgtctgaagcttaagtaacaacatccaaaaccccaaaaccttgtgacaatgagattgagttgtattatgcgtttgcaatttttacacgctttcttttgtgaaatggatacaagtccctttataataatatcaatttcagttc

SEQ ID NO: 19994 - protein, 264 aa, Zea mays subsp. mays
  peptide (1)..(264): Ceres Seq. ID no. 14309405
  misc_feature (8)..(264): NCBI GI NO: 21593963 NR Description: peptidylprolyl isomerase-like protein
  misc_feature (8)..(264): NCBI GI NO: 15240008 NR Description: peptidyl-prolyl isomerase protein
  misc_feature (8)..(264): NCBI GI NO: 9955556 NR Description: peptidylprolyl isomerase-like protein
  misc_feature (12)..(261): NCBI GI NO: 37788312 NR Description: cyclophilin-like protein [Triticum aestivum]
  misc_feature (68)..(261): NCBI GI NO: 37788308 NR Description: cyclophilin-like protein [Triticum aestivum]
  misc_feature (90)..(234): NCBI GI NO: 9945069 NR Description: similar to Arabidopsis thaliana Peptidyl-prolylcis-trans isomerase
  misc_feature (67)..(261): NCBI GI NO: 21555831 NR Description: peptidylprolyl isomerase ROC4
  misc_feature (67)..(261): NCBI GI NO: 15228674 NR Description: peptidylprolyl isomerase ROC4
  misc_feature (67)..(261): NCBI GI NO: 11762200 NR Description: AT3g62030 [Arabidopsis thaliana]
  misc_feature (88)..(261): NCBI GI NO: 34902534 NR Description: putative peptidyl-prolyl cis-trans isomerase
LTKTELSMAAFSMTLSNPKAFSAAPRRLSPINASAPSSTTFRLNTKSTVNFIKFPSLTASSLLLHTSSTKRNRRSCLSVQSSAEPLAEPQSKITHKVYFDISVGNPVGKLAGRIVIGLFGDDVPQTVENFRALCTGEKGFGYKGSTFHRVIRDFMIQGGDFDKGNGTGGKSVYGRTFKDENFNLSHVGPGVVSMANAGPNTNGSQFFICTVKTSWLDGRHVVFGQVIEGMDVVRLIEEQETDRGDRPRKKVVIADCGQLPMSEA

SEQ ID NO: 19995 - protein, 257 aa, Zea mays subsp. mays
  peptide (1)..(257): Ceres Seq. ID no. 14309406
  misc_feature (1)..(257): NCBI GI NO: 21593963 NR Description: peptidylprolyl isomerase-like protein
  misc_feature (1)..(257): NCBI GI NO: 15240008 NR Description: peptidyl-prolyl isomerase protein
  misc_feature (1)..(257): NCBI GI NO: 9955556 NR Description: peptidylprolyl isomerase-like protein
  misc_feature (5)..(254): NCBI GI NO: 37788312 NR Description: cyclophilin-like protein [Triticum aestivum]
  misc_feature (61)..(254): NCBI GI NO: 37788308 NR Description: cyclophilin-like protein [Triticum aestivum]
  misc_feature (83)..(227): NCBI GI NO: 9945069 NR Description: similar to Arabidopsis thaliana Peptidyl-prolylcis-trans isomerase
  misc_feature (60)..(254): NCBI GI NO: 21555831 NR Description: peptidylprolyl isomerase ROC4
  misc_feature (60)..(254): NCBI GI NO: 15228674 NR Description: peptidylprolyl isomerase ROC4
  misc_feature (60)..(254): NCBI GI NO: 11762200 NR Description: AT3g62030 [Arabidopsis thaliana]
  misc_feature (81)..(254): NCBI GI NO: 34902534 NR Description: putative peptidyl-prolyl cis-trans isomerase
MAAFSMTLSNPKAFSAAPRRLSPINASAPSSTTFRLNTKSTVNFIKFPSLTASSLLLHTSSTKRNRRSCLSVQSSAEPLAEPQSKITHKVYFDISVGNPVGKLAGRIVIGLFGDDVPQTVENFRALCTGEKGFGYKGSTFHRVIRDFMIQGGDFDKGNGTGGKSVYGRTFKDENFNLSHVGPGVVSMANAGPNTNGSQFFICTVKTSWLDGRHVVFGQVIEGMDVVRLIEEQETDRGDRPRKKVVIADCGQLPMSEA

SEQ ID NO: 19996 - protein, 252 aa, Zea mays subsp. mays
  peptide (1)..(252): Ceres Seq. ID no. 14309407
  misc_feature (1)..(252): NCBI GI NO: 21593963 NR Description: peptidylprolyl isomerase-like protein
  misc_feature (1)..(252): NCBI GI NO: 15240008 NR Description: peptidyl-prolyl isomerase protein
  misc_feature (1)..(252): NCBI GI NO: 9955556 NR Description: peptidylprolyl isomerase-like protein
  misc_feature (1)..(249): NCBI GI NO: 37788312 NR Description: cyclophilin-like protein [Triticum aestivum]
  misc_feature (56)..(249): NCBI GI NO: 37788308 NR Description: cyclophilin-like protein [Triticum aestivum]
  misc_feature (78)..(222): NCBI GI NO: 9945069 NR Description: similar to Arabidopsis thaliana Peptidyl-prolylcis-trans isomerase
  misc_feature (55)..(249): NCBI GI NO: 21555831 NR Description: peptidylprolyl isomerase ROC4
  misc_feature (55)..(249): NCBI GI NO: 15228674 NR Description: peptidylprolyl isomerase ROC4
  misc_feature (55)..(249): NCBI GI NO: 11762200 NR Description: AT3g62030 [Arabidopsis thaliana]
  misc_feature (76)..(249): NCBI GI NO: 34902534 NR Description: putative peptidyl-prolyl cis-trans isomerase
MTLSNPKAFSAAPRRLSPINASAPSSTTFRLNTKSTVNFIKFPSLTASSLLLHTSSTKRNRRSCLSVQSSAEPLAEPQSKITHKVYFDISVGNPVGKLAGRIVIGLFGDDVPQTVENFRALCTGEKGFGYKGSTFHRVIRDFMIQGGDFDKGNGTGGKSVYGRTFKDENFNLSHVGPGVVSMANAGPNTNGSQFFICTVKTSWLDGRHVVFGQVIEGMDVVRLIEEQETDRGDRPRKKVVIADCGQLPMSEA

SEQ ID NO: 19997 - DNA, 879 bp, Zea mays subsp. mays
  misc_feature (1)..(879): Ceres Seq. ID no. 15175425
agggtttgaagtttgagagagagagagagagagagagagatgagtgcttcgaggtttatcaagtgtgtcaccgtcggcgacggcgctgtcggaaagacttgtctgctcatctcctacactagcaacactttccccacggactatgtgccaactgtgtttgataatttcagcgcgaatgtgattgtggatgggaacactatcaacttgggattgtgggatactgcagggcaagaggactacaatagactaagaccattgagctatcgcggcgcagatgtcttcttactcgctttctcccttgtcagcaaagctagctatgaaaatgtttctaaaaagtgggtacctgaactgagacattatgctcctggtgttccaatcatcctcgtcggaaccaagcttgatcttcgagatgacaagcaattctttgttgagcaccctggtgctgtgcctatctctactgctcagggtgaagaactgaagaaggtgattggggcacctgcttatattgaatgcagtgcaaaaacacaacagaatgtaaaagcggtgtttgatgcggctatcaaggtagttctccaaccacccaaaaacaagaagaggaagaagagaaagtctcagaaagcttgttctatattgtgattcaatagagacagaagaaccaacaggaggattgaagagcttcacttgtttgttttcctcaagaaaggaggaatatgttgttgtagtctttaaaaaaaatcagaagtagtaccaagtatttgtattattgtttgcattttgatctgtaaatataccactgaatactttatttctttgttttctagactcgcacgaatggtttagagattattctccaataaaagtttttatgaggtttcagcc

SEQ ID NO: 19998 - protein, 198 aa, Zea mays subsp. mays
  peptide (1)..(198): Ceres Seq. ID no. 15175426
  misc_feature (8)..(179): Pfam Name: Pfam Description:  Ras family
  misc_feature (1)..(198): NCBI GI NO: 15236247 NR Description: Rho1Ps homolog  Rac-like protein
  misc_feature (1)..(198): NCBI GI NO: 28393687 NR Description: putative Rho1Ps homolog Rac protein
  misc_feature (1)..(198): NCBI GI NO: 7438393 NR Description: small GTP binding protein, rac-type - turnip
  misc_feature (1)..(198): NCBI GI NO: 1732519 NR Description: Rho1Ps homolog [Arabidopsis thaliana]
  misc_feature (1)..(198): NCBI GI NO: 38524283 NR Description: putative RACD protein
  misc_feature (1)..(198): NCBI GI NO: 34421680 NR Description: RAC-like G-protein Rac1 [Gossypium hirsutum]
  misc_feature (1)..(198): NCBI GI NO: 4097583 NR Description: NTGP3 [Nicotiana tabacum]
  misc_feature (1)..(198): NCBI GI NO: 4097565 NR Description: ATGP3 [Arabidopsis thaliana]
  misc_feature (2)..(198): NCBI GI NO: 5902930 NR Description: small GTP-binding protein OsRac3 [Oryza sativa]
  misc_feature (2)..(198): NCBI GI NO: 14165241 NR Description: putative Rop family GTPase ROP4 [Oryza sativa]
MSASRFIKCVTVGDGAVGKTCLLISYTSNTFPTDYVPTVFDNFSANVIVDGNTINLGLWDTAGQEDYNRLRPLSYRGADVFLLAFSLVSKASYENVSKKWVPELRHYAPGVPIILVGTKLDLRDDKQFFVEHPGAVPISTAQGEELKKVIGAPAYIECSAKTQQNVKAVFDAAIKVVLQPPKNKKRKKRKSQKACSIL

SEQ ID NO: 19999 - DNA, 985 bp, Zea mays subsp. mays
  misc_feature (1)..(985): Ceres Seq. ID no. 15175257
agtgtccattttttgcaaaagtagaaactgagagcatcttcaattattaacacttacagaggagagagaaggagagccaaatggtaagagagagtatgggagaagagtccgaggcttttgccacgacggcgccgttagctccagtgaccggtgagcgaaaagtaaggaacgacttggaggaaacattaccaaaaccatatttggcaagagcactagtagctccagatacagagcatccgaatggatcagaaggtcatgacagcaaaggcatgagtgttatgcaacaacatgttgcttttttcgaccaaaacggcgatggaatcgtctatccttgggagacttatgcgggattccgtgacctcggtttcaacccaatctcttctgttttttgggccatattcataaactttgcgtttagctacgttacacttccgagttggttgccatcaccactattgcctgtttatatcgacaacattcacaaagccaagcatgggagtgattcaagcacctatgataccgaaggaaggtacgtcccggttaatctcgagaacatctttagcaaatatgcgttaacggctccaaataaaataacattaaaagagctttggaacttaaccgagggaaaccgaatggcaatcgatccttttggatggcttgcgaataaagttgaatggctactagtctatcttcttgcaaaggatgaggaagggttcgtgtctaaagaagctgtgagaggtgtctttgatgcaagtttctttgaatactgtgctaaaaagaataaagagaaggccgattctcgcaagcaagactaagcatttaatttgcttatcttttaaatttgtccgtttgtattattatgctctcaatcttaattaggaaaaggacagaaaacaaaaactctatgtggaataaaacgtttgtgttcttggatatattgttgtgtaatatttgttgaataaataaaatgagattttcatcaatt

SEQ ID NO: 20000 - protein, 244 aa, Zea mays subsp. mays; identical to SEQ ID NO: 11205
  peptide (1)..(244): Ceres Seq. ID no. 15175258
  misc_feature (59)..(232): Pfam Name: Pfam Description:  Caleosin related protein
  misc_feature (6)..(244): NCBI GI NO: 15226103 NR Description: RD20 protein [Arabidopsis thaliana]
  misc_feature (9)..(232): NCBI GI NO: 7459611 NR Description: Ca+2-binding EF hand protein homolog PM13
  misc_feature (2)..(242): NCBI GI NO: 6478218 NR Description: caleosin [Sesamum indicum]
  misc_feature (9)..(232): NCBI GI NO: 15236846 NR Description: embryo-specific protein 1 (ATS1)
  misc_feature (9)..(232): NCBI GI NO: 17380858 NR Description: putative embryo-specific protein ATS1
  misc_feature (9)..(236): NCBI GI NO: 15240486 NR Description: embryo-specific protein 1 (ATS1)
  misc_feature (5)..(242): NCBI GI NO: 7459612 NR Description: abscisic acid-induced protein - rice
  misc_feature (11)..(236): NCBI GI NO: 34538477 NR Description: caleosin 2 [Hordeum vulgare]
  misc_feature (8)..(238): NCBI GI NO: 32488447 NR Description: OSJNBa0004N05.4
  misc_feature (2)..(236): NCBI GI NO: 34538473 NR Description: caleosin 1 [Hordeum vulgare]

SEQ ID NO: 20001 - protein, 239 aa, Zea mays subsp. mays; identical to SEQ ID NO: 11206
  peptide (1)..(239): Ceres Seq. ID no. 15175259
  misc_feature (54)..(227): Pfam Name: Pfam Description:  Caleosin related protein
  misc_feature (1)..(239): NCBI GI NO: 15226103 NR Description: RD20 protein [Arabidopsis thaliana]
  misc_feature (4)..(227): NCBI GI NO: 7459611 NR Description: Ca+2-binding EF hand protein homolog PM13
  misc_feature (1)..(237): NCBI GI NO: 6478218 NR Description: caleosin [Sesamum indicum]
  misc_feature (4)..(227): NCBI GI NO: 15236846 NR Description: embryo-specific protein 1 (ATS1)
  misc_feature (4)..(227): NCBI GI NO: 17380858 NR Description: putative embryo-specific protein ATS1
  misc_feature (4)..(231): NCBI GI NO: 15240486 NR Description: embryo-specific protein 1 (ATS1)
  misc_feature (1)..(237): NCBI GI NO: 7459612 NR Description: abscisic acid-induced protein - rice
  misc_feature (6)..(231): NCBI GI NO: 34538477 NR Description: caleosin 2 [Hordeum vulgare]
  misc_feature (3)..(233): NCBI GI NO: 32488447 NR Description: OSJNBa0004N05.4
  misc_feature (1)..(231): NCBI GI NO: 34538473 NR Description: caleosin 1 [Hordeum vulgare]

SEQ ID NO: 20002 - protein, 181 aa, Zea mays subsp. mays; identical to SEQ ID NO: 11207
  peptide (1)..(181): Ceres Seq. ID no. 15175260
  misc_feature (1)..(169): Pfam Name: Pfam Description:  Caleosin related protein
  misc_feature (1)..(181): NCBI GI NO: 15226103 NR Description: RD20 protein [Arabidopsis thaliana]
  misc_feature (1)..(169): NCBI GI NO: 7459611 NR Description: Ca+2-binding EF hand protein homolog PM13
  misc_feature (1)..(179): NCBI GI NO: 6478218 NR Description: caleosin [Sesamum indicum]
  misc_feature (1)..(169): NCBI GI NO: 15236846 NR Description: embryo-specific protein 1 (ATS1)
  misc_feature (1)..(169): NCBI GI NO: 17380858 NR Description: putative embryo-specific protein ATS1
  misc_feature (1)..(173): NCBI GI NO: 15240486 NR Description: embryo-specific protein 1 (ATS1)
  misc_feature (1)..(179): NCBI GI NO: 7459612 NR Description: abscisic acid-induced protein - rice
  misc_feature (1)..(173): NCBI GI NO: 34538477 NR Description: caleosin 2 [Hordeum vulgare]
  misc_feature (1)..(175): NCBI GI NO: 32488447 NR Description: OSJNBa0004N05.4
  misc_feature (1)..(173): NCBI GI NO: 34538473 NR Description: caleosin 1 [Hordeum vulgare]

SEQ ID NO: 20003 - DNA, 723 bp, Zea mays subsp. mays
  misc_feature (1)..(723): Ceres Seq. ID no. 14309497
aaataacaaaacgagcaggagttcgatcgccggcggtaatcagaatgaaggaagacattcagaaaatggtggccgtagggctcgtgtggggagccaccaacgccctgatccgccgcggagcactcgcctgggataaaaaatcatcatcatcttcgacgacaacgcagtctcctccgcctcttcagatcccatccaacttcagccgcaaaatcctcgcctctctccgcgactggatcaacctcctcctcttctggcaatactccgttcctttcctcgtaaacctctccgcctccgccgcgttcttcgccctcctcggcgagtccccgatctccatcgccgttccggtcaccaacgccacgaccttcgccgcaaccgccgcgttcggggttcttttgggggaggaaactcaaatcggacttgctttggtaggtacgagctttattgtatttggaatctggctttgcgttggtcactgatcagatcgatactgatctgatctgatctgagctgtgtgattggaacattctagaagcgtcactctgtttcctgtgagatatagaattgctttcattcttgttctagcagagatagatagggagagtgcttattaaactgaatatggcatggtcgctgcaatgtgcaactatagcaagttgcagctagttgttcgttttgatgtcgtgggactgatataactagtaatcccaagctagttacttctct

SEQ ID NO: 20004 - protein, 157 aa, Zea mays subsp. mays
  peptide (1)..(157): Ceres Seq. ID no. 14309498
  misc_feature (15)..(155): NCBI GI NO: 15239774 NR Description: expressed protein [Arabidopsis thaliana]
  misc_feature (86)..(155): NCBI GI NO: 28829061 NR Description: similar to putative protein; protein id:At5g19570
ITKRAGVRSPAVIRMKEDIQKMVAVGLVWGATNALIRRGALAWDKKSSSSSTTTQSPPPLQIPSNFSRKILASLRDWINLLLFWQYSVPFLVNLSASAAFFALLGESPISIAVPVTNATTFAATAAFGVLLGEETQIGLALVGTSFIVFGIWLCVGH

SEQ ID NO: 20005 - protein, 143 aa, Zea mays subsp. mays
  peptide (1)..(143): Ceres Seq. ID no. 14309499
  misc_feature (1)..(141): NCBI GI NO: 15239774 NR Description: expressed protein [Arabidopsis thaliana]
  misc_feature (72)..(141): NCBI GI NO: 28829061 NR Description: similar to putative protein; protein id:At5g19570
MKEDIQKMVAVGLVWGATNALIRRGALAWDKKSSSSSTTTQSPPPLQIPSNFSRKILASLRDWINLLLFWQYSVPFLVNLSASAAFFALLGESPISIAVPVTNATTFAATAAFGVLLGEETQIGLALVGTSFIVFGIWLCVGH

SEQ ID NO: 20006 - protein, 136 aa, Zea mays subsp. mays
  peptide (1)..(136): Ceres Seq. ID no. 14309500
  misc_feature (1)..(134): NCBI GI NO: 15239774 NR Description: expressed protein [Arabidopsis thaliana]
  misc_feature (65)..(134): NCBI GI NO: 28829061 NR Description: similar to putative protein; protein id:At5g19570
MVAVGLVWGATNALIRRGALAWDKKSSSSSTTTQSPPPLQIPSNFSRKILASLRDWINLLLFWQYSVPFLVNLSASAAFFALLGESPISIAVPVTNATTFAATAAFGVLLGEETQIGLALVGTSFIVFGIWLCVGH

SEQ ID NO: 20007 - DNA, 1034 bp, Zea mays subsp. mays
  misc_feature (1)..(1034): Ceres Seq. ID no. 14309495
atttttcttttgattgaccggcggcgatggacgcattgagagcttcttacggtgactcttcatcggactcggatactgatgatctctctccggctgctgaaaatcacggcgaggtatcaacctctggaaaacacgggaaggagtcgatttctctgcctcctccgccgctttcgcttctcgaatccattggatccacaggttctttggatgtctactcaacgaagactgtgactagagtaaggaactttcctcatgtcgatggaaactacgccttgcatgtttacatccctgtttttataccactattggcgaagaaggagattgcctgtgttttaaagagggttgcatcacttgttccccatcttcatttggtcgaagctgatattccactcagcattctttgcaacgatgaccagaagcttgaccatgctttggggagagagttccacataagcttgggaagaagcgttcctcttcgtgttcatcagattaactctctggtttctatgcttaggcaaaaacttcagttacacaagagatattggattgattttaataagtggcaagtctttgtgaatgacgactctactcgttctttcctctctctggaaatcaccacttctggactatccgagataagcaagcaaattgatgctgttaatgaagtttacaagcttcacaatcttccagagttttacaaggatccgcgaccacatatctccttggtctgggcgttgggtgatattagaacttccttaaagggagctgttgacggggaactgaagaagcttagagctggtggttgcgtgcagaatcgtatattcacctctaagttttctggaatcgagtgtaagataggaaacaaaacacacaaaatatgtaaactcccagatgaataatatctctgtatcacaatacctatcaggtatgcatttgtaacggcatagaagcatgagtttactatttttatttgggtggtccaatagtccctgtgcttaggaaaagagagataatgaacagtctttgtgcttcgg

SEQ ID NO: 20008 - protein, 290 aa, Zea mays subsp. mays
  peptide (1)..(290): Ceres Seq. ID no. 14309496
  misc_feature (1)..(290): NCBI GI NO: 18423246 NR Description: expressed protein [Arabidopsis thaliana]
  misc_feature (136)..(280): NCBI GI NO: 19527176 NR Description: expressed sequence AA960436 [Mus musculus]
  misc_feature (9)..(117): NCBI GI NO: 19527176 NR Description: expressed sequence AA960436 [Mus musculus]
  misc_feature (140)..(280): NCBI GI NO: 13325194 NR Description: hypothetical protein FLJ13154 [Homo sapiens]
  misc_feature (9)..(112): NCBI GI NO: 13325194 NR Description: hypothetical protein FLJ13154 [Homo sapiens]
  misc_feature (140)..(280): NCBI GI NO: 13375797 NR Description: hypothetical protein FLJ13154 [Homo sapiens]
  misc_feature (9)..(112): NCBI GI NO: 13375797 NR Description: hypothetical protein FLJ13154 [Homo sapiens]
  misc_feature (9)..(123): NCBI GI NO: 34851290 NR Description: similar to expressed sequence AA960436
  misc_feature (139)..(253): NCBI GI NO: 34851290 NR Description: similar to expressed sequence AA960436
  misc_feature (139)..(281): NCBI GI NO: 27694652 NR Description: Similar to expressed sequence AA960436
MDALRASYGDSSSDSDTDDLSPAAENHGEVSTSGKHGKESISLPPPPLSLLESIGSTGSLDVYSTKTVTRVRNFPHVDGNYALHVYIPVFIPLLAKKEIACVLKRVASLVPHLHLVEADIPLSILCNDDQKLDHALGREFHISLGRSVPLRVHQINSLVSMLRQKLQLHKRYWIDFNKWQVFVNDDSTRSFLSLEITTSGLSEISKQIDAVNEVYKLHNLPEFYKDPRPHISLVWALGDIRTSLKGAVDGELKKLRAGGCVQNRIFTSKFSGIECKIGNKTHKICKLPDE

SEQ ID NO: 20009 - DNA, 1129 bp, Zea mays subsp. mays
  misc_feature (1)..(1129): Ceres Seq. ID no. 14309480
attttccagactctccaccttcgatctatagatcctcttcttcaccaccggagagctcagccgtcgcactgaatccaatcaaccgagaaagcaatctctagatctgtcgtctccttcacatcttcttccagagatgtataataacatgggacctcagcctgggatgccaatgcctcaggcagttcctcagcctaacccttttgggaatgccttctctggtcctggctctggacttatcagaagtggcttgggagcttatggggagaagattttcggatccagctctgagtatgtgcagagcaacataactcgttacttctccgatcctcaatactattttcaagtgaatgaccaatatgtgaggaacaagttgaagattgttctgcttcctttccttcacaggggacactggactagaatctcagagccagttgggggtagactttcatacaagcccccgatatatgatattaatgcaccagacttatacattccacttatggcatttggcacatacgttgttcttgctggtttgtcactaggactctatgggaagttttctccggaagctctgaactggctttttgtcaaaggaatggttggctggtttttgcaagtcatgctgctgaagataacattgctttcattgggtagcggcgaagcacccctcttggatatcgtggcatatgctggctatactttcacgggtctctgcttagctgttcttggcaagatcatctggggatactcttactatgctctacttccgtggacctgcttgtgcagcggggttttcctagtgaagacgatgaagcgagttctctttgcggaagctaggagttatgactcgagcaggcatcactacctcttgatctttgtagctttagcacagtttcctcttttgatctggcttggtaacattagtgtcaattggctcttttgaaatgcactacgtttaagatgttgtgaaaagaaaaaacacctctgatgttatgttagcagaatttgagtttttatttatttctgggtttagacttttgtcaaacataaatatatgatgaaagaaaagtgtgatctcaagtacacatctctttttttatcttttgttttgaatgtcagtttcttgact

SEQ ID NO: 20010 - protein, 269 aa, Zea mays subsp. mays
  peptide (1)..(269): Ceres Seq. ID no. 14309481
  misc_feature (1)..(269): NCBI GI NO: 30695009 NR Description: expressed protein [Arabidopsis thaliana]
  misc_feature (11)..(269): NCBI GI NO: 11282553 NR Description: hypothetical protein T16L24
  misc_feature (11)..(269): NCBI GI NO: 33589682 NR Description: At3g59500 [Arabidopsis thaliana]
  misc_feature (1)..(268): NCBI GI NO: 18397705 NR Description: expressed protein [Arabidopsis thaliana]
  misc_feature (1)..(268): NCBI GI NO: 9755388 NR Description: F17F8.24 [Arabidopsis thaliana]
  misc_feature (1)..(263): NCBI GI NO: 38346458 NR Description: OSJNBa0019G23.6
  misc_feature (129)..(263): NCBI GI NO: 10241632 NR Description: putative protein
  misc_feature (10)..(260): NCBI GI NO: 14043299 NR Description: Similar to RIKEN cDNA 9430029K10 gene
  misc_feature (1)..(260): NCBI GI NO: 39795597 NR Description: Unknown (protein for MGC:76182)
  misc_feature (1)..(260): NCBI GI NO: 28277968 NR Description: Similar to Yip1p-interacting factor [Danio rerio]
MYNNMGPQPGMPMPQAVPQPNPFGNAFSGPGSGLIRSGLGAYGEKIFGSSSEYVQSNITRYFSDPQYYFQVNDQYVRNKLKIVLLPFLHRGHWTRISEPVGGRLSYKPPIYDINAPDLYIPLMAFGTYVVLAGLSLGLYGKFSPEALNWLFVKGMVGWFLQVMLLKITLLSLGSGEAPLLDIVAYAGYTFTGLCLAVLGKIIWGYSYYALLPWTCLCSGVFLVKTMKRVLFAEARSYDSSRHHYLLIFVALAQFPLLIWLGNISVNWLF

SEQ ID NO: 20011 - protein, 265 aa, Zea mays subsp. mays
  peptide (1)..(265): Ceres Seq. ID no. 14309482
  misc_feature (1)..(265): NCBI GI NO: 30695009 NR Description: expressed protein [Arabidopsis thaliana]
  misc_feature (7)..(265): NCBI GI NO: 11282553 NR Description: hypothetical protein T16L24
  misc_feature (7)..(265): NCBI GI NO: 33589682 NR Description: At3g59500 [Arabidopsis thaliana]
  misc_feature (1)..(264): NCBI GI NO: 18397705 NR Description: expressed protein [Arabidopsis thaliana]
  misc_feature (1)..(264): NCBI GI NO: 9755388 NR Description: F17F8.24 [Arabidopsis thaliana]
  misc_feature (1)..(259): NCBI GI NO: 38346458 NR Description: OSJNBa0019G23.6
  misc_feature (125)..(259): NCBI GI NO: 10241632 NR Description: putative protein
  misc_feature (6)..(256): NCBI GI NO: 14043299 NR Description: Similar to RIKEN cDNA 9430029K10 gene
  misc_feature (1)..(256): NCBI GI NO: 39795597 NR Description: Unknown (protein for MGC:76182)
  misc_feature (1)..(256): NCBI GI NO: 28277968 NR Description: Similar to Yip1p-interacting factor [Danio rerio]
MGPQPGMPMPQAVPQPNPFGNAFSGPGSGLIRSGLGAYGEKIFGSSSEYVQSNITRYFSDPQYYFQVNDQYVRNKLKIVLLPFLHRGHWTRISEPVGGRLSYKPPIYDINAPDLYIPLMAFGTYVVLAGLSLGLYGKFSPEALNWLFVKGMVGWFLQVMLLKITLLSLGSGEAPLLDIVAYAGYTFTGLCLAVLGKIIWGYSYYALLPWTCLCSGVFLVKTMKRVLFAEARSYDSSRHHYLLIFVALAQFPLLIWLGNISVNWLF

SEQ ID NO: 20012 - protein, 259 aa, Zea mays subsp. mays
  peptide (1)..(259): Ceres Seq. ID no. 14309483
  misc_feature (1)..(259): NCBI GI NO: 30695009 NR Description: expressed protein [Arabidopsis thaliana]
  misc_feature (1)..(259): NCBI GI NO: 11282553 NR Description: hypothetical protein T16L24
  misc_feature (1)..(259): NCBI GI NO: 33589682 NR Description: At3g59500 [Arabidopsis thaliana]
  misc_feature (1)..(258): NCBI GI NO: 18397705 NR Description: expressed protein [Arabidopsis thaliana]
  misc_feature (1)..(258): NCBI GI NO: 9755388 NR Description: F17F8.24 [Arabidopsis thaliana]
  misc_feature (1)..(253): NCBI GI NO: 38346458 NR Description: OSJNBa0019G23.6
  misc_feature (119)..(253): NCBI GI NO: 10241632 NR Description: putative protein
  misc_feature (1)..(250): NCBI GI NO: 14043299 NR Description: Similar to RIKEN cDNA 9430029K10 gene
  misc_feature (1)..(250): NCBI GI NO: 39795597 NR Description: Unknown (protein for MGC:76182)
  misc_feature (1)..(250): NCBI GI NO: 28277968 NR Description: Similar to Yip1p-interacting factor [Danio rerio]
MPMPQAVPQPNPFGNAFSGPGSGLIRSGLGAYGEKIFGSSSEYVQSNITRYFSDPQYYFQVNDQYVRNKLKIVLLPFLHRGHWTRISEPVGGRLSYKPPIYDINAPDLYIPLMAFGTYVVLAGLSLGLYGKFSPEALNWLFVKGMVGWFLQVMLLKITLLSLGSGEAPLLDIVAYAGYTFTGLCLAVLGKIIWGYSYYALLPWTCLCSGVFLVKTMKRVLFAEARSYDSSRHHYLLIFVALAQFPLLIWLGNISVNWLF

SEQ ID NO: 20013 - DNA, 748 bp, Zea mays subsp. mays
  misc_feature (1)..(748): Ceres Seq. ID no. 14309476
aaaactcactcctcaaacctctctctcatcttcaagctattcgatcaatggcagcgacaatggcgacatcagcaaaatgcatgtccctaaacacatctcttcctaaagccctaaaccaaaccaaacccatctgttcctcaaaacccttcatctccctcccatccccaccaaaacccaccgtctctctcgccgtcactagcaccgccctcgccggagccgtgttctcttccctcagctactcggaacccgctttcgccgctcaccagatcgctcagctggcagcggcggctcaaggtagcgacaaccgcggcctagctctcctcctcccgatcgtcccggccatcggatgggtactcttcaacatcctccagccagctcttaaccagatcaacaagatgcgcgctagcaaaggagtcgtcgtgggtcttggcatcggtggtggtctcgctgcgtcagggcttttgactatgaccccggaggcctccgctagtatggtcaacgagatggcggcggtggcggaagctgcggcgaaagttgaagacaacaggggacagttgttgttgttcgtggttgcgccggctctgctttgggttctttacaatatattgcagcctgctttgaaccaactcaacaaaatgaggaataagtaataatcttattgtttacatgtaatcattgttgggattcaaaatgtaaaattaatcatttgtttcatggacagattctctggttaaattttggacagact

SEQ ID NO: 20014 - protein, 215 aa, Zea mays subsp. mays
  peptide (1)..(215): Ceres Seq. ID no. 14309477
  misc_feature (100)..(133): Pfam Name: PsbY Pfam Description: Photosystem II protein Y
  misc_feature (16)..(214): NCBI GI NO: 15220530 NR Description: F12A21.13 [Arabidopsis thaliana]
  misc_feature (20)..(214): NCBI GI NO: 21593330 NR Description: unknown [Arabidopsis thaliana]
  misc_feature (16)..(215): NCBI GI NO: 6093830 NR Description: Photosystem II core complex proteins psbY
  misc_feature (138)..(215): NCBI GI NO: 6093830 NR Description: Photosystem II core complex proteins psbY
NSLLKPLSHLQAIRSMAATMATSAKCMSLNTSLPKALNQTKPICSSKPFISLPSPPKPTVSLAVTSTALAGAVFSSLSYSEPAFAAHQIAQLAAAAQGSDNRGLALLLPIVPAIGWVLFNILQPALNQINKMRASKGVVVGLGIGGGLAASGLLTMTPEASASMVNEMAAVAEAAAKVEDNRGQLLLFVVAPALLWVLYNILQPALNQLNKMRNK

SEQ ID NO: 20015 - protein, 200 aa, Zea mays subsp. mays
  peptide (1)..(200): Ceres Seq. ID no. 14309478
  misc_feature (85)..(118): Pfam Name: PsbY Pfam Description: Photosystem II protein Y
  misc_feature (1)..(199): NCBI GI NO: 15220530 NR Description: F12A21.13 [Arabidopsis thaliana]
  misc_feature (5)..(199): NCBI GI NO: 21593330 NR Description: unknown [Arabidopsis thaliana]
  misc_feature (1)..(200): NCBI GI NO: 6093830 NR Description: Photosystem II core complex proteins psbY
  misc_feature (123)..(200): NCBI GI NO: 6093830 NR Description: Photosystem II core complex proteins psbY
MAATMATSAKCMSLNTSLPKALNQTKPICSSKPFISLPSPPKPTVSLAVTSTALAGAVFSSLSYSEPAFAAHQIAQLAAAAQGSDNRGLALLLPIVPAIGWVLFNILQPALNQINKMRASKGVVVGLGIGGGLAASGLLTMTPEASASMVNEMAAVAEAAAKVEDNRGQLLLFVVAPALLWVLYNILQPALNQLNKMRNK

SEQ ID NO: 20016 - protein, 196 aa, Zea mays subsp. mays
  peptide (1)..(196): Ceres Seq. ID no. 14309479
  misc_feature (81)..(114): Pfam Name: PsbY Pfam Description: Photosystem II protein Y
  misc_feature (1)..(195): NCBI GI NO: 15220530 NR Description: F12A21.13 [Arabidopsis thaliana]
  misc_feature (1)..(195): NCBI GI NO: 21593330 NR Description: unknown [Arabidopsis thaliana]
  misc_feature (1)..(196): NCBI GI NO: 6093830 NR Description: Photosystem II core complex proteins psbY
  misc_feature (119)..(196): NCBI GI NO: 6093830 NR Description: Photosystem II core complex proteins psbY
MATSAKCMSLNTSLPKALNQTKPICSSKPFISLPSPPKPTVSLAVTSTALAGAVFSSLSYSEPAFAAHQIAQLAAAAQGSDNRGLALLLPIVPAIGWVLFNILQPALNQINKMRASKGVVVGLGIGGGLAASGLLTMTPEASASMVNEMAAVAEAAAKVEDNRGQLLLFVVAPALLWVLYNILQPALNQLNKMRNK

SEQ ID NO: 20017 - DNA, 754 bp, Zea mays subsp. mays
  misc_feature (1)..(754): Ceres Seq. ID no. 14309452
gggatcgatctctctttctctgaaacattttggaaacttctaggtaaggcttcttcattccaaagcaagaccacaatttttcttcatggccaccggagaggagaaacctgttatggtcgtcggtatcgacgaaagcgagcagagcacttacgccttggagtggaccctcgatcgtttcttcactccctacgctcctaattttcctttcaagctcttcatcgtccacgccaaacctaacgccgtctctgccgttggtcttgctggtcccggagctgcggaggttctgccttatgttgataccgatttgaagcatattgctgccagggttatcgagatggctaaaggtatctgtcagagcaaatcggttaatggcgctatgttcgaagtttttgaaggtgatgcaagaagtatactgtgcgatgttgtggataaacatcatgcttctcttcttgtcgtgggaagccatggttatggagctatcaagagggcggttctagggagcgtgagcgactactgtgctcatcatgctcattgctcggtgatgatcgtgaagaagcctaagatcaagcactgatgatcacctaaacccaagctgttatatcagtcaaagcaaagcaaagtctcatctgcatagtcgtcagtttcggtgaaatgaaataaaattgtgaaacgatccaatctatatattaatattcgtgtgtaaattggttattgtattcataaactattttatatattgacgtttgataatact

SEQ ID NO: 20018 - protein, 162 aa, Zea mays subsp. mays
  peptide (1)..(162): Ceres Seq. ID no. 14309453
  misc_feature (10)..(156): Pfam Name: Pfam Description:  Universal stress protein family
  misc_feature (1)..(161): NCBI GI NO: 18407428 NR Description: expressed protein [Arabidopsis thaliana]
  misc_feature (1)..(161): NCBI GI NO: 21555580 NR Description: unknown [Arabidopsis thaliana]
  misc_feature (12)..(162): NCBI GI NO: 38016525 NR Description: fiber protein Fb19 [Gossypium barbadense]
  misc_feature (2)..(161): NCBI GI NO: 22831145 NR Description: universal stress protein USP1-like protein
  misc_feature (2)..(161): NCBI GI NO: 20067187 NR Description: putative universal stress protein USP1
  misc_feature (10)..(159): NCBI GI NO: 18399413 NR Description: ethylene-responsive protein -related
  misc_feature (10)..(159): NCBI GI NO: 30681955 NR Description: ethylene-responsive protein -related
  misc_feature (10)..(159): NCBI GI NO: 21594903 NR Description: ethylene-responsive protein, putative
  misc_feature (1)..(119): NCBI GI NO: 15239780 NR Description: hypothetical protein [Arabidopsis thaliana]
  misc_feature (10)..(156): NCBI GI NO: 5669654 NR Description: ER6 protein [Lycopersicon esculentum]
MATGEEKPVMVVGIDESEQSTYALEWTLDRFFTPYAPNFPFKLFIVHAKPNAVSAVGLAGPGAAEVLPYVDTDLKHIAARVIEMAKGICQSKSVNGAMFEVFEGDARSILCDVVDKHHASLLVVGSHGYGAIKRAVLGSVSDYCAHHAHCSVMIVKKPKIKH

SEQ ID NO: 20019 - protein, 153 aa, Zea mays subsp. mays
  peptide (1)..(153): Ceres Seq. ID no. 14309454
  misc_feature (1)..(147): Pfam Name: Pfam Description:  Universal stress protein family
  misc_feature (1)..(152): NCBI GI NO: 18407428 NR Description: expressed protein [Arabidopsis thaliana]
  misc_feature (1)..(152): NCBI GI NO: 21555580 NR Description: unknown [Arabidopsis thaliana]
  misc_feature (3)..(153): NCBI GI NO: 38016525 NR Description: fiber protein Fb19 [Gossypium barbadense]
  misc_feature (1)..(152): NCBI GI NO: 22831145 NR Description: universal stress protein USP1-like protein
  misc_feature (1)..(152): NCBI GI NO: 20067187 NR Description: putative universal stress protein USP1
  misc_feature (1)..(150): NCBI GI NO: 18399413 NR Description: ethylene-responsive protein -related
  misc_feature (1)..(150): NCBI GI NO: 30681955 NR Description: ethylene-responsive protein -related
  misc_feature (1)..(150): NCBI GI NO: 21594903 NR Description: ethylene-responsive protein, putative
  misc_feature (1)..(110): NCBI GI NO: 15239780 NR Description: hypothetical protein [Arabidopsis thaliana]
  misc_feature (1)..(147): NCBI GI NO: 5669654 NR Description: ER6 protein [Lycopersicon esculentum]
MVVGIDESEQSTYALEWTLDRFFTPYAPNFPFKLFIVHAKPNAVSAVGLAGPGAAEVLPYVDTDLKHIAARVIEMAKGICQSKSVNGAMFEVFEGDARSILCDVVDKHHASLLVVGSHGYGAIKRAVLGSVSDYCAHHAHCSVMIVKKPKIKH

SEQ ID NO: 20020 - DNA, 820 bp, Zea mays subsp. mays
  misc_feature (1)..(820): Ceres Seq. ID no. 14309331
actcttcaaagtctccgccagacacttctccatcaaaactcctctcacacaatggccacttccttccctaccttgacaccttttcttttcatcctccttctctccatcccctccgttcttgaagcagctcatcaccacacggcggcgccggctccggctgtagactgttcgatgctcatactcaacatggctgattgtttgtcctttgtttccgctggaggcacggaggccaagccggctagttcgtgttgcaacggccttaagacggtgctcaagactgacgcagagtgtctatgtgaggcgtttaaaagcagtgcttctctaggagttactttgaacatgactaaagcagctacacttcccgctgcatgcaagcttcacgctccttctatggctgcttgtggattgtccgccgctcctactatggctccaggtcttgctccaggaggagctgctggacccgacttaagttttctatctccaaacccatctccagggaaccgcggatcttccttgcttcccttctccttcaccaccgtactcggtgctatgtccttcgtattgttattcttgtctcgtgtctgaagaagccagctagatttggttgtatgaaatggctttgggtttgggttttcgtgactttagttttgcgtgtcttttgagtctacttctgttttagaccatgtcggtttctgttcgtagtttatttaatcttaattacgtttcacattggtccttttatctaagaacatctctgatccctcgtatactgatggctacttattaaatttcgagttttcctaaaacaatttctttggtt

SEQ ID NO: 20021 - protein, 194 aa, Zea mays subsp. mays; identical to SEQ ID NO: 6676
  peptide (1)..(194): Ceres Seq. ID no. 14309332
  misc_feature (56)..(134): Pfam Name: Pfam Description:  Protease inhibitor/seed storage/LTP family
  misc_feature (18)..(192): NCBI GI NO: 21618136 NR Description: nonspecific lipid-transfer protein-like protein
  misc_feature (18)..(192): NCBI GI NO: 18424785 NR Description: protease inhibitor/seed storage/lipid transfer
  misc_feature (18)..(192): NCBI GI NO: 10176956 NR Description: contains similarity to nonspecific lipid-transferprotein~gene_id:MHJ24
  misc_feature (31)..(181): NCBI GI NO: 15225509 NR Description: protease inhibitor/seed storage/lipid transfer
  misc_feature (31)..(181): NCBI GI NO: 27765012 NR Description: At2g13820 [Arabidopsis thaliana]
  misc_feature (22)..(186): NCBI GI NO: 30682659 NR Description: lipid transfer protein family
  misc_feature (49)..(192): NCBI GI NO: 7487610 NR Description: hypothetical protein T3F12
  misc_feature (22)..(149): NCBI GI NO: 18415958 NR Description: lipid transfer protein family
  misc_feature (49)..(171): NCBI GI NO: 30680828 NR Description: protease inhibitor/seed storage/lipid transfer
  misc_feature (47)..(161): NCBI GI NO: 15220327 NR Description: protease inhibitor/seed storage/lipid transfer

SEQ ID NO: 20022 - protein, 177 aa, Zea mays subsp. mays; identical to SEQ ID NO: 6677
  peptide (1)..(177): Ceres Seq. ID no. 14309333
  misc_feature (39)..(117): Pfam Name: Pfam Description:  Protease inhibitor/seed storage/LTP family
  misc_feature (1)..(175): NCBI GI NO: 21618136 NR Description: nonspecific lipid-transfer protein-like protein
  misc_feature (1)..(175): NCBI GI NO: 18424785 NR Description: protease inhibitor/seed storage/lipid transfer
  misc_feature (1)..(175): NCBI GI NO: 10176956 NR Description: contains similarity to nonspecific lipid-transferprotein~gene_id:MHJ24
  misc_feature (14)..(164): NCBI GI NO: 15225509 NR Description: protease inhibitor/seed storage/lipid transfer
  misc_feature (14)..(164): NCBI GI NO: 27765012 NR Description: At2g13820 [Arabidopsis thaliana]
  misc_feature (5)..(169): NCBI GI NO: 30682659 NR Description: lipid transfer protein family
  misc_feature (32)..(175): NCBI GI NO: 7487610 NR Description: hypothetical protein T3F12
  misc_feature (5)..(132): NCBI GI NO: 18415958 NR Description: lipid transfer protein family
  misc_feature (32)..(154): NCBI GI NO: 30680828 NR Description: protease inhibitor/seed storage/lipid transfer
  misc_feature (30)..(144): NCBI GI NO: 15220327 NR Description: protease inhibitor/seed storage/lipid transfer

SEQ ID NO: 20023 - protein, 137 aa, Zea mays subsp. mays; identical to SEQ ID NO: 6678
  peptide (1)..(137): Ceres Seq. ID no. 14309334
  misc_feature (1)..(77): Pfam Name: Pfam Description:  Protease inhibitor/seed storage/LTP family
  misc_feature (1)..(135): NCBI GI NO: 21618136 NR Description: nonspecific lipid-transfer protein-like protein
  misc_feature (1)..(135): NCBI GI NO: 18424785 NR Description: protease inhibitor/seed storage/lipid transfer
  misc_feature (1)..(135): NCBI GI NO: 10176956 NR Description: contains similarity to nonspecific lipid-transferprotein~gene_id:MHJ24
  misc_feature (1)..(124): NCBI GI NO: 15225509 NR Description: protease inhibitor/seed storage/lipid transfer
  misc_feature (1)..(124): NCBI GI NO: 27765012 NR Description: At2g13820 [Arabidopsis thaliana]
  misc_feature (1)..(129): NCBI GI NO: 30682659 NR Description: lipid transfer protein family
  misc_feature (1)..(135): NCBI GI NO: 7487610 NR Description: hypothetical protein T3F12
  misc_feature (1)..(92): NCBI GI NO: 18415958 NR Description: lipid transfer protein family
  misc_feature (1)..(114): NCBI GI NO: 30680828 NR Description: protease inhibitor/seed storage/lipid transfer
  misc_feature (1)..(104): NCBI GI NO: 15220327 NR Description: protease inhibitor/seed storage/lipid transfer

SEQ ID NO: 20024 - DNA, 791 bp, Zea mays subsp. mays
  misc_feature (1)..(791): Ceres Seq. ID no. 15179459
aggacaataagtttaaagccatcaaatccaaaaaaaaatatttgttttaataatctaagcttcatcaatggcgaatcaagcagctatagcatttttctttttcgttttggcggtcttctccaacttggagctctcgtcttctacgcttttccatggcaaggtctcttgccttgactgccaccgcggtttcgacttctcaggcgttaaggttctcctaaagtgcgaaggcgagaagaaacacataaccacgatggcgacttcagacggatctttccggtcagtgcttccgaccaatgacagaaaacactccatgaactgtcttgcaaagctcttgggaggtcctgagcaactttatgctcataaacacaacatggtctctgaactggttaagtcaaaacacgataccaaggttcttactacctcaaacccactttccttctctctctcatgccctaaaccaactggagataatgtcggaaacatgataggagattcgaagactgttaattttcctgggacaggaggttttggattcccacctgctagcttctttcccttcttaccaatcattggcatcccatgattttaattaaatgtgcttgataagacgggggacgtatttattcataaatgttgttgtttatgtgaatttaagtgagcgaacaaaattgtttttgttttgtgagatataattaaggtttgtttatgtgataagaaaatgttggttatcggcttcttggatccgttgctttgtaccatgtttgtgataataataaagattgcattagtcc

SEQ ID NO: 20025 - protein, 171 aa, Zea mays subsp. mays; identical to SEQ ID NO: 7036
  peptide (1)..(171): Ceres Seq. ID no. 15179460
  misc_feature (1)..(171): NCBI GI NO: 18420486 NR Description: expressed protein [Arabidopsis thaliana]
  misc_feature (1)..(171): NCBI GI NO: 21594030 NR Description: unknown [Arabidopsis thaliana]
  misc_feature (7)..(171): NCBI GI NO: 30683502 NR Description: expressed protein [Arabidopsis thaliana]

SEQ ID NO: 20026 - protein, 110 aa, Zea mays subsp. mays; identical to SEQ ID NO: 7037
  peptide (1)..(110): Ceres Seq. ID no. 15179461
  misc_feature (1)..(110): NCBI GI NO: 18420486 NR Description: expressed protein [Arabidopsis thaliana]
  misc_feature (1)..(110): NCBI GI NO: 21594030 NR Description: unknown [Arabidopsis thaliana]
  misc_feature (1)..(110): NCBI GI NO: 30683502 NR Description: expressed protein [Arabidopsis thaliana]

SEQ ID NO: 20027 - protein, 90 aa, Zea mays subsp. mays; identical to SEQ ID NO: 7038
  peptide (1)..(90): Ceres Seq. ID no. 15179462
  misc_feature (1)..(90): NCBI GI NO: 18420486 NR Description: expressed protein [Arabidopsis thaliana]
  misc_feature (1)..(90): NCBI GI NO: 21594030 NR Description: unknown [Arabidopsis thaliana]
  misc_feature (1)..(90): NCBI GI NO: 30683502 NR Description: expressed protein [Arabidopsis thaliana]

SEQ ID NO: 20028 - DNA, 645 bp, Zea mays subsp. mays
  misc_feature (1)..(645): Ceres Seq. ID no. 15174145
aggaaacccttacatcagttaataatatctctaaacaatatgaacgacatgatgggtggatcttctcatgcggctccggcaccttcaccgtcggcgtttttccaacatcgccgacgtcatcacggtggcatgatgcacatgaccttcttctgggggaaaaacacggaggttctattcgacggatggccagggaccagtctgaccatgtattgggtctgcctagcctccattttcgtcacttccgcattgtcagagtggatttcgcgatgcggggtcatgaaagtcggtccagctagctttggcggcgggctagtccagacgttggtttacaccgtgagggcttgtttgtcttatttgatcatgctggccgtgatgtcattcaatggaggagtcttcttggctgcaatggctggttttggattagggtttatgatttttggaagtaggtcttttaaggacactggaagtaataacaatcacaccgaaattcaatcacattgttgattgattctttgtaggctttatttttcccccgtttaaataataataacgaaaaaaaattatttcaagattttaagattttagtattttttttgtctaagatataattggattttgtttacggtcatgttgattcaataaatt

SEQ ID NO: 20029 - protein, 167 aa, Zea mays subsp. mays
  peptide (1)..(167): Ceres Seq. ID no. 15174146
  misc_feature (45)..(158): Pfam Name: Pfam Description:  Ctr copper transporter family
  misc_feature (14)..(167): NCBI GI NO: 15237804 NR Description: copper transport protein - like
  misc_feature (14)..(167): NCBI GI NO: 21592951 NR Description: copper transport protein-like
  misc_feature (34)..(167): NCBI GI NO: 18496854 NR Description: copper transporter-like protein COPT3
  misc_feature (23)..(163): NCBI GI NO: 15232677 NR Description: copper transport protein - like protein
  misc_feature (26)..(162): NCBI GI NO: 30683324 NR Description: copper transport protein -related protein
  misc_feature (12)..(157): NCBI GI NO: 15237802 NR Description: copper transport protein [Arabidopsis thaliana]
  misc_feature (23)..(157): NCBI GI NO: 11288418 NR Description: copper transport protein
  misc_feature (35)..(153): NCBI GI NO: 30687312 NR Description: COPT4 protein [Arabidopsis thaliana]
  misc_feature (35)..(153): NCBI GI NO: 18496856 NR Description: COPT4 [Arabidopsis thaliana]
  misc_feature (35)..(146): NCBI GI NO: 25408576 NR Description: hypothetical protein At2g37920
RKPLHQLIISLNNMNDMMGGSSHAAPAPSPSAFFQHRRRHHGGMMHMTFFWGKNTEVLFDGWPGTSLTMYWVCLASIFVTSALSEWISRCGVMKVGPASFGGGLVQTLVYTVRACLSYLIMLAVMSFNGGVFLAAMAGFGLGFMIFGSRSFKDTGSNNNHTEIQSHC

SEQ ID NO: 20030 - protein, 154 aa, Zea mays subsp. mays
  peptide (1)..(154): Ceres Seq. ID no. 15174147
  misc_feature (32)..(145): Pfam Name: Pfam Description:  Ctr copper transporter family
  misc_feature (1)..(154): NCBI GI NO: 15237804 NR Description: copper transport protein - like
  misc_feature (1)..(154): NCBI GI NO: 21592951 NR Description: copper transport protein-like
  misc_feature (21)..(154): NCBI GI NO: 18496854 NR Description: copper transporter-like protein COPT3
  misc_feature (10)..(150): NCBI GI NO: 15232677 NR Description: copper transport protein - like protein
  misc_feature (13)..(149): NCBI GI NO: 30683324 NR Description: copper transport protein -related protein
  misc_feature (1)..(144): NCBI GI NO: 15237802 NR Description: copper transport protein [Arabidopsis thaliana]
  misc_feature (10)..(144): NCBI GI NO: 11288418 NR Description: copper transport protein
  misc_feature (22)..(140): NCBI GI NO: 30687312 NR Description: COPT4 protein [Arabidopsis thaliana]
  misc_feature (22)..(140): NCBI GI NO: 18496856 NR Description: COPT4 [Arabidopsis thaliana]
  misc_feature (22)..(133): NCBI GI NO: 25408576 NR Description: hypothetical protein At2g37920
MNDMMGGSSHAAPAPSPSAFFQHRRRHHGGMMHMTFFWGKNTEVLFDGWPGTSLTMYWVCLASIFVTSALSEWISRCGVMKVGPASFGGGLVQTLVYTVRACLSYLIMLAVMSFNGGVFLAAMAGFGLGFMIFGSRSFKDTGSNNNHTEIQSHC

SEQ ID NO: 20031 - protein, 151 aa, Zea mays subsp. mays
  peptide (1)..(151): Ceres Seq. ID no. 15174148
  misc_feature (29)..(142): Pfam Name: Pfam Description:  Ctr copper transporter family
  misc_feature (1)..(151): NCBI GI NO: 15237804 NR Description: copper transport protein - like
  misc_feature (1)..(151): NCBI GI NO: 21592951 NR Description: copper transport protein-like
  misc_feature (18)..(151): NCBI GI NO: 18496854 NR Description: copper transporter-like protein COPT3
  misc_feature (7)..(147): NCBI GI NO: 15232677 NR Description: copper transport protein - like protein
  misc_feature (10)..(146): NCBI GI NO: 30683324 NR Description: copper transport protein -related protein
  misc_feature (1)..(141): NCBI GI NO: 15237802 NR Description: copper transport protein [Arabidopsis thaliana]
  misc_feature (7)..(141): NCBI GI NO: 11288418 NR Description: copper transport protein
  misc_feature (19)..(137): NCBI GI NO: 30687312 NR Description: COPT4 protein [Arabidopsis thaliana]
  misc_feature (19)..(137): NCBI GI NO: 18496856 NR Description: COPT4 [Arabidopsis thaliana]
  misc_feature (19)..(130): NCBI GI NO: 25408576 NR Description: hypothetical protein At2g37920
MMGGSSHAAPAPSPSAFFQHRRRHHGGMMHMTFFWGKNTEVLFDGWPGTSLTMYWVCLASIFVTSALSEWISRCGVMKVGPASFGGGLVQTLVYTVRACLSYLIMLAVMSFNGGVFLAAMAGFGLGFMIFGSRSFKDTGSNNNHTEIQSHC

SEQ ID NO: 20032 - DNA, 866 bp, Zea mays subsp. mays
  misc_feature (1)..(866): Ceres Seq. ID no. 14309445
gtacttgggacttggaagaaagattcatggcttgtgttcagaacacactctacttcgttgcagctatacttcttattcaccagaagacggtcacctccgatttcctctctcctctgctctctcctatgttcgatgatatatgcaaggaagtgcaatgtgggaaagggaaatgcaaagcatctttaaacgcaacttttatgcatgaatgtgagtgtgataatggttggaagcagattgatcataacctcaagtttctcccttgcgtcacccccaactgtacctttgatctaacttgcggtgaagcagcttctccagcacagcccaaaacgcttcccaaggacaccaatgcttcatttttcgatatttgtcactgggtggattgtggaggagggttttgcaataagacaaatccgtttttatacagctgcaattgccgtgaaggttacaacaatcttatgaacatcaccacatttccttgctttaagcaatgtgcacttggaatggactgcttgaatcttgggatccctttgtccaacgcatcatcgtcttctccacctgctctgcctgatagcagcaagaatcaagcaacaggattgaatataagaggatcatcgttatggtttataacatatttgctctgtgtctccctagcaccatggaggttgctctgtatttgatcacttttattctgtgtgtttcacattttgtatacggatattgttcggtactgttttgtatttctttgtttctattctatcttactcatctattcttttttttttgtctaccacaaatactactgcaggcccggcccagtaaaatttattgcctaaaagcaaaataaaaaatgggcgttcgatggatcg

SEQ ID NO: 20033 - protein, 224 aa, Zea mays subsp. mays
  peptide (1)..(224): Ceres Seq. ID no. 14309446
  misc_feature (9)..(120): NCBI GI NO: 22328632 NR Description: hypothetical protein [Arabidopsis thaliana]
  misc_feature (122)..(224): NCBI GI NO: 22328632 NR Description: hypothetical protein [Arabidopsis thaliana]
  misc_feature (47)..(204): NCBI GI NO: 37534414 NR Description: putative protein C prepropeptide
  misc_feature (16)..(92): NCBI GI NO: 34902622 NR Description: Unknown protein
  misc_feature (122)..(188): NCBI GI NO: 37534418 NR Description: hypothetical protein
TWDLEERFMACVQNTLYFVAAILLIHQKTVTSDFLSPLLSPMFDDICKEVQCGKGKCKASLNATFMHECECDNGWKQIDHNLKFLPCVTPNCTFDLTCGEAASPAQPKTLPKDTNASFFDICHWVDCGGGFCNKTNPFLYSCNCREGYNNLMNITTFPCFKQCALGMDCLNLGIPLSNASSSSPPALPDSSKNQATGLNIRGSSLWFITYLLCVSLAPWRLLCI

SEQ ID NO: 20034 - protein, 216 aa, Zea mays subsp. mays
  peptide (1)..(216): Ceres Seq. ID no. 14309447
  misc_feature (1)..(112): NCBI GI NO: 22328632 NR Description: hypothetical protein [Arabidopsis thaliana]
  misc_feature (114)..(216): NCBI GI NO: 22328632 NR Description: hypothetical protein [Arabidopsis thaliana]
  misc_feature (39)..(196): NCBI GI NO: 37534414 NR Description: putative protein C prepropeptide
  misc_feature (8)..(84): NCBI GI NO: 34902622 NR Description: Unknown protein
  misc_feature (114)..(180): NCBI GI NO: 37534418 NR Description: hypothetical protein
MACVQNTLYFVAAILLIHQKTVTSDFLSPLLSPMFDDICKEVQCGKGKCKASLNATFMHECECDNGWKQIDHNLKFLPCVTPNCTFDLTCGEAASPAQPKTLPKDTNASFFDICHWVDCGGGFCNKTNPFLYSCNCREGYNNLMNITTFPCFKQCALGMDCLNLGIPLSNASSSSPPALPDSSKNQATGLNIRGSSLWFITYLLCVSLAPWRLLCI

SEQ ID NO: 20035 - protein, 183 aa, Zea mays subsp. mays
  peptide (1)..(183): Ceres Seq. ID no. 14309448
  misc_feature (1)..(79): NCBI GI NO: 22328632 NR Description: hypothetical protein [Arabidopsis thaliana]
  misc_feature (81)..(183): NCBI GI NO: 22328632 NR Description: hypothetical protein [Arabidopsis thaliana]
  misc_feature (6)..(163): NCBI GI NO: 37534414 NR Description: putative protein C prepropeptide
  misc_feature (1)..(51): NCBI GI NO: 34902622 NR Description: Unknown protein
  misc_feature (81)..(147): NCBI GI NO: 37534418 NR Description: hypothetical protein
MFDDICKEVQCGKGKCKASLNATFMHECECDNGWKQIDHNLKFLPCVTPNCTFDLTCGEAASPAQPKTLPKDTNASFFDICHWVDCGGGFCNKTNPFLYSCNCREGYNNLMNITTFPCFKQCALGMDCLNLGIPLSNASSSSPPALPDSSKNQATGLNIRGSSLWFITYLLCVSLAPWRLLCI

SEQ ID NO: 20036 - DNA, 769 bp, Zea mays subsp. mays
  misc_feature (1)..(769): Ceres Seq. ID no. 15179949
agactctttcatttgctcttttctttgtgtactaacattttcatttgttcaaatccatttgctcctttagacaccgatctccttcatggctccgattgctgtcggtagtgttttaccagacggaaaaatcttcctctttgacgagaacgatcagctccagacggtcaccgttcactctctcttggctggtaagaaggtcattctctttggtgtccccggtgctttcacttccgcctgcagcttgcagcatgtgcctagtttcattgagaaagcggaccagctgaaagcaaagggtgttaatgagatcatttgctatggcatgaatgatccgtatgtgatgaaagcatggggaaagacattcccagagaacaagcatgtcaagtttgtctcagacggctcaggagaatacacaaagctcctcggactggagcttgaccttaaggacaagggtcttggtattaggacaaggagatttgctatgttgctcgataacctcaaggtgactgtcgccaacattgaaacaggtggcgagttcacggtttctagcgccgaggatatcctcaaggctctctaagaaactaccatctgaaagtagaggatctctagcccgattttcagaataagaagttggcatagtaaattggttttagttgtttaattcctctttctaattataataacgtagtaatttttgaaagcgcggtttgtttccaaagtttaataaaacttttaatgaatttttcaataagtagtttattgatttaggaac

SEQ ID NO: 20037 - protein, 162 aa, Zea mays subsp. mays; identical to SEQ ID NO: 6771
  peptide (1)..(162): Ceres Seq. ID no. 15179950
  misc_feature (6)..(160): Pfam Name: Pfam Description:  AhpC/TSA family
  misc_feature (1)..(162): NCBI GI NO: 4928472 NR Description: type 2 peroxiredoxin
  misc_feature (1)..(162): NCBI GI NO: 15218877 NR Description: type 2 peroxiredoxin -related
  misc_feature (1)..(162): NCBI GI NO: 15218876 NR Description: type 2 peroxiredoxin -related
  misc_feature (1)..(162): NCBI GI NO: 21593881 NR Description: type 2 peroxiredoxin, putative
  misc_feature (1)..(162): NCBI GI NO: 18406870 NR Description: peroxiredoxin -related [Arabidopsis thaliana]
  misc_feature (1)..(162): NCBI GI NO: 21553913 NR Description: peroxiredoxin, putative [Arabidopsis thaliana]
  misc_feature (1)..(162): NCBI GI NO: 4704732 NR Description: peroxiredoxin TPx2 [Arabidopsis thaliana]
  misc_feature (1)..(162): NCBI GI NO: 19548660 NR Description: peroxiredoxin
  misc_feature (1)..(162): NCBI GI NO: 18654477 NR Description: thioredoxin peroxidase [Capsicum annuum]
  misc_feature (1)..(162): NCBI GI NO: 30841938 NR Description: thioredoxin peroxidase 1 [Lycopersicon esculentum]

SEQ ID NO: 20038 - protein, 84 aa, Zea mays subsp. mays; identical to SEQ ID NO: 6773
  peptide (1)..(84): Ceres Seq. ID no. 15179951
  misc_feature (1)..(82): Pfam Name: Pfam Description:  AhpC/TSA family
  misc_feature (1)..(84): NCBI GI NO: 4928472 NR Description: type 2 peroxiredoxin
  misc_feature (1)..(84): NCBI GI NO: 15218877 NR Description: type 2 peroxiredoxin -related
  misc_feature (1)..(84): NCBI GI NO: 15218876 NR Description: type 2 peroxiredoxin -related
  misc_feature (1)..(84): NCBI GI NO: 21593881 NR Description: type 2 peroxiredoxin, putative
  misc_feature (1)..(84): NCBI GI NO: 18406870 NR Description: peroxiredoxin -related [Arabidopsis thaliana]
  misc_feature (1)..(84): NCBI GI NO: 21553913 NR Description: peroxiredoxin, putative [Arabidopsis thaliana]
  misc_feature (1)..(84): NCBI GI NO: 4704732 NR Description: peroxiredoxin TPx2 [Arabidopsis thaliana]
  misc_feature (1)..(84): NCBI GI NO: 19548660 NR Description: peroxiredoxin
  misc_feature (1)..(84): NCBI GI NO: 18654477 NR Description: thioredoxin peroxidase [Capsicum annuum]
  misc_feature (1)..(84): NCBI GI NO: 30841938 NR Description: thioredoxin peroxidase 1 [Lycopersicon esculentum]

SEQ ID NO: 20039 - DNA, 843 bp, Zea mays subsp. mays
  misc_feature (1)..(843): Ceres Seq. ID no. 15179179
tatttttggacaaattaataaggtggggtattacagggggactgatgtttaccacttatttttagctttagtgttcacaaatgtattctttatgagtttttgacatgtgcagcctaatatggaacggctattttcagagtttatagaatcctgtacttggctgttaccattcccacatagcatttcattccgatttaggggctgtagtggttgaattactttcatggacaggcaccaaggacaaacagtgaagttcccagaaacatgtctgatgcagtgccagctacagatttcagaaagggaccagtggcaattgaaaaccaagtggctacaccaacaggcacaactgaagttatcattccttgcaattatataggctttgtctgtggaaacaatggcagtgaaattgaagaaatagagaagatgtcaggtgcttcaattacagttcatgatcctaaagctggcgacgcaaactcaaaagttgttatatgcggggatcccgaagaaacaaagaaggcacagagcctgattcatgccttcatattctgtggtctgtatcaaacataattgatgacttgatcactgtgcagtaccatcgtcgtttatgttcttgaatctagagtagttcccatgggcagatttcagcccttgattggatgtacatgtaccgtcgctaccggggtggatgtaggtagggctgatgcatgccttgtacaaacaacgccgatgtacatttctgtagtcctgtgttttagtttgggggaatggcaccatggaatgtgatgggttggctgcccggacctctgtggaatgtttaaccccaagccatcattggttttcatg

SEQ ID NO: 20040 - protein, 100 aa, Zea mays subsp. mays
  peptide (1)..(100): Ceres Seq. ID no. 15179180
  misc_feature (29)..(77): Pfam Name: Pfam Description:  KH domain
  misc_feature (11)..(96): NCBI GI NO: 15217969 NR Description: KH domain protein [Arabidopsis thaliana]
  misc_feature (1)..(96): NCBI GI NO: 22328051 NR Description: KH domain protein [Arabidopsis thaliana]
  misc_feature (1)..(96): NCBI GI NO: 28261403 NR Description: HEN4 [Arabidopsis thaliana]
MSDAVPATDFRKGPVAIENQVATPTGTTEVIIPCNYIGFVCGNNGSEIEEIEKMSGASITVHDPKAGDANSKVVICGDPEETKKAQSLIHAFIFCGLYQT

SEQ ID NO: 20041 - protein, 50 aa, Zea mays subsp. mays
  peptide (1)..(50): Ceres Seq. ID no. 15179181
MDRHQGQTVKFPETCLMQCQLQISERDQWQLKTKWLHQQAQLKLSFLAII

SEQ ID NO: 20042 - protein, 50 aa, Zea mays subsp. mays
  peptide (1)..(50): Ceres Seq. ID no. 15179182
MGRFQPLIGCTCTVATGVDVGRADACLVQTTPMYISVVLCFSLGEWHHGM

SEQ ID NO: 20043 - DNA, 1046 bp, Zea mays subsp. mays
  misc_feature (1)..(1046): Ceres Seq. ID no. 14309438
cttcacttttagtctctaacgttttcctcattcttcttcttctttttttttttttgcttcgggttcaagtcagctatggtggctatgtcctctgcttctggttctgctctttgtttcactgatgcttctagttctcccgctatcagacgtgatcttggatctttctgtcttcctcctagcacaatcacctttggatttgtcgataagcctattataaatcttcagcgactcagattatctcggttgaagcctcgagcagcaaacgctactgctgtggagaatggtaagcaggattctgacgaagtcccaactccagtggtcatagtcgaccaagattctgaccctgatgcaaccgtcgttgaagtaacatttggagaccgtctcggagctctacttgatactatgaatgccctaaaaaacttgggtctgaatgtcgtcaaggctaatgtctacctcgattcgtctggcaaacacaacaaatttgccattactaaagcggatagtggaagaaaagtagaagaccctgagttgctcgaggccatccgtctcactgtcataaacaatttgcttgagtttcatcctgaatcaagttctcagttggcaatgggagcagcttttggtgttcttccaccaactgaacaggttgatgtggacattgcaacacatatcaaaattgaagatgatggaccagaccgcagtttactgtacatagaaacagcggataggcctggactattagttgagctggtgaagatgattacagatatcagcgtagctgtcgaatctggagagttcgacaccgagggtttgttggctaaggttaagttccacgtaagttacagaaacaaagccctaatcaagcctcttcagcaggttcttgccaatagtctgaggtacttcttgaggcgtccatctactaacgactccagtttctgaaatgtcatttataagaaagaaaacaaaaaaacacaaaattgaaatatcatttcacatgaatacttatttttttacattttaccaaaataaactgcttcgttttagtggcc

SEQ ID NO: 20044 - protein, 286 aa, Zea mays subsp. mays
  peptide (1)..(286): Ceres Seq. ID no. 14309439
  misc_feature (208)..(277): Pfam Name: Pfam Description:  ACT domain
  misc_feature (2)..(286): NCBI GI NO: 18394414 NR Description: expressed protein [Arabidopsis thaliana]
  misc_feature (61)..(286): NCBI GI NO: 15238305 NR Description: ACT domain-containing protein
  misc_feature (61)..(286): NCBI GI NO: 21592963 NR Description: unknown [Arabidopsis thaliana]
  misc_feature (80)..(194): NCBI GI NO: 25370627 NR Description: protein F4N2.2 [imported] - Arabidopsis thaliana
  misc_feature (206)..(262): NCBI GI NO: 25370627 NR Description: protein F4N2.2 [imported] - Arabidopsis thaliana
  misc_feature (80)..(194): NCBI GI NO: 15221589 NR Description: uridylyltransferase-related [Arabidopsis thaliana]
  misc_feature (206)..(262): NCBI GI NO: 15221589 NR Description: uridylyltransferase-related [Arabidopsis thaliana]
MVAMSSASGSALCFTDASSSPAIRRDLGSFCLPPSTITFGFVDKPIINLQRLRLSRLKPRAANATAVENGKQDSDEVPTPVVIVDQDSDPDATVVEVTFGDRLGALLDTMNALKNLGLNVVKANVYLDSSGKHNKFAITKADSGRKVEDPELLEAIRLTVINNLLEFHPESSSQLAMGAAFGVLPPTEQVDVDIATHIKIEDDGPDRSLLYIETADRPGLLVELVKMITDISVAVESGEFDTEGLLAKVKFHVSYRNKALIKPLQQVLANSLRYFLRRPSTNDSSF

SEQ ID NO: 20045 - protein, 283 aa, Zea mays subsp. mays
  peptide (1)..(283): Ceres Seq. ID no. 14309440
  misc_feature (205)..(274): Pfam Name: Pfam Description:  ACT domain
  misc_feature (1)..(283): NCBI GI NO: 18394414 NR Description: expressed protein [Arabidopsis thaliana]
  misc_feature (58)..(283): NCBI GI NO: 15238305 NR Description: ACT domain-containing protein
  misc_feature (58)..(283): NCBI GI NO: 21592963 NR Description: unknown [Arabidopsis thaliana]
  misc_feature (77)..(191): NCBI GI NO: 25370627 NR Description: protein F4N2.2 [imported] - Arabidopsis thaliana
  misc_feature (203)..(259): NCBI GI NO: 25370627 NR Description: protein F4N2.2 [imported] - Arabidopsis thaliana
  misc_feature (77)..(191): NCBI GI NO: 15221589 NR Description: uridylyltransferase-related [Arabidopsis thaliana]
  misc_feature (203)..(259): NCBI GI NO: 15221589 NR Description: uridylyltransferase-related [Arabidopsis thaliana]
MSSASGSALCFTDASSSPAIRRDLGSFCLPPSTITFGFVDKPIINLQRLRLSRLKPRAANATAVENGKQDSDEVPTPVVIVDQDSDPDATVVEVTFGDRLGALLDTMNALKNLGLNVVKANVYLDSSGKHNKFAITKADSGRKVEDPELLEAIRLTVINNLLEFHPESSSQLAMGAAFGVLPPTEQVDVDIATHIKIEDDGPDRSLLYIETADRPGLLVELVKMITDISVAVESGEFDTEGLLAKVKFHVSYRNKALIKPLQQVLANSLRYFLRRPSTNDSSF

SEQ ID NO: 20046 - protein, 177 aa, Zea mays subsp. mays
  peptide (1)..(177): Ceres Seq. ID no. 14309441
  misc_feature (99)..(168): Pfam Name: Pfam Description:  ACT domain
  misc_feature (1)..(177): NCBI GI NO: 18394414 NR Description: expressed protein [Arabidopsis thaliana]
  misc_feature (1)..(177): NCBI GI NO: 15238305 NR Description: ACT domain-containing protein
  misc_feature (1)..(177): NCBI GI NO: 21592963 NR Description: unknown [Arabidopsis thaliana]
  misc_feature (1)..(85): NCBI GI NO: 25370627 NR Description: protein F4N2.2 [imported] - Arabidopsis thaliana
  misc_feature (97)..(153): NCBI GI NO: 25370627 NR Description: protein F4N2.2 [imported] - Arabidopsis thaliana
  misc_feature (1)..(85): NCBI GI NO: 15221589 NR Description: uridylyltransferase-related [Arabidopsis thaliana]
  misc_feature (97)..(153): NCBI GI NO: 15221589 NR Description: uridylyltransferase-related [Arabidopsis thaliana]
MNALKNLGLNVVKANVYLDSSGKHNKFAITKADSGRKVEDPELLEAIRLTVINNLLEFHPESSSQLAMGAAFGVLPPTEQVDVDIATHIKIEDDGPDRSLLYIETADRPGLLVELVKMITDISVAVESGEFDTEGLLAKVKFHVSYRNKALIKPLQQVLANSLRYFLRRPSTNDSSF

SEQ ID NO: 20047 - DNA, 1087 bp, Zea mays subsp. mays
  misc_feature (1)..(1087): Ceres Seq. ID no. 14309434
atcaaacaacaccctccaagtgctctctcagatagggatctcaacgcagcagcagcacaaaccctaatttcgagaaagaggagattcgatttctaaaaaaatggcgtacgcttctcgtttcctctccagatctaagcagctacaagggagtttagtcattttgcagcagcaccatgctattcccgtccgcgcttttgccaaggaagctgctcgtcctacttttaaaggagatgagatgttgaagggtgtctttacggagatcaagaacaaatttctggctgcagttgatattctccgtaaggagaagatcacccttgatcctgaagaccctgctgcggtcaaacagtatgctaatgtcatgaagaccatcaggcaaaaggcagacatgttctccgaatctcaacgcatcaaatatgatattgagaacgagactaaggagatcccagatgctcgtgcttacctcttgaagttgaaggatatccgcaccaggagggggcttactgatgagcttggtgctgaggccatgatgttcgaggctttggagaaagttgaaaaggatataaagaagcctctcttgagaagcgacaagaaaggaatggatcttttggttgctgaattcgagaaaggcaacaaaaagcttgggattaggaaagaagatcttcctaaatacgaggagaacttggagctgagcattgctaaagctcagttggatgagctgaagagtgatgctcttggagcaatggaatctcagaaaaagaaggaggagttcaaggatgaggagatgccagacgtgaaatcgttggacatccgtaactttatgtaaggtttgatgatgatcctaagaagaagcattttgagattttcttgcaagaaaagcagaagaaagatctctctcgctcttttttattgttcccttttgttgtttttggttaataaggtcggtctctcaccatggactcgaaatataataccaaatggtcttaactttctttctggttattaatacgcttgtgatttttagaaacaaacgtgggtttcatgtttctgataatggtgatataaatgaaactcgagattacatttaaat

SEQ ID NO: 20048 - protein, 240 aa, Zea mays subsp. mays
  peptide (1)..(240): Ceres Seq. ID no. 14309435
  misc_feature (1)..(240): NCBI GI NO: 15227104 NR Description: ATP synthase -related [Arabidopsis thaliana]
  misc_feature (1)..(240): NCBI GI NO: 21592716 NR Description: putative ATP synthase [Arabidopsis thaliana]
  misc_feature (1)..(220): NCBI GI NO: 30681554 NR Description: ATP synthase -related [Arabidopsis thaliana]
  misc_feature (1)..(179): NCBI GI NO: 421876 NR Description: probable ATP synthase chain - soybean
  misc_feature (1)..(179): NCBI GI NO: 1084358 NR Description: ATP synthase - soybean
  misc_feature (14)..(77): NCBI GI NO: 479146 NR Description: putative ATP synthase subunit [Glycine max]
MAYASRFLSRSKQLQGSLVILQQHHAIPVRAFAKEAARPTFKGDEMLKGVFTEIKNKFLAAVDILRKEKITLDPEDPAAVKQYANVMKTIRQKADMFSESQRIKYDIENETKEIPDARAYLLKLKDIRTRRGLTDELGAEAMMFEALEKVEKDIKKPLLRSDKKGMDLLVAEFEKGNKKLGIRKEDLPKYEENLELSIAKAQLDELKSDALGAMESQKKKEEFKDEEMPDVKSLDIRNFM

SEQ ID NO: 20049 - protein, 195 aa, Zea mays subsp. mays
  peptide (1)..(195): Ceres Seq. ID no. 14309436
  misc_feature (1)..(195): NCBI GI NO: 15227104 NR Description: ATP synthase -related [Arabidopsis thaliana]
  misc_feature (1)..(195): NCBI GI NO: 21592716 NR Description: putative ATP synthase [Arabidopsis thaliana]
  misc_feature (1)..(175): NCBI GI NO: 30681554 NR Description: ATP synthase -related [Arabidopsis thaliana]
  misc_feature (1)..(134): NCBI GI NO: 421876 NR Description: probable ATP synthase chain - soybean
  misc_feature (1)..(134): NCBI GI NO: 1084358 NR Description: ATP synthase - soybean
  misc_feature (1)..(32): NCBI GI NO: 479146 NR Description: putative ATP synthase subunit [Glycine max]
MLKGVFTEIKNKFLAAVDILRKEKITLDPEDPAAVKQYANVMKTIRQKADMFSESQRIKYDIENETKEIPDARAYLLKLKDIRTRRGLTDELGAEAMMFEALEKVEKDIKKPLLRSDKKGMDLLVAEFEKGNKKLGIRKEDLPKYEENLELSIAKAQLDELKSDALGAMESQKKKEEFKDEEMPDVKSLDIRNFM

SEQ ID NO: 20050 - protein, 154 aa, Zea mays subsp. mays
  peptide (1)..(154): Ceres Seq. ID no. 14309437
  misc_feature (1)..(154): NCBI GI NO: 15227104 NR Description: ATP synthase -related [Arabidopsis thaliana]
  misc_feature (1)..(154): NCBI GI NO: 21592716 NR Description: putative ATP synthase [Arabidopsis thaliana]
  misc_feature (1)..(134): NCBI GI NO: 30681554 NR Description: ATP synthase -related [Arabidopsis thaliana]
  misc_feature (1)..(93): NCBI GI NO: 421876 NR Description: probable ATP synthase chain - soybean
  misc_feature (1)..(93): NCBI GI NO: 1084358 NR Description: ATP synthase - soybean
MKTIRQKADMFSESQRIKYDIENETKEIPDARAYLLKLKDIRTRRGLTDELGAEAMMFEALEKVEKDIKKPLLRSDKKGMDLLVAEFEKGNKKLGIRKEDLPKYEENLELSIAKAQLDELKSDALGAMESQKKKEEFKDEEMPDVKSLDIRNFM

SEQ ID NO: 20051 - DNA, 670 bp, Zea mays subsp. mays
  misc_feature (1)..(670): Ceres Seq. ID no. 14309430
aaaaaaaaaaaatctcaaatctccttccactataaccatcagtaaaatctttcagccagcgcaaaccttcatcccgtgcaatggaaaccaccggaaaagtgaagaaggcttttggaggaagaaaagccggtggcccaaaaaccaaatcggtttcgaaatcgatcaaagccggtctccagttccccgtcggaagaatcacacgtttcctgaagaagggacggtacgctcagagactcggtggtggagctccggtctacatggccgccgttcttgagtacctcgcagccgaagttcttgagcttgctggtaacgcagcgagagacaacaagaagtcgaggatcattccgaggcatcttcttttggcgattaggaacgatgaagagttggggaagcttctgagtggagttacgatcgctcacggtggtgtgttgccgaacattaactctgttctattgcctaagaagtctgctaaatcgactgaggaagttgcgtccaagtcgccagctaaatctccgaagaaagcttaaatgtgctcgactttggtttcgttcaccagtttagttaatgtgttcgggtgctttgtgttgagtttggtggatgtatatgtaaaaatatctatcttttttaattatgtattttggatttgatgtctcttcaggtccaactttcc

SEQ ID NO: 20052 - protein, 148 aa, Zea mays subsp. mays
  peptide (1)..(148): Ceres Seq. ID no. 14309431
  misc_feature (6)..(128): Pfam Name: Pfam Description:  Core histone H2A/H2B/H3/H4
  misc_feature (1)..(148): NCBI GI NO: 15238549 NR Description: histone H2A, putative [Arabidopsis thaliana]
  misc_feature (1)..(148): NCBI GI NO: 122007 NR Description: Histone H2A
  misc_feature (1)..(148): NCBI GI NO: 27529852 NR Description: H2A histone [Nicotiana tabacum]
  misc_feature (1)..(148): NCBI GI NO: 7649159 NR Description: histone H2A [Euphorbia esula]
  misc_feature (5)..(148): NCBI GI NO: 34914498 NR Description: putative histone H2A
  misc_feature (5)..(148): NCBI GI NO: 729671 NR Description: Histone H2A
  misc_feature (1)..(148): NCBI GI NO: 122003 NR Description: HISTONE H2A
  misc_feature (6)..(148): NCBI GI NO: 121982 NR Description: HISTONE H2A.2.2
  misc_feature (1)..(148): NCBI GI NO: 122006 NR Description: HISTONE H2A
  misc_feature (6)..(148): NCBI GI NO: 121974 NR Description: HISTONE H2A.2.1
METTGKVKKAFGGRKAGGPKTKSVSKSIKAGLQFPVGRITRFLKKGRYAQRLGGGAPVYMAAVLEYLAAEVLELAGNAARDNKKSRIIPRHLLLAIRNDEELGKLLSGVTIAHGGVLPNINSVLLPKKSAKSTEEVASKSPAKSPKKA

SEQ ID NO: 20053 - protein, 90 aa, Zea mays subsp. mays
  peptide (1)..(90): Ceres Seq. ID no. 14309432
KKKNLKSPSTITISKIFQPAQTFIPCNGNHRKSEEGFWRKKSRWPKNQIGFEIDQSRSPVPRRKNHTFPEEGTVRSETRWWSSGLHGRRS

SEQ ID NO: 20054 - protein, 89 aa, Zea mays subsp. mays
  peptide (1)..(89): Ceres Seq. ID no. 14309433
  misc_feature (1)..(69): Pfam Name: Pfam Description:  Core histone H2A/H2B/H3/H4
  misc_feature (1)..(89): NCBI GI NO: 15238549 NR Description: histone H2A, putative [Arabidopsis thaliana]
  misc_feature (1)..(89): NCBI GI NO: 122007 NR Description: Histone H2A
  misc_feature (1)..(89): NCBI GI NO: 27529852 NR Description: H2A histone [Nicotiana tabacum]
  misc_feature (1)..(89): NCBI GI NO: 7649159 NR Description: histone H2A [Euphorbia esula]
  misc_feature (1)..(89): NCBI GI NO: 34914498 NR Description: putative histone H2A
  misc_feature (1)..(89): NCBI GI NO: 729671 NR Description: Histone H2A
  misc_feature (1)..(89): NCBI GI NO: 122003 NR Description: HISTONE H2A
  misc_feature (1)..(89): NCBI GI NO: 121982 NR Description: HISTONE H2A.2.2
  misc_feature (1)..(89): NCBI GI NO: 122006 NR Description: HISTONE H2A
  misc_feature (1)..(89): NCBI GI NO: 121974 NR Description: HISTONE H2A.2.1
MAAVLEYLAAEVLELAGNAARDNKKSRIIPRHLLLAIRNDEELGKLLSGVTIAHGGVLPNINSVLLPKKSAKSTEEVASKSPAKSPKKA

SEQ ID NO: 20055 - DNA, 762 bp, Zea mays subsp. mays
  misc_feature (1)..(762): Ceres Seq. ID no. 14309169
aaaaaaaaaaatgcttctaatagtttggtcgacgacacgagaggatctctctacccagctctctccgatcgaagcagtcaatttccaatcggagaagatgcagcagaggaaaacgacggcggcggcggcgggtaggccaagtggtaccgatggatctgatttctcgtaccggatggtggttgactctcgttacacgaaggtcactaaagggagatctcgtctccgtcttttgatccttgttcaggctacaatttatctaattggactgtcgtgtgcattcatgacaagtactaaaaatgaggagaggaacacccttggaattgcatctgcttctattggcttactctttgcattcattggagattttggttgcagacgcagcagagtaaaccttttgaggctctacacggctgcctccaccgttgtcatggttctttctctgttttctgctgttaggagcagattaacaatggaggaacggaatagttctggaacagcagctaaccttgagctcttagggttcatttctgctcaattgggagcggtggtgcagatattagcaatcatcgttacgggttcccttgtcaataatatgtccccacctacgaagacagaatagacaagacaagagagtttgtggtactggcatgtgtgattctgctaaatgaggaagacatttagaaatttgaagttttcagttctaccaaatgaatagttgtttacttcagtatcttctttcattattcaaaagacatttttaat

SEQ ID NO: 20056 - protein, 205 aa, Zea mays subsp. mays
  peptide (1)..(205): Ceres Seq. ID no. 14309170
  misc_feature (33)..(203): NCBI GI NO: 18423288 NR Description: expressed protein [Arabidopsis thaliana]
  misc_feature (30)..(203): NCBI GI NO: 37535924 NR Description: unknown protein
KKKMLLIVWSTTREDLSTQLSPIEAVNFQSEKMQQRKTTAAAAGRPSGTDGSDFSYRMVVDSRYTKVTKGRSRLRLLILVQATIYLIGLSCAFMTSTKNEERNTLGIASASIGLLFAFIGDFGCRRSRVNLLRLYTAASTVVMVLSLFSAVRSRLTMEERNSSGTAANLELLGFISAQLGAVVQILAIIVTGSLVNNMSPPTKTE

SEQ ID NO: 20057 - protein, 202 aa, Zea mays subsp. mays
  peptide (1)..(202): Ceres Seq. ID no. 14309171
  misc_feature (30)..(200): NCBI GI NO: 18423288 NR Description: expressed protein [Arabidopsis thaliana]
  misc_feature (27)..(200): NCBI GI NO: 37535924 NR Description: unknown protein
MLLIVWSTTREDLSTQLSPIEAVNFQSEKMQQRKTTAAAAGRPSGTDGSDFSYRMVVDSRYTKVTKGRSRLRLLILVQATIYLIGLSCAFMTSTKNEERNTLGIASASIGLLFAFIGDFGCRRSRVNLLRLYTAASTVVMVLSLFSAVRSRLTMEERNSSGTAANLELLGFISAQLGAVVQILAIIVTGSLVNNMSPPTKTE

SEQ ID NO: 20058 - protein, 173 aa, Zea mays subsp. mays
  peptide (1)..(173): Ceres Seq. ID no. 14309172
  misc_feature (1)..(171): NCBI GI NO: 18423288 NR Description: expressed protein [Arabidopsis thaliana]
  misc_feature (1)..(171): NCBI GI NO: 37535924 NR Description: unknown protein
MQQRKTTAAAAGRPSGTDGSDFSYRMVVDSRYTKVTKGRSRLRLLILVQATIYLIGLSCAFMTSTKNEERNTLGIASASIGLLFAFIGDFGCRRSRVNLLRLYTAASTVVMVLSLFSAVRSRLTMEERNSSGTAANLELLGFISAQLGAVVQILAIIVTGSLVNNMSPPTKTE

SEQ ID NO: 20059 - DNA, 889 bp, Zea mays subsp. mays
  misc_feature (1)..(889): Ceres Seq. ID no. 14309152
ttttaggctcgtgaaaaaaaccctactctcctctcctcttttaccccttccaaaaattacgccggcggcgaagccaaaactcttttaaggctagcagagaggatcgtgagcatggcggaaggagctaacaacgggacgaggcgcccaaggccgaacctactaatcacggggactcccggtaccggtaaatcgacgacggcttctgctctggcggaagccacgaacttccgttacatctgcgtcggagatctggtcaaagagaagaacttgcacgatggttgggacgatcagttcgagtgccacgtcattaacgaagacctggtgtgtgatgagcttgaagatgtaatagaaggaggaggtgtcattgtagattaccacggctgtgacttctttcccgagcgttggtttgatcgtgttgtcgtccttcaaactgagaactctgtcttgtatgatcgtttaaccaagaggggttattcgggaaccaagcttactaacaacatcgagtgcgagatcttccaagtcctgctcgaagaagctagagatagttaccaagaggagattgtcatcgcgctgcaaagtgacacaatcgaagatatctctgacaatgtcgcaagtttgacggaatggattaccacatggcatggcactggcagccctgagaaatgttgatgacaatgcatcttgcaatttactagtttcttttgatgggttctgtgtcggccacgcttgcaatttgtatactaatattctgaaagacaatgcagctgttgcactcagcttatgtatgttccctttgatacttattaaaagaaagcttgtcttatcttccctcatcatgttgtaatgttcagagtgacatatgttgtatgttattaccgtattagtcact

SEQ ID NO: 20060 - protein, 185 aa, Zea mays subsp. mays
  peptide (1)..(185): Ceres Seq. ID no. 14309153
  misc_feature (6)..(176): NCBI GI NO: 10177726 NR Description: gene_id:K9B18
  misc_feature (8)..(181): NCBI GI NO: 34395293 NR Description: putative adrenal gland protein AD-004
  misc_feature (71)..(181): NCBI GI NO: 34902744 NR Description: hypothetical protein~similar to Arabidopsisthaliana chromosome 5
  misc_feature (8)..(70): NCBI GI NO: 34902744 NR Description: hypothetical protein~similar to Arabidopsisthaliana chromosome 5
  misc_feature (6)..(117): NCBI GI NO: 15239296 NR Description: expressed protein [Arabidopsis thaliana]
  misc_feature (14)..(176): NCBI GI NO: 6457370 NR Description: unknown protein [Oryctolagus sp.]
  misc_feature (14)..(176): NCBI GI NO: 7706212 NR Description: adrenal gland protein AD-004
  misc_feature (14)..(176): NCBI GI NO: 33303797 NR Description: TAF9 RNA polymerase II, TATA box binding protein
  misc_feature (14)..(176): NCBI GI NO: 28076975 NR Description: RIKEN cDNA 4921516M08 [Mus musculus]
  misc_feature (14)..(176): NCBI GI NO: 34853506 NR Description: similar to RIKEN cDNA 4921516M08
MAEGANNGTRRPRPNLLITGTPGTGKSTTASALAEATNFRYICVGDLVKEKNLHDGWDDQFECHVINEDLVCDELEDVIEGGGVIVDYHGCDFFPERWFDRVVVLQTENSVLYDRLTKRGYSGTKLTNNIECEIFQVLLEEARDSYQEEIVIALQSDTIEDISDNVASLTEWITTWHGTGSPEKC

SEQ ID NO: 20061 - DNA, 746 bp, Zea mays subsp. mays
  misc_feature (1)..(746): Ceres Seq. ID no. 14309410
aaaagtcaaaacactctagtcagcaatgtggagcgtcaccggagctttgtgcgtggcggtgcctaccgccgccgcattccgtccaaaaccctttctcgtctcctctaaccttctccccaaccagacgaagaagctccatctctctcctcggcagcctccggctctatcatcacatttctcctcgtcttctttcaaaaccgccgctacttccgttcaacaacagtcagatgataaaaagggggagaagggcactaagtactacttccttgttgcaaacgctaagttcatgctcgacgaggaggagcactttcaggagcaactgtttgaacgtcttagatactacggagagcgtgacaaggaacaagacttctggctcgtcattgagcctaggttcctcgacaagttccccaacatcactcagagactccgtcgccctgctgttgctcttgtttccaccaatggcccctggatcacgtttatgaagttgagattggatcgagttctagctgaatcatttgaagcttcatctctggatgaagccttggcctctagtcctacaactctagagttcgaccagcctggaaactgggtggctccgtacccaaagtatgaacctggatggtgggacaccttcttgcccaaagcaaaacaagaatctctagcatagaactttgtccacctttgtcttagtgctttgtagtttgtattactgagcttcttgtgttatccaaatatgattgcaactc

SEQ ID NO: 20062 - protein, 213 aa, Zea mays subsp. mays; identical to SEQ ID NO: 6804
  peptide (1)..(213): Ceres Seq. ID no. 14309411
  misc_feature (1)..(211): NCBI GI NO: 15237144 NR Description: unknown protein (sp|P72777) -related
  misc_feature (78)..(178): NCBI GI NO: 23042740 NR Description: hypothetical protein
  misc_feature (67)..(178): NCBI GI NO: 23129763 NR Description: hypothetical protein [Nostoc punctiforme]
  misc_feature (78)..(178): NCBI GI NO: 17227712 NR Description: hypothetical protein [Nostoc sp. PCC 7120]
  misc_feature (78)..(175): NCBI GI NO: 16329384 NR Description: hypothetical protein [Synechocystis sp. PCC 6803]
  misc_feature (76)..(176): NCBI GI NO: 33865445 NR Description: conserved hypothetical protein
  misc_feature (78)..(168): NCBI GI NO: 37520451 NR Description: hypothetical protein [Gloeobacter violaceus]

SEQ ID NO: 20063 - protein, 159 aa, Zea mays subsp. mays; identical to SEQ ID NO: 6805
  peptide (1)..(159): Ceres Seq. ID no. 14309412

SEQ ID NO: 20064 - protein, 126 aa, Zea mays subsp. mays; identical to SEQ ID NO: 6806
  peptide (1)..(126): Ceres Seq. ID no. 14309413
  misc_feature (1)..(124): NCBI GI NO: 15237144 NR Description: unknown protein (sp|P72777) -related
  misc_feature (1)..(91): NCBI GI NO: 23042740 NR Description: hypothetical protein
  misc_feature (1)..(91): NCBI GI NO: 23129763 NR Description: hypothetical protein [Nostoc punctiforme]
  misc_feature (1)..(91): NCBI GI NO: 17227712 NR Description: hypothetical protein [Nostoc sp. PCC 7120]
  misc_feature (1)..(88): NCBI GI NO: 16329384 NR Description: hypothetical protein [Synechocystis sp. PCC 6803]
  misc_feature (1)..(89): NCBI GI NO: 33865445 NR Description: conserved hypothetical protein
  misc_feature (1)..(81): NCBI GI NO: 37520451 NR Description: hypothetical protein [Gloeobacter violaceus]

SEQ ID NO: 20065 - DNA, 1615 bp, Zea mays subsp. mays
  misc_feature (1)..(1615): Ceres Seq. ID no. 15179094
aaaaaatatcgaggaagaacttcttcttcttctggtgttattgagctctttctctcttggcctcgcctcgcctctgaccacttcgctcctcgggcattaggtactttgtaagtatctgttgatatttctctgcaaagttttcaaaatgggagactcagaaaatgctcaccaaccttccaaaaagagaggtgctttgaaacagctgtctcgcgagaatccggatgatgatgatgatattggttcagctgaacttgagagtggcactttcaagaaggccagtgatgaggtgttggcgaccagaagaattgtcaaaatcaagcgcaaagagccatcatcagctgcaccaccagccgcagcatccaacccattcgccggaattcaattgctccctactgcacctgcttcaaccggttttggaacaaatgctcctctggctgagtctaaagtggctcctgctgaagctgtagttgacgacaaccaaaaggcagttgatgctgaagacggcgatgaagttgacagtaagaagaaggttgatgtcacagatgaagtctctgtaaagtctaaagtaaaggatgttgatgataatgagtgtggaaagacatctgatgctggtgtagaccaggcggtctcgggtgttagcaacgctgtggaaggagcagcacaaactgaggatcctcttgagaaggaatcaggaggtgatcagactgatataaaagaaaaagaaggcgaaggaagcgttgaagcagctaagaacggtgatgatgataataataacggctctttgagttcgttccagcagcattcgagtagcaaaaacgcattcaccggacttgccggcacacagtcctctggttcttccttctcatttggtgtggtgtctcaggatggtagttctggacctctcttcggctttggcctctcaaacagcaacaacacttcttccctcttcggtgcatctggatcttccattatcaagaagagcgaaggcactgggtttcctccaaagcaagaggtttccacagaaacaggggaagagaacgagaaagtcgccttctcagctgactcgatcatgtttgaatatcttgatgggggatggagggagcgtggcaaaggagaagtcaaggtcaacgtttcaagcaatggcggtaaagcaaggctggttatgagagctaaaggaaactacaggttgatccttaacgcgagtctctacccggagatgaaacttgcaagcatggacaagaaaggaatcacgttcgcttgtgtgaatagtgaaggccgagaaggtctctctacgtttgcactcaagttcaaagatccaacaatcgttgatgagtttcgcgtagctgttgacaaacataaagaaagtaaaccagtagaaacggctcctccgctgaagacacctgagaactctccaacggctacagatgctgcctgaagtgaaaggtaaaagaaaaacactgaagaaactctcctctttaccttttgtgtctttactttcaagtagttgaattttgaggcagagaaaactagagattcgaacaagtttgtttgttgttgttttcattttaaacagttgttgagactttctggttagcataagacttaaaaaatctgc

SEQ ID NO: 20066 - protein, 429 aa, Zea mays subsp. mays
  peptide (1)..(429): Ceres Seq. ID no. 15179095
  misc_feature (289)..(407): Pfam Name: Pfam Description:  RanBP1 domain
  misc_feature (1)..(427): NCBI GI NO: 18403992 NR Description: expressed protein [Arabidopsis thaliana]
  misc_feature (165)..(427): NCBI GI NO: 22655290 NR Description: unknown protein [Arabidopsis thaliana]
  misc_feature (38)..(428): NCBI GI NO: 18400970 NR Description: expressed protein [Arabidopsis thaliana]
  misc_feature (38)..(428): NCBI GI NO: 21536684 NR Description: unknown [Arabidopsis thaliana]
  misc_feature (1)..(274): NCBI GI NO: 18400970 NR Description: expressed protein [Arabidopsis thaliana]
  misc_feature (1)..(274): NCBI GI NO: 21536684 NR Description: unknown [Arabidopsis thaliana]
  misc_feature (363)..(428): NCBI GI NO: 26451646 NR Description: unknown protein [Arabidopsis thaliana]
  misc_feature (182)..(426): NCBI GI NO: 2293556 NR Description: Ran binding protein 2 [Homo sapiens]
  misc_feature (77)..(429): NCBI GI NO: 21355293 NR Description: CG10225-PA [Drosophila melanogaster]
  misc_feature (137)..(426): NCBI GI NO: 8039801 NR Description: Ran-binding protein 2
MGDSENAHQPSKKRGALKQLSRENPDDDDDIGSAELESGTFKKASDEVLATRRIVKIKRKEPSSAAPPAAASNPFAGIQLLPTAPASTGFGTNAPLAESKVAPAEAVVDDNQKAVDAEDGDEVDSKKKVDVTDEVSVKSKVKDVDDNECGKTSDAGVDQAVSGVSNAVEGAAQTEDPLEKESGGDQTDIKEKEGEGSVEAAKNGDDDNNNGSLSSFQQHSSSKNAFTGLAGTQSSGSSFSFGVVSQDGSSGPLFGFGLSNSNNTSSLFGASGSSIIKKSEGTGFPPKQEVSTETGEENEKVAFSADSIMFEYLDGGWRERGKGEVKVNVSSNGGKARLVMRAKGNYRLILNASLYPEMKLASMDKKGITFACVNSEGREGLSTFALKFKDPTIVDEFRVAVDKHKESKPVETAPPLKTPENSPTATDAA

SEQ ID NO: 20067 - DNA, 700 bp, Zea mays subsp. mays
  misc_feature (1)..(700): Ceres Seq. ID no. 14309400
atcatttcagactctctctctctctccattcttcagctcagagagagagagagagagatggcgagttccatttcttcgatgtcaacacgtttttgtttcatccttaacaacaatggtagtcacaaaccaaacccatggctctatcaaccatcgttaagctcgaacagtctcatattctattcaaagcatcatcctcatcgtcgtccactatcttcttcttcccagattcccgtcgtagagactgatgaaggcgacgacaaagatggccttacattcagtggttgcagcggatgcgggaaggaggtgaaggagaatggttgcaacggcgacggacggattcaaggaggcattgccactgtccctggcttcggttggtggcccattaaggcttaccggccttgtcccggtttcgttgaggccggaggtagataccgccgcatagggcagagcatggatgaggttgcctttggtcgcggtgactctaaatcctccaccgattcctagctttatggctcaggtaaaaaattgcaaacatataccagtttttaattggactattgaaacatattcagattttcaatttagagaaagtcttatgtaacattacaaagtaaatgtttaaatagaattttgcacaaatgatgtttaaatagttgtttgagactgtcttgcagagcaatagatctcttgctttgcttct

SEQ ID NO: 20068 - protein, 167 aa, Zea mays subsp. mays
  peptide (1)..(167): Ceres Seq. ID no. 14309401
  misc_feature (20)..(165): NCBI GI NO: 9757952 NR Description: dbj|BAA92898
  misc_feature (20)..(165): NCBI GI NO: 18422170 NR Description: expressed protein [Arabidopsis thaliana]
  misc_feature (47)..(166): NCBI GI NO: 34904394 NR Description: unnamed protein product
IISDSLSLSILQLREREREMASSISSMSTRFCFILNNNGSHKPNPWLYQPSLSSNSLIFYSKHHPHRRPLSSSSQIPVVETDEGDDKDGLTFSGCSGCGKEVKENGCNGDGRIQGGIATVPGFGWWPIKAYRPCPGFVEAGGRYRRIGQSMDEVAFGRGDSKSSTDS

SEQ ID NO: 20069 - protein, 148 aa, Zea mays subsp. mays
  peptide (1)..(148): Ceres Seq. ID no. 14309402
  misc_feature (1)..(146): NCBI GI NO: 9757952 NR Description: dbj|BAA92898
  misc_feature (1)..(146): NCBI GI NO: 18422170 NR Description: expressed protein [Arabidopsis thaliana]
  misc_feature (28)..(147): NCBI GI NO: 34904394 NR Description: unnamed protein product
MASSISSMSTRFCFILNNNGSHKPNPWLYQPSLSSNSLIFYSKHHPHRRPLSSSSQIPVVETDEGDDKDGLTFSGCSGCGKEVKENGCNGDGRIQGGIATVPGFGWWPIKAYRPCPGFVEAGGRYRRIGQSMDEVAFGRGDSKSSTDS

SEQ ID NO: 20070 - protein, 141 aa, Zea mays subsp. mays
  peptide (1)..(141): Ceres Seq. ID no. 14309403
  misc_feature (1)..(139): NCBI GI NO: 9757952 NR Description: dbj|BAA92898
  misc_feature (1)..(139): NCBI GI NO: 18422170 NR Description: expressed protein [Arabidopsis thaliana]
  misc_feature (21)..(140): NCBI GI NO: 34904394 NR Description: unnamed protein product
MSTRFCFILNNNGSHKPNPWLYQPSLSSNSLIFYSKHHPHRRPLSSSSQIPVVETDEGDDKDGLTFSGCSGCGKEVKENGCNGDGRIQGGIATVPGFGWWPIKAYRPCPGFVEAGGRYRRIGQSMDEVAFGRGDSKSSTDS

SEQ ID NO: 20071 - DNA, 1159 bp, Zea mays subsp. mays
  misc_feature (1)..(1159): Ceres Seq. ID no. 15178828
gagattatcatattattaaagattgagaatatacaactgtagcattgatctgagcaaactcgtttcttctatcatacactcttttgaccttaaacctcaaagattgctgatgaagccatgtgatggatgtctacgttctccccagtttctacgttttccggctgatgggttctctgcgtttcgcagttactccctgtcgaggagcagattcatggccgcttcctccacggatccgatggttggagaggaggcaaacggtggtgttacaatgcttccggctgttgaagacaagtacggtggcgtgatgacggagatgagtcgtcccatggatccttctgccttctctgcacttctcagatcctctctctctaactggactcttcagggaaagaagggagtgtggatcaaattgccgaggcagcttatcggtcttgctgaaactgctgttaaggagggattctggtttcatcacgcggagaaaaactacttgatgcttgtgtattggattcccaaacaagaccatacccttccttccaatgcatctcaccgtgttggcatagccgcctttgttctaaaccacaagaaagaggtgctagtggttcaagagaagacaggaagatttaaaggccaaggtatctggaagttccccaccggagtagtcaatgagggagaatacatccatgatggctcggtcagagaggtgaaagaggagacaggagtggatacagagtttgtccaagtattggctttcagacagacccacaaagctttctttgaaaagtcagatctgttcttcgtctgcatgatgaagcctctttctctggagatcaatgcacaagagtctgagatagaggcagctcagtggatgccatggggggaatacaacaagcaaccattcgtacagaaccatgagctgttaaggtatatgacagacatttgctctgctaaaaccaacggacactacgaaggcttcactcctctccccgtctctgcacctgatctacaaggcaacttgtacttcaacaaccgcgacctcagttctcgccaataacattcttttcccacaagaagcaaatcaaagttgttttctctgctctatgttaagcattttgacatttgaattatcttaagcgaaaacatttgcattcaatgctattcg

SEQ ID NO: 20072 - protein, 313 aa, Zea mays subsp. mays
  peptide (1)..(313): Ceres Seq. ID no. 15178829
  misc_feature (146)..(279): Pfam Name: Pfam Description:  NUDIX domain
  misc_feature (36)..(312): NCBI GI NO: 18422823 NR Description: MutT/nudix family protein [Arabidopsis thaliana]
  misc_feature (53)..(312): NCBI GI NO: 9758793 NR Description: MutT domain protein-like [Arabidopsis thaliana]
  misc_feature (54)..(308): NCBI GI NO: 38564312 NR Description: At4g25434 [Arabidopsis thaliana]
  misc_feature (54)..(204): NCBI GI NO: 30686884 NR Description: MutT/nudix family protein [Arabidopsis thaliana]
  misc_feature (204)..(308): NCBI GI NO: 30686884 NR Description: MutT/nudix family protein [Arabidopsis thaliana]
  misc_feature (54)..(308): NCBI GI NO: 7486814 NR Description: hypothetical protein M7J2
  misc_feature (53)..(305): NCBI GI NO: 21593371 NR Description: mutT domain protein-like [Arabidopsis thaliana]
  misc_feature (53)..(305): NCBI GI NO: 21928133 NR Description: AT5g47240/MQL5_10 [Arabidopsis thaliana]
  misc_feature (53)..(305): NCBI GI NO: 8809607 NR Description: mutT domain protein-like [Arabidopsis thaliana]
  misc_feature (53)..(305): NCBI GI NO: 18422772 NR Description: MutT/nudix family protein [Arabidopsis thaliana]
MKPCDGCLRSPQFLRFPADGFSAFRSYSLSRSRFMAASSTDPMVGEEANGGVTMLPAVEDKYGGVMTEMSRPMDPSAFSALLRSSLSNWTLQGKKGVWIKLPRQLIGLAETAVKEGFWFHHAEKNYLMLVYWIPKQDHTLPSNASHRVGIAAFVLNHKKEVLVVQEKTGRFKGQGIWKFPTGVVNEGEYIHDGSVREVKEETGVDTEFVQVLAFRQTHKAFFEKSDLFFVCMMKPLSLEINAQESEIEAAQWMPWGEYNKQPFVQNHELLRYMTDICSAKTNGHYEGFTPLPVSAPDLQGNLYFNNRDLSSRQ

SEQ ID NO: 20073 - protein, 279 aa, Zea mays subsp. mays
  peptide (1)..(279): Ceres Seq. ID no. 15178830
  misc_feature (112)..(245): Pfam Name: Pfam Description:  NUDIX domain
  misc_feature (2)..(278): NCBI GI NO: 18422823 NR Description: MutT/nudix family protein [Arabidopsis thaliana]
  misc_feature (19)..(278): NCBI GI NO: 9758793 NR Description: MutT domain protein-like [Arabidopsis thaliana]
  misc_feature (20)..(274): NCBI GI NO: 38564312 NR Description: At4g25434 [Arabidopsis thaliana]
  misc_feature (20)..(170): NCBI GI NO: 30686884 NR Description: MutT/nudix family protein [Arabidopsis thaliana]
  misc_feature (170)..(274): NCBI GI NO: 30686884 NR Description: MutT/nudix family protein [Arabidopsis thaliana]
  misc_feature (20)..(274): NCBI GI NO: 7486814 NR Description: hypothetical protein M7J2
  misc_feature (19)..(271): NCBI GI NO: 21593371 NR Description: mutT domain protein-like [Arabidopsis thaliana]
  misc_feature (19)..(271): NCBI GI NO: 21928133 NR Description: AT5g47240/MQL5_10 [Arabidopsis thaliana]
  misc_feature (19)..(271): NCBI GI NO: 8809607 NR Description: mutT domain protein-like [Arabidopsis thaliana]
  misc_feature (19)..(271): NCBI GI NO: 18422772 NR Description: MutT/nudix family protein [Arabidopsis thaliana]
MAASSTDPMVGEEANGGVTMLPAVEDKYGGVMTEMSRPMDPSAFSALLRSSLSNWTLQGKKGVWIKLPRQLIGLAETAVKEGFWFHHAEKNYLMLVYWIPKQDHTLPSNASHRVGIAAFVLNHKKEVLVVQEKTGRFKGQGIWKFPTGVVNEGEYIHDGSVREVKEETGVDTEFVQVLAFRQTHKAFFEKSDLFFVCMMKPLSLEINAQESEIEAAQWMPWGEYNKQPFVQNHELLRYMTDICSAKTNGHYEGFTPLPVSAPDLQGNLYFNNRDLSSRQ

SEQ ID NO: 20074 - protein, 271 aa, Zea mays subsp. mays
  peptide (1)..(271): Ceres Seq. ID no. 15178831
  misc_feature (104)..(237): Pfam Name: Pfam Description:  NUDIX domain
  misc_feature (1)..(270): NCBI GI NO: 18422823 NR Description: MutT/nudix family protein [Arabidopsis thaliana]
  misc_feature (11)..(270): NCBI GI NO: 9758793 NR Description: MutT domain protein-like [Arabidopsis thaliana]
  misc_feature (12)..(266): NCBI GI NO: 38564312 NR Description: At4g25434 [Arabidopsis thaliana]
  misc_feature (12)..(162): NCBI GI NO: 30686884 NR Description: MutT/nudix family protein [Arabidopsis thaliana]
  misc_feature (162)..(266): NCBI GI NO: 30686884 NR Description: MutT/nudix family protein [Arabidopsis thaliana]
  misc_feature (12)..(266): NCBI GI NO: 7486814 NR Description: hypothetical protein M7J2
  misc_feature (11)..(263): NCBI GI NO: 21593371 NR Description: mutT domain protein-like [Arabidopsis thaliana]
  misc_feature (11)..(263): NCBI GI NO: 21928133 NR Description: AT5g47240/MQL5_10 [Arabidopsis thaliana]
  misc_feature (11)..(263): NCBI GI NO: 8809607 NR Description: mutT domain protein-like [Arabidopsis thaliana]
  misc_feature (11)..(263): NCBI GI NO: 18422772 NR Description: MutT/nudix family protein [Arabidopsis thaliana]
MVGEEANGGVTMLPAVEDKYGGVMTEMSRPMDPSAFSALLRSSLSNWTLQGKKGVWIKLPRQLIGLAETAVKEGFWFHHAEKNYLMLVYWIPKQDHTLPSNASHRVGIAAFVLNHKKEVLVVQEKTGRFKGQGIWKFPTGVVNEGEYIHDGSVREVKEETGVDTEFVQVLAFRQTHKAFFEKSDLFFVCMMKPLSLEINAQESEIEAAQWMPWGEYNKQPFVQNHELLRYMTDICSAKTNGHYEGFTPLPVSAPDLQGNLYFNNRDLSSRQ

SEQ ID NO: 20075 - DNA, 744 bp, Zea mays subsp. mays
  misc_feature (1)..(744): Ceres Seq. ID no. 14309388
aacctttattaaaacagagctcactctctctctctctctctctctagctccaatgggcttccccgtaggctacacagaggtcttcctcccgaagctcttcgtacaaacactctcaatcctcagtctcatcagaaccgtcgtcttctccctcttccgcttcttgggcctctccgacttcctcgaaatggaccaaacctggcccgactacacatcttacccgacccgaacacccgagctccgctcccccttctccgccctcctcatccgcgagatcttacccgtcatcaagttcgaagacgtgacgacctcttccggcgaagatctgccggagagctgcgccgtctgcctctacgagttcgaaggagagcaagagatccggtggctgagaaactgcagacatatattccaccggagctgtctcgaccgttggatggatcacgatcagaagacgtgtcctctctgtagaacgccgtttgttccggacgagatgcaagaagagtttaatcaacggctgtgggctgcttctggtgttcatgattttcacagtgagtactgtcccgtgacggaactatagagagacagagagacagcttccttccctcctcctttgtgtctttttttttttgacttttcacccctgtacttttaaattttctttttttcaccccttgctaacattagatttgccacgcttttatgtgtgtatgtaaatatacatatgaatgagatgagcaataaacattg

SEQ ID NO: 20076 - protein, 190 aa, Zea mays subsp. mays
  peptide (1)..(190): Ceres Seq. ID no. 14309389
  misc_feature (112)..(154): Pfam Name: RING finger Pfam Description: Zinc finger, C3HC4 type
  misc_feature (18)..(190): NCBI GI NO: 15233117 NR Description: BRH1 RING finger protein [Arabidopsis thaliana]
  misc_feature (18)..(175): NCBI GI NO: 15222553 NR Description: RING-H2 finger protein, putative
  misc_feature (18)..(175): NCBI GI NO: 21554155 NR Description: RING zinc finger protein-like
  misc_feature (18)..(175): NCBI GI NO: 15238072 NR Description: RING-H2 zinc finger protein, putative
  misc_feature (24)..(190): NCBI GI NO: 32488512 NR Description: OSJNBa0011J08.19
  misc_feature (18)..(175): NCBI GI NO: 11358777 NR Description: RING-H2 finger protein RHA1b
  misc_feature (18)..(175): NCBI GI NO: 15233350 NR Description: RING-H2 finger protein RHA1b
  misc_feature (18)..(183): NCBI GI NO: 15233352 NR Description: RING-H2 finger protein, putative
  misc_feature (18)..(183): NCBI GI NO: 11358776 NR Description: RING-H2 finger protein RHA1a
  misc_feature (90)..(161): NCBI GI NO: 18411282 NR Description: zinc finger
TFIKTELTLSLSLSLAPMGFPVGYTEVFLPKLFVQTLSILSLIRTVVFSLFRFLGLSDFLEMDQTWPDYTSYPTRTPELRSPFSALLIREILPVIKFEDVTTSSGEDLPESCAVCLYEFEGEQEIRWLRNCRHIFHRSCLDRWMDHDQKTCPLCRTPFVPDEMQEEFNQRLWAASGVHDFHSEYCPVTEL

SEQ ID NO: 20077 - protein, 173 aa, Zea mays subsp. mays
  peptide (1)..(173): Ceres Seq. ID no. 14309390
  misc_feature (95)..(137): Pfam Name: RING finger Pfam Description: Zinc finger, C3HC4 type
  misc_feature (1)..(173): NCBI GI NO: 15233117 NR Description: BRH1 RING finger protein [Arabidopsis thaliana]
  misc_feature (1)..(158): NCBI GI NO: 15222553 NR Description: RING-H2 finger protein, putative
  misc_feature (1)..(158): NCBI GI NO: 21554155 NR Description: RING zinc finger protein-like
  misc_feature (1)..(158): NCBI GI NO: 15238072 NR Description: RING-H2 zinc finger protein, putative
  misc_feature (7)..(173): NCBI GI NO: 32488512 NR Description: OSJNBa0011J08.19
  misc_feature (1)..(158): NCBI GI NO: 11358777 NR Description: RING-H2 finger protein RHA1b
  misc_feature (1)..(158): NCBI GI NO: 15233350 NR Description: RING-H2 finger protein RHA1b
  misc_feature (1)..(166): NCBI GI NO: 15233352 NR Description: RING-H2 finger protein, putative
  misc_feature (1)..(166): NCBI GI NO: 11358776 NR Description: RING-H2 finger protein RHA1a
  misc_feature (73)..(144): NCBI GI NO: 18411282 NR Description: zinc finger
MGFPVGYTEVFLPKLFVQTLSILSLIRTVVFSLFRFLGLSDFLEMDQTWPDYTSYPTRTPELRSPFSALLIREILPVIKFEDVTTSSGEDLPESCAVCLYEFEGEQEIRWLRNCRHIFHRSCLDRWMDHDQKTCPLCRTPFVPDEMQEEFNQRLWAASGVHDFHSEYCPVTEL

SEQ ID NO: 20078 - protein, 129 aa, Zea mays subsp. mays
  peptide (1)..(129): Ceres Seq. ID no. 14309391
  misc_feature (51)..(93): Pfam Name: RING finger Pfam Description: Zinc finger, C3HC4 type
  misc_feature (1)..(129): NCBI GI NO: 15233117 NR Description: BRH1 RING finger protein [Arabidopsis thaliana]
  misc_feature (1)..(114): NCBI GI NO: 15222553 NR Description: RING-H2 finger protein, putative
  misc_feature (1)..(114): NCBI GI NO: 21554155 NR Description: RING zinc finger protein-like
  misc_feature (1)..(114): NCBI GI NO: 15238072 NR Description: RING-H2 zinc finger protein, putative
  misc_feature (1)..(129): NCBI GI NO: 32488512 NR Description: OSJNBa0011J08.19
  misc_feature (1)..(114): NCBI GI NO: 11358777 NR Description: RING-H2 finger protein RHA1b
  misc_feature (1)..(114): NCBI GI NO: 15233350 NR Description: RING-H2 finger protein RHA1b
  misc_feature (1)..(122): NCBI GI NO: 15233352 NR Description: RING-H2 finger protein, putative
  misc_feature (1)..(122): NCBI GI NO: 11358776 NR Description: RING-H2 finger protein RHA1a
  misc_feature (29)..(100): NCBI GI NO: 18411282 NR Description: zinc finger
MDQTWPDYTSYPTRTPELRSPFSALLIREILPVIKFEDVTTSSGEDLPESCAVCLYEFEGEQEIRWLRNCRHIFHRSCLDRWMDHDQKTCPLCRTPFVPDEMQEEFNQRLWAASGVHDFHSEYCPVTEL

SEQ ID NO: 20079 - DNA, 1048 bp, Zea mays subsp. mays
  misc_feature (1)..(1048): Ceres Seq. ID no. 15177686
taaatcaacctccatgtccgatatatatctagcagagaagcaactcaaagttttaattttctagtagactagttttttttttttctcgtggatcattatctaagaagagaggaaatgttgggaatttttagcggagctatagtatcattgccggaagagctggtggccgccggcagcagaactccgtcgccgaagacaacaggagcggctctagtcaacaagtttgtcgagaaaaacccatccgctgtgaccgtacaagtcggagactatgtgcagcttgcgtacacccaccacaaagagagtcctctccggccaaggtcatttggggctaaggatgagatattctgcttgttccaaggctcacttgacaacctaggaagcttgaagcagcaatacgggcttgctaagaatacaaatgaggttcttttggtcattgaggcttacaagactctccgtgacagagctccataccctgccaaccatgtagtggctcatctaagtggcgacttcgcctttgtggtcttcgataaatcaacatccactctgtttgtagcttctgacctagaaggtaaggttccattgtattgggggataacagctgatgggtatgtggcatttgctgatgatgttgagttgctaaaaggtgcttgtggcaagtctcttgcttctttccctcaaggctgcttttactcgactgcgttaggtgggctaaggagctttgagaaccctaagaacaagatcactgccattcctgctaaagaggaagaaatttggggagccaccttcaaggtggaaggagcaacagttcttgcagattgaaaatcgaaactcttcaacagcaaaaaaataaaataaatcatgctgtgaaaacaagaagctgttctatgagttctttaagctatcaaccaaaacaagaagctgttctatgagttctttaagctatgtgatgatgtgatgatgtgtgtagtgttatctctctctcttgtcttttgcttctttgtatagccagcgtctgtttcttcctgttttaactgtattcgtcctaaat

SEQ ID NO: 20080 - protein, 234 aa, Zea mays subsp. mays
  peptide (1)..(234): Ceres Seq. ID no. 15177687
  misc_feature (1)..(234): NCBI GI NO: 15239658 NR Description: aluminium-induced protein - like
  misc_feature (1)..(227): NCBI GI NO: 7488440 NR Description: aluminum-induced protein - rape
  misc_feature (1)..(233): NCBI GI NO: 7488881 NR Description: hypothetical protein ARG10 - mung bean
  misc_feature (1)..(233): NCBI GI NO: 34541994 NR Description: Al-induced protein [Gossypium hirsutum]
  misc_feature (1)..(233): NCBI GI NO: 13958130 NR Description: aluminium induced protein [Avicennia marina]
  misc_feature (2)..(222): NCBI GI NO: 7489671 NR Description: hypothetical protein wali7 - wheat (fragment)
  misc_feature (1)..(230): NCBI GI NO: 20340249 NR Description: aluminum-induced protein-like protein
  misc_feature (1)..(230): NCBI GI NO: 15239993 NR Description: aluminum-induced protein-related
  misc_feature (1)..(227): NCBI GI NO: 30017570 NR Description: unknown protein
  misc_feature (1)..(227): NCBI GI NO: 32352176 NR Description: hypothetical protein
MLGIFSGAIVSLPEELVAAGSRTPSPKTTGAALVNKFVEKNPSAVTVQVGDYVQLAYTHHKESPLRPRSFGAKDEIFCLFQGSLDNLGSLKQQYGLAKNTNEVLLVIEAYKTLRDRAPYPANHVVAHLSGDFAFVVFDKSTSTLFVASDLEGKVPLYWGITADGYVAFADDVELLKGACGKSLASFPQGCFYSTALGGLRSFENPKNKITAIPAKEEEIWGATFKVEGATVLAD

SEQ ID NO: 20081 - DNA, 1042 bp, Zea mays subsp. mays
  misc_feature (1)..(1042): Ceres Seq. ID no. 15174327
aaaagcttcactgtaactctcccacaaccatttaaaacgccattacatttcaaccactcttttcatctctctctctcttctctttgaatctccgacatgacagacgacagagtttacccggcgtcgaaacctcccggcgcagcagccaccgccaacccaactttcccggcgaataaagctcagctctacaacgcaaaccgccccgcttaccgtcaaccagcctcccgccgccgcacgcatagccgcggatgctgctgccgctgctgctgctggacgactttcgtgatcatcctcctgatcctcctcgccgccgccgcgtccgccgtcgtgtacctaatctaccgtcctcgacaaccgagcttcaccgtctcttccctcaaagtctcctctctcaacttcacctccgccaaccacctcaccaccgccatatccctctccgtcatcgccaagaacccgaacaaaaacgtcgggttcaactacgacgtcaccgacatcacggtctacaaaacctctccaggagacgatgacgtcgtcatcggcaaaggctcgatcccgtcgtttgtccacgggaagaagaacacgactctgctgaaatcgacgatcgggagtcccccgggagatcttgatgagctgtcggcggggaagcttaagggagagctgaaggcgaagaaagcggtggcgattaagattgtgcttgatacgaaggtgaaggtgaagatggggtctgtgaaaagtcctaagtcggggattagggttacttgcgaagggattaaagcggcggctccgtccgggaagaaggcgacgacggctgctacctccgccgctaagtgtaaggttgatcttaggatcaagatctggaaattcactttttaaccgctgggtaaaaaaggaaatgtaattcacgttcgtagtttttttttcatctttccattgtttcaattttcgtttcttcttaatttgatttcatatacagctcttcgattcccgtaagactttttttttttggtttatgtaaatgaggtataatatatttgttgtgttc

SEQ ID NO: 20082 - protein, 258 aa, Zea mays subsp. mays
  peptide (1)..(258): Ceres Seq. ID no. 15174328
  misc_feature (1)..(258): NCBI GI NO: 18394509 NR Description: expressed protein [Arabidopsis thaliana]
  misc_feature (1)..(258): NCBI GI NO: 11762174 NR Description: At1g17620 [Arabidopsis thaliana]
  misc_feature (12)..(258): NCBI GI NO: 15239804 NR Description: expressed protein [Arabidopsis thaliana]
  misc_feature (12)..(258): NCBI GI NO: 21536796 NR Description: unknown [Arabidopsis thaliana]
  misc_feature (14)..(258): NCBI GI NO: 34914304 NR Description: B1151A10.19
  misc_feature (8)..(231): NCBI GI NO: 34903552 NR Description: P0001B06.28
  misc_feature (1)..(251): NCBI GI NO: 10178216 NR Description: gb|AAF23842
  misc_feature (1)..(251): NCBI GI NO: 15239459 NR Description: hypothetical protein [Arabidopsis thaliana]
  misc_feature (34)..(255): NCBI GI NO: 34909192 NR Description: P0425G02.19
  misc_feature (1)..(223): NCBI GI NO: 15242167 NR Description: hypothetical protein [Arabidopsis thaliana]
MTDDRVYPASKPPGAAATANPTFPANKAQLYNANRPAYRQPASRRRTHSRGCCCRCCCWTTFVIILLILLAAAASAVVYLIYRPRQPSFTVSSLKVSSLNFTSANHLTTAISLSVIAKNPNKNVGFNYDVTDITVYKTSPGDDDVVIGKGSIPSFVHGKKNTTLLKSTIGSPPGDLDELSAGKLKGELKAKKAVAIKIVLDTKVKVKMGSVKSPKSGIRVTCEGIKAAAPSGKKATTAATSAAKCKVDLRIKIWKFTF

SEQ ID NO: 20083 - DNA, 1079 bp, Zea mays subsp. mays
  misc_feature (1)..(1079): Ceres Seq. ID no. 15178850
attttcttctctctgtaaaataaaaataaacttaaaataaacaaaacagacaaaataaacattttggttttgtttttgggtattaatacttcttttttgtttgctttcctcgtaaaacccatgacccctttcttcctctcttgcttctaatcttcaagaaaaatgccttcttttgcttttggatctcatcaccatttggccaatcccactgactcgccgtacaccgtcgaaattagcatcgacggcgactcctccgacttagattccttgtctgaggtcgacttagagagcggcggtgtgacgaagctgcattccggtggtggtaagaagaggaggacgaggaggagaaagaagaagaagaaaaggaagaagaaagagagtagagattgcaggatctgccatctgcctttagagactactaaaaaagcagatgaggaaggtgaagattctgatgaacaagaagaacaaggtgaagaagaagatgaagcaagagacggtgaagaagaggaagagtattatggtttgcctttgcaattgggttgttcttgtaaaggtgatttgggtgtagctcacagtaagtgtgctgaaacttggttcaagatcaaaggaaacatgacatgtgagatatgcggggcaatggctataaacgtagctggggaacagtcaaacccagagagcaccgcctctacacattcacaagtggctgcaggacaaactcagagtagtcagacagagccaaggggaatctggcatggtcgccgtgtaatgaacttcttacttgccgctatggtctttgccttcattgtctcttggctttttcacttcaaagtcctcaagtgaaacaaactccatccatcccaccctctctctcttctcctggctcttgagccgcttgcaatcacttcatcaaatccctcctgttgcctgattgttcgttcacacgttttgtagctgtaaaaacttgttagtttttagattgttgttgtcacttgtgagctttacatcttcttgtataatatccatctctactcaggcttggtctaaacttgtgtgcaatcaagactagggtcttagctctt

SEQ ID NO: 20084 - protein, 225 aa, Zea mays subsp. mays
  peptide (1)..(225): Ceres Seq. ID no. 15178851
  misc_feature (76)..(156): Pfam Name: RING finger Pfam Description: Zinc finger, C3HC4 type
  misc_feature (1)..(225): NCBI GI NO: 21537129 NR Description: unknown [Arabidopsis thaliana]
  misc_feature (1)..(225): NCBI GI NO: 15237796 NR Description: zinc finger
  misc_feature (120)..(225): NCBI GI NO: 9759231 NR Description: gb|AAD32776
  misc_feature (1)..(85): NCBI GI NO: 9759231 NR Description: gb|AAD32776
  misc_feature (52)..(223): NCBI GI NO: 15239254 NR Description: zinc finger
  misc_feature (120)..(223): NCBI GI NO: 34908318 NR Description: P0529H11.12
  misc_feature (120)..(223): NCBI GI NO: 15224415 NR Description: zinc finger
  misc_feature (103)..(163): NCBI GI NO: 29725746 NR Description: hypothetical protein [Arabidopsis thaliana]
  misc_feature (51)..(170): NCBI GI NO: 18406816 NR Description: zinc finger
  misc_feature (51)..(170): NCBI GI NO: 21593046 NR Description: unknown [Arabidopsis thaliana]
MPSFAFGSHHHLANPTDSPYTVEISIDGDSSDLDSLSEVDLESGGVTKLHSGGGKKRRTRRRKKKKKRKKKESRDCRICHLPLETTKKADEEGEDSDEQEEQGEEEDEARDGEEEEEYYGLPLQLGCSCKGDLGVAHSKCAETWFKIKGNMTCEICGAMAINVAGEQSNPESTASTHSQVAAGQTQSSQTEPRGIWHGRRVMNFLLAAMVFAFIVSWLFHFKVLK

SEQ ID NO: 20085 - DNA, 1134 bp, Zea mays subsp. mays
  misc_feature (1)..(1134): Ceres Seq. ID no. 15174329
ataaaactaagaggaagatgaagacttatttacttctccttctcatcttctcactcctcttatcatattcctccggccagcaatgcggtcgtcaagcccaaggagcactctgccccaacggtctatgctgcagcgagtacggatggtgcggcaccaccgaagcttactgtgggcgtggttgccaaagccagtgcactcccactcctcccactcccactcccactcctcctagtcccacccctcctaggcccactccacctggtcccagcggggatctttcgggcatcatttcaagagatcagttctataaaatgcttaagcacatgaacgataacgcttgtcctgctagagggttcttcacttacgacgccttcatcaccgccgctaagtttttccctagtttcgggaacaccggagaccttgccacaaggaagaaggagatcgcagccttcttcggccaaacttcccacgaaaccactggtgggtggacggatgcaccagacggagcaaatacatggggctactgtttcaaggacgaaattggcaaaagcaatccctactgtgatagcaacaacctcgagtggccatgcgcacctggccaattttactacggaagaggaccaatgatgctgtcttggaactacaattatggacagtgcgggagagacctaggactcgacttactacgcaggccagctattgcgtccagcgacccagtgatcgctttcgaaaccgcaatttggttctggatgactcctcaggctcctaaaccgtcttgccacgatgtgatcaccgaccagtggcagccgtcggctgccgacatttcagcggggagattaccaggttatggagtgattaccaatatcattaacggtggattagagtgtgctggtcgcaatgtcgcacaggtcgaagatcggatatcgttttatacgaggtattgtggcatgtttggtgttgatcctggaagtaatgttgactgtgacaaacaaaggccgtttagtgaaggaattaacgttttcttggatgctgctatctaataaggagtgttaaaaaaaaaaaagagtgttaatgcagctttgttgtatccatgcaataagagaatatcaaactaaataaaactccttttatgat

SEQ ID NO: 20086 - protein, 345 aa, Zea mays subsp. mays
  peptide (1)..(345): Ceres Seq. ID no. 15174330
  misc_feature (25)..(64): Pfam Name: Pfam Description:  Chitin recognition protein
  misc_feature (27)..(345): NCBI GI NO: 6048743 NR Description: chitinase [Brassica juncea]
  misc_feature (5)..(345): NCBI GI NO: 7798646 NR Description: class I chitinase [Arabis fecunda]
  misc_feature (1)..(345): NCBI GI NO: 5689118 NR Description: basic endochitinase [Arabidopsis thaliana]
  misc_feature (1)..(345): NCBI GI NO: 5689134 NR Description: basic endochitinase [Arabis gemmifera]
  misc_feature (1)..(345): NCBI GI NO: 320556 NR Description: chitinase (EC 3
  misc_feature (1)..(345): NCBI GI NO: 5689110 NR Description: basic endochitinase [Arabidopsis thaliana]
  misc_feature (1)..(345): NCBI GI NO: 5689102 NR Description: basic endochitinase [Arabidopsis thaliana]
  misc_feature (1)..(345): NCBI GI NO: 5689130 NR Description: basic endochitinase [Arabidopsis thaliana]
  misc_feature (6)..(345): NCBI GI NO: 18399632 NR Description: glycosyl hydrolase family 19 (basic endochitinase)
  misc_feature (30)..(337): NCBI GI NO: 7798656 NR Description: class I chitinase
KTKRKMKTYLLLLLIFSLLLSYSSGQQCGRQAQGALCPNGLCCSEYGWCGTTEAYCGRGCQSQCTPTPPTPTPTPPSPTPPRPTPPGPSGDLSGIISRDQFYKMLKHMNDNACPARGFFTYDAFITAAKFFPSFGNTGDLATRKKEIAAFFGQTSHETTGGWTDAPDGANTWGYCFKDEIGKSNPYCDSNNLEWPCAPGQFYYGRGPMMLSWNYNYGQCGRDLGLDLLRRPAIASSDPVIAFETAIWFWMTPQAPKPSCHDVITDQWQPSAADISAGRLPGYGVITNIINGGLECAGRNVAQVEDRISFYTRYCGMFGVDPGSNVDCDKQRPFSEGINVFLDAAI

SEQ ID NO: 20087 - protein, 340 aa, Zea mays subsp. mays
  peptide (1)..(340): Ceres Seq. ID no. 15174331
  misc_feature (20)..(59): Pfam Name: Pfam Description:  Chitin recognition protein
  misc_feature (22)..(340): NCBI GI NO: 6048743 NR Description: chitinase [Brassica juncea]
  misc_feature (1)..(340): NCBI GI NO: 7798646 NR Description: class I chitinase [Arabis fecunda]
  misc_feature (1)..(340): NCBI GI NO: 5689118 NR Description: basic endochitinase [Arabidopsis thaliana]
  misc_feature (1)..(340): NCBI GI NO: 5689134 NR Description: basic endochitinase [Arabis gemmifera]
  misc_feature (1)..(340): NCBI GI NO: 320556 NR Description: chitinase (EC 3
  misc_feature (1)..(340): NCBI GI NO: 5689110 NR Description: basic endochitinase [Arabidopsis thaliana]
  misc_feature (1)..(340): NCBI GI NO: 5689102 NR Description: basic endochitinase [Arabidopsis thaliana]
  misc_feature (1)..(340): NCBI GI NO: 5689130 NR Description: basic endochitinase [Arabidopsis thaliana]
  misc_feature (1)..(340): NCBI GI NO: 18399632 NR Description: glycosyl hydrolase family 19 (basic endochitinase)
  misc_feature (25)..(332): NCBI GI NO: 7798656 NR Description: class I chitinase
MKTYLLLLLIFSLLLSYSSGQQCGRQAQGALCPNGLCCSEYGWCGTTEAYCGRGCQSQCTPTPPTPTPTPPSPTPPRPTPPGPSGDLSGIISRDQFYKMLKHMNDNACPARGFFTYDAFITAAKFFPSFGNTGDLATRKKEIAAFFGQTSHETTGGWTDAPDGANTWGYCFKDEIGKSNPYCDSNNLEWPCAPGQFYYGRGPMMLSWNYNYGQCGRDLGLDLLRRPAIASSDPVIAFETAIWFWMTPQAPKPSCHDVITDQWQPSAADISAGRLPGYGVITNIINGGLECAGRNVAQVEDRISFYTRYCGMFGVDPGSNVDCDKQRPFSEGINVFLDAAI

SEQ ID NO: 20088 - protein, 242 aa, Zea mays subsp. mays
  peptide (1)..(242): Ceres Seq. ID no. 15174332
  misc_feature (1)..(242): NCBI GI NO: 6048743 NR Description: chitinase [Brassica juncea]
  misc_feature (1)..(242): NCBI GI NO: 7798646 NR Description: class I chitinase [Arabis fecunda]
  misc_feature (1)..(242): NCBI GI NO: 5689118 NR Description: basic endochitinase [Arabidopsis thaliana]
  misc_feature (1)..(242): NCBI GI NO: 5689134 NR Description: basic endochitinase [Arabis gemmifera]
  misc_feature (1)..(242): NCBI GI NO: 320556 NR Description: chitinase (EC 3
  misc_feature (1)..(242): NCBI GI NO: 5689110 NR Description: basic endochitinase [Arabidopsis thaliana]
  misc_feature (1)..(242): NCBI GI NO: 5689102 NR Description: basic endochitinase [Arabidopsis thaliana]
  misc_feature (1)..(242): NCBI GI NO: 5689130 NR Description: basic endochitinase [Arabidopsis thaliana]
  misc_feature (1)..(242): NCBI GI NO: 18399632 NR Description: glycosyl hydrolase family 19 (basic endochitinase)
  misc_feature (1)..(234): NCBI GI NO: 7798656 NR Description: class I chitinase
MLKHMNDNACPARGFFTYDAFITAAKFFPSFGNTGDLATRKKEIAAFFGQTSHETTGGWTDAPDGANTWGYCFKDEIGKSNPYCDSNNLEWPCAPGQFYYGRGPMMLSWNYNYGQCGRDLGLDLLRRPAIASSDPVIAFETAIWFWMTPQAPKPSCHDVITDQWQPSAADISAGRLPGYGVITNIINGGLECAGRNVAQVEDRISFYTRYCGMFGVDPGSNVDCDKQRPFSEGINVFLDAAI

SEQ ID NO: 20089 - DNA, 1920 bp, Zea mays subsp. mays
  misc_feature (1)..(1920): Ceres Seq. ID no. 15177463
agaacaaatatgagtctagactgtgatctcactgttctagaagagctaacatcaaatgcgaagcaaatacaagacgatgtattgaccaagatactcaaagctaacgcgaacacagtgtacctcggacgttttctccaggggagtgcggataaagagctgttcaagaagaacgtacccgtggtgagctatgaagatcttaagccttatctcgaccgtgtcgcaaacggagaaccctcggatgtcatttcgggggaacccatcactgcgtttttagtgagctctggaacttcaagtgggaatcaaaagatatttcctgcgaacaacatcttctttaagaatattcaaatcttctatacgctaggctatctcgttatgtccaagcatttcaatggttataagcaaggaaaggtgattaggtttacgttcattcatccgacatccacaactccttgtggtttgcctcttgctcctacggtaactagcttcacaaagagtgaattttttaggagcctgccaaaaaatagtccaagcccctaccagatcatactgtgtccggacgccaaacagagtatgtactgtcaacttctctgtggtcttgtccagagagatgaggttgtaagtgttggtgctgtgttcgcttctgttttggttcaagttatccattttcttgaaaattactggaaagagttggctagtaatatcagatgtggtcatgtcagcgagtggatcaccgaccttagctgtagagagaccgtcactaccatccttgttgagccaaatccagaattggcagatctaatcgaaaacgagtgccgacaagaatcttggcaaggtatagtttcacgactttggcctaaagcctaatgcattgatgctatttttacaggaagcatggctcaatacatcccagcattggagttctacactaataaactgcctctagtctctaaatcttatgcatcttctgaagcatttttcgggttaaatttggaacctctaagcaaacatgtgtcctacacatttctacccaacatgtcatacttcgagttcatagatgtcgatggaggaaccgagggcgagattgttgatcttgtgaatgtgaagttgggtcaccactatgagcccttggtcacaaacttttcaggtttacacagatgtagagtgggggatgttttaaaggtcactggtttttacaatatggcacctcagttcagatttgtacgtagaaaaaatgcggctttaagcgttcacctagagtcaacgactgaagaagatcttttaaaagcgttggctcgtgcgacactagttcttgaatcttcggatttagtgatcatgggtttcacatgctatgccgatatctccactgttccgggtcactatgttttttacttggaactcaaatcaaaagtcaacaataataatagcactaatgttctatcacttgataacaaggtattggtggaatgttgttgtgtcatggaggaatcattgaatagtttttataggctcttcaggagcaaaaatggttcgattggagctccagagataagagtggtgcaagagggaacgtttggttctctcatggagttttttgtctcccgaggtgcttctataactcaatacaagacacctatatgcataaactctgctgaggctttaaaggttcttgaagacaaggttcttgctcggttcttcagtgacaaatcccctccttatctgatcctggcgtgatgatgaccaccaccaaaaaaaactacatcaccctaataatgaagcaataaatttgtctggtgagtggtatgagtgttttataattccttgttgtttaattatgtcttgtgtgctttttctcttttgtcgtcatgtttactgttgtgggtgtttcagttaaatgtgattgatgcattcttatgttttttg

SEQ ID NO: 20090 - protein, 287 aa, Zea mays subsp. mays
  peptide (1)..(287): Ceres Seq. ID no. 15177464
  misc_feature (9)..(287): Pfam Name: Pfam Description:  GH3 auxin-responsive promoter
  misc_feature (4)..(287): NCBI GI NO: 15242095 NR Description: auxin-responsive GH3-related protein
  misc_feature (4)..(287): NCBI GI NO: 15221933 NR Description: Nt-gh3 deduced protein -related
  misc_feature (202)..(287): NCBI GI NO: 15221934 NR Description: Nt-gh3 deduced protein -related
  misc_feature (4)..(154): NCBI GI NO: 15221934 NR Description: Nt-gh3 deduced protein -related
  misc_feature (13)..(287): NCBI GI NO: 15240601 NR Description: auxin-responsive - like protein
  misc_feature (10)..(287): NCBI GI NO: 15220661 NR Description: GH3-related auxin-regulated protein
  misc_feature (7)..(287): NCBI GI NO: 15217844 NR Description: auxin-regulated GH3 protein -related
  misc_feature (10)..(287): NCBI GI NO: 15240613 NR Description: auxin reponsive - like protein
  misc_feature (2)..(287): NCBI GI NO: 30684377 NR Description: auxin reponsive - like protein
  misc_feature (10)..(287): NCBI GI NO: 15240608 NR Description: auxin-responsive - like protein
RTNMSLDCDLTVLEELTSNAKQIQDDVLTKILKANANTVYLGRFLQGSADKELFKKNVPVVSYEDLKPYLDRVANGEPSDVISGEPITAFLVSSGTSSGNQKIFPANNIFFKNIQIFYTLGYLVMSKHFNGYKQGKVIRFTFIHPTSTTPCGLPLAPTVTSFTKSEFFRSLPKNSPSPYQIILCPDAKQSMYCQLLCGLVQRDEVVSVGAVFASVLVQVIHFLENYWKELASNIRCGHVSEWITDLSCRETVTTILVEPNPELADLIENECRQESWQGIVSRLWPKA

SEQ ID NO: 20091 - protein, 284 aa, Zea mays subsp. mays
  peptide (1)..(284): Ceres Seq. ID no. 15177465
  misc_feature (6)..(284): Pfam Name: Pfam Description:  GH3 auxin-responsive promoter
  misc_feature (1)..(284): NCBI GI NO: 15242095 NR Description: auxin-responsive GH3-related protein
  misc_feature (1)..(284): NCBI GI NO: 15221933 NR Description: Nt-gh3 deduced protein -related
  misc_feature (199)..(284): NCBI GI NO: 15221934 NR Description: Nt-gh3 deduced protein -related
  misc_feature (1)..(151): NCBI GI NO: 15221934 NR Description: Nt-gh3 deduced protein -related
  misc_feature (10)..(284): NCBI GI NO: 15240601 NR Description: auxin-responsive - like protein
  misc_feature (7)..(284): NCBI GI NO: 15220661 NR Description: GH3-related auxin-regulated protein
  misc_feature (4)..(284): NCBI GI NO: 15217844 NR Description: auxin-regulated GH3 protein -related
  misc_feature (7)..(284): NCBI GI NO: 15240613 NR Description: auxin reponsive - like protein
  misc_feature (1)..(284): NCBI GI NO: 30684377 NR Description: auxin reponsive - like protein
  misc_feature (7)..(284): NCBI GI NO: 15240608 NR Description: auxin-responsive - like protein
MSLDCDLTVLEELTSNAKQIQDDVLTKILKANANTVYLGRFLQGSADKELFKKNVPVVSYEDLKPYLDRVANGEPSDVISGEPITAFLVSSGTSSGNQKIFPANNIFFKNIQIFYTLGYLVMSKHFNGYKQGKVIRFTFIHPTSTTPCGLPLAPTVTSFTKSEFFRSLPKNSPSPYQIILCPDAKQSMYCQLLCGLVQRDEVVSVGAVFASVLVQVIHFLENYWKELASNIRCGHVSEWITDLSCRETVTTILVEPNPELADLIENECRQESWQGIVSRLWPKA

SEQ ID NO: 20092 - protein, 279 aa, Zea mays subsp. mays
  peptide (1)..(279): Ceres Seq. ID no. 15177466
  misc_feature (1)..(258): Pfam Name: Pfam Description:  GH3 auxin-responsive promoter
  misc_feature (1)..(272): NCBI GI NO: 15242095 NR Description: auxin-responsive GH3-related protein
  misc_feature (1)..(274): NCBI GI NO: 15221933 NR Description: Nt-gh3 deduced protein -related
  misc_feature (1)..(274): NCBI GI NO: 15221934 NR Description: Nt-gh3 deduced protein -related
  misc_feature (1)..(269): NCBI GI NO: 15240601 NR Description: auxin-responsive - like protein
  misc_feature (1)..(269): NCBI GI NO: 15220661 NR Description: GH3-related auxin-regulated protein
  misc_feature (1)..(64): NCBI GI NO: 15217844 NR Description: auxin-regulated GH3 protein -related
  misc_feature (55)..(275): NCBI GI NO: 15217844 NR Description: auxin-regulated GH3 protein -related
  misc_feature (1)..(275): NCBI GI NO: 15240613 NR Description: auxin reponsive - like protein
  misc_feature (1)..(275): NCBI GI NO: 30684377 NR Description: auxin reponsive - like protein
  misc_feature (1)..(275): NCBI GI NO: 15240608 NR Description: auxin-responsive - like protein
MAQYIPALEFYTNKLPLVSKSYASSEAFFGLNLEPLSKHVSYTFLPNMSYFEFIDVDGGTEGEIVDLVNVKLGHHYEPLVTNFSGLHRCRVGDVLKVTGFYNMAPQFRFVRRKNAALSVHLESTTEEDLLKALARATLVLESSDLVIMGFTCYADISTVPGHYVFYLELKSKVNNNNSTNVLSLDNKVLVECCCVMEESLNSFYRLFRSKNGSIGAPEIRVVQEGTFGSLMEFFVSRGASITQYKTPICINSAEALKVLEDKVLARFFSDKSPPYLILA

SEQ ID NO: 20093 - DNA, 903 bp, Zea mays subsp. mays
  misc_feature (1)..(903): Ceres Seq. ID no. 15179471
agaaaccgttcgtctcccccccctctctatctctctctagatggctcgttccctctcccttccactttctctctctaaaaaccgactcacagcagctgcagcctccttcctcccttcatcgcacctcttatccatccgatctcaatcctccgaccgtcgcggcgatctgtacgaattcgacatcgccgcgtcgcaatcgccctcggatccgttaattcagaagctagaggacgccgttcaccggatagtcgtccgaagatcggcacccgattggctcccgtttgttcccggtgcgtcgtactgggtccctcctcctggatctggatctcagactcacgggatcgctcagctcgtcgcgaagctggctaatccgttaacggacgaagaatctctctccaccaattcgtctcgcggatggccttcctctgattatttccttaaaggtaaaaaggcctagctttgtggtgtaacaggtgtgcagcctctattgatggagactaagaccgaggcgacttcaaatacagagtctcactccgaggatgaggaagggtaaagagaatgctactttgaagaatcaaccggcgcgtttgggtgggttgttacttaaactaaagatagaagaaataatgaagctagatctattggatctgtagattgttatgaatatgagccggggtgattctgatgacgactgaaccaagtcaagtgcaaagactcgccatatagactgctttactaatcctgaaatgtaaaaaaaaaagaataatagtagttagttgtagccattttacctctgtttagtgtaatcttttccttttttaaaaagctgttgtatatatttctgtttcattgctctttcagttatgtaaccagtttatgataaactcgaatgaataaaagggg

SEQ ID NO: 20094 - protein, 138 aa, Zea mays subsp. mays
  peptide (1)..(138): Ceres Seq. ID no. 15179472
  misc_feature (1)..(138): NCBI GI NO: 18394407 NR Description: expressed protein [Arabidopsis thaliana]
  misc_feature (1)..(135): NCBI GI NO: 30685027 NR Description: expressed protein [Arabidopsis thaliana]
  misc_feature (1)..(138): NCBI GI NO: 25364101 NR Description: hypothetical protein F9K20.6
  misc_feature (1)..(138): NCBI GI NO: 18412160 NR Description: expressed protein [Arabidopsis thaliana]
  misc_feature (1)..(138): NCBI GI NO: 21592720 NR Description: unknown [Arabidopsis thaliana]
  misc_feature (1)..(109): NCBI GI NO: 38175698 NR Description: unknown protein
  misc_feature (111)..(136): NCBI GI NO: 38175698 NR Description: unknown protein
  misc_feature (45)..(133): NCBI GI NO: 14423398 NR Description: Unknown protein [Arabidopsis thaliana]
  misc_feature (45)..(133): NCBI GI NO: 18398961 NR Description: expressed protein [Arabidopsis thaliana]
  misc_feature (1)..(136): NCBI GI NO: 38346553 NR Description: OSJNBa0035M09.14
MARSLSLPLSLSKNRLTAAAASFLPSSHLLSIRSQSSDRRGDLYEFDIAASQSPSDPLIQKLEDAVHRIVVRRSAPDWLPFVPGASYWVPPPGSGSQTHGIAQLVAKLANPLTDEESLSTNSSRGWPSSDYFLKGKKA

SEQ ID NO: 20095 - protein, 70 aa, Zea mays subsp. mays
  peptide (1)..(70): Ceres Seq. ID no. 15179473
KPFVSPPSLSLSRWLVPSPFHFLSLKTDSQQLQPPSSLHRTSYPSDLNPPTVAAICTNSTSPRRNRPRIR

SEQ ID NO: 20096 - DNA, 1358 bp, Zea mays subsp. mays
  misc_feature (1)..(1358): Ceres Seq. ID no. 15179609
aacaaaaagagagaagaaacatctctcctctctttgaacaagaacatcaagaacaatggcttgtactaatctaacaacaatgtgggtttcatcaaaactatctatttctgattcctcttccttgtccttccgttctattctcaacccacttcctctcccaaaccacaactcatctccttcaagatcttcctctgtctctccaatccagtcctctcttcgtgagctccgagaccgtatcgactcagtcaaaaacactcagaagatcactgaagccatgaagcttgtcgctgcagcaaaagtcaggagagctcaggaagctgtggtcaacggccgaccattctcagaaaccctagttgaagttctttacaacatcaacgaacagcttcaaaccgatgatatagatgtgcccttaaccaaaatcagaccggttaagaaagttgcactcgttgttgtaacaggagaccgaggattatgcggtggattcaacaacttcatcatcaagaaagcagaggcaaggatcaaagagcttcaaggcctaggtcttgactacacagtcattagcgtggggaaaaagggaaactcttatttcctccgtcgtccttacatccccgtcgacaagtacctcgaagccggaaccttaccgaccgcgaaagaagctcaagctgtagctgatgatgtcttctctctgtttataagcgaagaggtcgacaaagtcgagctcttgtacacaaagtttgtctctttggtcaaatcagaacccgtgatccacacgctactgcctctatctcccaaaggagagatctgtgacattaatgggaactgtgtggacgctgctgaagacgagctcttcaggttaacgaccaaagaagggaaacttactgttgaaagagagacttttcggacaccaactgctgatttctcaccgatcttgcagttcgagcaagaccctgttcagattcttgatgctttgttgcctctgtatcttaacagtcagattctaagggctttacaggagtcattggcgagtgagcttgcagctagaatgagtgcaatgagtagtgcttcagataatgcttctgatcttaagaagtcgctttctatggtgtataatagaaagcgtcaagctaagatcactggtgagatccttgagattgttgctggagctaatgcacaggcttgatttgtttggaacctctttgatatatgagccgactcttcctttttttttttttttgcgtttttggtgttataatgtttaatttgtcaagaactcgtaatgatgtttttataaataatgcagttacaagcataattcggttgtatttgttttggcctttcattggataaatatttaattt

SEQ ID NO: 20097 - protein, 374 aa, Zea mays subsp. mays
  peptide (1)..(374): Ceres Seq. ID no. 15179610
  misc_feature (52)..(373): Pfam Name: Pfam Description:  ATP synthase
  misc_feature (1)..(373): NCBI GI NO: 18412632 NR Description: ATP synthase gamma chain 1, chloroplast
  misc_feature (1)..(372): NCBI GI NO: 231610 NR Description: ATP synthase gamma chain, chloroplast precursor
  misc_feature (1)..(369): NCBI GI NO: 114640 NR Description: ATP synthase gamma chain, chloroplast precursor
  misc_feature (74)..(373): NCBI GI NO: 5708095 NR Description: ATP synthase gamma chain, chloroplast precursor
  misc_feature (22)..(372): NCBI GI NO: 114643 NR Description: ATP synthase gamma chain, chloroplast precursor
  misc_feature (48)..(372): NCBI GI NO: 755801 NR Description: ATP synthase [Spinacia oleracea]
  misc_feature (1)..(374): NCBI GI NO: 27818005 NR Description: putative ATP synthase gamma chain 1, chloroplast
  misc_feature (5)..(372): NCBI GI NO: 15218281 NR Description: ATP synthase gamma-subunit -related
  misc_feature (50)..(372): NCBI GI NO: 114638 NR Description: ATP synthase gamma chain, chloroplast precursor
  misc_feature (40)..(372): NCBI GI NO: 228698 NR Description: CF1 ATP synthase:SUBUNIT=gamma
MACTNLTTMWVSSKLSISDSSSLSFRSILNPLPLPNHNSSPSRSSSVSPIQSSLRELRDRIDSVKNTQKITEAMKLVAAAKVRRAQEAVVNGRPFSETLVEVLYNINEQLQTDDIDVPLTKIRPVKKVALVVVTGDRGLCGGFNNFIIKKAEARIKELQGLGLDYTVISVGKKGNSYFLRRPYIPVDKYLEAGTLPTAKEAQAVADDVFSLFISEEVDKVELLYTKFVSLVKSEPVIHTLLPLSPKGEICDINGNCVDAAEDELFRLTTKEGKLTVERETFRTPTADFSPILQFEQDPVQILDALLPLYLNSQILRALQESLASELAARMSAMSSASDNASDLKKSLSMVYNRKRQAKITGEILEIVAGANAQA

SEQ ID NO: 20098 - protein, 366 aa, Zea mays subsp. mays
  peptide (1)..(366): Ceres Seq. ID no. 15179611
  misc_feature (44)..(365): Pfam Name: Pfam Description:  ATP synthase
  misc_feature (1)..(365): NCBI GI NO: 18412632 NR Description: ATP synthase gamma chain 1, chloroplast
  misc_feature (1)..(364): NCBI GI NO: 231610 NR Description: ATP synthase gamma chain, chloroplast precursor
  misc_feature (1)..(361): NCBI GI NO: 114640 NR Description: ATP synthase gamma chain, chloroplast precursor
  misc_feature (66)..(365): NCBI GI NO: 5708095 NR Description: ATP synthase gamma chain, chloroplast precursor
  misc_feature (14)..(364): NCBI GI NO: 114643 NR Description: ATP synthase gamma chain, chloroplast precursor
  misc_feature (40)..(364): NCBI GI NO: 755801 NR Description: ATP synthase [Spinacia oleracea]
  misc_feature (1)..(366): NCBI GI NO: 27818005 NR Description: putative ATP synthase gamma chain 1, chloroplast
  misc_feature (1)..(364): NCBI GI NO: 15218281 NR Description: ATP synthase gamma-subunit -related
  misc_feature (42)..(364): NCBI GI NO: 114638 NR Description: ATP synthase gamma chain, chloroplast precursor
  misc_feature (32)..(364): NCBI GI NO: 228698 NR Description: CF1 ATP synthase:SUBUNIT=gamma
MWVSSKLSISDSSSLSFRSILNPLPLPNHNSSPSRSSSVSPIQSSLRELRDRIDSVKNTQKITEAMKLVAAAKVRRAQEAVVNGRPFSETLVEVLYNINEQLQTDDIDVPLTKIRPVKKVALVVVTGDRGLCGGFNNFIIKKAEARIKELQGLGLDYTVISVGKKGNSYFLRRPYIPVDKYLEAGTLPTAKEAQAVADDVFSLFISEEVDKVELLYTKFVSLVKSEPVIHTLLPLSPKGEICDINGNCVDAAEDELFRLTTKEGKLTVERETFRTPTADFSPILQFEQDPVQILDALLPLYLNSQILRALQESLASELAARMSAMSSASDNASDLKKSLSMVYNRKRQAKITGEILEIVAGANAQA

SEQ ID NO: 20099 - protein, 301 aa, Zea mays subsp. mays
  peptide (1)..(301): Ceres Seq. ID no. 15179612
  misc_feature (1)..(300): Pfam Name: Pfam Description:  ATP synthase
  misc_feature (1)..(300): NCBI GI NO: 18412632 NR Description: ATP synthase gamma chain 1, chloroplast
  misc_feature (1)..(299): NCBI GI NO: 231610 NR Description: ATP synthase gamma chain, chloroplast precursor
  misc_feature (1)..(296): NCBI GI NO: 114640 NR Description: ATP synthase gamma chain, chloroplast precursor
  misc_feature (1)..(300): NCBI GI NO: 5708095 NR Description: ATP synthase gamma chain, chloroplast precursor
  misc_feature (1)..(299): NCBI GI NO: 114643 NR Description: ATP synthase gamma chain, chloroplast precursor
  misc_feature (1)..(299): NCBI GI NO: 755801 NR Description: ATP synthase [Spinacia oleracea]
  misc_feature (1)..(301): NCBI GI NO: 27818005 NR Description: putative ATP synthase gamma chain 1, chloroplast
  misc_feature (1)..(299): NCBI GI NO: 15218281 NR Description: ATP synthase gamma-subunit -related
  misc_feature (1)..(299): NCBI GI NO: 114638 NR Description: ATP synthase gamma chain, chloroplast precursor
  misc_feature (1)..(299): NCBI GI NO: 228698 NR Description: CF1 ATP synthase:SUBUNIT=gamma
MKLVAAAKVRRAQEAVVNGRPFSETLVEVLYNINEQLQTDDIDVPLTKIRPVKKVALVVVTGDRGLCGGFNNFIIKKAEARIKELQGLGLDYTVISVGKKGNSYFLRRPYIPVDKYLEAGTLPTAKEAQAVADDVFSLFISEEVDKVELLYTKFVSLVKSEPVIHTLLPLSPKGEICDINGNCVDAAEDELFRLTTKEGKLTVERETFRTPTADFSPILQFEQDPVQILDALLPLYLNSQILRALQESLASELAARMSAMSSASDNASDLKKSLSMVYNRKRQAKITGEILEIVAGANAQA

SEQ ID NO: 20100 - DNA, 774 bp, Zea mays subsp. mays
  misc_feature (1)..(774): Ceres Seq. ID no. 14309373
aaacataaacaggacttgttcaagtgtcagatatttcgagaagaagaagaagagatggagagggagccgacaagagtgatggtggctgtgaatgaatcgacgatcaaagggaagccccacccttcgataagcagcaaaagagctttcgaatggactctggagaagatgatccgatccaacacatccgatttcaagattctcttgctccatgtacatgttgtcgacgaagacggttttgatgaggtagacagcatatatgcctctcccgatgatttcaaagagtctaacaagtctaaaggtcttcaccttctcgagtttttcgttaaaaaatgtcatgagattggggttagttgcgaggcatggatcaagaaaggtgatcccaaggatgtgatctgccaagaagtcagccgggtccgaccagatcttcttgttttgggaagccgtggtcttggccgcttccaaaaggtctttgttgggaccgtgagtgggttctgtgtgaaacatgctgagtgtccagtcctcacgatcaaacgcaacgccgatgaaactcccagtgatcttgctgatgactaaaccaactacattctaaacattccttccttccaaaatgataaataaactcttcattgatcctatcccattgtgtgcttttgtgtgtccaagtttatgattaataatattagtatgtgtgtgaagtctgctatgtttctgttgtcagtgatactgataatgcaactaaactttcaatttcttttaatcatttctaaattgaat

SEQ ID NO: 20101 - protein, 190 aa, Zea mays subsp. mays
  peptide (1)..(190): Ceres Seq. ID no. 14309374
  misc_feature (23)..(177): Pfam Name: Pfam Description:  Universal stress protein family
  misc_feature (18)..(190): NCBI GI NO: 6016711 NR Description: unknown protein [Arabidopsis thaliana]
  misc_feature (19)..(190): NCBI GI NO: 18395845 NR Description: expressed protein [Arabidopsis thaliana]
  misc_feature (27)..(190): NCBI GI NO: 21536534 NR Description: putative ethylene-responsive protein
  misc_feature (19)..(190): NCBI GI NO: 15241464 NR Description: expressed protein [Arabidopsis thaliana]
  misc_feature (22)..(190): NCBI GI NO: 19387249 NR Description: putative ethylene-responsive protein
  misc_feature (14)..(180): NCBI GI NO: 18408994 NR Description: expressed protein [Arabidopsis thaliana]
  misc_feature (14)..(186): NCBI GI NO: 30694811 NR Description: expressed protein [Arabidopsis thaliana]
  misc_feature (14)..(186): NCBI GI NO: 30694813 NR Description: expressed protein [Arabidopsis thaliana]
  misc_feature (25)..(178): NCBI GI NO: 34914610 NR Description: P0520B06.18
  misc_feature (45)..(183): NCBI GI NO: 30681321 NR Description: ER6 protein -related [Arabidopsis thaliana]
KHKQDLFKCQIFREEEEEMEREPTRVMVAVNESTIKGKPHPSISSKRAFEWTLEKMIRSNTSDFKILLLHVHVVDEDGFDEVDSIYASPDDFKESNKSKGLHLLEFFVKKCHEIGVSCEAWIKKGDPKDVICQEVSRVRPDLLVLGSRGLGRFQKVFVGTVSGFCVKHAECPVLTIKRNADETPSDLADD

SEQ ID NO: 20102 - protein, 172 aa, Zea mays subsp. mays
  peptide (1)..(172): Ceres Seq. ID no. 14309375
  misc_feature (5)..(159): Pfam Name: Pfam Description:  Universal stress protein family
  misc_feature (1)..(172): NCBI GI NO: 6016711 NR Description: unknown protein [Arabidopsis thaliana]
  misc_feature (1)..(172): NCBI GI NO: 18395845 NR Description: expressed protein [Arabidopsis thaliana]
  misc_feature (9)..(172): NCBI GI NO: 21536534 NR Description: putative ethylene-responsive protein
  misc_feature (1)..(172): NCBI GI NO: 15241464 NR Description: expressed protein [Arabidopsis thaliana]
  misc_feature (4)..(172): NCBI GI NO: 19387249 NR Description: putative ethylene-responsive protein
  misc_feature (1)..(162): NCBI GI NO: 18408994 NR Description: expressed protein [Arabidopsis thaliana]
  misc_feature (1)..(168): NCBI GI NO: 30694811 NR Description: expressed protein [Arabidopsis thaliana]
  misc_feature (1)..(168): NCBI GI NO: 30694813 NR Description: expressed protein [Arabidopsis thaliana]
  misc_feature (7)..(160): NCBI GI NO: 34914610 NR Description: P0520B06.18
  misc_feature (27)..(165): NCBI GI NO: 30681321 NR Description: ER6 protein -related [Arabidopsis thaliana]
MEREPTRVMVAVNESTIKGKPHPSISSKRAFEWTLEKMIRSNTSDFKILLLHVHVVDEDGFDEVDSIYASPDDFKESNKSKGLHLLEFFVKKCHEIGVSCEAWIKKGDPKDVICQEVSRVRPDLLVLGSRGLGRFQKVFVGTVSGFCVKHAECPVLTIKRNADETPSDLADD

SEQ ID NO: 20103 - protein, 164 aa, Zea mays subsp. mays
  peptide (1)..(164): Ceres Seq. ID no. 14309376
  misc_feature (1)..(151): Pfam Name: Pfam Description:  Universal stress protein family
  misc_feature (1)..(164): NCBI GI NO: 6016711 NR Description: unknown protein [Arabidopsis thaliana]
  misc_feature (1)..(164): NCBI GI NO: 18395845 NR Description: expressed protein [Arabidopsis thaliana]
  misc_feature (1)..(164): NCBI GI NO: 21536534 NR Description: putative ethylene-responsive protein
  misc_feature (1)..(164): NCBI GI NO: 15241464 NR Description: expressed protein [Arabidopsis thaliana]
  misc_feature (1)..(164): NCBI GI NO: 19387249 NR Description: putative ethylene-responsive protein
  misc_feature (1)..(154): NCBI GI NO: 18408994 NR Description: expressed protein [Arabidopsis thaliana]
  misc_feature (1)..(160): NCBI GI NO: 30694811 NR Description: expressed protein [Arabidopsis thaliana]
  misc_feature (1)..(160): NCBI GI NO: 30694813 NR Description: expressed protein [Arabidopsis thaliana]
  misc_feature (1)..(152): NCBI GI NO: 34914610 NR Description: P0520B06.18
  misc_feature (19)..(157): NCBI GI NO: 30681321 NR Description: ER6 protein -related [Arabidopsis thaliana]
MVAVNESTIKGKPHPSISSKRAFEWTLEKMIRSNTSDFKILLLHVHVVDEDGFDEVDSIYASPDDFKESNKSKGLHLLEFFVKKCHEIGVSCEAWIKKGDPKDVICQEVSRVRPDLLVLGSRGLGRFQKVFVGTVSGFCVKHAECPVLTIKRNADETPSDLADD

SEQ ID NO: 20104 - DNA, 750 bp, Zea mays subsp. mays
  misc_feature (1)..(750): Ceres Seq. ID no. 14309365
agaggaaataaaatatcttgaatcttagagaagaaggaaaagagaagagaagatgacgaccgagaagaaagagatggaagtggtgaaaggtctagacttggagaggtacatgggccgttggtacgaggttgcttctttcccttccaggttccaacccaagaacggtgcagacactcgcgccacctacacccttaaccccgacgggaccgtgaaagtcttgaacgagacgtgggacggaggcaagagaggtttcatccaaggctcagctttcaaaaccgatcctaagagcgacgaggccaagttcaaagtcaggttctacgtccctcctttcctccctatcattcccgttaccggcgactactgggtgctgtatatcgatcctgagtaccagcatgccgtcattggccagccttcaaggagttatctctggatcctgagcaggacggcgcacgtggaggaagagacatacaagcagctggtggagaaggcggtggagcaagggtatgatgttagcaagcttcgcaagacagctcagagtgacacaccacccgagtccgacgctgctcctgacgacaccaagggtatttggtggatcaaatctatcttcggcaaatagttacctgacacattaaaagacttgtttcacctccttgtacttgctctgtctatgtaatatactaccccttttgtttactccagtaatgaacgtcctacttttgttggtttttaaacatctaaatctatttgcgt

SEQ ID NO: 20105 - protein, 187 aa, Zea mays subsp. mays
  peptide (1)..(187): Ceres Seq. ID no. 14309366
  misc_feature (18)..(164): Pfam Name: Pfam Description:  Lipocalin / cytosolic fatty-acid binding protein family
  misc_feature (3)..(187): NCBI GI NO: 15242942 NR Description: outer membrane lipo protein - like
  misc_feature (8)..(187): NCBI GI NO: 21553811 NR Description: outer membrane lipoprotein-like
  misc_feature (7)..(187): NCBI GI NO: 18650668 NR Description: temperature stress-induced lipocalin
  misc_feature (1)..(156): NCBI GI NO: 13473955 NR Description: outer membrane lipoprotein [Mesorhizobium loti]
  misc_feature (1)..(156): NCBI GI NO: 13474785 NR Description: outer membrane lipoprotein [Mesorhizobium loti]
  misc_feature (5)..(156): NCBI GI NO: 21243293 NR Description: outer membrane lipoprotein Blc
  misc_feature (5)..(156): NCBI GI NO: 21231866 NR Description: outer membrane lipoprotein
  misc_feature (1)..(159): NCBI GI NO: 21244675 NR Description: outer membrane lipoprotein Blc
  misc_feature (1)..(159): NCBI GI NO: 21233298 NR Description: outer membrane lipoprotein Blc
  misc_feature (9)..(156): NCBI GI NO: 23058021 NR Description: hypothetical protein
MTTEKKEMEVVKGLDLERYMGRWYEVASFPSRFQPKNGADTRATYTLNPDGTVKVLNETWDGGKRGFIQGSAFKTDPKSDEAKFKVRFYVPPFLPIIPVTGDYWVLYIDPEYQHAVIGQPSRSYLWILSRTAHVEEETYKQLVEKAVEQGYDVSKLRKTAQSDTPPESDAAPDDTKGIWWIKSIFGK

SEQ ID NO: 20106 - protein, 180 aa, Zea mays subsp. mays
  peptide (1)..(180): Ceres Seq. ID no. 14309367
  misc_feature (11)..(157): Pfam Name: Pfam Description:  Lipocalin / cytosolic fatty-acid binding protein family
  misc_feature (1)..(180): NCBI GI NO: 15242942 NR Description: outer membrane lipo protein - like
  misc_feature (1)..(180): NCBI GI NO: 21553811 NR Description: outer membrane lipoprotein-like
  misc_feature (1)..(180): NCBI GI NO: 18650668 NR Description: temperature stress-induced lipocalin
  misc_feature (1)..(149): NCBI GI NO: 13473955 NR Description: outer membrane lipoprotein [Mesorhizobium loti]
  misc_feature (1)..(149): NCBI GI NO: 13474785 NR Description: outer membrane lipoprotein [Mesorhizobium loti]
  misc_feature (1)..(149): NCBI GI NO: 21243293 NR Description: outer membrane lipoprotein Blc
  misc_feature (1)..(149): NCBI GI NO: 21231866 NR Description: outer membrane lipoprotein
  misc_feature (1)..(152): NCBI GI NO: 21244675 NR Description: outer membrane lipoprotein Blc
  misc_feature (1)..(152): NCBI GI NO: 21233298 NR Description: outer membrane lipoprotein Blc
  misc_feature (2)..(149): NCBI GI NO: 23058021 NR Description: hypothetical protein
MEVVKGLDLERYMGRWYEVASFPSRFQPKNGADTRATYTLNPDGTVKVLNETWDGGKRGFIQGSAFKTDPKSDEAKFKVRFYVPPFLPIIPVTGDYWVLYIDPEYQHAVIGQPSRSYLWILSRTAHVEEETYKQLVEKAVEQGYDVSKLRKTAQSDTPPESDAAPDDTKGIWWIKSIFGK

SEQ ID NO: 20107 - protein, 168 aa, Zea mays subsp. mays
  peptide (1)..(168): Ceres Seq. ID no. 14309368
  misc_feature (1)..(145): Pfam Name: Pfam Description:  Lipocalin / cytosolic fatty-acid binding protein family
  misc_feature (1)..(168): NCBI GI NO: 15242942 NR Description: outer membrane lipo protein - like
  misc_feature (1)..(168): NCBI GI NO: 21553811 NR Description: outer membrane lipoprotein-like
  misc_feature (1)..(168): NCBI GI NO: 18650668 NR Description: temperature stress-induced lipocalin
  misc_feature (1)..(137): NCBI GI NO: 13473955 NR Description: outer membrane lipoprotein [Mesorhizobium loti]
  misc_feature (1)..(137): NCBI GI NO: 13474785 NR Description: outer membrane lipoprotein [Mesorhizobium loti]
  misc_feature (1)..(137): NCBI GI NO: 21243293 NR Description: outer membrane lipoprotein Blc
  misc_feature (1)..(137): NCBI GI NO: 21231866 NR Description: outer membrane lipoprotein
  misc_feature (1)..(140): NCBI GI NO: 21244675 NR Description: outer membrane lipoprotein Blc
  misc_feature (1)..(140): NCBI GI NO: 21233298 NR Description: outer membrane lipoprotein Blc
  misc_feature (1)..(137): NCBI GI NO: 23058021 NR Description: hypothetical protein
MGRWYEVASFPSRFQPKNGADTRATYTLNPDGTVKVLNETWDGGKRGFIQGSAFKTDPKSDEAKFKVRFYVPPFLPIIPVTGDYWVLYIDPEYQHAVIGQPSRSYLWILSRTAHVEEETYKQLVEKAVEQGYDVSKLRKTAQSDTPPESDAAPDDTKGIWWIKSIFGK

SEQ ID NO: 20108 - DNA, 1072 bp, Zea mays subsp. mays
  misc_feature (1)..(1072): Ceres Seq. ID no. 14309361
aaaaagatgaaactcgcaggtctgaaatcgatcgagaacgcgcacgaagattccgtttgggcggcgacatgggttccggcgacggaagaacgaccggcgttgcttcttaccggatctctagacgagacggtgaagctatggagagcggacgagctggatctagtgaggactaacacaggacactccttgggagtagcagctgtggcggcgcatccttccggaatcatcgcagcttcttcttccctcgatagcttcgtccgtgtcttcgatgttgacacgaatgccaccatcgctgttctcgaagctcctccttctgaggtttggggtatgcaatttgaacctaagggtacaatccttgctgttgctggtggaagtagtgcctcggtcaagctttgggacactgcgagctggagactaatctcaactctctcaatcccacgtccagaagcaccaaagccttctgataaaaccagcagcaagaagttcgttctctctgtggcttggtctcccaacgggaaacgtctagcttgtggttcaatggatggcacgatctgcgtctttgatgttgatcgctctaagcttcttcaccagcttgaaggacacaacatgcctgtaaggtcccttgtgttctcccctgtagacccgagagtcctcttctccggatcagatgatgggcatgtgaacgtgcacgacgcagaagggaaaacgcttgtggggtccatgtcggggcacacgagctgggtgctgagcgttgatgctagccctgacggtggagctatagcaacggggtcgagtgataggactgtgaggctgtgggatcttaagatgagagcggctattcagacaatgagcaatcataatgaccaggtttggtctgttgcgtttagaccacctggtggaaccggtgtccgtgctggtcgtctcgctagtgtctctgacgacaagagtgtatcgctctatgattactcatgaaaaaagtcctgttgtttcttacttttatgcatttacaatgtaatctgcaagagtttttttttttttctgttggttcaaactttgcttgagagcttattat

SEQ ID NO: 20109 - protein, 323 aa, Zea mays subsp. mays
  peptide (1)..(323): Ceres Seq. ID no. 14309362
  misc_feature (278)..(321): Pfam Name: Pfam Description:  WD domain, G-beta repeat
  misc_feature (3)..(323): NCBI GI NO: 15233721 NR Description: transducin / WD-40 repeat protein family
  misc_feature (12)..(321): NCBI GI NO: 38541742 NR Description: Unknown (protein for MGC:77675) [Danio rerio]
  misc_feature (12)..(321): NCBI GI NO: 37590940 NR Description: Unknown (protein for MGC:75826)
  misc_feature (12)..(321): NCBI GI NO: 13376840 NR Description: recombination protein REC14 [Homo sapiens]
  misc_feature (12)..(321): NCBI GI NO: 13277350 NR Description: meiotic recombination protein REC14 [Mus musculus]
  misc_feature (12)..(321): NCBI GI NO: 12849020 NR Description: unnamed protein product [Mus musculus]
  misc_feature (12)..(321): NCBI GI NO: 33150742 NR Description: G protein beta subunit-like protein [Homo sapiens]
  misc_feature (12)..(289): NCBI GI NO: 26345856 NR Description: unnamed protein product [Mus musculus]
  misc_feature (35)..(321): NCBI GI NO: 19335618 NR Description: unknown protein [Aedes aegypti]
  misc_feature (35)..(321): NCBI GI NO: 13173173 NR Description: unknown protein i8 [Aedes aegypti]
KKMKLAGLKSIENAHEDSVWAATWVPATEERPALLLTGSLDETVKLWRADELDLVRTNTGHSLGVAAVAAHPSGIIAASSSLDSFVRVFDVDTNATIAVLEAPPSEVWGMQFEPKGTILAVAGGSSASVKLWDTASWRLISTLSIPRPEAPKPSDKTSSKKFVLSVAWSPNGKRLACGSMDGTICVFDVDRSKLLHQLEGHNMPVRSLVFSPVDPRVLFSGSDDGHVNVHDAEGKTLVGSMSGHTSWVLSVDASPDGGAIATGSSDRTVRLWDLKMRAAIQTMSNHNDQVWSVAFRPPGGTGVRAGRLASVSDDKSVSLYDYS

SEQ ID NO: 20110 - protein, 321 aa, Zea mays subsp. mays
  peptide (1)..(321): Ceres Seq. ID no. 14309363
  misc_feature (276)..(319): Pfam Name: Pfam Description:  WD domain, G-beta repeat
  misc_feature (1)..(321): NCBI GI NO: 15233721 NR Description: transducin / WD-40 repeat protein family
  misc_feature (10)..(319): NCBI GI NO: 38541742 NR Description: Unknown (protein for MGC:77675) [Danio rerio]
  misc_feature (10)..(319): NCBI GI NO: 37590940 NR Description: Unknown (protein for MGC:75826)
  misc_feature (10)..(319): NCBI GI NO: 13376840 NR Description: recombination protein REC14 [Homo sapiens]
  misc_feature (10)..(319): NCBI GI NO: 13277350 NR Description: meiotic recombination protein REC14 [Mus musculus]
  misc_feature (10)..(319): NCBI GI NO: 12849020 NR Description: unnamed protein product [Mus musculus]
  misc_feature (10)..(319): NCBI GI NO: 33150742 NR Description: G protein beta subunit-like protein [Homo sapiens]
  misc_feature (10)..(287): NCBI GI NO: 26345856 NR Description: unnamed protein product [Mus musculus]
  misc_feature (33)..(319): NCBI GI NO: 19335618 NR Description: unknown protein [Aedes aegypti]
  misc_feature (33)..(319): NCBI GI NO: 13173173 NR Description: unknown protein i8 [Aedes aegypti]
MKLAGLKSIENAHEDSVWAATWVPATEERPALLLTGSLDETVKLWRADELDLVRTNTGHSLGVAAVAAHPSGIIAASSSLDSFVRVFDVDTNATIAVLEAPPSEVWGMQFEPKGTILAVAGGSSASVKLWDTASWRLISTLSIPRPEAPKPSDKTSSKKFVLSVAWSPNGKRLACGSMDGTICVFDVDRSKLLHQLEGHNMPVRSLVFSPVDPRVLFSGSDDGHVNVHDAEGKTLVGSMSGHTSWVLSVDASPDGGAIATGSSDRTVRLWDLKMRAAIQTMSNHNDQVWSVAFRPPGGTGVRAGRLASVSDDKSVSLYDYS

SEQ ID NO: 20111 - protein, 214 aa, Zea mays subsp. mays
  peptide (1)..(214): Ceres Seq. ID no. 14309364
  misc_feature (169)..(212): Pfam Name: Pfam Description:  WD domain, G-beta repeat
  misc_feature (1)..(214): NCBI GI NO: 15233721 NR Description: transducin / WD-40 repeat protein family
  misc_feature (1)..(212): NCBI GI NO: 38541742 NR Description: Unknown (protein for MGC:77675) [Danio rerio]
  misc_feature (1)..(212): NCBI GI NO: 37590940 NR Description: Unknown (protein for MGC:75826)
  misc_feature (1)..(212): NCBI GI NO: 13376840 NR Description: recombination protein REC14 [Homo sapiens]
  misc_feature (1)..(212): NCBI GI NO: 13277350 NR Description: meiotic recombination protein REC14 [Mus musculus]
  misc_feature (1)..(212): NCBI GI NO: 12849020 NR Description: unnamed protein product [Mus musculus]
  misc_feature (1)..(212): NCBI GI NO: 33150742 NR Description: G protein beta subunit-like protein [Homo sapiens]
  misc_feature (1)..(180): NCBI GI NO: 26345856 NR Description: unnamed protein product [Mus musculus]
  misc_feature (1)..(212): NCBI GI NO: 19335618 NR Description: unknown protein [Aedes aegypti]
  misc_feature (1)..(212): NCBI GI NO: 13173173 NR Description: unknown protein i8 [Aedes aegypti]
MQFEPKGTILAVAGGSSASVKLWDTASWRLISTLSIPRPEAPKPSDKTSSKKFVLSVAWSPNGKRLACGSMDGTICVFDVDRSKLLHQLEGHNMPVRSLVFSPVDPRVLFSGSDDGHVNVHDAEGKTLVGSMSGHTSWVLSVDASPDGGAIATGSSDRTVRLWDLKMRAAIQTMSNHNDQVWSVAFRPPGGTGVRAGRLASVSDDKSVSLYDYS

SEQ ID NO: 20112 - DNA, 1084 bp, Zea mays subsp. mays
  misc_feature (1)..(1084): Ceres Seq. ID no. 14309357
acatttcattttcattcatcctctcgcttctgacctgacctgacctaaatcatcatcatcgaaaatggtttccgcgcgtgaggagttcgtgtacatggccaagctcgccgagcaagccgagcgctacgaggagatggtggagttcatggagaaagtgtccgcctccgtcgacggcgacgagctcaccgtcgaggagcgtaacctcctctccgtcgcctacaagaacgtgatcggcgcgcggcgcgcctcgtggcgcatcatatcgtcgatcgagcagaaggaggagagccgcggcaacgacgaccacgtggcggcgatccgcgattacagggggaagatcgagacggagctcacggggatctgcgaggggatactgaagctgctggactcgaggctggtccccgccgcagcgtcgggggactcgaaggtgttttatctgaagatgaagggggattaccataggtacttggctgagtttaagaccggtcaagagaggaaagacgccgctgagaatactctctccgcttacaaatctgctcaggatattgcgaatgcagagctcgctccaactcacccaatccgtctaggtctggcattgaacttctctgtgttctactacgagatcttaaactctcctgatcgtgcctgcagcctcgctaaacaggcctttgatgacgcgattgcggagttggacactctaggtgaagagtcgtacaaagacagcaccttgatcatgcagcttctccgtgacaacctcactctctggacatccgacatgcaggatgatgctgcggatgaggagatcaaggaagagtcggctccaaagccagctgaggaacagcagtaatcaaatctttttgactgaactgctgttttctaggggtttggaacttttattcattcatcgtaatccctagcaagttggaccatcagtcatcatcttttatctctttgcctgattttctccttttttatttgttgttgttctatctttttttttttgtcttctgggatatgtctatttcaatgtctgcaatcgaaccttgctttgtgtgtttctattcaatttgaaaggctctgtcct

SEQ ID NO: 20113 - protein, 260 aa, Zea mays subsp. mays
  peptide (1)..(260): Ceres Seq. ID no. 14309358
  misc_feature (5)..(242): Pfam Name: Pfam Description:  14-3-3 protein
  misc_feature (2)..(260): NCBI GI NO: 13447104 NR Description: GF14 omega [Brassica napus]
  misc_feature (1)..(260): NCBI GI NO: 18411901 NR Description: 14-3-3 protein GF14 omega (grf2)
  misc_feature (1)..(260): NCBI GI NO: 487791 NR Description: GF14omega isoform
  misc_feature (3)..(260): NCBI GI NO: 18399524 NR Description: 14-3-3 protein GF14 phi (grf4)
  misc_feature (3)..(258): NCBI GI NO: 14532442 NR Description: At1g35160/T32G9_30 [Arabidopsis thaliana]
  misc_feature (1)..(260): NCBI GI NO: 20340229 NR Description: 14-3-3-like protein [Thellungiella halophila]
  misc_feature (3)..(260): NCBI GI NO: 8099063 NR Description: 14-3-3 protein [Populus x canescens]
  misc_feature (1)..(260): NCBI GI NO: 1361987 NR Description: 14-3-3 protein homolog GF14 chi chain
  misc_feature (3)..(260): NCBI GI NO: 18413181 NR Description: 14-3-3 protein GF14 chi (grf1)
  misc_feature (3)..(260): NCBI GI NO: 1702986 NR Description: 14-3-3-like protein GF14 chi
MVSAREEFVYMAKLAEQAERYEEMVEFMEKVSASVDGDELTVEERNLLSVAYKNVIGARRASWRIISSIEQKEESRGNDDHVAAIRDYRGKIETELTGICEGILKLLDSRLVPAAASGDSKVFYLKMKGDYHRYLAEFKTGQERKDAAENTLSAYKSAQDIANAELAPTHPIRLGLALNFSVFYYEILNSPDRACSLAKQAFDDAIAELDTLGEESYKDSTLIMQLLRDNLTLWTSDMQDDAADEEIKEESAPKPAEEQQ

SEQ ID NO: 20114 - protein, 250 aa, Zea mays subsp. mays
  peptide (1)..(250): Ceres Seq. ID no. 14309359
  misc_feature (1)..(232): Pfam Name: Pfam Description:  14-3-3 protein
  misc_feature (1)..(250): NCBI GI NO: 13447104 NR Description: GF14 omega [Brassica napus]
  misc_feature (1)..(250): NCBI GI NO: 18411901 NR Description: 14-3-3 protein GF14 omega (grf2)
  misc_feature (1)..(250): NCBI GI NO: 487791 NR Description: GF14omega isoform
  misc_feature (1)..(250): NCBI GI NO: 18399524 NR Description: 14-3-3 protein GF14 phi (grf4)
  misc_feature (1)..(248): NCBI GI NO: 14532442 NR Description: At1g35160/T32G9_30 [Arabidopsis thaliana]
  misc_feature (1)..(250): NCBI GI NO: 20340229 NR Description: 14-3-3-like protein [Thellungiella halophila]
  misc_feature (1)..(250): NCBI GI NO: 8099063 NR Description: 14-3-3 protein [Populus x canescens]
  misc_feature (1)..(250): NCBI GI NO: 1361987 NR Description: 14-3-3 protein homolog GF14 chi chain
  misc_feature (1)..(250): NCBI GI NO: 18413181 NR Description: 14-3-3 protein GF14 chi (grf1)
  misc_feature (1)..(250): NCBI GI NO: 1702986 NR Description: 14-3-3-like protein GF14 chi
MAKLAEQAERYEEMVEFMEKVSASVDGDELTVEERNLLSVAYKNVIGARRASWRIISSIEQKEESRGNDDHVAAIRDYRGKIETELTGICEGILKLLDSRLVPAAASGDSKVFYLKMKGDYHRYLAEFKTGQERKDAAENTLSAYKSAQDIANAELAPTHPIRLGLALNFSVFYYEILNSPDRACSLAKQAFDDAIAELDTLGEESYKDSTLIMQLLRDNLTLWTSDMQDDAADEEIKEESAPKPAEEQQ

SEQ ID NO: 20115 - protein, 237 aa, Zea mays subsp. mays
  peptide (1)..(237): Ceres Seq. ID no. 14309360
  misc_feature (1)..(219): Pfam Name: Pfam Description:  14-3-3 protein
  misc_feature (1)..(237): NCBI GI NO: 13447104 NR Description: GF14 omega [Brassica napus]
  misc_feature (1)..(237): NCBI GI NO: 18411901 NR Description: 14-3-3 protein GF14 omega (grf2)
  misc_feature (1)..(237): NCBI GI NO: 487791 NR Description: GF14omega isoform
  misc_feature (1)..(237): NCBI GI NO: 18399524 NR Description: 14-3-3 protein GF14 phi (grf4)
  misc_feature (1)..(235): NCBI GI NO: 14532442 NR Description: At1g35160/T32G9_30 [Arabidopsis thaliana]
  misc_feature (1)..(237): NCBI GI NO: 20340229 NR Description: 14-3-3-like protein [Thellungiella halophila]
  misc_feature (1)..(237): NCBI GI NO: 8099063 NR Description: 14-3-3 protein [Populus x canescens]
  misc_feature (1)..(237): NCBI GI NO: 1361987 NR Description: 14-3-3 protein homolog GF14 chi chain
  misc_feature (1)..(237): NCBI GI NO: 18413181 NR Description: 14-3-3 protein GF14 chi (grf1)
  misc_feature (1)..(237): NCBI GI NO: 1702986 NR Description: 14-3-3-like protein GF14 chi
MVEFMEKVSASVDGDELTVEERNLLSVAYKNVIGARRASWRIISSIEQKEESRGNDDHVAAIRDYRGKIETELTGICEGILKLLDSRLVPAAASGDSKVFYLKMKGDYHRYLAEFKTGQERKDAAENTLSAYKSAQDIANAELAPTHPIRLGLALNFSVFYYEILNSPDRACSLAKQAFDDAIAELDTLGEESYKDSTLIMQLLRDNLTLWTSDMQDDAADEEIKEESAPKPAEEQQ

SEQ ID NO: 20116 - DNA, 967 bp, Zea mays subsp. mays
  misc_feature (1)..(967): Ceres Seq. ID no. 14309353
aattaacttttcttttttcattgttgtgttctctctctctttctctcgctggagaaaaatgttggctatatttcacgaggcctttgctcacccgccggaggaactctacagtccggcgtctgagaaatgctctaaacagcccaaacttccagaagaaaccttagacgacttcttgtctcgtcactctgacaacactttctccatgtctttcggaaaagcagctgttcttgcttacgttcgtccctctgcttccttctcagtccaccagaggttgttctgtgggtttgatgacatctactgtctcttctttgggagcttgaacaatctgtgtcagctaaacaagcaatatggtctgaccaagacaacaaacgaggccatgtttgtgattgaagcttataggactcttagagacagaggtccttatccagctgatcaggttgtcaaggatttagacggtagctttgcctttgttgtttatgatagcaaagctggttctgtcttcacggccctggggtctgatggaggagtgaagctgttttggggaatagctgctgatggatctgttgtgatatcagatgatttggatgttatcaaagagggttgtgctaaatcttttgctccttttcctactggatgtatgttccacagtgaaggagggttaatgagctttgagcatccgatgaacaagataaaggcgatgccgagagtggacagtgaaggagtcctatgtggtgctaacttcaaggtggatgtgtacacgcgtgttaacagtatccctcgtcgaggaagtgaagccaattggtctctctgaatgccttgcattctctcaacttcctaaatgatactttcctttccgcactttcatgctccgttcttgttcttctctacttctgttatggaataagccatgaataaaaactgtgaatagctttcgaggttctatataaaaataaatttctcagcgctc

SEQ ID NO: 20117 - protein, 269 aa, Zea mays subsp. mays
  peptide (1)..(269): Ceres Seq. ID no. 14309354
  misc_feature (20)..(269): NCBI GI NO: 18416995 NR Description: expressed protein [Arabidopsis thaliana]
  misc_feature (20)..(269): NCBI GI NO: 7486256 NR Description: hypothetical protein F27G19
  misc_feature (20)..(267): NCBI GI NO: 9857931 NR Description: unknown [Glycine max]
  misc_feature (20)..(269): NCBI GI NO: 18400774 NR Description: expressed protein [Arabidopsis thaliana]
  misc_feature (20)..(268): NCBI GI NO: 542200 NR Description: hypothetical protein - garden asparagus
  misc_feature (19)..(268): NCBI GI NO: 7489016 NR Description: hypothetical protein - tomato
  misc_feature (20)..(268): NCBI GI NO: 15239993 NR Description: aluminum-induced protein-related
  misc_feature (20)..(268): NCBI GI NO: 20340249 NR Description: aluminum-induced protein-like protein
  misc_feature (19)..(268): NCBI GI NO: 30017570 NR Description: unknown protein
  misc_feature (20)..(145): NCBI GI NO: 38344040 NR Description: OSJNBb0017I01.8
INFSFFIVVFSLSFSRWRKMLAIFHEAFAHPPEELYSPASEKCSKQPKLPEETLDDFLSRHSDNTFSMSFGKAAVLAYVRPSASFSVHQRLFCGFDDIYCLFFGSLNNLCQLNKQYGLTKTTNEAMFVIEAYRTLRDRGPYPADQVVKDLDGSFAFVVYDSKAGSVFTALGSDGGVKLFWGIAADGSVVISDDLDVIKEGCAKSFAPFPTGCMFHSEGGLMSFEHPMNKIKAMPRVDSEGVLCGANFKVDVYTRVNSIPRRGSEANWSL

SEQ ID NO: 20118 - protein, 250 aa, Zea mays subsp. mays
  peptide (1)..(250): Ceres Seq. ID no. 14309355
  misc_feature (1)..(250): NCBI GI NO: 18416995 NR Description: expressed protein [Arabidopsis thaliana]
  misc_feature (1)..(250): NCBI GI NO: 7486256 NR Description: hypothetical protein F27G19
  misc_feature (1)..(248): NCBI GI NO: 9857931 NR Description: unknown [Glycine max]
  misc_feature (1)..(250): NCBI GI NO: 18400774 NR Description: expressed protein [Arabidopsis thaliana]
  misc_feature (1)..(249): NCBI GI NO: 542200 NR Description: hypothetical protein - garden asparagus
  misc_feature (1)..(249): NCBI GI NO: 7489016 NR Description: hypothetical protein - tomato
  misc_feature (1)..(249): NCBI GI NO: 15239993 NR Description: aluminum-induced protein-related
  misc_feature (1)..(249): NCBI GI NO: 20340249 NR Description: aluminum-induced protein-like protein
  misc_feature (1)..(249): NCBI GI NO: 30017570 NR Description: unknown protein
  misc_feature (1)..(126): NCBI GI NO: 38344040 NR Description: OSJNBb0017I01.8
MLAIFHEAFAHPPEELYSPASEKCSKQPKLPEETLDDFLSRHSDNTFSMSFGKAAVLAYVRPSASFSVHQRLFCGFDDIYCLFFGSLNNLCQLNKQYGLTKTTNEAMFVIEAYRTLRDRGPYPADQVVKDLDGSFAFVVYDSKAGSVFTALGSDGGVKLFWGIAADGSVVISDDLDVIKEGCAKSFAPFPTGCMFHSEGGLMSFEHPMNKIKAMPRVDSEGVLCGANFKVDVYTRVNSIPRRGSEANWSL

SEQ ID NO: 20119 - protein, 202 aa, Zea mays subsp. mays
  peptide (1)..(202): Ceres Seq. ID no. 14309356
  misc_feature (1)..(202): NCBI GI NO: 18416995 NR Description: expressed protein [Arabidopsis thaliana]
  misc_feature (1)..(202): NCBI GI NO: 7486256 NR Description: hypothetical protein F27G19
  misc_feature (1)..(200): NCBI GI NO: 9857931 NR Description: unknown [Glycine max]
  misc_feature (1)..(202): NCBI GI NO: 18400774 NR Description: expressed protein [Arabidopsis thaliana]
  misc_feature (1)..(201): NCBI GI NO: 542200 NR Description: hypothetical protein - garden asparagus
  misc_feature (1)..(201): NCBI GI NO: 7489016 NR Description: hypothetical protein - tomato
  misc_feature (1)..(201): NCBI GI NO: 15239993 NR Description: aluminum-induced protein-related
  misc_feature (1)..(201): NCBI GI NO: 20340249 NR Description: aluminum-induced protein-like protein
  misc_feature (1)..(201): NCBI GI NO: 30017570 NR Description: unknown protein
  misc_feature (1)..(78): NCBI GI NO: 38344040 NR Description: OSJNBb0017I01.8
MSFGKAAVLAYVRPSASFSVHQRLFCGFDDIYCLFFGSLNNLCQLNKQYGLTKTTNEAMFVIEAYRTLRDRGPYPADQVVKDLDGSFAFVVYDSKAGSVFTALGSDGGVKLFWGIAADGSVVISDDLDVIKEGCAKSFAPFPTGCMFHSEGGLMSFEHPMNKIKAMPRVDSEGVLCGANFKVDVYTRVNSIPRRGSEANWSL

SEQ ID NO: 20120 - DNA, 802 bp, Zea mays subsp. mays
  misc_feature (1)..(802): Ceres Seq. ID no. 15178333
tctgcctctgcctctcagtttaccaaaaccctagtttcaaagctttactctccagaaatggctttctgcaaaaatctcggtggtctattgaggcaaggtgcggtttctcagacagggaatgtacccgttcagtctatgctcgggtctctccggtacatgtctaccaagctctttgtcggtggtctctcatggggaactgatgaccagtcattgagggaggctttctccaacttcggtgaagtgatcgattctaaggtcattgttgatagggaaaccggaaggtcaagggggtttggatttgtcaatttctctgatgagagtgctgctaatgctgcaatttcagagatggacggaaaggaactgaatggacgcaacatccgagtgaatgttgctaacgatagaccaagtgctccccgggcttatggaggtggtggcggctacggtggaggtggtggtggctatggaggaggtggtgatggaggcggttactaaacagaggagcttcttgtgataagaagaattgatctttctgtttgtttttttttattatttaaatcgagcttgtgctagtacaaaacctgaatgggatttgttgagactctagtagtcagtactcttatctaagacacggcttttcactcagtttgtgttagcttcaaatattgtccgttaataattctggaggaaagccgaattgagagtatgagcagttatcatctgttttagaattatacccgatctgacttgagatttgagttcttgtaaaaggaagtgtattcttcaatttgagtttatcttttcg

SEQ ID NO: 20121 - protein, 163 aa, Zea mays subsp. mays
  peptide (1)..(163): Ceres Seq. ID no. 15178334
  misc_feature (57)..(128): Pfam Name: a.k.a. RRM, RBD, or RNP domain Pfam Description: RNA recognition motif.
  misc_feature (20)..(163): NCBI GI NO: 2826811 NR Description: AtGRP2 [Arabidopsis thaliana]
  misc_feature (20)..(162): NCBI GI NO: 15236359 NR Description: glycine-rich RNA-binding protein (AtGRP2)
  misc_feature (20)..(162): NCBI GI NO: 30682622 NR Description: glycine-rich RNA-binding protein (AtGRP2)
  misc_feature (40)..(162): NCBI GI NO: 322514 NR Description: glycine-rich RNA-binding protein
  misc_feature (20)..(153): NCBI GI NO: 15229525 NR Description: RNA-binding protein, putative
  misc_feature (20)..(153): NCBI GI NO: 21553972 NR Description: glycine-rich RNA binding protein, putative
  misc_feature (20)..(163): NCBI GI NO: 7439994 NR Description: glycine-rich RNA-binding protein - garden pea
  misc_feature (20)..(163): NCBI GI NO: 7439995 NR Description: RNA binding protein 3 - wood tobacco
  misc_feature (20)..(145): NCBI GI NO: 7489099 NR Description: RNA-binding protein RGP-3 - wood tobacco
  misc_feature (20)..(162): NCBI GI NO: 15239505 NR Description: RNA-binding protein, putative
SASASQFTKTLVSKLYSPEMAFCKNLGGLLRQGAVSQTGNVPVQSMLGSLRYMSTKLFVGGLSWGTDDQSLREAFSNFGEVIDSKVIVDRETGRSRGFGFVNFSDESAANAAISEMDGKELNGRNIRVNVANDRPSAPRAYGGGGGYGGGGGGYGGGGDGGGY

SEQ ID NO: 20122 - protein, 144 aa, Zea mays subsp. mays
  peptide (1)..(144): Ceres Seq. ID no. 15178335
  misc_feature (38)..(109): Pfam Name: a.k.a. RRM, RBD, or RNP domain Pfam Description: RNA recognition motif.
  misc_feature (1)..(144): NCBI GI NO: 2826811 NR Description: AtGRP2 [Arabidopsis thaliana]
  misc_feature (1)..(143): NCBI GI NO: 15236359 NR Description: glycine-rich RNA-binding protein (AtGRP2)
  misc_feature (1)..(143): NCBI GI NO: 30682622 NR Description: glycine-rich RNA-binding protein (AtGRP2)
  misc_feature (21)..(143): NCBI GI NO: 322514 NR Description: glycine-rich RNA-binding protein
  misc_feature (1)..(134): NCBI GI NO: 15229525 NR Description: RNA-binding protein, putative
  misc_feature (1)..(134): NCBI GI NO: 21553972 NR Description: glycine-rich RNA binding protein, putative
  misc_feature (1)..(144): NCBI GI NO: 7439994 NR Description: glycine-rich RNA-binding protein - garden pea
  misc_feature (1)..(144): NCBI GI NO: 7439995 NR Description: RNA binding protein 3 - wood tobacco
  misc_feature (1)..(126): NCBI GI NO: 7489099 NR Description: RNA-binding protein RGP-3 - wood tobacco
  misc_feature (1)..(143): NCBI GI NO: 15239505 NR Description: RNA-binding protein, putative
MAFCKNLGGLLRQGAVSQTGNVPVQSMLGSLRYMSTKLFVGGLSWGTDDQSLREAFSNFGEVIDSKVIVDRETGRSRGFGFVNFSDESAANAAISEMDGKELNGRNIRVNVANDRPSAPRAYGGGGGYGGGGGGYGGGGDGGGY

SEQ ID NO: 20123 - protein, 118 aa, Zea mays subsp. mays
  peptide (1)..(118): Ceres Seq. ID no. 15178336
  misc_feature (12)..(83): Pfam Name: a.k.a. RRM, RBD, or RNP domain Pfam Description: RNA recognition motif.
  misc_feature (1)..(118): NCBI GI NO: 2826811 NR Description: AtGRP2 [Arabidopsis thaliana]
  misc_feature (1)..(117): NCBI GI NO: 15236359 NR Description: glycine-rich RNA-binding protein (AtGRP2)
  misc_feature (1)..(117): NCBI GI NO: 30682622 NR Description: glycine-rich RNA-binding protein (AtGRP2)
  misc_feature (1)..(117): NCBI GI NO: 322514 NR Description: glycine-rich RNA-binding protein
  misc_feature (1)..(108): NCBI GI NO: 15229525 NR Description: RNA-binding protein, putative
  misc_feature (1)..(108): NCBI GI NO: 21553972 NR Description: glycine-rich RNA binding protein, putative
  misc_feature (1)..(118): NCBI GI NO: 7439994 NR Description: glycine-rich RNA-binding protein - garden pea
  misc_feature (1)..(118): NCBI GI NO: 7439995 NR Description: RNA binding protein 3 - wood tobacco
  misc_feature (1)..(100): NCBI GI NO: 7489099 NR Description: RNA-binding protein RGP-3 - wood tobacco
  misc_feature (1)..(117): NCBI GI NO: 15239505 NR Description: RNA-binding protein, putative
MLGSLRYMSTKLFVGGLSWGTDDQSLREAFSNFGEVIDSKVIVDRETGRSRGFGFVNFSDESAANAAISEMDGKELNGRNIRVNVANDRPSAPRAYGGGGGYGGGGGGYGGGGDGGGY

SEQ ID NO: 20124 - DNA, 756 bp, Zea mays subsp. mays
  misc_feature (1)..(756): Ceres Seq. ID no. 14309350
attcttccttcacagcacttcttctctaacgaacaaatctttcttcatatctttctctcaaacacaaacgatggctcaggaaggtgttgctgctgctgcgaatggtgctacagtggtggagaagtctgttaccttcactgcctacaagccccagctgatcgtggaggctcagaaggtcggtgacgctgtcgctttctacaaggatgtgtttggtgcgacggagactggacactctctttaccctaagcgtaaggctgaccaagagctccctcacgttgtctccgctgagattaacctcgctggtgctaccgtcgttgtctccgacgtctctgttcactctggctctaatgtgaagacggggactgtgtctgcactcctcgaaactgatgacgtggaagctgccgttgcgaaagctgtagccgccggagctgtgaaagtggaggaggtctcggagggggaagctgagggttgggtgaagggaaaggtgactgacccgttcggtttcacctggatctttgtttctccggtggacaaggatgacaaggaagaaaacaaagaggtggtctaactgtcgtcgtcgtcgtcggatctgatcgttcgtcggtttctgaacaaaccttctattatcctttttttatgcttttgtagtttgtcttttgtggaatctccggtatcagtaaaccgggtcggttaacttatgacttttgttgagtttaatttcacccttttgacataagacttggtgaaataaaacgg

SEQ ID NO: 20125 - protein, 188 aa, Zea mays subsp. mays
  peptide (1)..(188): Ceres Seq. ID no. 14309351
  misc_feature (62)..(170): Pfam Name: Pfam Description:  Glyoxalase/Bleomycin resistance protein/Dioxygenasesuperfamily
  misc_feature (24)..(187): NCBI GI NO: 18422918 NR Description: expressed protein [Arabidopsis thaliana]
  misc_feature (25)..(180): NCBI GI NO: 28565534 NR Description: early tobacco anther 1 [Nicotiana tabacum]
FFLHSTSSLTNKSFFISFSQTQTMAQEGVAAAANGATVVEKSVTFTAYKPQLIVEAQKVGDAVAFYKDVFGATETGHSLYPKRKADQELPHVVSAEINLAGATVVVSDVSVHSGSNVKTGTVSALLETDDVEAAVAKAVAAGAVKVEEVSEGEAEGWVKGKVTDPFGFTWIFVSPVDKDDKEENKEVV

SEQ ID NO: 20126 - protein, 165 aa, Zea mays subsp. mays
  peptide (1)..(165): Ceres Seq. ID no. 14309352
  misc_feature (39)..(147): Pfam Name: Pfam Description:  Glyoxalase/Bleomycin resistance protein/Dioxygenasesuperfamily
  misc_feature (1)..(164): NCBI GI NO: 18422918 NR Description: expressed protein [Arabidopsis thaliana]
  misc_feature (2)..(157): NCBI GI NO: 28565534 NR Description: early tobacco anther 1 [Nicotiana tabacum]
MAQEGVAAAANGATVVEKSVTFTAYKPQLIVEAQKVGDAVAFYKDVFGATETGHSLYPKRKADQELPHVVSAEINLAGATVVVSDVSVHSGSNVKTGTVSALLETDDVEAAVAKAVAAGAVKVEEVSEGEAEGWVKGKVTDPFGFTWIFVSPVDKDDKEENKEVV

SEQ ID NO: 20127 - DNA, 798 bp, Zea mays subsp. mays
  misc_feature (1)..(798): Ceres Seq. ID no. 14309346
agattcggtcgctaataatatttggagtcgggaggggtgacctgagatattcacgacacaaaacaaatcatcatcatgtggagaagaatcgtctcctctggtctcaaaaccctagcctccgatgtcgccgctgcttctcctcgtcgatccgtagccaccaccaccgtgagacccttgaggttctacctcgcatccaatcccgcttcttcttcccttttacctcgccatttcagctccgaatcagtggagaccgttgggaagaagaaggtggaggatgttatgcccattgctactggacatgaaaaggaggagcttgaagctgaacttgaggggaggaggctgcttgacattgacttccctgaaggtccttttggaactaaggaagctcctgctatcgtaaagtcctactatgacaagcgaattgtgggatgccctggtggtgaaggcgaggatgaacacgatgttgtgtggttctggctggagaaaggaaagtcttttgaatgccccgtttgcactcagtactttgagctggaagtggttggtccaggtggacctcccgatggtcacggtgatgaagacgatgagcaccaccactgattccggcttctcccttgctgcgagttttgctttttttttttttattattttttactggaataaaaaacatatgctgctggtgagacagttaaaaatgtttttgatccttttggaacaacacttcggtatcggaagttgtcaaaatgcctaaaccgttgttttacttttgtaccaattcttgaatcagagttattcctgcct

SEQ ID NO: 20128 - protein, 173 aa, Zea mays subsp. mays
  peptide (1)..(173): Ceres Seq. ID no. 14309347
  misc_feature (62)..(158): Pfam Name: Pfam Description:  Cytochrome c oxidase subunit Vb
  misc_feature (1)..(173): NCBI GI NO: 15232644 NR Description: cytochrome c oxidase subunit Vb -related
  misc_feature (1)..(172): NCBI GI NO: 21592567 NR Description: cytochrome c oxidase subunit, putative
  misc_feature (1)..(172): NCBI GI NO: 15220092 NR Description: cytochrome c oxidase subunit -related
  misc_feature (41)..(173): NCBI GI NO: 5803264 NR Description: ESTs AU057456
  misc_feature (1)..(173): NCBI GI NO: 34912592 NR Description: cytochrome c oxidase subunit Vb precursor
  misc_feature (1)..(111): NCBI GI NO: 7484634 NR Description: probable cytochrome-c oxidase (EC 1
  misc_feature (125)..(172): NCBI GI NO: 5903035 NR Description: Similar to gb|D85381 cytochrome c oxidase subunitVb precursor from Oryza sativa
  misc_feature (72)..(152): NCBI GI NO: 223590 NR Description: oxidase IV,cytochrome
  misc_feature (72)..(152): NCBI GI NO: 117102 NR Description: CYTOCHROME C OXIDASE POLYPEPTIDE VB (VI)
  misc_feature (72)..(152): NCBI GI NO: 17017988 NR Description: cytochrome c oxidase subunit Vb precursor
MWRRIVSSGLKTLASDVAAASPRRSVATTTVRPLRFYLASNPASSSLLPRHFSSESVETVGKKKVEDVMPIATGHEKEELEAELEGRRLLDIDFPEGPFGTKEAPAIVKSYYDKRIVGCPGGEGEDEHDVVWFWLEKGKSFECPVCTQYFELEVVGPGGPPDGHGDEDDEHHH

SEQ ID NO: 20129 - protein, 112 aa, Zea mays subsp. mays
  peptide (1)..(112): Ceres Seq. ID no. 14309348
MTSELWDALVVKARMNTMLCGSGWRKESLLNAPFALSTLSWKWLVQVDLPMVTVMKTMSTTTDSGFSLAASFAFFFFIIFYWNKKHMLLVRQLKMFLILLEQHFGIGSCQNA

SEQ ID NO: 20130 - protein, 105 aa, Zea mays subsp. mays; identical to SEQ ID NO: 6596
  peptide (1)..(105): Ceres Seq. ID no. 14309349
  misc_feature (1)..(90): Pfam Name: Pfam Description:  Cytochrome c oxidase subunit Vb
  misc_feature (1)..(105): NCBI GI NO: 15232644 NR Description: cytochrome c oxidase subunit Vb -related
  misc_feature (1)..(104): NCBI GI NO: 21592567 NR Description: cytochrome c oxidase subunit, putative
  misc_feature (1)..(104): NCBI GI NO: 15220092 NR Description: cytochrome c oxidase subunit -related
  misc_feature (1)..(105): NCBI GI NO: 5803264 NR Description: ESTs AU057456
  misc_feature (1)..(105): NCBI GI NO: 34912592 NR Description: cytochrome c oxidase subunit Vb precursor
  misc_feature (1)..(43): NCBI GI NO: 7484634 NR Description: probable cytochrome-c oxidase (EC 1
  misc_feature (57)..(104): NCBI GI NO: 5903035 NR Description: Similar to gb|D85381 cytochrome c oxidase subunitVb precursor from Oryza sativa
  misc_feature (4)..(84): NCBI GI NO: 223590 NR Description: oxidase IV,cytochrome
  misc_feature (4)..(84): NCBI GI NO: 117102 NR Description: CYTOCHROME C OXIDASE POLYPEPTIDE VB (VI)
  misc_feature (4)..(84): NCBI GI NO: 17017988 NR Description: cytochrome c oxidase subunit Vb precursor

SEQ ID NO: 20131 - DNA, 797 bp, Zea mays subsp. mays
  misc_feature (1)..(797): Ceres Seq. ID no. 14309339
aatcggagcttggaagggttgagacttgagcgagcgagcgagagatgagcaactacgcgattccactttcttcttcgtcctctctctccaatgcctatcatcaaccttctcgtgtttgcttcgttttccgcaatcctcgttccaattttgagtttcgcgggacacgactaagtggtggggttcgaagaacctctttaaagtgcaattgctgcagcaaagggaagggaggtacaggtgaaaacgaaaacagaaatgtgttggatgctttctttttgggaaaggcactagctgaggttatcaacgagcgaattgagtccactgttggcgaagttttgggtaacattgggaggtttcaagctgagcaacagaagcaagttcaggagattcagggagaggtacttgaaagagccaagaaagctaaggaaagagcagctagagaatccatggaggcacaaggactcgtaccggaatccacaaacacaaacccaaagccggctgctggtgttgttgcctctgttgtaacccctacctcgatcgttgaaagcaaggctataagaaatgatgaaaagctgtctggtttctccggatcttcaatgggggacgatatggatagctcgagttctagcgacgaagacgaagacagtgtctaagcgattgttcctagaccaatttcaagatttggtgatagatgcagacttgtttgaaaccgttgagaacatcttcgttgatatatgtacttaaaatgatgtttgagaataaataaccttgatattaattatgtggatttttaaaagggc

SEQ ID NO: 20132 - protein, 201 aa, Zea mays subsp. mays
  peptide (1)..(201): Ceres Seq. ID no. 14309340
  misc_feature (1)..(197): NCBI GI NO: 21553912 NR Description: unknown [Arabidopsis thaliana]
  misc_feature (1)..(197): NCBI GI NO: 15235625 NR Description: expressed protein [Arabidopsis thaliana]
  misc_feature (71)..(129): NCBI GI NO: 23130619 NR Description: hypothetical protein [Nostoc punctiforme]
  misc_feature (71)..(129): NCBI GI NO: 17232006 NR Description: hypothetical protein [Nostoc sp. PCC 7120]
  misc_feature (71)..(156): NCBI GI NO: 16330265 NR Description: unknown protein [Synechocystis sp. PCC 6803]
MSNYAIPLSSSSSLSNAYHQPSRVCFVFRNPRSNFEFRGTRLSGGVRRTSLKCNCCSKGKGGTGENENRNVLDAFFLGKALAEVINERIESTVGEVLGNIGRFQAEQQKQVQEIQGEVLERAKKAKERAARESMEAQGLVPESTNTNPKPAAGVVASVVTPTSIVESKAIRNDEKLSGFSGSSMGDDMDSSSSSDEDEDSV

SEQ ID NO: 20133 - DNA, 1274 bp, Zea mays subsp. mays
  misc_feature (1)..(1274): Ceres Seq. ID no. 15180051
aacacaccaatctctcgccagaaaacacagaggatctcaatctcagatcgagagagaatgggtttctcttcccaagaaaacccttcttctctttacttcttcttcttctgtctctgtctctccacagtctctgcttacacaaacacaagcagcaacaatggtgtggaaggaggaagaagagagctagcttcttggagatgcaattggtttagagggagttgggtttatgatgtaacgtacccactttacgatccttacaaatgtccattcatagatccacagtttaactgcaagaagtatggtcgtcccgacaatctttatcttaagtatcgatggcaaccttcctcttgctctctccccagattcaatgggttgtatttcttgaggaagatgagagggaagaagataatgttcgttggagattcactaagcacaaatatgtggcaatctcttgcttgtctaattcacgcttgggttcctaacgctcgttacactcttcttcgccaaaagggtctcgcttccctcaccttcgaggactacggagtgacgttgaagctatacagaacacagttcttagtggatttagatgccgagaacgttggaagagtgcttaagcttgattccattaagcaaggcaaaatgtggagaggcatggacgtcttgattttcaacagttggcattggtggacccatatcgatcacatccagccgtgggactacatggaagatgggaaccgattgtacaaagacatgaacagactggtcgcttattacaaaggaatgaccacttgggctcgatgggttaatgcattcgtcaatccatctaagaccaaggttttcttcaatggtgtttctcctgtccattacgatggaagggattggggagagccaatgaagtcatgtaagagtcagacacaaccattctacgggaggaagtatccaggagggccaccagtggcttgggtgattttaaacaaagtgtttaggagattgaagaaaccagtctattggctcgacataaccggtctatctcagcttcgtaaagatgctcatccttctgcttacagtgggaaccatcctggtaatgactgtagccactggtgtcttcctggtctacctgatacttggaacgtactcttttactctgctcttttttcttgaagtctattttgttttatcatcaatgtataagttaccgaatagtctatttctttagttaattaactttgaattgtggtcgcttgattcttgactgaaataacgttttagatacc

SEQ ID NO: 20134 - protein, 386 aa, Zea mays subsp. mays
  peptide (1)..(386): Ceres Seq. ID no. 15180052
  misc_feature (20)..(386): NCBI GI NO: 18406003 NR Description: expressed protein [Arabidopsis thaliana]
  misc_feature (62)..(386): NCBI GI NO: 21593142 NR Description: unknown [Arabidopsis thaliana]
  misc_feature (62)..(386): NCBI GI NO: 28393769 NR Description: unknown protein [Arabidopsis thaliana]
  misc_feature (49)..(384): NCBI GI NO: 18396930 NR Description: expressed protein [Arabidopsis thaliana]
  misc_feature (48)..(386): NCBI GI NO: 34911864 NR Description: OSJNBb0032K15.9
  misc_feature (58)..(384): NCBI GI NO: 18403435 NR Description: expressed protein [Arabidopsis thaliana]
  misc_feature (49)..(384): NCBI GI NO: 25366741 NR Description: F28N24.24 protein - Arabidopsis thaliana
  misc_feature (67)..(385): NCBI GI NO: 15224585 NR Description: expressed protein [Arabidopsis thaliana]
  misc_feature (66)..(386): NCBI GI NO: 15219157 NR Description: hypothetical protein [Arabidopsis thaliana]
  misc_feature (51)..(381): NCBI GI NO: 15228743 NR Description: expressed protein [Arabidopsis thaliana]
NTPISRQKTQRISISDRERMGFSSQENPSSLYFFFFCLCLSTVSAYTNTSSNNGVEGGRRELASWRCNWFRGSWVYDVTYPLYDPYKCPFIDPQFNCKKYGRPDNLYLKYRWQPSSCSLPRFNGLYFLRKMRGKKIMFVGDSLSTNMWQSLACLIHAWVPNARYTLLRQKGLASLTFEDYGVTLKLYRTQFLVDLDAENVGRVLKLDSIKQGKMWRGMDVLIFNSWHWWTHIDHIQPWDYMEDGNRLYKDMNRLVAYYKGMTTWARWVNAFVNPSKTKVFFNGVSPVHYDGRDWGEPMKSCKSQTQPFYGRKYPGGPPVAWVILNKVFRRLKKPVYWLDITGLSQLRKDAHPSAYSGNHPGNDCSHWCLPGLPDTWNVLFYSALFS

SEQ ID NO: 20135 - protein, 367 aa, Zea mays subsp. mays
  peptide (1)..(367): Ceres Seq. ID no. 15180053
  misc_feature (1)..(367): NCBI GI NO: 18406003 NR Description: expressed protein [Arabidopsis thaliana]
  misc_feature (43)..(367): NCBI GI NO: 21593142 NR Description: unknown [Arabidopsis thaliana]
  misc_feature (43)..(367): NCBI GI NO: 28393769 NR Description: unknown protein [Arabidopsis thaliana]
  misc_feature (30)..(365): NCBI GI NO: 18396930 NR Description: expressed protein [Arabidopsis thaliana]
  misc_feature (29)..(367): NCBI GI NO: 34911864 NR Description: OSJNBb0032K15.9
  misc_feature (39)..(365): NCBI GI NO: 18403435 NR Description: expressed protein [Arabidopsis thaliana]
  misc_feature (30)..(365): NCBI GI NO: 25366741 NR Description: F28N24.24 protein - Arabidopsis thaliana
  misc_feature (48)..(366): NCBI GI NO: 15224585 NR Description: expressed protein [Arabidopsis thaliana]
  misc_feature (47)..(367): NCBI GI NO: 15219157 NR Description: hypothetical protein [Arabidopsis thaliana]
  misc_feature (32)..(362): NCBI GI NO: 15228743 NR Description: expressed protein [Arabidopsis thaliana]
MGFSSQENPSSLYFFFFCLCLSTVSAYTNTSSNNGVEGGRRELASWRCNWFRGSWVYDVTYPLYDPYKCPFIDPQFNCKKYGRPDNLYLKYRWQPSSCSLPRFNGLYFLRKMRGKKIMFVGDSLSTNMWQSLACLIHAWVPNARYTLLRQKGLASLTFEDYGVTLKLYRTQFLVDLDAENVGRVLKLDSIKQGKMWRGMDVLIFNSWHWWTHIDHIQPWDYMEDGNRLYKDMNRLVAYYKGMTTWARWVNAFVNPSKTKVFFNGVSPVHYDGRDWGEPMKSCKSQTQPFYGRKYPGGPPVAWVILNKVFRRLKKPVYWLDITGLSQLRKDAHPSAYSGNHPGNDCSHWCLPGLPDTWNVLFYSALFS

SEQ ID NO: 20136 - protein, 256 aa, Zea mays subsp. mays
  peptide (1)..(256): Ceres Seq. ID no. 15180054
  misc_feature (1)..(256): NCBI GI NO: 18406003 NR Description: expressed protein [Arabidopsis thaliana]
  misc_feature (1)..(256): NCBI GI NO: 21593142 NR Description: unknown [Arabidopsis thaliana]
  misc_feature (1)..(256): NCBI GI NO: 28393769 NR Description: unknown protein [Arabidopsis thaliana]
  misc_feature (1)..(254): NCBI GI NO: 18396930 NR Description: expressed protein [Arabidopsis thaliana]
  misc_feature (1)..(256): NCBI GI NO: 34911864 NR Description: OSJNBb0032K15.9
  misc_feature (1)..(254): NCBI GI NO: 18403435 NR Description: expressed protein [Arabidopsis thaliana]
  misc_feature (1)..(254): NCBI GI NO: 25366741 NR Description: F28N24.24 protein - Arabidopsis thaliana
  misc_feature (1)..(255): NCBI GI NO: 15224585 NR Description: expressed protein [Arabidopsis thaliana]
  misc_feature (1)..(256): NCBI GI NO: 15219157 NR Description: hypothetical protein [Arabidopsis thaliana]
  misc_feature (1)..(251): NCBI GI NO: 15228743 NR Description: expressed protein [Arabidopsis thaliana]
MRGKKIMFVGDSLSTNMWQSLACLIHAWVPNARYTLLRQKGLASLTFEDYGVTLKLYRTQFLVDLDAENVGRVLKLDSIKQGKMWRGMDVLIFNSWHWWTHIDHIQPWDYMEDGNRLYKDMNRLVAYYKGMTTWARWVNAFVNPSKTKVFFNGVSPVHYDGRDWGEPMKSCKSQTQPFYGRKYPGGPPVAWVILNKVFRRLKKPVYWLDITGLSQLRKDAHPSAYSGNHPGNDCSHWCLPGLPDTWNVLFYSALFS

SEQ ID NO: 20137 - DNA, 979 bp, Zea mays subsp. mays
  misc_feature (1)..(979): Ceres Seq. ID no. 15179147
atatacatttttcttgttcactagcttcgaagtttctttcgaatagttaaaaaaaacaaacaatggcgacggttcagttcttcaaccaattcccctgccaaacccgagtccaaagcccatcaaactcaaaacccctctccaagccaccgtcttcgctggtgccaatgagcgcgctcactcgccgtccgtcgttttcccccggagaaatcgccgtttctcgttctgatttcagagtcagagtcatcgatgcggaagacgagttggatccggagacgagtgagggaggaggatctgctctattgatggcggaggaagcaatcgaatctgtggaggaaacggaggctctcaagagatcgctggtggattcgttgtacggcacagaccgagggttgagcgcatcgagcgagacgagagccgagatcggagatctaatcacacagctcgagtccaagaaccctacaccagctcccaccgatgctctcttccttctcaacggcaaatggatccagattaagttcgaggaaggtgtgatcggcactcctcagctaacggattcgattgagatcccggagtatgttgagtttcttggtcagaagattgatcttactccgatcagagggttgcttacatcggtacaagacacggctacgtctgtggctagaaccatatcgagccagccaccgttgaaattctctttgcctggggacagtgctcagtcgtggctgctcacgacttatctggacaaggacattaggatctctagaggagatggtggaagcgtctttgtgcttatcaaagaaggaagccctctgttgaacccttgaactctttaatgccaagtacaaactaagtgtttaatatattgttgttgtagtgttaatcgtttgtatgtattaactcggatggtatggagttaagtaataatgttgtagctgctataaaaatacaaaaaaaaaaatatacaaatgttaagaatctc

SEQ ID NO: 20138 - protein, 253 aa, Zea mays subsp. mays; identical to SEQ ID NO: 11476
  peptide (1)..(253): Ceres Seq. ID no. 15179148
  misc_feature (93)..(148): Pfam Name: Pfam Description:  PAP_fibrillin
  misc_feature (1)..(148): NCBI GI NO: 21618237 NR Description: fibrillin precursor-like protein
  misc_feature (137)..(253): NCBI GI NO: 21618237 NR Description: fibrillin precursor-like protein
  misc_feature (1)..(148): NCBI GI NO: 22261807 NR Description: Light-induced protein, chloroplast precursor
  misc_feature (133)..(253): NCBI GI NO: 22261807 NR Description: Light-induced protein, chloroplast precursor
  misc_feature (1)..(148): NCBI GI NO: 25453087 NR Description: Light-induced protein, chloroplast precursor(C40
  misc_feature (133)..(253): NCBI GI NO: 25453087 NR Description: Light-induced protein, chloroplast precursor(C40
  misc_feature (1)..(180): NCBI GI NO: 14248556 NR Description: plastid-lipid associated protein PAP2
  misc_feature (1)..(180): NCBI GI NO: 14248550 NR Description: plastid-lipid associated protein PAP2
  misc_feature (133)..(253): NCBI GI NO: 7489179 NR Description: plastid-lipid-associated protein pap
  misc_feature (62)..(148): NCBI GI NO: 7489179 NR Description: plastid-lipid-associated protein pap

SEQ ID NO: 20139 - protein, 219 aa, Zea mays subsp. mays; identical to SEQ ID NO: 11477
  peptide (1)..(219): Ceres Seq. ID no. 15179149
  misc_feature (59)..(114): Pfam Name: Pfam Description:  PAP_fibrillin
  misc_feature (1)..(114): NCBI GI NO: 21618237 NR Description: fibrillin precursor-like protein
  misc_feature (103)..(219): NCBI GI NO: 21618237 NR Description: fibrillin precursor-like protein
  misc_feature (1)..(114): NCBI GI NO: 22261807 NR Description: Light-induced protein, chloroplast precursor
  misc_feature (99)..(219): NCBI GI NO: 22261807 NR Description: Light-induced protein, chloroplast precursor
  misc_feature (1)..(114): NCBI GI NO: 25453087 NR Description: Light-induced protein, chloroplast precursor(C40
  misc_feature (99)..(219): NCBI GI NO: 25453087 NR Description: Light-induced protein, chloroplast precursor(C40
  misc_feature (1)..(146): NCBI GI NO: 14248556 NR Description: plastid-lipid associated protein PAP2
  misc_feature (1)..(146): NCBI GI NO: 14248550 NR Description: plastid-lipid associated protein PAP2
  misc_feature (99)..(219): NCBI GI NO: 7489179 NR Description: plastid-lipid-associated protein pap
  misc_feature (28)..(114): NCBI GI NO: 7489179 NR Description: plastid-lipid-associated protein pap

SEQ ID NO: 20140 - protein, 173 aa, Zea mays subsp. mays; identical to SEQ ID NO: 11478
  peptide (1)..(173): Ceres Seq. ID no. 15179150
  misc_feature (13)..(68): Pfam Name: Pfam Description:  PAP_fibrillin
  misc_feature (1)..(68): NCBI GI NO: 21618237 NR Description: fibrillin precursor-like protein
  misc_feature (57)..(173): NCBI GI NO: 21618237 NR Description: fibrillin precursor-like protein
  misc_feature (1)..(68): NCBI GI NO: 22261807 NR Description: Light-induced protein, chloroplast precursor
  misc_feature (53)..(173): NCBI GI NO: 22261807 NR Description: Light-induced protein, chloroplast precursor
  misc_feature (1)..(68): NCBI GI NO: 25453087 NR Description: Light-induced protein, chloroplast precursor(C40
  misc_feature (53)..(173): NCBI GI NO: 25453087 NR Description: Light-induced protein, chloroplast precursor(C40
  misc_feature (1)..(100): NCBI GI NO: 14248556 NR Description: plastid-lipid associated protein PAP2
  misc_feature (1)..(100): NCBI GI NO: 14248550 NR Description: plastid-lipid associated protein PAP2
  misc_feature (53)..(173): NCBI GI NO: 7489179 NR Description: plastid-lipid-associated protein pap
  misc_feature (1)..(68): NCBI GI NO: 7489179 NR Description: plastid-lipid-associated protein pap

SEQ ID NO: 20141 - DNA, 1046 bp, Zea mays subsp. mays
  misc_feature (1)..(1046): Ceres Seq. ID no. 15179003
agattttgattttaaccggaatagtcactttcctccggcgattgagaggctaattcatcctccggggaggttaattaagatggaggtaatcactcatccaacacctcgaactgtcgatgaggtctttactgacttcagaggtcgacgagctggtcttatcaaggctctcaccaccgatatggtgaagttttaccaaacgtgcgatcctgagaaagagaacttgtgcctctatggacttcctaatgagacatgggaggttaatcttcccgtcgaggaagttcctcctgagcttcctgaacctgctttaggcatcaatttcgctagagacgggatgcaagaaaaggactgggtgtctctggtcgctgttcacagtgattcctggctgctttctgttgccttctactttggtgcacgttttgggtttggtaagaatgagaggaagaagctcttccagatgataaacgagctcccaaccattttcgagattgtaacgggcaatgcaaagcaatccaaggatctatctggtaacaacaacaccagtagcaaaagcaaatccaacggcttgaaggtaccaaagatgtcatctccaccgcctaaagaagaagatgagagtgaggacgaggatgaagacgatgaacaaggtgcggtgtgtggcgcctgtggagacagtgacggtacagatgagttctggatctgctgtgacgcctgcgagaagtggttccatgggaaatgtgtgaagataacacctgctaaggcagaacacatcaagcactacaaatgcccaagctgcagtaacaagagagccaggccttgatgtaaaagaattaggaagaaggtgtgaaagaaggagaaagaagtttccagtttattgaacgagggttttagaagatgtaagaagatttttaaaaatacgctttatgtttaaaattgcttagtctttgtttatggattgagactatttacaatttgagtgatgtctttctttgtttttctttggattatttgttgttgttgttaatgtcaatgcactactgatttggcctgct

SEQ ID NO: 20142 - protein, 270 aa, Zea mays subsp. mays
  peptide (1)..(270): Ceres Seq. ID no. 15179004
  misc_feature (216)..(266): Pfam Name: Pfam Description:  PHD-finger
  misc_feature (27)..(270): NCBI GI NO: 15226967 NR Description: PHD-type zinc finger protein -related
  misc_feature (27)..(270): NCBI GI NO: 21593407 NR Description: putative PHD-type zinc finger protein
  misc_feature (27)..(267): NCBI GI NO: 15223786 NR Description: nucleic acid binding protein (alfin-1) -related
  misc_feature (62)..(267): NCBI GI NO: 25346630 NR Description: F14L17.29 protein - Arabidopsis thaliana
  misc_feature (27)..(58): NCBI GI NO: 25346630 NR Description: F14L17.29 protein - Arabidopsis thaliana
  misc_feature (32)..(269): NCBI GI NO: 7488751 NR Description: probable zinc finger protein - alfalfa (fragment)
  misc_feature (35)..(269): NCBI GI NO: 15229157 NR Description: nucleic acid binding protein-related
  misc_feature (32)..(270): NCBI GI NO: 30687843 NR Description: zinc finger protein - like [Arabidopsis thaliana]
  misc_feature (35)..(269): NCBI GI NO: 15239624 NR Description: nucleic acid binding protein - like
  misc_feature (36)..(269): NCBI GI NO: 4091080 NR Description: nucleic acid binding protein [Oryza sativa]
DFDFNRNSHFPPAIERLIHPPGRLIKMEVITHPTPRTVDEVFTDFRGRRAGLIKALTTDMVKFYQTCDPEKENLCLYGLPNETWEVNLPVEEVPPELPEPALGINFARDGMQEKDWVSLVAVHSDSWLLSVAFYFGARFGFGKNERKKLFQMINELPTIFEIVTGNAKQSKDLSGNNNTSSKSKSNGLKVPKMSSPPPKEEDESEDEDEDDEQGAVCGACGDSDGTDEFWICCDACEKWFHGKCVKITPAKAEHIKHYKCPSCSNKRARP

SEQ ID NO: 20143 - protein, 244 aa, Zea mays subsp. mays
  peptide (1)..(244): Ceres Seq. ID no. 15179005
  misc_feature (190)..(240): Pfam Name: Pfam Description:  PHD-finger
  misc_feature (1)..(244): NCBI GI NO: 15226967 NR Description: PHD-type zinc finger protein -related
  misc_feature (1)..(244): NCBI GI NO: 21593407 NR Description: putative PHD-type zinc finger protein
  misc_feature (1)..(241): NCBI GI NO: 15223786 NR Description: nucleic acid binding protein (alfin-1) -related
  misc_feature (36)..(241): NCBI GI NO: 25346630 NR Description: F14L17.29 protein - Arabidopsis thaliana
  misc_feature (1)..(32): NCBI GI NO: 25346630 NR Description: F14L17.29 protein - Arabidopsis thaliana
  misc_feature (6)..(243): NCBI GI NO: 7488751 NR Description: probable zinc finger protein - alfalfa (fragment)
  misc_feature (9)..(243): NCBI GI NO: 15229157 NR Description: nucleic acid binding protein-related
  misc_feature (6)..(244): NCBI GI NO: 30687843 NR Description: zinc finger protein - like [Arabidopsis thaliana]
  misc_feature (9)..(243): NCBI GI NO: 15239624 NR Description: nucleic acid binding protein - like
  misc_feature (10)..(243): NCBI GI NO: 4091080 NR Description: nucleic acid binding protein [Oryza sativa]
MEVITHPTPRTVDEVFTDFRGRRAGLIKALTTDMVKFYQTCDPEKENLCLYGLPNETWEVNLPVEEVPPELPEPALGINFARDGMQEKDWVSLVAVHSDSWLLSVAFYFGARFGFGKNERKKLFQMINELPTIFEIVTGNAKQSKDLSGNNNTSSKSKSNGLKVPKMSSPPPKEEDESEDEDEDDEQGAVCGACGDSDGTDEFWICCDACEKWFHGKCVKITPAKAEHIKHYKCPSCSNKRARP

SEQ ID NO: 20144 - protein, 211 aa, Zea mays subsp. mays
  peptide (1)..(211): Ceres Seq. ID no. 15179006
  misc_feature (157)..(207): Pfam Name: Pfam Description:  PHD-finger
  misc_feature (1)..(211): NCBI GI NO: 15226967 NR Description: PHD-type zinc finger protein -related
  misc_feature (1)..(211): NCBI GI NO: 21593407 NR Description: putative PHD-type zinc finger protein
  misc_feature (1)..(208): NCBI GI NO: 15223786 NR Description: nucleic acid binding protein (alfin-1) -related
  misc_feature (3)..(208): NCBI GI NO: 25346630 NR Description: F14L17.29 protein - Arabidopsis thaliana
  misc_feature (1)..(210): NCBI GI NO: 7488751 NR Description: probable zinc finger protein - alfalfa (fragment)
  misc_feature (1)..(210): NCBI GI NO: 15229157 NR Description: nucleic acid binding protein-related
  misc_feature (1)..(211): NCBI GI NO: 30687843 NR Description: zinc finger protein - like [Arabidopsis thaliana]
  misc_feature (1)..(210): NCBI GI NO: 15239624 NR Description: nucleic acid binding protein - like
  misc_feature (1)..(210): NCBI GI NO: 4091080 NR Description: nucleic acid binding protein [Oryza sativa]
  misc_feature (1)..(209): NCBI GI NO: 14192880 NR Description: Putative nucleic acid binding protein
MVKFYQTCDPEKENLCLYGLPNETWEVNLPVEEVPPELPEPALGINFARDGMQEKDWVSLVAVHSDSWLLSVAFYFGARFGFGKNERKKLFQMINELPTIFEIVTGNAKQSKDLSGNNNTSSKSKSNGLKVPKMSSPPPKEEDESEDEDEDDEQGAVCGACGDSDGTDEFWICCDACEKWFHGKCVKITPAKAEHIKHYKCPSCSNKRARP

SEQ ID NO: 20145 - DNA, 1174 bp, Zea mays subsp. mays
  misc_feature (1)..(1174): Ceres Seq. ID no. 14309328
aatcggtacgatcagattgcataaaagcaaatcataataagtcacgtggcacagttttgtcagatccaagagaagaaatcagaaaaagaacttgaaacgatgccgtactacaccagagacgaggacgaagtcgacgatttcgacgagttcgatccgacgccgtacagtggaggctacgacatcaccgtgatctacggccgtccgatccctccttgcgacgacacttgctaccctctctcctccgcagcggatgaagatttcgagtacgagagacctgaattcacctcgtaccacgatccttccgcctacgccgaagaagctctcaacaccgagtacagcagctactcccgccccaagccccgtcccggatttcgacccggttcagccggtggcggtcatgtccaaggtgagagacccgatcccagttacggatccggatacggtggagcgacggaggctgagtacggtaggagacctgaatctggatatggtgggagatcggagacggagaccggatacggatccgggtatgagaagaaaccgagcttcggtgaagagaggagcgagtatgagcgtaagcctagctatggaaggtctggggaagaggaaggaggttacaggaagcctagctatgggagatctgaggatcaggttgagagctacataaagcccaccagctatgaaaggtctgaggaacaggaggaagggagttacaggaagcctagctatggccgcaatgatgacgatgatgatgaagagcgcaggaaccgttctggtgatgatgaggaaggcagctatggccgcaagaaatatggtggcaatgactctaatgatgatgatgaggagaagaagcagcatcgttacaagcatcaccaccaccagaggcgccgtgatgaagatgatgactaaaaccttctctcagtactggagagtgttatgatcaagtacttttgcttagcttcatcttactaaataataaaaaagctaaggcatttatctttggatgttgttgttgcgtttgtttgattctctttggatacagcagagtctgtgtctgactttgtttctggttcataataagaccttgaactgatatcgggtcatcatcatgtaaaaagtaaactgttgtttttgttttctcgatattaaatatcaaaagtcattgccgagaagt

SEQ ID NO: 20146 - protein, 269 aa, Zea mays subsp. mays
  peptide (1)..(269): Ceres Seq. ID no. 14309329
  misc_feature (1)..(268): NCBI GI NO: 9758332 NR Description: gene_id:MIJ24
  misc_feature (1)..(268): NCBI GI NO: 24417262 NR Description: unknown [Arabidopsis thaliana]
  misc_feature (1)..(269): NCBI GI NO: 15228587 NR Description: glycine-rich protein [Arabidopsis thaliana]
  misc_feature (68)..(269): NCBI GI NO: 9758332 NR Description: gene_id:MIJ24
  misc_feature (68)..(269): NCBI GI NO: 24417262 NR Description: unknown [Arabidopsis thaliana]
  misc_feature (1)..(245): NCBI GI NO: 21928162 NR Description: AT3g29075/MXE2_1 [Arabidopsis thaliana]
  misc_feature (88)..(269): NCBI GI NO: 9758332 NR Description: gene_id:MIJ24
  misc_feature (88)..(269): NCBI GI NO: 24417262 NR Description: unknown [Arabidopsis thaliana]
  misc_feature (6)..(236): NCBI GI NO: 32352182 NR Description: hypothetical protein
  misc_feature (72)..(268): NCBI GI NO: 32352182 NR Description: hypothetical protein
MPYYTRDEDEVDDFDEFDPTPYSGGYDITVIYGRPIPPCDDTCYPLSSAADEDFEYERPEFTSYHDPSAYAEEALNTEYSSYSRPKPRPGFRPGSAGGGHVQGERPDPSYGSGYGGATEAEYGRRPESGYGGRSETETGYGSGYEKKPSFGEERSEYERKPSYGRSGEEEGGYRKPSYGRSEDQVESYIKPTSYERSEEQEEGSYRKPSYGRNDDDDDEERRNRSGDDEEGSYGRKKYGGNDSNDDDEEKKQHRYKHHHHQRRRDEDDD

SEQ ID NO: 20147 - protein, 138 aa, Zea mays subsp. mays
  peptide (1)..(138): Ceres Seq. ID no. 14309330
  misc_feature (50)..(138): NCBI GI NO: 18421880 NR Description: expressed protein [Arabidopsis thaliana]
  misc_feature (1)..(138): NCBI GI NO: 18421880 NR Description: expressed protein [Arabidopsis thaliana]
MKISSTRDLNSPRTTILPPTPKKLSTPSTAATPAPSPVPDFDPVQPVAVMSKVRDPIPVTDPDTVERRRLSTVGDLNLDMVGDRRRRPDTDPGMRRNRASVKRGASMSVSLAMEGLGKRKEVTGSLAMGDLRIRLRAT

SEQ ID NO: 20148 - DNA, 1093 bp, Zea mays subsp. mays
  misc_feature (1)..(1093): Ceres Seq. ID no. 14309314
atggccaagccatcctctcctctgcccaaatccaaatcccaataacccaactctcctccttctctccttcctttccttcgtatggctgcaatcgcttctctttccttcccggcgctgggccaatctggaaagatttcgaatcccacgccttgtcgtcctctcgcctccgtctccgccatctgcaggagactttctcgccgctctctgacttcttccaggccttccacttcctcttcgaaattcgtcatccactgcatgtcaaatgctaccgatgtgccacctgtatcggagacaaagtcgaatttcctcaaagcttacaagcggcccatcccaagcatctacaacaccgtgttgcaggagctcatcgtgcagcagcatttgatgaggtacaaaaggacttaccgttacgaccccgttttcgcccttggctttgtaaccgtctacgatcagctcatggatgggtatccgagcgatcaggatcgtgattccattttccaagcttacgttgaagctttgaacgaggatcctaagcaataccgaattgatgcgcagaagatggaggaatgggccagaagtcagacgtctgcttcactagttgacttctcctctaaggaaggagaagttgaagcgattcttaaggacatttcagaaagagctggcagtaaggagggtttcagttacagcaggttcttcgctgttggcctctttcgcttgcttgagcttgcaggtgctactgatccaactgtccttgacaagctttgtgcgtccctaaatatcaacaagaaaagcgtggatcgggacctcgatgtgtatcgcaacctgctgtcaaagcttgtccaagccaaggaactactcaaggagtatgtcgagagggagaagaagaagagaggggaaagagccgaatcccagaaagctaacgaatcaatctccaagtctctgggagataatagcctatctttcttcgtttaatgaaaatcctaaaacaatctatttgtgattttttttgttttattgttcttagtaacgacatcaacttcttgacttgagatatacatatgctcattcctaagaacaaacatcactctgtctttcg

SEQ ID NO: 20149 - protein, 295 aa, Zea mays subsp. mays
  peptide (1)..(295): Ceres Seq. ID no. 14309315
  misc_feature (3)..(295): NCBI GI NO: 18399513 NR Description: expressed protein [Arabidopsis thaliana]
  misc_feature (3)..(295): NCBI GI NO: 21592994 NR Description: unknown [Arabidopsis thaliana]
  misc_feature (1)..(288): NCBI GI NO: 33469614 NR Description: light-regulated chloroplast-localized protein
  misc_feature (1)..(291): NCBI GI NO: 29367385 NR Description: inositol phosphatase-like protein
  misc_feature (68)..(283): NCBI GI NO: 23041708 NR Description: hypothetical protein
  misc_feature (68)..(283): NCBI GI NO: 17228142 NR Description: hypothetical protein [Nostoc sp. PCC 7120]
  misc_feature (68)..(283): NCBI GI NO: 22298677 NR Description: ORF_ID:tlr1134~hypothetical protein
  misc_feature (64)..(278): NCBI GI NO: 23124166 NR Description: hypothetical protein [Nostoc punctiforme]
  misc_feature (68)..(276): NCBI GI NO: 37520969 NR Description: hypothetical protein glr1400
  misc_feature (63)..(275): NCBI GI NO: 16330615 NR Description: hypothetical protein [Synechocystis sp. PCC 6803]
MAAIASLSFPALGQSGKISNPTPCRPLASVSAICRRLSRRSLTSSRPSTSSSKFVIHCMSNATDVPPVSETKSNFLKAYKRPIPSIYNTVLQELIVQQHLMRYKRTYRYDPVFALGFVTVYDQLMDGYPSDQDRDSIFQAYVEALNEDPKQYRIDAQKMEEWARSQTSASLVDFSSKEGEVEAILKDISERAGSKEGFSYSRFFAVGLFRLLELAGATDPTVLDKLCASLNINKKSVDRDLDVYRNLLSKLVQAKELLKEYVEREKKKRGERAESQKANESISKSLGDNSLSFFV

SEQ ID NO: 20150 - protein, 237 aa, Zea mays subsp. mays
  peptide (1)..(237): Ceres Seq. ID no. 14309316
  misc_feature (1)..(237): NCBI GI NO: 18399513 NR Description: expressed protein [Arabidopsis thaliana]
  misc_feature (1)..(237): NCBI GI NO: 21592994 NR Description: unknown [Arabidopsis thaliana]
  misc_feature (1)..(230): NCBI GI NO: 33469614 NR Description: light-regulated chloroplast-localized protein
  misc_feature (1)..(233): NCBI GI NO: 29367385 NR Description: inositol phosphatase-like protein
  misc_feature (10)..(225): NCBI GI NO: 23041708 NR Description: hypothetical protein
  misc_feature (10)..(225): NCBI GI NO: 17228142 NR Description: hypothetical protein [Nostoc sp. PCC 7120]
  misc_feature (10)..(225): NCBI GI NO: 22298677 NR Description: ORF_ID:tlr1134~hypothetical protein
  misc_feature (6)..(220): NCBI GI NO: 23124166 NR Description: hypothetical protein [Nostoc punctiforme]
  misc_feature (10)..(218): NCBI GI NO: 37520969 NR Description: hypothetical protein glr1400
  misc_feature (5)..(217): NCBI GI NO: 16330615 NR Description: hypothetical protein [Synechocystis sp. PCC 6803]
MSNATDVPPVSETKSNFLKAYKRPIPSIYNTVLQELIVQQHLMRYKRTYRYDPVFALGFVTVYDQLMDGYPSDQDRDSIFQAYVEALNEDPKQYRIDAQKMEEWARSQTSASLVDFSSKEGEVEAILKDISERAGSKEGFSYSRFFAVGLFRLLELAGATDPTVLDKLCASLNINKKSVDRDLDVYRNLLSKLVQAKELLKEYVEREKKKRGERAESQKANESISKSLGDNSLSFFV

SEQ ID NO: 20151 - protein, 195 aa, Zea mays subsp. mays
  peptide (1)..(195): Ceres Seq. ID no. 14309317
  misc_feature (1)..(195): NCBI GI NO: 18399513 NR Description: expressed protein [Arabidopsis thaliana]
  misc_feature (1)..(195): NCBI GI NO: 21592994 NR Description: unknown [Arabidopsis thaliana]
  misc_feature (1)..(188): NCBI GI NO: 33469614 NR Description: light-regulated chloroplast-localized protein
  misc_feature (1)..(191): NCBI GI NO: 29367385 NR Description: inositol phosphatase-like protein
  misc_feature (1)..(183): NCBI GI NO: 23041708 NR Description: hypothetical protein
  misc_feature (1)..(183): NCBI GI NO: 17228142 NR Description: hypothetical protein [Nostoc sp. PCC 7120]
  misc_feature (1)..(183): NCBI GI NO: 22298677 NR Description: ORF_ID:tlr1134~hypothetical protein
  misc_feature (1)..(178): NCBI GI NO: 23124166 NR Description: hypothetical protein [Nostoc punctiforme]
  misc_feature (1)..(176): NCBI GI NO: 37520969 NR Description: hypothetical protein glr1400
  misc_feature (1)..(175): NCBI GI NO: 16330615 NR Description: hypothetical protein [Synechocystis sp. PCC 6803]
MRYKRTYRYDPVFALGFVTVYDQLMDGYPSDQDRDSIFQAYVEALNEDPKQYRIDAQKMEEWARSQTSASLVDFSSKEGEVEAILKDISERAGSKEGFSYSRFFAVGLFRLLELAGATDPTVLDKLCASLNINKKSVDRDLDVYRNLLSKLVQAKELLKEYVEREKKKRGERAESQKANESISKSLGDNSLSFFV

SEQ ID NO: 20152 - DNA, 803 bp, Zea mays subsp. mays
  misc_feature (1)..(803): Ceres Seq. ID no. 14309300
gtcgtcttcttgccgagaaaaaaaaaattaaaagagcctcgaaaaattcacagacttgtctcccctctccctctctttctcactctttagtagcttctgaaaatttcacagccctaaacaaacaaaaatgagcaagttctggactttcctcaccgctcttcactcaggcgctggtcctctggtgatgttggtgtatccattgtacgcatcggtggtggcaatggagagcacaacgaaagtagacgatgagcagtggcttgcctactggatcatttactccttcctcaccctcactgagctgattctgcagtcgcttcttgagtggatcccgatctggtactcggtgaaactggtgtttgtagcttggttggttctgcctcagttccatggtgcagctttcatctacaaccgtgtggtgagagaacagttcaagaaacacggcttcttcggctcctcctttcacaccaaacactccaaacccaacatcatccactccattttccaccgggagggacacgaggctcactctcactgacgccaaagcagaggagaagctcgaatagcattgtagcggagttggtggtggcccccgtcttgtcttaagtctaatctttacttttgttttagttttatttaataatttgagaaatgtgatggatgatgactaatgaggtgtgtgatcgtttaaaagtagaaatggcttcttgttgtttttgttgttgttgtattgctttagcttccacgcgtatcttccatttgggaacacaagtgttaacgctattgtttcaatcgctttctaatgc

SEQ ID NO: 20153 - protein, 135 aa, Zea mays subsp. mays
  peptide (1)..(135): Ceres Seq. ID no. 14309301
  misc_feature (4)..(101): Pfam Name: Pfam Description:  TB2/DP1, HVA22 family
  misc_feature (1)..(135): NCBI GI NO: 18416458 NR Description: abscisic acid-induced - like protein
  misc_feature (20)..(127): NCBI GI NO: 7484787 NR Description: abscisic acid-induced protein homolog F13M23
  misc_feature (1)..(105): NCBI GI NO: 18423191 NR Description: expressed protein [Arabidopsis thaliana]
  misc_feature (20)..(105): NCBI GI NO: 8777395 NR Description: gene_id:MFB16
  misc_feature (1)..(135): NCBI GI NO: 33342176 NR Description: hypothetical protein [Triticum aestivum]
  misc_feature (1)..(104): NCBI GI NO: 1076715 NR Description: abscisic acid-induced protein HVA22 - barley
  misc_feature (15)..(101): NCBI GI NO: 15221266 NR Description: AtHVA22a [Arabidopsis thaliana]
  misc_feature (17)..(102): NCBI GI NO: 15222421 NR Description: AtHVA22c [Arabidopsis thaliana]
  misc_feature (15)..(98): NCBI GI NO: 4884934 NR Description: AtHVA22b [Arabidopsis thaliana]
  misc_feature (15)..(98): NCBI GI NO: 15241840 NR Description: AtHVA22b-related protein [Arabidopsis thaliana]
MSKFWTFLTALHSGAGPLVMLVYPLYASVVAMESTTKVDDEQWLAYWIIYSFLTLTELILQSLLEWIPIWYSVKLVFVAWLVLPQFHGAAFIYNRVVREQFKKHGFFGSSFHTKHSKPNIIHSIFHREGHEAHSH

SEQ ID NO: 20154 - protein, 116 aa, Zea mays subsp. mays
  peptide (1)..(116): Ceres Seq. ID no. 14309302
  misc_feature (1)..(82): Pfam Name: Pfam Description:  TB2/DP1, HVA22 family
  misc_feature (1)..(116): NCBI GI NO: 18416458 NR Description: abscisic acid-induced - like protein
  misc_feature (1)..(108): NCBI GI NO: 7484787 NR Description: abscisic acid-induced protein homolog F13M23
  misc_feature (1)..(86): NCBI GI NO: 18423191 NR Description: expressed protein [Arabidopsis thaliana]
  misc_feature (1)..(86): NCBI GI NO: 8777395 NR Description: gene_id:MFB16
  misc_feature (1)..(116): NCBI GI NO: 33342176 NR Description: hypothetical protein [Triticum aestivum]
  misc_feature (1)..(85): NCBI GI NO: 1076715 NR Description: abscisic acid-induced protein HVA22 - barley
  misc_feature (1)..(82): NCBI GI NO: 15221266 NR Description: AtHVA22a [Arabidopsis thaliana]
  misc_feature (1)..(83): NCBI GI NO: 15222421 NR Description: AtHVA22c [Arabidopsis thaliana]
  misc_feature (1)..(79): NCBI GI NO: 4884934 NR Description: AtHVA22b [Arabidopsis thaliana]
  misc_feature (1)..(79): NCBI GI NO: 15241840 NR Description: AtHVA22b-related protein [Arabidopsis thaliana]
MLVYPLYASVVAMESTTKVDDEQWLAYWIIYSFLTLTELILQSLLEWIPIWYSVKLVFVAWLVLPQFHGAAFIYNRVVREQFKKHGFFGSSFHTKHSKPNIIHSIFHREGHEAHSH

SEQ ID NO: 20155 - protein, 104 aa, Zea mays subsp. mays
  peptide (1)..(104): Ceres Seq. ID no. 14309303
  misc_feature (1)..(70): Pfam Name: Pfam Description:  TB2/DP1, HVA22 family
  misc_feature (1)..(104): NCBI GI NO: 18416458 NR Description: abscisic acid-induced - like protein
  misc_feature (1)..(96): NCBI GI NO: 7484787 NR Description: abscisic acid-induced protein homolog F13M23
  misc_feature (1)..(74): NCBI GI NO: 18423191 NR Description: expressed protein [Arabidopsis thaliana]
  misc_feature (1)..(74): NCBI GI NO: 8777395 NR Description: gene_id:MFB16
  misc_feature (1)..(104): NCBI GI NO: 33342176 NR Description: hypothetical protein [Triticum aestivum]
  misc_feature (1)..(73): NCBI GI NO: 1076715 NR Description: abscisic acid-induced protein HVA22 - barley
  misc_feature (1)..(70): NCBI GI NO: 15221266 NR Description: AtHVA22a [Arabidopsis thaliana]
  misc_feature (1)..(71): NCBI GI NO: 15222421 NR Description: AtHVA22c [Arabidopsis thaliana]
  misc_feature (1)..(67): NCBI GI NO: 4884934 NR Description: AtHVA22b [Arabidopsis thaliana]
  misc_feature (1)..(67): NCBI GI NO: 15241840 NR Description: AtHVA22b-related protein [Arabidopsis thaliana]
MESTTKVDDEQWLAYWIIYSFLTLTELILQSLLEWIPIWYSVKLVFVAWLVLPQFHGAAFIYNRVVREQFKKHGFFGSSFHTKHSKPNIIHSIFHREGHEAHSH

SEQ ID NO: 20156 - DNA, 1269 bp, Zea mays subsp. mays
  misc_feature (1)..(1269): Ceres Seq. ID no. 15179023
atatcatcttctagatatagtttctcttcttcttataaacttcgtatactccattttaaggaaacgggagagtacacgtagtgtgtcagagggtgagaatcccaatgaggatcttacccgagcctctaggttcggttccatgcctcattctcctcgtgtcgtcggttctattttcagcgactctatccctcgctcgtgtcgtcgaagttgttggttacgccgagagcaaaatcaaaaatccccatgcattcacaggactccgagtgacgattgaatgtaagggggagaaagggcattttgttacaaaaggttctggaaacattgatgaggaaggaaagttcggtctgaaagttcttcctcatgacattatctctgacgacggagccttaaaggaggagtgttatgcccagcttcacagtgcggcgggagcaccttgtccggctcacgacggccttgagtcaaacaagatcgtgtttctatacacatccggagacaaacacgttttgggcctcaaacaaaacctgaggtttacacctgaactttgtgtttccaaattcttttggcctatgcctaagttccctcctgttaagggatttgaacatcatttccctttacctccaccgtttcctaaattcaagaaaccttgcccacctccccctgaggaggttccaccaccaccaaaggtagagcttccgccacctgtcccggttcacgatccacccccgaaggtggagcttccaccaccggctcctaagaagccttgtcctcctaaatcgccgaagatagagcacccacctcctgttcccgtttacaagccgccaccaaagatagagcattcacctcctaagaagccatgcccaccgccggttcacgttcacaagccgccaccgaagaaggcatgccccccaaagatcgagcttccaccaccagtcccgatctacaagccgccgccgaagatagagcatccaccaatctacgtgccaccggtggtgattccgaagaagccgtgtccaccacttccaaagtttccacatcttcctcctaaatacattcaccatcccaagttcggcaaatggcctcccttgccaacacacccttgaaactttaaacgtttactcgtatattttttttaaaaattattgcatgcatgtttaatattttggttgcttttgtctcatttaatctttgtttgctttatctccgatcgagttatatatatgtagactgtttgcgtaactattccagcaataatatggtaatgattccttt

SEQ ID NO: 20157 - protein, 331 aa, Zea mays subsp. mays
  peptide (1)..(331): Ceres Seq. ID no. 15179024
  misc_feature (154)..(329): Pfam Name: Pfam Description:  Extensin-like region
  misc_feature (1)..(330): NCBI GI NO: 15234785 NR Description: proline-rich protein family [Arabidopsis thaliana]
  misc_feature (1)..(330): NCBI GI NO: 6782442 NR Description: proline-rich protein [Arabidopsis thaliana]
  misc_feature (1)..(330): NCBI GI NO: 7620015 NR Description: proline-rich protein 4 [Arabidopsis thaliana]
  misc_feature (1)..(331): NCBI GI NO: 15226468 NR Description: proline-rich protein family [Arabidopsis thaliana]
  misc_feature (1)..(325): NCBI GI NO: 7620011 NR Description: proline-rich protein 2 [Arabidopsis thaliana]
  misc_feature (16)..(328): NCBI GI NO: 7489265 NR Description: proline-rich protein GPP1 - potato
  misc_feature (154)..(331): NCBI GI NO: 6782442 NR Description: proline-rich protein [Arabidopsis thaliana]
  misc_feature (154)..(331): NCBI GI NO: 7620015 NR Description: proline-rich protein 4 [Arabidopsis thaliana]
  misc_feature (154)..(330): NCBI GI NO: 15234785 NR Description: proline-rich protein family [Arabidopsis thaliana]
  misc_feature (154)..(330): NCBI GI NO: 6782442 NR Description: proline-rich protein [Arabidopsis thaliana]
MRILPEPLGSVPCLILLVSSVLFSATLSLARVVEVVGYAESKIKNPHAFTGLRVTIECKGEKGHFVTKGSGNIDEEGKFGLKVLPHDIISDDGALKEECYAQLHSAAGAPCPAHDGLESNKIVFLYTSGDKHVLGLKQNLRFTPELCVSKFFWPMPKFPPVKGFEHHFPLPPPFPKFKKPCPPPPEEVPPPPKVELPPPVPVHDPPPKVELPPPAPKKPCPPKSPKIEHPPPVPVYKPPPKIEHSPPKKPCPPPVHVHKPPPKKACPPKIELPPPVPIYKPPPKIEHPPIYVPPVVIPKKPCPPLPKFPHLPPKYIHHPKFGKWPPLPTHP

SEQ ID NO: 20158 - protein, 177 aa, Zea mays subsp. mays
  peptide (1)..(177): Ceres Seq. ID no. 15179025
  misc_feature (1)..(175): Pfam Name: Pfam Description:  Extensin-like region
  misc_feature (1)..(176): NCBI GI NO: 15234785 NR Description: proline-rich protein family [Arabidopsis thaliana]
  misc_feature (1)..(176): NCBI GI NO: 6782442 NR Description: proline-rich protein [Arabidopsis thaliana]
  misc_feature (1)..(176): NCBI GI NO: 7620015 NR Description: proline-rich protein 4 [Arabidopsis thaliana]
  misc_feature (1)..(177): NCBI GI NO: 15226468 NR Description: proline-rich protein family [Arabidopsis thaliana]
  misc_feature (1)..(171): NCBI GI NO: 7620011 NR Description: proline-rich protein 2 [Arabidopsis thaliana]
  misc_feature (1)..(174): NCBI GI NO: 7489265 NR Description: proline-rich protein GPP1 - potato
  misc_feature (1)..(177): NCBI GI NO: 6782442 NR Description: proline-rich protein [Arabidopsis thaliana]
  misc_feature (1)..(177): NCBI GI NO: 7620015 NR Description: proline-rich protein 4 [Arabidopsis thaliana]
  misc_feature (1)..(176): NCBI GI NO: 15234785 NR Description: proline-rich protein family [Arabidopsis thaliana]
  misc_feature (1)..(176): NCBI GI NO: 6782442 NR Description: proline-rich protein [Arabidopsis thaliana]
MPKFPPVKGFEHHFPLPPPFPKFKKPCPPPPEEVPPPPKVELPPPVPVHDPPPKVELPPPAPKKPCPPKSPKIEHPPPVPVYKPPPKIEHSPPKKPCPPPVHVHKPPPKKACPPKIELPPPVPIYKPPPKIEHPPIYVPPVVIPKKPCPPLPKFPHLPPKYIHHPKFGKWPPLPTHP

SEQ ID NO: 20159 - DNA, 912 bp, Zea mays subsp. mays
  misc_feature (1)..(912): Ceres Seq. ID no. 15174355
aacactacccacacgcctttcatcatcctttcgctactcccatcttcttcttcttttaatcttcttatcgccatagctctagcttgcaatagaagctgtacagttaaccttaaggttttattagtttttttggtttgttggaaagaaagaaaggaacgatgaaccactgggcggtccagccaaacgctttcggtgatcagagtgttgttgtctgcccaaaaccacgtcggattgctctccgtaacccttccctctaccaccatcccgctcgttctctccgttgttacttcagtcatcaacaagtggaggtgtgtgaatccgaggcagagactgatatcttagatatcatactcacaaaggatggttatggtacggaacaagttcaggctcaggtattagactcgccgtccccgtttttatgtgggtcgccgccgagcagagtcgctaaccctttaacccaggatgctcgtttcagagatgaactctcactggtctcttcatcgatctcgactccgctaggccaacctcagtcctcctcaggtaggaaaggaggatgtgttagaggcagttttggtagcagcccagcggttaggattgaagggttcgattgcctcgacagggacagtagaaactgcagcatccctgccttggcatgagaacccaacgtcggaaaccaccaaccacatactctgttgaattagctcacaaaaaccaattagtgcgtcgtacataatgagttaagtatatggagaatttgtggaaatctttgagggaagttgagagagagatagatccctttggagtttttctaaagagtgtgtaaataggagaaattttcttggctaagtttgtagtaatggtcattttgtaaaaagagtattaaggcagaaaatcagttgttgaggagagacc

SEQ ID NO: 20160 - protein, 165 aa, Zea mays subsp. mays
  peptide (1)..(165): Ceres Seq. ID no. 15174356
  misc_feature (1)..(165): NCBI GI NO: 18409044 NR Description: expressed protein [Arabidopsis thaliana]
  misc_feature (1)..(165): NCBI GI NO: 15222278 NR Description: expressed protein [Arabidopsis thaliana]
  misc_feature (1)..(165): NCBI GI NO: 30685676 NR Description: expressed protein [Arabidopsis thaliana]
  misc_feature (1)..(165): NCBI GI NO: 11762168 NR Description: AT5g16110 [Arabidopsis thaliana]
  misc_feature (1)..(165): NCBI GI NO: 18396232 NR Description: expressed protein [Arabidopsis thaliana]
MNHWAVQPNAFGDQSVVVCPKPRRIALRNPSLYHHPARSLRCYFSHQQVEVCESEAETDILDIILTKDGYGTEQVQAQVLDSPSPFLCGSPPSRVANPLTQDARFRDELSLVSSSISTPLGQPQSSSGRKGGCVRGSFGSSPAVRIEGFDCLDRDSRNCSIPALA

SEQ ID NO: 20161 - DNA, 1149 bp, Zea mays subsp. mays
  misc_feature (1)..(1149): Ceres Seq. ID no. 14309296
gaatcttcttatctgggtcttcctcgttttctccgcttttaagccatgaaagtcaccgtcgtctcccgcagcggcagagaagttctcaaagcccccctcgacctccccgattcggcgactgttgctgatctgcaggaagcttttcataagagagctaagaagttttacccgtcgaggcaaagactgactctccccgtggctcctggctcaaaggacaaaccggttgtcctcaacagcaagaagtcactcaaagagtactgtgatggaaacacagactccttaaccgtagtcttcaaggacttgggagcacaagtctcataccacacgctcttcttcttcgagtacctaggcccgctcctaatctacccggtcttctactacttccctgtctacaaatacctgggctacggcgaagaccgtgtgatccacccggtccagacctacgccatgtactactggtgctttcactacttcaaacgtatcatggaaacgttcttcgtccataggttcagccacgcgacttcaccgatagggaacgtgttcaggaactgtgcttactactggacctttggtgcttacattgcgtattacgtgaaccaccctttgtacacgccggtgagtgaccttcagatgaagatcggtttcgggtttggtttggtctgccaagtcgcaaacttttactgtcacattctgttgaagaatctgagagaccctagtggctctggagggtaccagatcccacgtggcttcctcttcaacattgttacgtgtgccaattacacgactgagatttaccagtggctagggttcaacatcgctactcagaccgttgcgggatacgttttcttggctgttgcggctctgattatgactaactgggctcttggaaagcacagccgtctgagaaagatatttgatgggaaagatgggaagccaaagtatccaagaagatgggtgatcttacctccattcctgtagaagactcatcgttgtgatcctcgtttttatcagtttaaaactctattaataaggttgtcaaagagatttgcaagatgtgtggtttcctctgtattggttgttccttttgttttgatatgttttgtaagtttagagattttagaaacatgcttctttaatcgtttatcacgc

SEQ ID NO: 20162 - protein, 310 aa, Zea mays subsp. mays
  peptide (1)..(310): Ceres Seq. ID no. 14309297
  misc_feature (158)..(310): Pfam Name: Pfam Description:  3-oxo-5-alpha-steroid 4-dehydrogenase
  misc_feature (1)..(310): NCBI GI NO: 15233250 NR Description: 3-oxo-5-alpha-steroid 4-dehydrogenase
  misc_feature (1)..(310): NCBI GI NO: 34895848 NR Description: putative glycoprotein
  misc_feature (1)..(310): NCBI GI NO: 25004880 NR Description: steroid 5-alpha reductase [Cicer arietinum]
  misc_feature (2)..(310): NCBI GI NO: 33585860 NR Description: Glycoprotein, synaptic 2 [Xenopus laevis]
  misc_feature (23)..(307): NCBI GI NO: 31418870 NR Description: Unknown (protein for MGC:64025) [Danio rerio]
  misc_feature (2)..(310): NCBI GI NO: 13111809 NR Description: Unknown (protein for IMAGE:2901253) [Homo sapiens]
  misc_feature (2)..(310): NCBI GI NO: 30585427 NR Description: Homo sapiens glycoprotein, synaptic 2
  misc_feature (2)..(310): NCBI GI NO: 24475816 NR Description: glycoprotein, synaptic 2
  misc_feature (24)..(310): NCBI GI NO: 19924091 NR Description: synaptic glycoprotein SC2 [Rattus norvegicus]
  misc_feature (24)..(310): NCBI GI NO: 19923070 NR Description: synaptic glycoprotein SC2
MKVTVVSRSGREVLKAPLDLPDSATVADLQEAFHKRAKKFYPSRQRLTLPVAPGSKDKPVVLNSKKSLKEYCDGNTDSLTVVFKDLGAQVSYHTLFFFEYLGPLLIYPVFYYFPVYKYLGYGEDRVIHPVQTYAMYYWCFHYFKRIMETFFVHRFSHATSPIGNVFRNCAYYWTFGAYIAYYVNHPLYTPVSDLQMKIGFGFGLVCQVANFYCHILLKNLRDPSGSGGYQIPRGFLFNIVTCANYTTEIYQWLGFNIATQTVAGYVFLAVAALIMTNWALGKHSRLRKIFDGKDGKPKYPRRWVILPPFL

SEQ ID NO: 20163 - protein, 176 aa, Zea mays subsp. mays
  peptide (1)..(176): Ceres Seq. ID no. 14309298
  misc_feature (24)..(176): Pfam Name: Pfam Description:  3-oxo-5-alpha-steroid 4-dehydrogenase
  misc_feature (1)..(176): NCBI GI NO: 15233250 NR Description: 3-oxo-5-alpha-steroid 4-dehydrogenase
  misc_feature (1)..(176): NCBI GI NO: 34895848 NR Description: putative glycoprotein
  misc_feature (1)..(176): NCBI GI NO: 25004880 NR Description: steroid 5-alpha reductase [Cicer arietinum]
  misc_feature (1)..(176): NCBI GI NO: 33585860 NR Description: Glycoprotein, synaptic 2 [Xenopus laevis]
  misc_feature (1)..(173): NCBI GI NO: 31418870 NR Description: Unknown (protein for MGC:64025) [Danio rerio]
  misc_feature (1)..(176): NCBI GI NO: 13111809 NR Description: Unknown (protein for IMAGE:2901253) [Homo sapiens]
  misc_feature (1)..(176): NCBI GI NO: 30585427 NR Description: Homo sapiens glycoprotein, synaptic 2
  misc_feature (1)..(176): NCBI GI NO: 24475816 NR Description: glycoprotein, synaptic 2
  misc_feature (1)..(176): NCBI GI NO: 19924091 NR Description: synaptic glycoprotein SC2 [Rattus norvegicus]
  misc_feature (1)..(176): NCBI GI NO: 19923070 NR Description: synaptic glycoprotein SC2
MYYWCFHYFKRIMETFFVHRFSHATSPIGNVFRNCAYYWTFGAYIAYYVNHPLYTPVSDLQMKIGFGFGLVCQVANFYCHILLKNLRDPSGSGGYQIPRGFLFNIVTCANYTTEIYQWLGFNIATQTVAGYVFLAVAALIMTNWALGKHSRLRKIFDGKDGKPKYPRRWVILPPFL

SEQ ID NO: 20164 - protein, 164 aa, Zea mays subsp. mays
  peptide (1)..(164): Ceres Seq. ID no. 14309299
  misc_feature (12)..(164): Pfam Name: Pfam Description:  3-oxo-5-alpha-steroid 4-dehydrogenase
  misc_feature (1)..(164): NCBI GI NO: 15233250 NR Description: 3-oxo-5-alpha-steroid 4-dehydrogenase
  misc_feature (1)..(164): NCBI GI NO: 34895848 NR Description: putative glycoprotein
  misc_feature (1)..(164): NCBI GI NO: 25004880 NR Description: steroid 5-alpha reductase [Cicer arietinum]
  misc_feature (1)..(164): NCBI GI NO: 33585860 NR Description: Glycoprotein, synaptic 2 [Xenopus laevis]
  misc_feature (1)..(161): NCBI GI NO: 31418870 NR Description: Unknown (protein for MGC:64025) [Danio rerio]
  misc_feature (1)..(164): NCBI GI NO: 13111809 NR Description: Unknown (protein for IMAGE:2901253) [Homo sapiens]
  misc_feature (1)..(164): NCBI GI NO: 30585427 NR Description: Homo sapiens glycoprotein, synaptic 2
  misc_feature (1)..(164): NCBI GI NO: 24475816 NR Description: glycoprotein, synaptic 2
  misc_feature (1)..(164): NCBI GI NO: 19924091 NR Description: synaptic glycoprotein SC2 [Rattus norvegicus]
  misc_feature (1)..(164): NCBI GI NO: 19923070 NR Description: synaptic glycoprotein SC2
METFFVHRFSHATSPIGNVFRNCAYYWTFGAYIAYYVNHPLYTPVSDLQMKIGFGFGLVCQVANFYCHILLKNLRDPSGSGGYQIPRGFLFNIVTCANYTTEIYQWLGFNIATQTVAGYVFLAVAALIMTNWALGKHSRLRKIFDGKDGKPKYPRRWVILPPFL

SEQ ID NO: 20165 - DNA, 916 bp, Zea mays subsp. mays
  misc_feature (1)..(916): Ceres Seq. ID no. 14309294
acactctttctctagaaaatggagaccattctctctcctcgttgtctatctcctcctctcattccaaaactatcatcttctcatcaatccaaacatgctacttcttcttctttggctctctcgaatcccaccgtcttgggcccgaaacacctttccactcggtttagtgctaaaccagaatcttggttaacagatgcaaagcaaggactagctgctttatctctttctctggctcttactttctcacctgttggcactgccttagcctctgagttcaatattctcaacgatggtccacccaaagaaacttacgttgtggacgacgctggtgttcttagtcgagttacgagatcagatctgaagaaactcttgtctgatcttgaatacagaaagaaactccgactcaatttcatcactgtccggaagctcactagtaaagcagatgcgtttgagtatgcagaccaggttctggagaaatggtatccttcgattgaagaaggcaacaataagggtattgttgttttgattactagccagaaggaaggggcaattactggtggtcctgccttcattgaagctgtaggtgaaaagattcttgatgctaccgtctcggaaaatcttcctgtactagccacagacgaaaaatacaatgaagcaatatacagcagtgcaaaacggttggttgcagcaatagacggtctcccagaccccggtggtccagaagtgaaggataacaagagagaatcaaatttcaaaacgaaagaagaaaccgaagagaagagaggacagttcagtcttgtcgttggaggtttgcttgtaattgcctttgttgttcccatggctcagtactatgcttatgtatccaagaagtagtgtattggctcactttcgtatataccaaacttggccaggtcat

SEQ ID NO: 20166 - protein, 284 aa, Zea mays subsp. mays
  peptide (1)..(284): Ceres Seq. ID no. 14309295
  misc_feature (1)..(284): NCBI GI NO: 18405061 NR Description: thylakoid lumen 18.3 kDa protein
  misc_feature (64)..(282): NCBI GI NO: 23041448 NR Description: hypothetical protein
  misc_feature (66)..(282): NCBI GI NO: 17231592 NR Description: hypothetical protein [Nostoc sp. PCC 7120]
  misc_feature (64)..(280): NCBI GI NO: 23128295 NR Description: hypothetical protein [Nostoc punctiforme]
  misc_feature (56)..(280): NCBI GI NO: 22297947 NR Description: ORF_ID:tll0404~hypothetical protein
  misc_feature (61)..(281): NCBI GI NO: 16330824 NR Description: hypothetical protein [Synechocystis sp. PCC 6803]
  misc_feature (73)..(281): NCBI GI NO: 13812326 NR Description: hypothetical protein [Guillardia theta]
METILSPRCLSPPLIPKLSSSHQSKHATSSSLALSNPTVLGPKHLSTRFSAKPESWLTDAKQGLAALSLSLALTFSPVGTALASEFNILNDGPPKETYVVDDAGVLSRVTRSDLKKLLSDLEYRKKLRLNFITVRKLTSKADAFEYADQVLEKWYPSIEEGNNKGIVVLITSQKEGAITGGPAFIEAVGEKILDATVSENLPVLATDEKYNEAIYSSAKRLVAAIDGLPDPGGPEVKDNKRESNFKTKEETEEKRGQFSLVVGGLLVIAFVVPMAQYYAYVSKK

SEQ ID NO: 20167 - DNA, 980 bp, Zea mays subsp. mays
  misc_feature (1)..(980): Ceres Seq. ID no. 15174357
aagaaaagcatcagtctcgtctcttctacggcgtttcagagaatctaagagagatcatcgatgggtcttctctccaacagaatcgatagatcaagtttgaaacctggagatcacatctactcgtggaggactgcttacatctatgcccatcacggtatatatgttggagatgatagagtcatccatttcacaagacgaggccaagaagttggaaccgggaccgttctcgatctcatactcgtaagctcaggcccatcacgagcccacacgcactgtccaacctgcgttccgcccaacgaaggccacggcgtcgtttcctcgtgcctgaactgtttcctagccggtggcgtcctgtaccgcttcgagtactccgtcaacgccgctcacttcctcgccaaagcccgaggaggaacctgcacgctcgccgtctccgaccctaacgagataactgtccaccgtgccaaccacctccttcggaacgggttcgggtgctacgacgttttcaagaacaactgcgaggactttgcgatctattgcaagaccgggttgcttgttctcgaaggaagaatgacgatggggcagagcggtcaggctgtttcgattatcggtgggcccatcgctgcggttttgtccacaccgatgaggcttgtgacgacgaatatatatgggatggcggcgacggcggttagcgtgtactgtgcgagtaggtacgctactgatatcggtatgagagctgacgtggcgaaagttgaagtggaggatctcacgagaaggctctctgtagggctgttccaagtggttgagcctccagtggcagccgttgctttaccaaccacaagctgatagataaagcttaagagcttcatctacttcttgaatgtttcagtgattgtatcatgtgttgtttccagtttacgtttcgtatccaaaacattcgaataaccacactctgcttgtatacttatacgtttctctacact

SEQ ID NO: 20168 - protein, 260 aa, Zea mays subsp. mays
  peptide (1)..(260): Ceres Seq. ID no. 15174358
  misc_feature (101)..(173): Pfam Name: Pfam Description:  NC domain
  misc_feature (1)..(260): NCBI GI NO: 18415178 NR Description: expressed protein [Arabidopsis thaliana]
  misc_feature (32)..(260): NCBI GI NO: 9758417 NR Description: gb|AAF32477
  misc_feature (1)..(235): NCBI GI NO: 18396282 NR Description: expressed protein [Arabidopsis thaliana]
  misc_feature (1)..(235): NCBI GI NO: 21594170 NR Description: unknown [Arabidopsis thaliana]
  misc_feature (1)..(241): NCBI GI NO: 18378812 NR Description: expressed protein [Arabidopsis thaliana]
  misc_feature (1)..(241): NCBI GI NO: 21592684 NR Description: unknown [Arabidopsis thaliana]
  misc_feature (1)..(243): NCBI GI NO: 22328196 NR Description: expressed protein [Arabidopsis thaliana]
  misc_feature (1)..(238): NCBI GI NO: 15237327 NR Description: hypothetical protein [Arabidopsis thaliana]
  misc_feature (1)..(190): NCBI GI NO: 15237330 NR Description: expressed protein [Arabidopsis thaliana]
MGLLSNRIDRSSLKPGDHIYSWRTAYIYAHHGIYVGDDRVIHFTRRGQEVGTGTVLDLILVSSGPSRAHTHCPTCVPPNEGHGVVSSCLNCFLAGGVLYRFEYSVNAAHFLAKARGGTCTLAVSDPNEITVHRANHLLRNGFGCYDVFKNNCEDFAIYCKTGLLVLEGRMTMGQSGQAVSIIGGPIAAVLSTPMRLVTTNIYGMAATAVSVYCASRYATDIGMRADVAKVEVEDLTRRLSVGLFQVVEPPVAAVALPTTS

SEQ ID NO: 20169 - DNA, 1096 bp, Zea mays subsp. mays
  misc_feature (1)..(1096): Ceres Seq. ID no. 14309287
gagatctttctcgatttgcctttactcgtttctcctgcgatatccgagctaagctgcagtgaaatatgatgcctcagcatcagatcaaggagcaacataatgctctcgtcatgaataagaagatcatgtccatccttgccgagagggacgctgccgtcaaggaaagaaacgaggccttggctgctaagcaggaagctttagccgctcgggatgaagcccttcagcaacgggacttagctatctctgagagagataatgctatcatggagagggaaaatgccttaactgctcttcaacaccgtgaaaaccatctcaactacattttggattgcgcaaagcgtggtggctaccaaacctgtttcactgaagaaacccacttgcccaacccttccccattgtcaaccattccacatgaaccacccaacaccaaaaggaagaaagatcgcaagagaaagaaagctggcggcgaagatctgaaccgtcagcttgcttctcctgggaagaaatgcagaaaggattgggactgtaacgatgtggggttaaaccttgtcacgttcgatgagacgacaatgccagtgcccatgtgcacttgcaccgggactgctcgtcagtgttacaaatggggaaatggcgggtggcaatcgtcttgctgcacaaccactttgtctcagtatccgctcccgcagatgccaaacaagcggcattctcgaataggcggtagaaaaatgagtggaaacgtcttctccaggttacttagccgtttagctggagaagggcacgacctctcctctccggttgatctcaaggactattgggctaggcatggcacgaatcgctacatcattatcaagtagccgagatttatgaaccactatgttaaatcaggtgtgtttctctcttcatcccttttttcttcttcgtttttttaacaattaggttcaaaaatgggatgaaagaatgaagcttaggctcattgttgtttttgttgtctatatagttcagctaataccaaatgtttagtagtattgttttgacttggtttcgtgtttatgtaattgtaaacagtccagtgaatgatgtcatattttattttaac

SEQ ID NO: 20170 - protein, 262 aa, Zea mays subsp. mays
  peptide (1)..(262): Ceres Seq. ID no. 14309288
  misc_feature (1)..(262): NCBI GI NO: 18399638 NR Description: expressed protein [Arabidopsis thaliana]
  misc_feature (1)..(234): NCBI GI NO: 15234867 NR Description: hypothetical protein [Arabidopsis thaliana]
  misc_feature (149)..(262): NCBI GI NO: 18422219 NR Description: expressed protein [Arabidopsis thaliana]
  misc_feature (4)..(83): NCBI GI NO: 18422219 NR Description: expressed protein [Arabidopsis thaliana]
  misc_feature (9)..(262): NCBI GI NO: 9759488 NR Description: gb|AAF18661
  misc_feature (200)..(262): NCBI GI NO: 6006362 NR Description: Similar to Arabidopsis thaliana chromosome II BACT32F12
  misc_feature (26)..(77): NCBI GI NO: 6006362 NR Description: Similar to Arabidopsis thaliana chromosome II BACT32F12
  misc_feature (107)..(262): NCBI GI NO: 30686452 NR Description: expressed protein [Arabidopsis thaliana]
  misc_feature (107)..(262): NCBI GI NO: 30686455 NR Description: expressed protein [Arabidopsis thaliana]
  misc_feature (19)..(262): NCBI GI NO: 20530716 NR Description: GAGA-binding protein [Glycine max]
MMPQHQIKEQHNALVMNKKIMSILAERDAAVKERNEALAAKQEALAARDEALQQRDLAISERDNAIMERENALTALQHRENHLNYILDCAKRGGYQTCFTEETHLPNPSPLSTIPHEPPNTKRKKDRKRKKAGGEDLNRQLASPGKKCRKDWDCNDVGLNLVTFDETTMPVPMCTCTGTARQCYKWGNGGWQSSCCTTTLSQYPLPQMPNKRHSRIGGRKMSGNVFSRLLSRLAGEGHDLSSPVDLKDYWARHGTNRYIIIK

SEQ ID NO: 20171 - protein, 261 aa, Zea mays subsp. mays
  peptide (1)..(261): Ceres Seq. ID no. 14309289
  misc_feature (1)..(261): NCBI GI NO: 18399638 NR Description: expressed protein [Arabidopsis thaliana]
  misc_feature (1)..(233): NCBI GI NO: 15234867 NR Description: hypothetical protein [Arabidopsis thaliana]
  misc_feature (148)..(261): NCBI GI NO: 18422219 NR Description: expressed protein [Arabidopsis thaliana]
  misc_feature (3)..(82): NCBI GI NO: 18422219 NR Description: expressed protein [Arabidopsis thaliana]
  misc_feature (8)..(261): NCBI GI NO: 9759488 NR Description: gb|AAF18661
  misc_feature (199)..(261): NCBI GI NO: 6006362 NR Description: Similar to Arabidopsis thaliana chromosome II BACT32F12
  misc_feature (25)..(76): NCBI GI NO: 6006362 NR Description: Similar to Arabidopsis thaliana chromosome II BACT32F12
  misc_feature (106)..(261): NCBI GI NO: 30686452 NR Description: expressed protein [Arabidopsis thaliana]
  misc_feature (106)..(261): NCBI GI NO: 30686455 NR Description: expressed protein [Arabidopsis thaliana]
  misc_feature (18)..(261): NCBI GI NO: 20530716 NR Description: GAGA-binding protein [Glycine max]
MPQHQIKEQHNALVMNKKIMSILAERDAAVKERNEALAAKQEALAARDEALQQRDLAISERDNAIMERENALTALQHRENHLNYILDCAKRGGYQTCFTEETHLPNPSPLSTIPHEPPNTKRKKDRKRKKAGGEDLNRQLASPGKKCRKDWDCNDVGLNLVTFDETTMPVPMCTCTGTARQCYKWGNGGWQSSCCTTTLSQYPLPQMPNKRHSRIGGRKMSGNVFSRLLSRLAGEGHDLSSPVDLKDYWARHGTNRYIIIK

SEQ ID NO: 20172 - protein, 247 aa, Zea mays subsp. mays
  peptide (1)..(247): Ceres Seq. ID no. 14309290
  misc_feature (1)..(247): NCBI GI NO: 18399638 NR Description: expressed protein [Arabidopsis thaliana]
  misc_feature (1)..(219): NCBI GI NO: 15234867 NR Description: hypothetical protein [Arabidopsis thaliana]
  misc_feature (134)..(247): NCBI GI NO: 18422219 NR Description: expressed protein [Arabidopsis thaliana]
  misc_feature (1)..(68): NCBI GI NO: 18422219 NR Description: expressed protein [Arabidopsis thaliana]
  misc_feature (1)..(247): NCBI GI NO: 9759488 NR Description: gb|AAF18661
  misc_feature (185)..(247): NCBI GI NO: 6006362 NR Description: Similar to Arabidopsis thaliana chromosome II BACT32F12
  misc_feature (11)..(62): NCBI GI NO: 6006362 NR Description: Similar to Arabidopsis thaliana chromosome II BACT32F12
  misc_feature (92)..(247): NCBI GI NO: 30686452 NR Description: expressed protein [Arabidopsis thaliana]
  misc_feature (92)..(247): NCBI GI NO: 30686455 NR Description: expressed protein [Arabidopsis thaliana]
  misc_feature (4)..(247): NCBI GI NO: 20530716 NR Description: GAGA-binding protein [Glycine max]
MNKKIMSILAERDAAVKERNEALAAKQEALAARDEALQQRDLAISERDNAIMERENALTALQHRENHLNYILDCAKRGGYQTCFTEETHLPNPSPLSTIPHEPPNTKRKKDRKRKKAGGEDLNRQLASPGKKCRKDWDCNDVGLNLVTFDETTMPVPMCTCTGTARQCYKWGNGGWQSSCCTTTLSQYPLPQMPNKRHSRIGGRKMSGNVFSRLLSRLAGEGHDLSSPVDLKDYWARHGTNRYIIIK

SEQ ID NO: 20173 - DNA, 1135 bp, Zea mays subsp. mays
  misc_feature (1)..(1135): Ceres Seq. ID no. 14309283
atatctgtatcagttcgcatcagttttgtctgagaaccacttttgtgtcaatctttagcgatgtcgattcctcaggccaagatggagcttcgtcctctgggaaacacaggtctcaaagttagctccatcggctttggcgcctctcccctcggaagcgtcttcggtccagtcgccgaagtcgatgcagtcgccaccgtacgcgaggcgttccgacaaggcattaacttcttcgacacttccccgtattatggaggaacactgtcggagaagatgcttggcaagggactaaaagcactacaagtccctagaagcgactacattgttgcaaccaagtgtggacgttacgaggaaggctttgacttcagcactgagagagtaacaaagagcatcgacgagagcttggagaggcttcagctagactacgttgacatacttcattgccacgacattgagttcgggtctcttgaccagattgtgagtgaaacaatccctgctctccagaaactgaaacaggaagggaagacacggttcatcggtatcactggtcttccgttgagtattttcacttacgttcttgatcgagtgcctccagggacggtcgatgtgatactatcgtactgccattacggtgtgaatgattcgacgttggtggatttgataccttacttgaaagggaaaggtgtgggtgtgattagtgcttctccattagcaatgggtctccttacggaacaaggtggtcctgaatggcatcctgcttcccctgagctcaagtctgcttgcaaagccgctgctgctcattgtaaatcaaaaggtaagaagatcacaaagttggcgttgcagtacagcttggcaaacaaggagatttcatcagtgttggttggaatgagctctgtctcacaggtagaagaaaatgttgcagcagttaaagagcttgaagatttgggtatggatcaagaaactctctctgaggttgaagctattcttgagcctgtcaagaatcagacatggccaagtggagtcgatcagaagtagaagctcttttgttgtgtttgttcacatttacttcttggagtgctttgatgtgtcgataacagttttaagttgagttgatacgattaataaagttttcttagat

SEQ ID NO: 20174 - protein, 323 aa, Zea mays subsp. mays
  peptide (1)..(323): Ceres Seq. ID no. 14309284
  misc_feature (7)..(322): NCBI GI NO: 15235040 NR Description: aldo/keto reductase family [Arabidopsis thaliana]
  misc_feature (8)..(322): NCBI GI NO: 27728731 NR Description: galactose dehydrogenase [Actinidia deliciosa]
  misc_feature (2)..(322): NCBI GI NO: 30267886 NR Description: L-galactose dehydrogenase [Malus x domestica]
  misc_feature (8)..(316): NCBI GI NO: 29349022 NR Description: putative oxidoreductase
  misc_feature (7)..(321): NCBI GI NO: 31201147 NR Description: ENSANGP00000008370 [Anopheles gambiae]
  misc_feature (6)..(322): NCBI GI NO: 32470782 NR Description: putative oxidoreductase-possibly Aldo/ketoreductase
  misc_feature (7)..(301): NCBI GI NO: 24646155 NR Description: CG18547-PA [Drosophila melanogaster]
  misc_feature (7)..(321): NCBI GI NO: 39594041 NR Description: Hypothetical protein CBG16615
  misc_feature (7)..(318): NCBI GI NO: 24646159 NR Description: CG3397-PA [Drosophila melanogaster]
  misc_feature (7)..(321): NCBI GI NO: 17553316 NR Description: MEChanosensory abnormality MEC-14
MSIPQAKMELRPLGNTGLKVSSIGFGASPLGSVFGPVAEVDAVATVREAFRQGINFFDTSPYYGGTLSEKMLGKGLKALQVPRSDYIVATKCGRYEEGFDFSTERVTKSIDESLERLQLDYVDILHCHDIEFGSLDQIVSETIPALQKLKQEGKTRFIGITGLPLSIFTYVLDRVPPGTVDVILSYCHYGVNDSTLVDLIPYLKGKGVGVISASPLAMGLLTEQGGPEWHPASPELKSACKAAAAHCKSKGKKITKLALQYSLANKEISSVLVGMSSVSQVEENVAAVKELEDLGMDQETLSEVEAILEPVKNQTWPSGVDQK

SEQ ID NO: 20175 - protein, 316 aa, Zea mays subsp. mays
  peptide (1)..(316): Ceres Seq. ID no. 14309285
  misc_feature (1)..(315): NCBI GI NO: 15235040 NR Description: aldo/keto reductase family [Arabidopsis thaliana]
  misc_feature (1)..(315): NCBI GI NO: 27728731 NR Description: galactose dehydrogenase [Actinidia deliciosa]
  misc_feature (1)..(315): NCBI GI NO: 30267886 NR Description: L-galactose dehydrogenase [Malus x domestica]
  misc_feature (1)..(309): NCBI GI NO: 29349022 NR Description: putative oxidoreductase
  misc_feature (1)..(314): NCBI GI NO: 31201147 NR Description: ENSANGP00000008370 [Anopheles gambiae]
  misc_feature (1)..(315): NCBI GI NO: 32470782 NR Description: putative oxidoreductase-possibly Aldo/ketoreductase
  misc_feature (1)..(294): NCBI GI NO: 24646155 NR Description: CG18547-PA [Drosophila melanogaster]
  misc_feature (1)..(314): NCBI GI NO: 39594041 NR Description: Hypothetical protein CBG16615
  misc_feature (1)..(311): NCBI GI NO: 24646159 NR Description: CG3397-PA [Drosophila melanogaster]
  misc_feature (1)..(314): NCBI GI NO: 17553316 NR Description: MEChanosensory abnormality MEC-14
MELRPLGNTGLKVSSIGFGASPLGSVFGPVAEVDAVATVREAFRQGINFFDTSPYYGGTLSEKMLGKGLKALQVPRSDYIVATKCGRYEEGFDFSTERVTKSIDESLERLQLDYVDILHCHDIEFGSLDQIVSETIPALQKLKQEGKTRFIGITGLPLSIFTYVLDRVPPGTVDVILSYCHYGVNDSTLVDLIPYLKGKGVGVISASPLAMGLLTEQGGPEWHPASPELKSACKAAAAHCKSKGKKITKLALQYSLANKEISSVLVGMSSVSQVEENVAAVKELEDLGMDQETLSEVEAILEPVKNQTWPSGVDQK

SEQ ID NO: 20176 - protein, 253 aa, Zea mays subsp. mays
  peptide (1)..(253): Ceres Seq. ID no. 14309286
  misc_feature (1)..(252): NCBI GI NO: 15235040 NR Description: aldo/keto reductase family [Arabidopsis thaliana]
  misc_feature (1)..(252): NCBI GI NO: 27728731 NR Description: galactose dehydrogenase [Actinidia deliciosa]
  misc_feature (1)..(252): NCBI GI NO: 30267886 NR Description: L-galactose dehydrogenase [Malus x domestica]
  misc_feature (1)..(246): NCBI GI NO: 29349022 NR Description: putative oxidoreductase
  misc_feature (1)..(251): NCBI GI NO: 31201147 NR Description: ENSANGP00000008370 [Anopheles gambiae]
  misc_feature (1)..(252): NCBI GI NO: 32470782 NR Description: putative oxidoreductase-possibly Aldo/ketoreductase
  misc_feature (1)..(231): NCBI GI NO: 24646155 NR Description: CG18547-PA [Drosophila melanogaster]
  misc_feature (1)..(251): NCBI GI NO: 39594041 NR Description: Hypothetical protein CBG16615
  misc_feature (1)..(248): NCBI GI NO: 24646159 NR Description: CG3397-PA [Drosophila melanogaster]
  misc_feature (1)..(251): NCBI GI NO: 17553316 NR Description: MEChanosensory abnormality MEC-14
MLGKGLKALQVPRSDYIVATKCGRYEEGFDFSTERVTKSIDESLERLQLDYVDILHCHDIEFGSLDQIVSETIPALQKLKQEGKTRFIGITGLPLSIFTYVLDRVPPGTVDVILSYCHYGVNDSTLVDLIPYLKGKGVGVISASPLAMGLLTEQGGPEWHPASPELKSACKAAAAHCKSKGKKITKLALQYSLANKEISSVLVGMSSVSQVEENVAAVKELEDLGMDQETLSEVEAILEPVKNQTWPSGVDQK

SEQ ID NO: 20177 - DNA, 830 bp, Zea mays subsp. mays
  misc_feature (1)..(830): Ceres Seq. ID no. 15174365
gtactcctcctccacacttccctccaacgagttccaaaacccgagaagccatgtcgctcacgatcccgacgaacctcgttctcaacccgagatccaacaaatctctcactcaatccttgcctaaatccaccgcgagattcgtctgctccgacgacaaatccgcgacgcagcaacagtccatgaaggctttctccaccgcagtggctctctcctccatcctcctctcagctccgatgccagccgttgctgatatctcggggttgacaccttgcaaggagtcgaaacagttcgccaagagggagaagcaacagatcaagaagcttcagtcatctcttaagctctacgctccggaaagtgctcctgctcttgctcttaacgctcagatcgagaagactaaacgcaggttcgacaactatggcaagtatggacttctctgtggcgcagacggtctaccccacctgatagtgaacggagatcagcggcattggggagagttcataactccaggccttctcttcctctacattgctggatggatcgggtgggttggaagaagctacttgatagcaatcagcgatgagaagaaaccagcaatgaaagagatcatcattgatgttccattggctagtcgcctcatcttccgtggtttcatttggcctgttgctgcttacagagcgttactcaatggcgatctcattgccaaggatgtctagaaaaacaaaaacaaatctatatttgttgttttggtttgcttctctctctttctctctatctcatgttttccagtgtatgtattgatatctctaattaactcttccatttctaagaat

SEQ ID NO: 20178 - protein, 236 aa, Zea mays subsp. mays
  peptide (1)..(236): Ceres Seq. ID no. 15174366
  misc_feature (62)..(236): Pfam Name: Pfam Description:  Photosystem I reaction centre subunit III
  misc_feature (17)..(236): NCBI GI NO: 5734518 NR Description: photosystem I subunit III precursor
  misc_feature (17)..(236): NCBI GI NO: 15221681 NR Description: photosystem I subunit III precursor -related
  misc_feature (17)..(236): NCBI GI NO: 15450361 NR Description: At1g31330/T19E23_1 [Arabidopsis thaliana]
  misc_feature (17)..(236): NCBI GI NO: 8954295 NR Description: photosystem I reaction center subunit III
  misc_feature (17)..(232): NCBI GI NO: 30013659 NR Description: putative photosystem I subunit III precursor
  misc_feature (17)..(232): NCBI GI NO: 1172664 NR Description: Photosystem I reaction centre subunit III
  misc_feature (17)..(232): NCBI GI NO: 131187 NR Description: Photosystem I reaction centre subunit III
  misc_feature (16)..(235): NCBI GI NO: 548604 NR Description: Photosystem I reaction centre subunit III
  misc_feature (59)..(235): NCBI GI NO: 3885892 NR Description: photosystem-1 F subunit precursor [Oryza sativa]
TPPPHFPPTSSKTREAMSLTIPTNLVLNPRSNKSLTQSLPKSTARFVCSDDKSATQQQSMKAFSTAVALSSILLSAPMPAVADISGLTPCKESKQFAKREKQQIKKLQSSLKLYAPESAPALALNAQIEKTKRRFDNYGKYGLLCGADGLPHLIVNGDQRHWGEFITPGLLFLYIAGWIGWVGRSYLIAISDEKKPAMKEIIIDVPLASRLIFRGFIWPVAAYRALLNGDLIAKDV

SEQ ID NO: 20179 - protein, 220 aa, Zea mays subsp. mays
  peptide (1)..(220): Ceres Seq. ID no. 15174367
  misc_feature (46)..(220): Pfam Name: Pfam Description:  Photosystem I reaction centre subunit III
  misc_feature (1)..(220): NCBI GI NO: 5734518 NR Description: photosystem I subunit III precursor
  misc_feature (1)..(220): NCBI GI NO: 15221681 NR Description: photosystem I subunit III precursor -related
  misc_feature (1)..(220): NCBI GI NO: 15450361 NR Description: At1g31330/T19E23_1 [Arabidopsis thaliana]
  misc_feature (1)..(220): NCBI GI NO: 8954295 NR Description: photosystem I reaction center subunit III
  misc_feature (1)..(216): NCBI GI NO: 30013659 NR Description: putative photosystem I subunit III precursor
  misc_feature (1)..(216): NCBI GI NO: 1172664 NR Description: Photosystem I reaction centre subunit III
  misc_feature (1)..(216): NCBI GI NO: 131187 NR Description: Photosystem I reaction centre subunit III
  misc_feature (1)..(219): NCBI GI NO: 548604 NR Description: Photosystem I reaction centre subunit III
  misc_feature (43)..(219): NCBI GI NO: 3885892 NR Description: photosystem-1 F subunit precursor [Oryza sativa]
MSLTIPTNLVLNPRSNKSLTQSLPKSTARFVCSDDKSATQQQSMKAFSTAVALSSILLSAPMPAVADISGLTPCKESKQFAKREKQQIKKLQSSLKLYAPESAPALALNAQIEKTKRRFDNYGKYGLLCGADGLPHLIVNGDQRHWGEFITPGLLFLYIAGWIGWVGRSYLIAISDEKKPAMKEIIIDVPLASRLIFRGFIWPVAAYRALLNGDLIAKDV

SEQ ID NO: 20180 - protein, 177 aa, Zea mays subsp. mays
  peptide (1)..(177): Ceres Seq. ID no. 15174368
  misc_feature (3)..(177): Pfam Name: Pfam Description:  Photosystem I reaction centre subunit III
  misc_feature (1)..(177): NCBI GI NO: 5734518 NR Description: photosystem I subunit III precursor
  misc_feature (1)..(177): NCBI GI NO: 15221681 NR Description: photosystem I subunit III precursor -related
  misc_feature (1)..(177): NCBI GI NO: 15450361 NR Description: At1g31330/T19E23_1 [Arabidopsis thaliana]
  misc_feature (1)..(177): NCBI GI NO: 8954295 NR Description: photosystem I reaction center subunit III
  misc_feature (1)..(173): NCBI GI NO: 30013659 NR Description: putative photosystem I subunit III precursor
  misc_feature (1)..(173): NCBI GI NO: 1172664 NR Description: Photosystem I reaction centre subunit III
  misc_feature (1)..(173): NCBI GI NO: 131187 NR Description: Photosystem I reaction centre subunit III
  misc_feature (1)..(176): NCBI GI NO: 548604 NR Description: Photosystem I reaction centre subunit III
  misc_feature (1)..(176): NCBI GI NO: 3885892 NR Description: photosystem-1 F subunit precursor [Oryza sativa]
MKAFSTAVALSSILLSAPMPAVADISGLTPCKESKQFAKREKQQIKKLQSSLKLYAPESAPALALNAQIEKTKRRFDNYGKYGLLCGADGLPHLIVNGDQRHWGEFITPGLLFLYIAGWIGWVGRSYLIAISDEKKPAMKEIIIDVPLASRLIFRGFIWPVAAYRALLNGDLIAKDV

SEQ ID NO: 20181 - DNA, 696 bp, Zea mays subsp. mays
  misc_feature (1)..(696): Ceres Seq. ID no. 14309275
gaatttagggtagagttccaacggcgactcagtagtcgtctctcgatccctttacctcgtctcagctcaattcgctgcttttatcacggtggtgagagagatgaatcacggccaacaatctggcgaggcgaagcatgaagatgatcctgctcttacagagttccttgggtctctcatggattacactcctactattcctgatgatctaatggagcactacttggctaagagtgggtttcagtgccctgacgtacgattaataaggctagttgctgtggctacacaaaagtttgttgcagatgttgccagcgacgcccttcagcactgcaaggctagaccagcaccagttgtgaaagacaaaaaacagcaaaaggataaacgtttagtattgacaatggaagacctttccaaagctttgcgtgagtatggtgtgaacgtgaagcatccagaatattttgctgatagcccttccaccggaattgatcctgcgacaagggaggaatagaaaccaaacaggaagtctcgaccatattttgcctagtaagaatgattatgtgtgagagatccgtgattctatgttgtgtttccgtgaaaacaaaactcactctctcttcctattcacatgtatattcttttttgttgtttgtttcttgactcgtctctctccttgataaataagatttctgagttcttggt

SEQ ID NO: 20182 - protein, 134 aa, Zea mays subsp. mays
  peptide (1)..(134): Ceres Seq. ID no. 14309276
  misc_feature (30)..(80): Pfam Name: Pfam Description:  Transcription initiation factor TFIID 23-30kDa subunit
  misc_feature (1)..(134): NCBI GI NO: 15236059 NR Description: Transcription factor II homolog
  misc_feature (1)..(134): NCBI GI NO: 26450720 NR Description: putative transcription factor II
  misc_feature (7)..(119): NCBI GI NO: 9910576 NR Description: TAF10 RNA polymerase II, TATA box binding protein
  misc_feature (7)..(119): NCBI GI NO: 21619259 NR Description: Ilk protein [Mus musculus]
  misc_feature (7)..(119): NCBI GI NO: 34859827 NR Description: similar to Ilk protein [Rattus norvegicus]
  misc_feature (7)..(119): NCBI GI NO: 26338586 NR Description: unnamed protein product [Mus musculus]
  misc_feature (18)..(119): NCBI GI NO: 5454106 NR Description: TBP-related factor 10; TATA box binding protein
  misc_feature (7)..(119): NCBI GI NO: 20863106 NR Description: similar to Transcription initiation factor TFIID 30kDa subunit
  misc_feature (18)..(119): NCBI GI NO: 2136293 NR Description: transcription factor IID 30k chain - human
  misc_feature (2)..(118): NCBI GI NO: 17137648 NR Description: TBP-associated factor 10b CG3069-PA
MNHGQQSGEAKHEDDPALTEFLGSLMDYTPTIPDDLMEHYLAKSGFQCPDVRLIRLVAVATQKFVADVASDALQHCKARPAPVVKDKKQQKDKRLVLTMEDLSKALREYGVNVKHPEYFADSPSTGIDPATREE

SEQ ID NO: 20183 - protein, 109 aa, Zea mays subsp. mays
  peptide (1)..(109): Ceres Seq. ID no. 14309277
  misc_feature (5)..(55): Pfam Name: Pfam Description:  Transcription initiation factor TFIID 23-30kDa subunit
  misc_feature (1)..(109): NCBI GI NO: 15236059 NR Description: Transcription factor II homolog
  misc_feature (1)..(109): NCBI GI NO: 26450720 NR Description: putative transcription factor II
  misc_feature (1)..(94): NCBI GI NO: 9910576 NR Description: TAF10 RNA polymerase II, TATA box binding protein
  misc_feature (1)..(94): NCBI GI NO: 34859827 NR Description: similar to Ilk protein [Rattus norvegicus]
  misc_feature (1)..(94): NCBI GI NO: 26338586 NR Description: unnamed protein product [Mus musculus]
  misc_feature (1)..(94): NCBI GI NO: 21619259 NR Description: Ilk protein [Mus musculus]
  misc_feature (1)..(94): NCBI GI NO: 5454106 NR Description: TBP-related factor 10; TATA box binding protein
  misc_feature (1)..(94): NCBI GI NO: 20863106 NR Description: similar to Transcription initiation factor TFIID 30kDa subunit
  misc_feature (1)..(94): NCBI GI NO: 2136293 NR Description: transcription factor IID 30k chain - human
  misc_feature (1)..(93): NCBI GI NO: 17137648 NR Description: TBP-associated factor 10b CG3069-PA
MDYTPTIPDDLMEHYLAKSGFQCPDVRLIRLVAVATQKFVADVASDALQHCKARPAPVVKDKKQQKDKRLVLTMEDLSKALREYGVNVKHPEYFADSPSTGIDPATREE

SEQ ID NO: 20184 - protein, 98 aa, Zea mays subsp. mays
  peptide (1)..(98): Ceres Seq. ID no. 14309278
  misc_feature (1)..(44): Pfam Name: Pfam Description:  Transcription initiation factor TFIID 23-30kDa subunit
  misc_feature (1)..(98): NCBI GI NO: 15236059 NR Description: Transcription factor II homolog
  misc_feature (1)..(98): NCBI GI NO: 26450720 NR Description: putative transcription factor II
  misc_feature (1)..(83): NCBI GI NO: 9910576 NR Description: TAF10 RNA polymerase II, TATA box binding protein
  misc_feature (1)..(83): NCBI GI NO: 34859827 NR Description: similar to Ilk protein [Rattus norvegicus]
  misc_feature (1)..(83): NCBI GI NO: 26338586 NR Description: unnamed protein product [Mus musculus]
  misc_feature (1)..(83): NCBI GI NO: 21619259 NR Description: Ilk protein [Mus musculus]
  misc_feature (1)..(83): NCBI GI NO: 5454106 NR Description: TBP-related factor 10; TATA box binding protein
  misc_feature (1)..(83): NCBI GI NO: 20863106 NR Description: similar to Transcription initiation factor TFIID 30kDa subunit
  misc_feature (1)..(83): NCBI GI NO: 2136293 NR Description: transcription factor IID 30k chain - human
  misc_feature (1)..(82): NCBI GI NO: 17137648 NR Description: TBP-associated factor 10b CG3069-PA
MEHYLAKSGFQCPDVRLIRLVAVATQKFVADVASDALQHCKARPAPVVKDKKQQKDKRLVLTMEDLSKALREYGVNVKHPEYFADSPSTGIDPATREE

SEQ ID NO: 20185 - DNA, 1144 bp, Zea mays subsp. mays
  misc_feature (1)..(1144): Ceres Seq. ID no. 15176165
tagaacatcctaatcgaaaaatgaaattcgtctccatccgcggttcacccctgcaacaaaggcatggaagaagcagttcagttatgtctggcagctaaatccaacgacttgaaaaaggttcaaactttaattacctccggcgccgacgtttctcactttgacggcgacggtctaactccgttaatgcacgccgctaaaaccggaaacgccgaaatcatctctgcattactcgaagcaggagctccatggaacgctctgtccccgtctaatctctcagcaggagacttcgcaatggaagcaggacaccaagaagcgttcgatctcctcctcaaaaccggaatccaatccgagctaatcttgggaacaatcgcccgcaaagaaaccaagaacgaatactccaaccaagagtatctccaagaccgagtcaccttcagcgaagacaagatcatggacaacgaaagcaaaggagtgatgatgtcttgggagaagccgctaatggaagctcacgctaaagccatctgcaccaacggtggctccattctcaacgtcgggttcggtatgggactcgtcgatacagcgatacagcagtacaatccgaccaaacacacgatcatcgaagctcatccggatgtgtacaagcgtatgatcgagtcaggttggggcgagaaggagaacgtgaggattgttttcgggaggtggcaagatgttcttggcgagcttgatgagtgtggctacgatgggatctttttcgatacgtatggagagtattacgaagatttgtgggagtttcatcagaatctacccaagcttctgaagtctgatgggatttattcgtattttaatgggttttgtgggagtaatgcgttttttcatgttgtgtattgtaatctggtgacgttggagattgagagtttggggtttagcactcagttgattccgttgccggttaaggattgtcttggtgatgaagtttgggaaggtgtcaagcaaaagtattggcagcttgatacttattatctacctgtttgtcagtttagtgagtgaagttttacaacttccaagttttgtaatctctttgatacttttagttatgaaagtatcgattagctactaatttttttttagtagaaatttgccaaaatat

SEQ ID NO: 20186 - protein, 326 aa, Zea mays subsp. mays
  peptide (1)..(326): Ceres Seq. ID no. 15176166
  misc_feature (35)..(67): Pfam Name: Pfam Description:  Ankyrin repeat
  misc_feature (1)..(326): NCBI GI NO: 15239183 NR Description: hypothetical protein [Arabidopsis thaliana]
  misc_feature (1)..(323): NCBI GI NO: 14488376 NR Description: putative methyltransferase
  misc_feature (2)..(324): NCBI GI NO: 25777560 NR Description: hypothetical protein SPAC26A3
  misc_feature (2)..(324): NCBI GI NO: 12644401 NR Description: Hypothetical protein C26A3.17c in chromosome I
  misc_feature (55)..(324): NCBI GI NO: 19115072 NR Description: hypothetical protein [Schizosaccharomyces pombe]
  misc_feature (112)..(326): NCBI GI NO: 40738857 NR Description: hypothetical protein AN6072.2
  misc_feature (33)..(119): NCBI GI NO: 40738857 NR Description: hypothetical protein AN6072.2
  misc_feature (112)..(325): NCBI GI NO: 6320673 NR Description: Protein Arginine Methyltransferase
  misc_feature (108)..(295): NCBI GI NO: 32416678 NR Description: hypothetical protein [Neurospora crassa]
  misc_feature (206)..(324): NCBI GI NO: 32416678 NR Description: hypothetical protein [Neurospora crassa]
MEEAVQLCLAAKSNDLKKVQTLITSGADVSHFDGDGLTPLMHAAKTGNAEIISALLEAGAPWNALSPSNLSAGDFAMEAGHQEAFDLLLKTGIQSELILGTIARKETKNEYSNQEYLQDRVTFSEDKIMDNESKGVMMSWEKPLMEAHAKAICTNGGSILNVGFGMGLVDTAIQQYNPTKHTIIEAHPDVYKRMIESGWGEKENVRIVFGRWQDVLGELDECGYDGIFFDTYGEYYEDLWEFHQNLPKLLKSDGIYSYFNGFCGSNAFFHVVYCNLVTLEIESLGFSTQLIPLPVKDCLGDEVWEGVKQKYWQLDTYYLPVCQFSE

SEQ ID NO: 20187 - protein, 286 aa, Zea mays subsp. mays
  peptide (1)..(286): Ceres Seq. ID no. 15176167
  misc_feature (1)..(27): Pfam Name: Pfam Description:  Ankyrin repeat
  misc_feature (1)..(286): NCBI GI NO: 15239183 NR Description: hypothetical protein [Arabidopsis thaliana]
  misc_feature (1)..(283): NCBI GI NO: 14488376 NR Description: putative methyltransferase
  misc_feature (1)..(284): NCBI GI NO: 25777560 NR Description: hypothetical protein SPAC26A3
  misc_feature (1)..(284): NCBI GI NO: 12644401 NR Description: Hypothetical protein C26A3.17c in chromosome I
  misc_feature (15)..(284): NCBI GI NO: 19115072 NR Description: hypothetical protein [Schizosaccharomyces pombe]
  misc_feature (72)..(286): NCBI GI NO: 40738857 NR Description: hypothetical protein AN6072.2
  misc_feature (1)..(79): NCBI GI NO: 40738857 NR Description: hypothetical protein AN6072.2
  misc_feature (72)..(285): NCBI GI NO: 6320673 NR Description: Protein Arginine Methyltransferase
  misc_feature (68)..(255): NCBI GI NO: 32416678 NR Description: hypothetical protein [Neurospora crassa]
  misc_feature (166)..(284): NCBI GI NO: 32416678 NR Description: hypothetical protein [Neurospora crassa]
MHAAKTGNAEIISALLEAGAPWNALSPSNLSAGDFAMEAGHQEAFDLLLKTGIQSELILGTIARKETKNEYSNQEYLQDRVTFSEDKIMDNESKGVMMSWEKPLMEAHAKAICTNGGSILNVGFGMGLVDTAIQQYNPTKHTIIEAHPDVYKRMIESGWGEKENVRIVFGRWQDVLGELDECGYDGIFFDTYGEYYEDLWEFHQNLPKLLKSDGIYSYFNGFCGSNAFFHVVYCNLVTLEIESLGFSTQLIPLPVKDCLGDEVWEGVKQKYWQLDTYYLPVCQFSE

SEQ ID NO: 20188 - protein, 250 aa, Zea mays subsp. mays
  peptide (1)..(250): Ceres Seq. ID no. 15176168
  misc_feature (1)..(250): NCBI GI NO: 15239183 NR Description: hypothetical protein [Arabidopsis thaliana]
  misc_feature (1)..(247): NCBI GI NO: 14488376 NR Description: putative methyltransferase
  misc_feature (1)..(248): NCBI GI NO: 25777560 NR Description: hypothetical protein SPAC26A3
  misc_feature (1)..(248): NCBI GI NO: 12644401 NR Description: Hypothetical protein C26A3.17c in chromosome I
  misc_feature (1)..(248): NCBI GI NO: 19115072 NR Description: hypothetical protein [Schizosaccharomyces pombe]
  misc_feature (36)..(250): NCBI GI NO: 40738857 NR Description: hypothetical protein AN6072.2
  misc_feature (1)..(43): NCBI GI NO: 40738857 NR Description: hypothetical protein AN6072.2
  misc_feature (36)..(249): NCBI GI NO: 6320673 NR Description: Protein Arginine Methyltransferase
  misc_feature (32)..(219): NCBI GI NO: 32416678 NR Description: hypothetical protein [Neurospora crassa]
  misc_feature (130)..(248): NCBI GI NO: 32416678 NR Description: hypothetical protein [Neurospora crassa]
MEAGHQEAFDLLLKTGIQSELILGTIARKETKNEYSNQEYLQDRVTFSEDKIMDNESKGVMMSWEKPLMEAHAKAICTNGGSILNVGFGMGLVDTAIQQYNPTKHTIIEAHPDVYKRMIESGWGEKENVRIVFGRWQDVLGELDECGYDGIFFDTYGEYYEDLWEFHQNLPKLLKSDGIYSYFNGFCGSNAFFHVVYCNLVTLEIESLGFSTQLIPLPVKDCLGDEVWEGVKQKYWQLDTYYLPVCQFSE

SEQ ID NO: 20189 - DNA, 1001 bp, Zea mays subsp. mays
  misc_feature (1)..(1001): Ceres Seq. ID no. 14309271
aagaaagaagaaagagttgttttgtacattcatttacgaatagtagaattggtacaaagacgttgcatttccatagattcgaattttgtctggtagggagggagtggatcatggcggaggttgttgtgcacatatacgatgtgaccaacactggatcagacaaaaccaacaacaccattcttcagatcaacaggatcttcaaagacggcatcggtctaggcggcattttccacagcgccattcaggtgtatggaaacgatgagtggtcttatgggtattgtgagcaaggcactggtgtcttcagatgtcctagcagcaagaatccaatgtacacttatcgtgagaaaattgttcttgggaggacagattgtacaatctttatggttaatcagatattccgtgagctcaccagggaatggccaggacatacttatgatctcttgtctagaaactgcaaccacttctgtgatgtactctgtgataggcttggtgtgccgaagctcccaggttgggtgaaccgttttgcgcatgctggcgacacagctttggaagtagcagaaaccacagcgatgcggttaaagcaagccaaaactgagcttctatcagctagtaaagtagcctatcgcttcctttcgaatgtcacctcaagcgtaaccaacagcagcaatggctcaccacaacagcctggaaccgtcaacaattcagacaatgtgaactcgagaatgcaaggcacttggctcaaagggatgctaaacacttcgaaaccttccacaagcacagagatagagaacaaagatgaagatgcaaatcacgactctgaggttctacagtttcagcagcaaccgtagtccaccgtaatgcattcatttggttaattgcattgcatatccaccccggaccaaaagctactcaactgtatccattactttgtatcacaccattggaacccatctcttttttttctcaacacgttaatgacaagtaaccaagcaagtctcagc

SEQ ID NO: 20190 - protein, 281 aa, Zea mays subsp. mays
  peptide (1)..(281): Ceres Seq. ID no. 14309272
  misc_feature (38)..(175): Pfam Name: DUF862 Pfam Description: Eukaryotic protein of unknown function
  misc_feature (37)..(278): NCBI GI NO: 15235955 NR Description: expressed protein [Arabidopsis thaliana]
  misc_feature (37)..(278): NCBI GI NO: 15235952 NR Description: expressed protein [Arabidopsis thaliana]
  misc_feature (37)..(281): NCBI GI NO: 37536408 NR Description: unknown protein
  misc_feature (32)..(135): NCBI GI NO: 34897764 NR Description: hypothetical protein
  misc_feature (69)..(243): NCBI GI NO: 18400749 NR Description: expressed protein [Arabidopsis thaliana]
  misc_feature (70)..(224): NCBI GI NO: 18420889 NR Description: expressed protein [Arabidopsis thaliana]
  misc_feature (69)..(178): NCBI GI NO: 17529024 NR Description: unknown protein [Arabidopsis thaliana]
  misc_feature (70)..(178): NCBI GI NO: 18412886 NR Description: expressed protein [Arabidopsis thaliana]
  misc_feature (70)..(178): NCBI GI NO: 25354458 NR Description: hypothetical protein F23A5.4
  misc_feature (40)..(176): NCBI GI NO: 31240103 NR Description: ENSANGP00000016701 [Anopheles gambiae]
ERRKSCFVHSFTNSRIGTKTLHFHRFEFCLVGREWIMAEVVVHIYDVTNTGSDKTNNTILQINRIFKDGIGLGGIFHSAIQVYGNDEWSYGYCEQGTGVFRCPSSKNPMYTYREKIVLGRTDCTIFMVNQIFRELTREWPGHTYDLLSRNCNHFCDVLCDRLGVPKLPGWVNRFAHAGDTALEVAETTAMRLKQAKTELLSASKVAYRFLSNVTSSVTNSSNGSPQQPGTVNNSDNVNSRMQGTWLKGMLNTSKPSTSTEIENKDEDANHDSEVLQFQQQP

SEQ ID NO: 20191 - protein, 245 aa, Zea mays subsp. mays
  peptide (1)..(245): Ceres Seq. ID no. 14309273
  misc_feature (2)..(139): Pfam Name: DUF862 Pfam Description: Eukaryotic protein of unknown function
  misc_feature (1)..(242): NCBI GI NO: 15235955 NR Description: expressed protein [Arabidopsis thaliana]
  misc_feature (1)..(242): NCBI GI NO: 15235952 NR Description: expressed protein [Arabidopsis thaliana]
  misc_feature (1)..(245): NCBI GI NO: 37536408 NR Description: unknown protein
  misc_feature (1)..(99): NCBI GI NO: 34897764 NR Description: hypothetical protein
  misc_feature (33)..(207): NCBI GI NO: 18400749 NR Description: expressed protein [Arabidopsis thaliana]
  misc_feature (34)..(188): NCBI GI NO: 18420889 NR Description: expressed protein [Arabidopsis thaliana]
  misc_feature (33)..(142): NCBI GI NO: 17529024 NR Description: unknown protein [Arabidopsis thaliana]
  misc_feature (34)..(142): NCBI GI NO: 18412886 NR Description: expressed protein [Arabidopsis thaliana]
  misc_feature (34)..(142): NCBI GI NO: 25354458 NR Description: hypothetical protein F23A5.4
  misc_feature (4)..(140): NCBI GI NO: 31240103 NR Description: ENSANGP00000016701 [Anopheles gambiae]
MAEVVVHIYDVTNTGSDKTNNTILQINRIFKDGIGLGGIFHSAIQVYGNDEWSYGYCEQGTGVFRCPSSKNPMYTYREKIVLGRTDCTIFMVNQIFRELTREWPGHTYDLLSRNCNHFCDVLCDRLGVPKLPGWVNRFAHAGDTALEVAETTAMRLKQAKTELLSASKVAYRFLSNVTSSVTNSSNGSPQQPGTVNNSDNVNSRMQGTWLKGMLNTSKPSTSTEIENKDEDANHDSEVLQFQQQP

SEQ ID NO: 20192 - protein, 173 aa, Zea mays subsp. mays
  peptide (1)..(173): Ceres Seq. ID no. 14309274
  misc_feature (1)..(67): Pfam Name: DUF862 Pfam Description: Eukaryotic protein of unknown function
  misc_feature (1)..(170): NCBI GI NO: 15235955 NR Description: expressed protein [Arabidopsis thaliana]
  misc_feature (1)..(170): NCBI GI NO: 15235952 NR Description: expressed protein [Arabidopsis thaliana]
  misc_feature (1)..(173): NCBI GI NO: 37536408 NR Description: unknown protein
  misc_feature (1)..(27): NCBI GI NO: 34897764 NR Description: hypothetical protein
  misc_feature (1)..(135): NCBI GI NO: 18400749 NR Description: expressed protein [Arabidopsis thaliana]
  misc_feature (1)..(116): NCBI GI NO: 18420889 NR Description: expressed protein [Arabidopsis thaliana]
  misc_feature (1)..(70): NCBI GI NO: 17529024 NR Description: unknown protein [Arabidopsis thaliana]
  misc_feature (1)..(70): NCBI GI NO: 18412886 NR Description: expressed protein [Arabidopsis thaliana]
  misc_feature (1)..(70): NCBI GI NO: 25354458 NR Description: hypothetical protein F23A5.4
  misc_feature (1)..(68): NCBI GI NO: 31240103 NR Description: ENSANGP00000016701 [Anopheles gambiae]
MYTYREKIVLGRTDCTIFMVNQIFRELTREWPGHTYDLLSRNCNHFCDVLCDRLGVPKLPGWVNRFAHAGDTALEVAETTAMRLKQAKTELLSASKVAYRFLSNVTSSVTNSSNGSPQQPGTVNNSDNVNSRMQGTWLKGMLNTSKPSTSTEIENKDEDANHDSEVLQFQQQP

SEQ ID NO: 20193 - DNA, 1810 bp, Zea mays subsp. mays
  misc_feature (1)..(1810): Ceres Seq. ID no. 15178939
tttactccgtccattcacaaagagcgttcatttctgttttctctctcctctcttatttctcttttttccttttttttcttttttttgtttttttttttttttcctctttcgttttttttttctctcttcgttttagttgatttcgaaccctaagctaaaaaggggaaagaggtcttttctcgggaaacaaaacagatatttttccatctcattcatcgcagtgagaaaaaaagatgcagaatccgaggctcaaacaacagcaacaacaacaacaacaacaacaacaagctatgatgcagcaagctttgatgcaacaacaccactctctctatcatcctagccttatggctcctcctccccctcctcctcagatggagcctctaccaagtggaaaccttcctcctggtttcgatcccactacttgccgcagtgtgtatgctggcaacattcacacgcaggtcactgaggttcttcttcaagaaatttttgctagcaccggccctgttgagagctgtaagctcatcagaaaggataagtcatcatatggatttgttcactactttgatcgaagatctgctggtttggctatcatgtctcttaacggcaggcatctgtttggacagcctatcaaagttaattgggcttatgctactggtcaaagggaagacacatcaagccacttcaacatatttgtcggagacctcagtccagatgttactgatgcagctttgtttgagagcttctctgccttcaatacttgctcggatgcaagagtaatgtgggaccagaaaactggacgctcgagaggctttgggtttgtttccttccgcaatcagcaggatgctcaaaatgccataaatgaaatgaatggtaaatggttaagtagcagacaaatcagatgcaactgggcgacaaaaggtgctacttttggcgacgacaaacatagctctgatggcaaaagtgtcgttgaactcacaaacggctcagaggatggtagagagatctcaatcacaaacgaagaagctcctgaaaacaatcctcagtataccactgtgtatgtaggaaaccttgctcctgaagtaactcagcttgatctacaccgcctgttccatacacttggcgctggagtgattgaagaggtccgtgtccagcgagacaaaggctttggttttgtgagatacaatactcatgacgaggctgctcttgctattcagatgggcaactctcagcctttcctcttcaacagacagataaagtgttcatggggaaacaaaccaactccaataggcacagcctcaaacccgcttccaccaccagcgccagtggcagtccctggtctgtccccaatggacctcttagcctatgagaggcaactggctctagccaagatgcatcctcaggctcagcattctcttaggcatgccaatgcagccggagcaagtgctgctatgtacgatggtggttttcagaatgtagctgcggctcatcagcagctcatgtactatcagtaataaactcttggtgccttcgcgctgagataccttttctttctttcttcttaattttatcactttcttgttttcattttctagaccttgttcagagtcttatgtatgtgtctctctctcatttgaagtcgctgattttatatgcatgcttgctggttcgtaccctgagtcttacttggcttgcaagcaagcaataaaataacgttgaaataaaatggagtttggtttgggttctagacatgtttgtctgagagggagtagtagtgtcttgtattgtggttttgtaatggtaaacttggtcc

SEQ ID NO: 20194 - protein, 425 aa, Zea mays subsp. mays
  peptide (1)..(425): Ceres Seq. ID no. 15178940
  misc_feature (152)..(223): Pfam Name: a.k.a. RRM, RBD, or RNP domain Pfam Description: RNA recognition motif.
  misc_feature (1)..(425): NCBI GI NO: 15221031 NR Description: oligouridylate binding protein (UBP1), putative
  misc_feature (1)..(425): NCBI GI NO: 30695647 NR Description: oligouridylate binding protein (UBP1), putative
  misc_feature (1)..(425): NCBI GI NO: 21593280 NR Description: oligouridylate binding protein, putative
  misc_feature (1)..(425): NCBI GI NO: 15231783 NR Description: oligouridylate binding protein (UBP1), putative
  misc_feature (8)..(425): NCBI GI NO: 18394471 NR Description: oligouridylate binding protein (UBP1), putative
  misc_feature (46)..(214): NCBI GI NO: 25402821 NR Description: protein F1L3.2 [imported] - Arabidopsis thaliana
  misc_feature (212)..(346): NCBI GI NO: 25402821 NR Description: protein F1L3.2 [imported] - Arabidopsis thaliana
  misc_feature (340)..(425): NCBI GI NO: 25402821 NR Description: protein F1L3.2 [imported] - Arabidopsis thaliana
  misc_feature (8)..(51): NCBI GI NO: 25402821 NR Description: protein F1L3.2 [imported] - Arabidopsis thaliana
  misc_feature (6)..(424): NCBI GI NO: 6996560 NR Description: oligouridylate binding protein
MQNPRLKQQQQQQQQQQQAMMQQALMQQHHSLYHPSLMAPPPPPPQMEPLPSGNLPPGFDPTTCRSVYAGNIHTQVTEVLLQEIFASTGPVESCKLIRKDKSSYGFVHYFDRRSAGLAIMSLNGRHLFGQPIKVNWAYATGQREDTSSHFNIFVGDLSPDVTDAALFESFSAFNTCSDARVMWDQKTGRSRGFGFVSFRNQQDAQNAINEMNGKWLSSRQIRCNWATKGATFGDDKHSSDGKSVVELTNGSEDGREISITNEEAPENNPQYTTVYVGNLAPEVTQLDLHRLFHTLGAGVIEEVRVQRDKGFGFVRYNTHDEAALAIQMGNSQPFLFNRQIKCSWGNKPTPIGTASNPLPPPAPVAVPGLSPMDLLAYERQLALAKMHPQAQHSLRHANAAGASAAMYDGGFQNVAAAHQQLMYYQ

SEQ ID NO: 20195 - protein, 406 aa, Zea mays subsp. mays
  peptide (1)..(406): Ceres Seq. ID no. 15178941
  misc_feature (133)..(204): Pfam Name: a.k.a. RRM, RBD, or RNP domain Pfam Description: RNA recognition motif.
  misc_feature (1)..(406): NCBI GI NO: 15221031 NR Description: oligouridylate binding protein (UBP1), putative
  misc_feature (1)..(406): NCBI GI NO: 30695647 NR Description: oligouridylate binding protein (UBP1), putative
  misc_feature (1)..(406): NCBI GI NO: 21593280 NR Description: oligouridylate binding protein, putative
  misc_feature (1)..(406): NCBI GI NO: 15231783 NR Description: oligouridylate binding protein (UBP1), putative
  misc_feature (1)..(406): NCBI GI NO: 18394471 NR Description: oligouridylate binding protein (UBP1), putative
  misc_feature (27)..(195): NCBI GI NO: 25402821 NR Description: protein F1L3.2 [imported] - Arabidopsis thaliana
  misc_feature (193)..(327): NCBI GI NO: 25402821 NR Description: protein F1L3.2 [imported] - Arabidopsis thaliana
  misc_feature (321)..(406): NCBI GI NO: 25402821 NR Description: protein F1L3.2 [imported] - Arabidopsis thaliana
  misc_feature (1)..(32): NCBI GI NO: 25402821 NR Description: protein F1L3.2 [imported] - Arabidopsis thaliana
  misc_feature (1)..(405): NCBI GI NO: 6996560 NR Description: oligouridylate binding protein
MMQQALMQQHHSLYHPSLMAPPPPPPQMEPLPSGNLPPGFDPTTCRSVYAGNIHTQVTEVLLQEIFASTGPVESCKLIRKDKSSYGFVHYFDRRSAGLAIMSLNGRHLFGQPIKVNWAYATGQREDTSSHFNIFVGDLSPDVTDAALFESFSAFNTCSDARVMWDQKTGRSRGFGFVSFRNQQDAQNAINEMNGKWLSSRQIRCNWATKGATFGDDKHSSDGKSVVELTNGSEDGREISITNEEAPENNPQYTTVYVGNLAPEVTQLDLHRLFHTLGAGVIEEVRVQRDKGFGFVRYNTHDEAALAIQMGNSQPFLFNRQIKCSWGNKPTPIGTASNPLPPPAPVAVPGLSPMDLLAYERQLALAKMHPQAQHSLRHANAAGASAAMYDGGFQNVAAAHQQLMYYQ

SEQ ID NO: 20196 - protein, 405 aa, Zea mays subsp. mays
  peptide (1)..(405): Ceres Seq. ID no. 15178942
  misc_feature (132)..(203): Pfam Name: a.k.a. RRM, RBD, or RNP domain Pfam Description: RNA recognition motif.
  misc_feature (1)..(405): NCBI GI NO: 15221031 NR Description: oligouridylate binding protein (UBP1), putative
  misc_feature (1)..(405): NCBI GI NO: 30695647 NR Description: oligouridylate binding protein (UBP1), putative
  misc_feature (1)..(405): NCBI GI NO: 21593280 NR Description: oligouridylate binding protein, putative
  misc_feature (1)..(405): NCBI GI NO: 15231783 NR Description: oligouridylate binding protein (UBP1), putative
  misc_feature (1)..(405): NCBI GI NO: 18394471 NR Description: oligouridylate binding protein (UBP1), putative
  misc_feature (26)..(194): NCBI GI NO: 25402821 NR Description: protein F1L3.2 [imported] - Arabidopsis thaliana
  misc_feature (192)..(326): NCBI GI NO: 25402821 NR Description: protein F1L3.2 [imported] - Arabidopsis thaliana
  misc_feature (320)..(405): NCBI GI NO: 25402821 NR Description: protein F1L3.2 [imported] - Arabidopsis thaliana
  misc_feature (1)..(31): NCBI GI NO: 25402821 NR Description: protein F1L3.2 [imported] - Arabidopsis thaliana
  misc_feature (1)..(404): NCBI GI NO: 6996560 NR Description: oligouridylate binding protein
MQQALMQQHHSLYHPSLMAPPPPPPQMEPLPSGNLPPGFDPTTCRSVYAGNIHTQVTEVLLQEIFASTGPVESCKLIRKDKSSYGFVHYFDRRSAGLAIMSLNGRHLFGQPIKVNWAYATGQREDTSSHFNIFVGDLSPDVTDAALFESFSAFNTCSDARVMWDQKTGRSRGFGFVSFRNQQDAQNAINEMNGKWLSSRQIRCNWATKGATFGDDKHSSDGKSVVELTNGSEDGREISITNEEAPENNPQYTTVYVGNLAPEVTQLDLHRLFHTLGAGVIEEVRVQRDKGFGFVRYNTHDEAALAIQMGNSQPFLFNRQIKCSWGNKPTPIGTASNPLPPPAPVAVPGLSPMDLLAYERQLALAKMHPQAQHSLRHANAAGASAAMYDGGFQNVAAAHQQLMYYQ

SEQ ID NO: 20197 - DNA, 1467 bp, Zea mays subsp. mays
  misc_feature (1)..(1467): Ceres Seq. ID no. 15178909
ataaataagaaaaatatttttttccaaacactaataataataaaactagtggattacaaaatatataaacaaaaataaaaattgtaatccctagtaactaaaaaaaaatcatataatgggtgtacattttggaatatctgtattatttgttgtttgtttgctaggtttatcagcaaatgctaaagatttcacaatcactgctcctccaggttctgatatcaccagcttattgttgaaaacattcaatgaggcatgccagttcccaaccaagagcagcgttttgatccctaaaggtgaatacaagcttaggcaaatagagatgatgggtccatgcaaagctcccataaggattactcttcaaggcactgtgaaagctgacggaaacgttaacgggaatgactactgggtcgctttccgcaggattaatgggtttaagttgaacggaggtggtgtctttgacggtgaaggtaacactgcatggagggctaataattgccacaaaatggcattaactcagtgcaagaaactccctatcagcatacggtttgatttcgtgactgacgctaagataagaggcataacctcgatggattcaaagaacttccacattaacgtgctcggggcaaggaacatgacattggaagaaatcacgatcattgcccctgaagagagtcccaacaccgatggaatccacgtgggaaggagtgttggagtccagatcatcaactcaaacatcaaaacaggagatgactgcatctctattggagacgggacgagagaccttcttgtcgaaagagttacatgcggtccgggacatggaatcagtattggaagcctcgatttatacgtgaaggaggaagacgtcactggcatcagggtcgtgaactgcaccctcataaacactgacaatggtgtaaggatcaagacatggccgtctgcagcttgctccaccaccgcctcgggtatccattttgagaatattatcctcaagaacgttaccaaccctatcctcatcgaccaagagtactgcccctggaaccgatgcaacaagaacaaaccatcaacaatcaagctggtggacataagcttcaagcatatcagaggaacatcagggaacaaagacgccgttaagcttttgtgcagcaagggatttccgtgcaagaacgtggagattggtgacattgacattaagtacaccggagccgatggtccagcgacattccaatgctccaacgtatctcccacgttgatgggaactcaggtccctaaagcatgtagcagcccagtgactaagctaccaggccagtaagaaatctcgatgcgataaccaatacacaatctaaaatgtacaacccataatgtatgttatattctttcatttgattttatttgtaaaaaaaaaaagcgtttttgctagctatcttgtataacatgcatcattcttgagaaaaaatataataactttat

SEQ ID NO: 20198 - protein, 397 aa, Zea mays subsp. mays
  peptide (1)..(397): Ceres Seq. ID no. 15178910
  misc_feature (47)..(387): Pfam Name: Pfam Description:  Glycosyl hydrolases family 28
  misc_feature (1)..(395): NCBI GI NO: 15238902 NR Description: polygalacturonase, putative [Arabidopsis thaliana]
  misc_feature (1)..(390): NCBI GI NO: 15231874 NR Description: polygalacturonase, putative [Arabidopsis thaliana]
  misc_feature (1)..(390): NCBI GI NO: 11263969 NR Description: polygalacturonase (EC 3.2.1.15)
  misc_feature (1)..(397): NCBI GI NO: 21668071 NR Description: putative pollen polygalacturonase
  misc_feature (1)..(393): NCBI GI NO: 15231878 NR Description: exopolygalacturonase [Arabidopsis thaliana]
  misc_feature (1)..(397): NCBI GI NO: 30984029 NR Description: polygalacturonase [Brassica napus]
  misc_feature (1)..(390): NCBI GI NO: 15231876 NR Description: polygalacturonase, putative [Arabidopsis thaliana]
  misc_feature (1)..(397): NCBI GI NO: 548490 NR Description: Polygalacturonase precursor (PG) (Pectinase)
  misc_feature (1)..(395): NCBI GI NO: 3024385 NR Description: POLYGALACTURONASE PRECURSOR (PG) (PECTINASE)
  misc_feature (1)..(395): NCBI GI NO: 3024386 NR Description: POLYGALACTURONASE PRECURSOR (PG) (PECTINASE)
MGVHFGISVLFVVCLLGLSANAKDFTITAPPGSDITSLLLKTFNEACQFPTKSSVLIPKGEYKLRQIEMMGPCKAPIRITLQGTVKADGNVNGNDYWVAFRRINGFKLNGGGVFDGEGNTAWRANNCHKMALTQCKKLPISIRFDFVTDAKIRGITSMDSKNFHINVLGARNMTLEEITIIAPEESPNTDGIHVGRSVGVQIINSNIKTGDDCISIGDGTRDLLVERVTCGPGHGISIGSLDLYVKEEDVTGIRVVNCTLINTDNGVRIKTWPSAACSTTASGIHFENIILKNVTNPILIDQEYCPWNRCNKNKPSTIKLVDISFKHIRGTSGNKDAVKLLCSKGFPCKNVEIGDIDIKYTGADGPATFQCSNVSPTLMGTQVPKACSSPVTKLPGQ

SEQ ID NO: 20199 - protein, 329 aa, Zea mays subsp. mays
  peptide (1)..(329): Ceres Seq. ID no. 15178911
  misc_feature (1)..(319): Pfam Name: Pfam Description:  Glycosyl hydrolases family 28
  misc_feature (1)..(327): NCBI GI NO: 15238902 NR Description: polygalacturonase, putative [Arabidopsis thaliana]
  misc_feature (1)..(322): NCBI GI NO: 15231874 NR Description: polygalacturonase, putative [Arabidopsis thaliana]
  misc_feature (1)..(322): NCBI GI NO: 11263969 NR Description: polygalacturonase (EC 3.2.1.15)
  misc_feature (1)..(329): NCBI GI NO: 21668071 NR Description: putative pollen polygalacturonase
  misc_feature (1)..(325): NCBI GI NO: 15231878 NR Description: exopolygalacturonase [Arabidopsis thaliana]
  misc_feature (1)..(329): NCBI GI NO: 30984029 NR Description: polygalacturonase [Brassica napus]
  misc_feature (1)..(322): NCBI GI NO: 15231876 NR Description: polygalacturonase, putative [Arabidopsis thaliana]
  misc_feature (1)..(329): NCBI GI NO: 548490 NR Description: Polygalacturonase precursor (PG) (Pectinase)
  misc_feature (1)..(327): NCBI GI NO: 3024385 NR Description: POLYGALACTURONASE PRECURSOR (PG) (PECTINASE)
  misc_feature (1)..(327): NCBI GI NO: 3024386 NR Description: POLYGALACTURONASE PRECURSOR (PG) (PECTINASE)
MMGPCKAPIRITLQGTVKADGNVNGNDYWVAFRRINGFKLNGGGVFDGEGNTAWRANNCHKMALTQCKKLPISIRFDFVTDAKIRGITSMDSKNFHINVLGARNMTLEEITIIAPEESPNTDGIHVGRSVGVQIINSNIKTGDDCISIGDGTRDLLVERVTCGPGHGISIGSLDLYVKEEDVTGIRVVNCTLINTDNGVRIKTWPSAACSTTASGIHFENIILKNVTNPILIDQEYCPWNRCNKNKPSTIKLVDISFKHIRGTSGNKDAVKLLCSKGFPCKNVEIGDIDIKYTGADGPATFQCSNVSPTLMGTQVPKACSSPVTKLPGQ

SEQ ID NO: 20200 - protein, 328 aa, Zea mays subsp. mays
  peptide (1)..(328): Ceres Seq. ID no. 15178912
  misc_feature (1)..(318): Pfam Name: Pfam Description:  Glycosyl hydrolases family 28
  misc_feature (1)..(326): NCBI GI NO: 15238902 NR Description: polygalacturonase, putative [Arabidopsis thaliana]
  misc_feature (1)..(321): NCBI GI NO: 15231874 NR Description: polygalacturonase, putative [Arabidopsis thaliana]
  misc_feature (1)..(321): NCBI GI NO: 11263969 NR Description: polygalacturonase (EC 3.2.1.15)
  misc_feature (1)..(328): NCBI GI NO: 21668071 NR Description: putative pollen polygalacturonase
  misc_feature (1)..(324): NCBI GI NO: 15231878 NR Description: exopolygalacturonase [Arabidopsis thaliana]
  misc_feature (1)..(328): NCBI GI NO: 30984029 NR Description: polygalacturonase [Brassica napus]
  misc_feature (1)..(321): NCBI GI NO: 15231876 NR Description: polygalacturonase, putative [Arabidopsis thaliana]
  misc_feature (1)..(328): NCBI GI NO: 548490 NR Description: Polygalacturonase precursor (PG) (Pectinase)
  misc_feature (1)..(326): NCBI GI NO: 3024385 NR Description: POLYGALACTURONASE PRECURSOR (PG) (PECTINASE)
  misc_feature (1)..(326): NCBI GI NO: 3024386 NR Description: POLYGALACTURONASE PRECURSOR (PG) (PECTINASE)
MGPCKAPIRITLQGTVKADGNVNGNDYWVAFRRINGFKLNGGGVFDGEGNTAWRANNCHKMALTQCKKLPISIRFDFVTDAKIRGITSMDSKNFHINVLGARNMTLEEITIIAPEESPNTDGIHVGRSVGVQIINSNIKTGDDCISIGDGTRDLLVERVTCGPGHGISIGSLDLYVKEEDVTGIRVVNCTLINTDNGVRIKTWPSAACSTTASGIHFENIILKNVTNPILIDQEYCPWNRCNKNKPSTIKLVDISFKHIRGTSGNKDAVKLLCSKGFPCKNVEIGDIDIKYTGADGPATFQCSNVSPTLMGTQVPKACSSPVTKLPGQ

SEQ ID NO: 20201 - DNA, 1358 bp, Zea mays subsp. mays
  misc_feature (1)..(1358): Ceres Seq. ID no. 15179524
atcacaatttcaaacctctctctctctctctcttctccaattctcaatcaatcgaatcatggttgaaccggcgaataccgttggaatcccgttgaaccacactgcgctgctgaaggatgagctcgacatcgtgatccccacgatccgcaacctcgatttcctcgagatgtggagaccttttctccagccttaccatctcatcatcgtccaggacggagatccttccaagaccattgctgttcctgaagggttcgattacgagctttacaacaggaacgacattaaccgtatcctcggtcccaaagcttcgtgcatttccttcaaggactcggcttgtcgctgcttcggttacatggtgtctaagaagaagtacatcttcacaatcgacgacgattgcttcgttgctaaggatccatctggaaaagcagtgaacgcacttgagcaacacatcaagaaccttctctgcccatcttctccgtttttcttcaacaccttgtacgacccataccgtgaaggtgctgacttcgtccgtggataccctttcagtctccgtgagggtgtttccactgctgtctcccacggtctctggctcaacatccctgattacgatgccccaacccaacttgtgaagcctaaagaaaggaacacaaggtatgtggatgctgtaatgaccatcccaaagggaacacttttcccaatgtgtggtatgaacttagcctttgaccgtgatctcatcggtccggctatgtactttggtctcatgggtgatggtcagcctattggtcgctacgacgatatgtgggctggatggtgtgtcaaggtgatctgtgaccatttggggttaggagtgaagacaggtcttccctacatttaccacagcaaggcaagcaacccatttgtgaacctgaagaaggaatacaagggcattttctggcaggaggacatcattcctttcttccagagcgcaaagctctcgaaagaagctgtgacggttcaacaatgctacattgagctgtccaagatggtgaaggagaagctcagcgccattgatccttactttgacaagcttgctgatgctatggtcacctggattgaagcttgggatgagcttaacccggccaccaaagcttgagcagcagataaaaaaaaaaatcaccgcagttttggttattagcttaacctatctcatctatcttctttccttccccgttttttttctgactttccggtgattattcagttcgttttaaagttgccagagtttatttaaatagtgatggtgtgtagttctatttaagaccgatacaatgtatcctctgagctttttgtttcaataataaaatcatatatattccttg

SEQ ID NO: 20202 - protein, 376 aa, Zea mays subsp. mays
  peptide (1)..(376): Ceres Seq. ID no. 15179525
  misc_feature (32)..(375): Pfam Name: Pfam Description:  Reversibly glycosylated polypeptide
  misc_feature (20)..(376): NCBI GI NO: 15232865 NR Description: reversibly glycosylated polypeptide-1
  misc_feature (20)..(376): NCBI GI NO: 2317729 NR Description: reversibly glycosylated polypeptide-1
  misc_feature (20)..(372): NCBI GI NO: 15242351 NR Description: reversibly glycosylated polypeptide-3
  misc_feature (20)..(372): NCBI GI NO: 2317731 NR Description: reversibly glycosylated polypeptide-2
  misc_feature (20)..(372): NCBI GI NO: 21593071 NR Description: reversibly glycosylated polypeptide-3
  misc_feature (28)..(372): NCBI GI NO: 34582499 NR Description: Alpha-1,4-glucan-protein synthase
  misc_feature (24)..(376): NCBI GI NO: 4158221 NR Description: reversibly glycosylated polypeptide
  misc_feature (24)..(376): NCBI GI NO: 34915190 NR Description: reversibly glycosylated polypeptide
  misc_feature (34)..(376): NCBI GI NO: 30680679 NR Description: reversibly glycosylatable polypeptide -related
  misc_feature (56)..(376): NCBI GI NO: 7488889 NR Description: type IIIa membrane protein cp-wap13 - cowpea
SQFQTSLSLSLLQFSINRIMVEPANTVGIPLNHTALLKDELDIVIPTIRNLDFLEMWRPFLQPYHLIIVQDGDPSKTIAVPEGFDYELYNRNDINRILGPKASCISFKDSACRCFGYMVSKKKYIFTIDDDCFVAKDPSGKAVNALEQHIKNLLCPSSPFFFNTLYDPYREGADFVRGYPFSLREGVSTAVSHGLWLNIPDYDAPTQLVKPKERNTRYVDAVMTIPKGTLFPMCGMNLAFDRDLIGPAMYFGLMGDGQPIGRYDDMWAGWCVKVICDHLGLGVKTGLPYIYHSKASNPFVNLKKEYKGIFWQEDIIPFFQSAKLSKEAVTVQQCYIELSKMVKEKLSAIDPYFDKLADAMVTWIEAWDELNPATKA

SEQ ID NO: 20203 - protein, 357 aa, Zea mays subsp. mays
  peptide (1)..(357): Ceres Seq. ID no. 15179526
  misc_feature (13)..(356): Pfam Name: Pfam Description:  Reversibly glycosylated polypeptide
  misc_feature (1)..(357): NCBI GI NO: 15232865 NR Description: reversibly glycosylated polypeptide-1
  misc_feature (1)..(357): NCBI GI NO: 2317729 NR Description: reversibly glycosylated polypeptide-1
  misc_feature (1)..(353): NCBI GI NO: 15242351 NR Description: reversibly glycosylated polypeptide-3
  misc_feature (1)..(353): NCBI GI NO: 2317731 NR Description: reversibly glycosylated polypeptide-2
  misc_feature (1)..(353): NCBI GI NO: 21593071 NR Description: reversibly glycosylated polypeptide-3
  misc_feature (9)..(353): NCBI GI NO: 34582499 NR Description: Alpha-1,4-glucan-protein synthase
  misc_feature (5)..(357): NCBI GI NO: 4158221 NR Description: reversibly glycosylated polypeptide
  misc_feature (5)..(357): NCBI GI NO: 34915190 NR Description: reversibly glycosylated polypeptide
  misc_feature (15)..(357): NCBI GI NO: 30680679 NR Description: reversibly glycosylatable polypeptide -related
  misc_feature (37)..(357): NCBI GI NO: 7488889 NR Description: type IIIa membrane protein cp-wap13 - cowpea
MVEPANTVGIPLNHTALLKDELDIVIPTIRNLDFLEMWRPFLQPYHLIIVQDGDPSKTIAVPEGFDYELYNRNDINRILGPKASCISFKDSACRCFGYMVSKKKYIFTIDDDCFVAKDPSGKAVNALEQHIKNLLCPSSPFFFNTLYDPYREGADFVRGYPFSLREGVSTAVSHGLWLNIPDYDAPTQLVKPKERNTRYVDAVMTIPKGTLFPMCGMNLAFDRDLIGPAMYFGLMGDGQPIGRYDDMWAGWCVKVICDHLGLGVKTGLPYIYHSKASNPFVNLKKEYKGIFWQEDIIPFFQSAKLSKEAVTVQQCYIELSKMVKEKLSAIDPYFDKLADAMVTWIEAWDELNPATKA

SEQ ID NO: 20204 - protein, 321 aa, Zea mays subsp. mays
  peptide (1)..(321): Ceres Seq. ID no. 15179527
  misc_feature (1)..(320): Pfam Name: Pfam Description:  Reversibly glycosylated polypeptide
  misc_feature (1)..(321): NCBI GI NO: 15232865 NR Description: reversibly glycosylated polypeptide-1
  misc_feature (1)..(321): NCBI GI NO: 2317729 NR Description: reversibly glycosylated polypeptide-1
  misc_feature (1)..(317): NCBI GI NO: 15242351 NR Description: reversibly glycosylated polypeptide-3
  misc_feature (1)..(317): NCBI GI NO: 2317731 NR Description: reversibly glycosylated polypeptide-2
  misc_feature (1)..(317): NCBI GI NO: 21593071 NR Description: reversibly glycosylated polypeptide-3
  misc_feature (1)..(317): NCBI GI NO: 34582499 NR Description: Alpha-1,4-glucan-protein synthase
  misc_feature (1)..(321): NCBI GI NO: 4158221 NR Description: reversibly glycosylated polypeptide
  misc_feature (1)..(321): NCBI GI NO: 34915190 NR Description: reversibly glycosylated polypeptide
  misc_feature (1)..(321): NCBI GI NO: 30680679 NR Description: reversibly glycosylatable polypeptide -related
  misc_feature (1)..(321): NCBI GI NO: 7488889 NR Description: type IIIa membrane protein cp-wap13 - cowpea
MWRPFLQPYHLIIVQDGDPSKTIAVPEGFDYELYNRNDINRILGPKASCISFKDSACRCFGYMVSKKKYIFTIDDDCFVAKDPSGKAVNALEQHIKNLLCPSSPFFFNTLYDPYREGADFVRGYPFSLREGVSTAVSHGLWLNIPDYDAPTQLVKPKERNTRYVDAVMTIPKGTLFPMCGMNLAFDRDLIGPAMYFGLMGDGQPIGRYDDMWAGWCVKVICDHLGLGVKTGLPYIYHSKASNPFVNLKKEYKGIFWQEDIIPFFQSAKLSKEAVTVQQCYIELSKMVKEKLSAIDPYFDKLADAMVTWIEAWDELNPATKA

SEQ ID NO: 20205 - DNA, 907 bp, Zea mays subsp. mays
  misc_feature (1)..(907): Ceres Seq. ID no. 15174373
gattcagagtctcactcttgctcaagtggagctccatcaatggcttcactaaacctcttcaccttcgctttccttcttcttatctctcacgcttcagcttcaacggtcgtattcctcaacaaatgcagatatccagtgtggccaggcatccagcccagcgccggccaaaacatactcgccggcggtggatttaagcttcctgctaacaaagcctacacccttcagctcccaccgctttggtccggccgcttctggggtcgccacggctgcacatttgacagatctggccgtggtcgctgcgccaccggagattgcggcggttctctcacctgcaacggtgccggcggttcacctccggccactctcgcagaaatcaccctcggacaagagcttgacttctatgacgtcagcctcgtcgacggttataacctcgctatgtcgataatgccggtgaaaggtagaggtcaatgtagctacgccggttgtgtaagcgatctaaaccggatgtgtccggttgggttacaagtccggtcacgcaacgggaaacgggtgttagcctgtaaaagcgcttgctctgccttcaactcaccacagtactgttgtaccggcacgttcggtaacccgctcacctgcaagccaacttcttactccaaaatcttcaaggtcgcttgccctaaagcttattcttacgcttacgacgacccaaccagcatcgcaacttgttccaaggctaattacatcgtcaccttttgccctcaccatcgccgttaaggttacaattattaagaacaaggcatttctctgttagcaacaatatcttgtgttatgtaatcgggaatctttgaggtttatgtctctacaattgtaacactcttgaaatgcaaaatcctataacaatatcaatatc

SEQ ID NO: 20206 - protein, 256 aa, Zea mays subsp. mays
  peptide (1)..(256): Ceres Seq. ID no. 15174374
  misc_feature (40)..(252): Pfam Name: Pfam Description:  Thaumatin family
  misc_feature (14)..(256): NCBI GI NO: 7442175 NR Description: thaumatin-like protein - turnip
  misc_feature (14)..(255): NCBI GI NO: 15221033 NR Description: thaumatin-like protein [Arabidopsis thaliana]
  misc_feature (14)..(255): NCBI GI NO: 2129751 NR Description: thaumatin-like protein - Arabidopsis thaliana
  misc_feature (9)..(256): NCBI GI NO: 15219508 NR Description: thaumatin-like protein
  misc_feature (15)..(256): NCBI GI NO: 21553814 NR Description: thaumatin-like protein [Arabidopsis thaliana]
  misc_feature (14)..(123): NCBI GI NO: 25296198 NR Description: protein T10O22.21
  misc_feature (153)..(255): NCBI GI NO: 25296198 NR Description: protein T10O22.21
  misc_feature (24)..(251): NCBI GI NO: 4586372 NR Description: thaumatin-like protein SE39b [Nicotiana tabacum]
  misc_feature (14)..(252): NCBI GI NO: 15222088 NR Description: thaumatin-like protein [Arabidopsis thaliana]
  misc_feature (26)..(252): NCBI GI NO: 6273385 NR Description: SCUTL2 [Vitis vinifera]
DSESHSCSSGAPSMASLNLFTFAFLLLISHASASTVVFLNKCRYPVWPGIQPSAGQNILAGGGFKLPANKAYTLQLPPLWSGRFWGRHGCTFDRSGRGRCATGDCGGSLTCNGAGGSPPATLAEITLGQELDFYDVSLVDGYNLAMSIMPVKGRGQCSYAGCVSDLNRMCPVGLQVRSRNGKRVLACKSACSAFNSPQYCCTGTFGNPLTCKPTSYSKIFKVACPKAYSYAYDDPTSIATCSKANYIVTFCPHHRR

SEQ ID NO: 20207 - protein, 243 aa, Zea mays subsp. mays
  peptide (1)..(243): Ceres Seq. ID no. 15174375
  misc_feature (27)..(239): Pfam Name: Pfam Description:  Thaumatin family
  misc_feature (1)..(243): NCBI GI NO: 7442175 NR Description: thaumatin-like protein - turnip
  misc_feature (1)..(242): NCBI GI NO: 15221033 NR Description: thaumatin-like protein [Arabidopsis thaliana]
  misc_feature (1)..(242): NCBI GI NO: 2129751 NR Description: thaumatin-like protein - Arabidopsis thaliana
  misc_feature (1)..(243): NCBI GI NO: 15219508 NR Description: thaumatin-like protein
  misc_feature (2)..(243): NCBI GI NO: 21553814 NR Description: thaumatin-like protein [Arabidopsis thaliana]
  misc_feature (1)..(110): NCBI GI NO: 25296198 NR Description: protein T10O22.21
  misc_feature (140)..(242): NCBI GI NO: 25296198 NR Description: protein T10O22.21
  misc_feature (11)..(238): NCBI GI NO: 4586372 NR Description: thaumatin-like protein SE39b [Nicotiana tabacum]
  misc_feature (1)..(239): NCBI GI NO: 15222088 NR Description: thaumatin-like protein [Arabidopsis thaliana]
  misc_feature (13)..(239): NCBI GI NO: 6273385 NR Description: SCUTL2 [Vitis vinifera]
MASLNLFTFAFLLLISHASASTVVFLNKCRYPVWPGIQPSAGQNILAGGGFKLPANKAYTLQLPPLWSGRFWGRHGCTFDRSGRGRCATGDCGGSLTCNGAGGSPPATLAEITLGQELDFYDVSLVDGYNLAMSIMPVKGRGQCSYAGCVSDLNRMCPVGLQVRSRNGKRVLACKSACSAFNSPQYCCTGTFGNPLTCKPTSYSKIFKVACPKAYSYAYDDPTSIATCSKANYIVTFCPHHRR

SEQ ID NO: 20208 - DNA, 1048 bp, Zea mays subsp. mays
  misc_feature (1)..(1048): Ceres Seq. ID no. 15174333
ctccagttgattagatttctcccactttacactttctcccattctccaccgctctgcgacaatgtcggctgctttcattcccatggatcaatctcagaacaacattctcatggattcccagcctactacttcccccgtgaaaactgtgaaaattagcaatgtttcactcaatgtctccaagaaagatctcaatgagttcttttctttctctggtgacattcactacatcgagatgcgcagtgaaacgcaagaaactcagcttgcttatgttaccttcaaggatccacaaggagcagaaactgctatgctcttaacgggagctgtcattgctgatcatcgtgttagtattactcctgctgtgaactacgacctaccaccagaagcccttgcacttgactcgcaggaatattcatttaatggcttcactgtcaagaaagctgaacatgtggtaagcaccatgatggaaagaggttatgctgttggcaaagacgctatggagaaagccaaagcctttgacgacagacacaacctagtctcaaacgcttcagcaaccattgcctccctcgacaacaagatgggtttgagcgagaagctaagcataggaactaccgtggtgaacgaaaagctgagagaggtggacgagcggtatcaagtgagggagatcacaaaatccgctctagcagctgctgaggagagagcgattagcgcaggaacggctttgatggcgaatccttatgtttcaagcggagcttcgtggctatcaaacgcctttggtgcagtgacaaaggcggttagggctgaggatggaggagagggaagaaaggagattgtccaacttgatgacacgtcacctaaagctcctgctgttgttcctgttaactcagtggacacagacttcaccaaaccaagtttctaaagattgtcttaaactccaattctttgatacatttgctgtgcatatacatgcttacatattcattggtctttcttttattgcacaacataaacataacataaaacctttaaaatgtattttgttgtcacattc

SEQ ID NO: 20209 - protein, 284 aa, Zea mays subsp. mays
  peptide (1)..(284): Ceres Seq. ID no. 15174334
  misc_feature (29)..(96): Pfam Name: a.k.a. RRM, RBD, or RNP domain Pfam Description: RNA recognition motif.
  misc_feature (1)..(272): NCBI GI NO: 30697598 NR Description: RNA recognition motif (RRM)-containing protein
  misc_feature (1)..(272): NCBI GI NO: 18408904 NR Description: RNA recognition motif (RRM)-containing protein
  misc_feature (3)..(272): NCBI GI NO: 30697595 NR Description: RNA recognition motif (RRM)-containing protein
  misc_feature (1)..(245): NCBI GI NO: 26450623 NR Description: unknown protein [Arabidopsis thaliana]
  misc_feature (58)..(272): NCBI GI NO: 25404689 NR Description: unknown protein, 64612-65506
  misc_feature (58)..(272): NCBI GI NO: 30697600 NR Description: RNA recognition motif (RRM)-containing protein
  misc_feature (26)..(281): NCBI GI NO: 18071362 NR Description: putative splicing regulatory protein
  misc_feature (28)..(269): NCBI GI NO: 18414951 NR Description: RNA recognition motif (RRM)-containing protein
  misc_feature (26)..(261): NCBI GI NO: 38344181 NR Description: OSJNBa0053K19.20
  misc_feature (24)..(255): NCBI GI NO: 38347069 NR Description: OSJNBa0006A01.10
MSAAFIPMDQSQNNILMDSQPTTSPVKTVKISNVSLNVSKKDLNEFFSFSGDIHYIEMRSETQETQLAYVTFKDPQGAETAMLLTGAVIADHRVSITPAVNYDLPPEALALDSQEYSFNGFTVKKAEHVVSTMMERGYAVGKDAMEKAKAFDDRHNLVSNASATIASLDNKMGLSEKLSIGTTVVNEKLREVDERYQVREITKSALAAAEERAISAGTALMANPYVSSGASWLSNAFGAVTKAVRAEDGGEGRKEIVQLDDTSPKAPAVVPVNSVDTDFTKPSF

SEQ ID NO: 20210 - protein, 277 aa, Zea mays subsp. mays
  peptide (1)..(277): Ceres Seq. ID no. 15174335
  misc_feature (22)..(89): Pfam Name: a.k.a. RRM, RBD, or RNP domain Pfam Description: RNA recognition motif.
  misc_feature (1)..(265): NCBI GI NO: 30697598 NR Description: RNA recognition motif (RRM)-containing protein
  misc_feature (1)..(265): NCBI GI NO: 18408904 NR Description: RNA recognition motif (RRM)-containing protein
  misc_feature (1)..(265): NCBI GI NO: 30697595 NR Description: RNA recognition motif (RRM)-containing protein
  misc_feature (1)..(238): NCBI GI NO: 26450623 NR Description: unknown protein [Arabidopsis thaliana]
  misc_feature (51)..(265): NCBI GI NO: 25404689 NR Description: unknown protein, 64612-65506
  misc_feature (51)..(265): NCBI GI NO: 30697600 NR Description: RNA recognition motif (RRM)-containing protein
  misc_feature (19)..(274): NCBI GI NO: 18071362 NR Description: putative splicing regulatory protein
  misc_feature (21)..(262): NCBI GI NO: 18414951 NR Description: RNA recognition motif (RRM)-containing protein
  misc_feature (19)..(254): NCBI GI NO: 38344181 NR Description: OSJNBa0053K19.20
  misc_feature (17)..(248): NCBI GI NO: 38347069 NR Description: OSJNBa0006A01.10
MDQSQNNILMDSQPTTSPVKTVKISNVSLNVSKKDLNEFFSFSGDIHYIEMRSETQETQLAYVTFKDPQGAETAMLLTGAVIADHRVSITPAVNYDLPPEALALDSQEYSFNGFTVKKAEHVVSTMMERGYAVGKDAMEKAKAFDDRHNLVSNASATIASLDNKMGLSEKLSIGTTVVNEKLREVDERYQVREITKSALAAAEERAISAGTALMANPYVSSGASWLSNAFGAVTKAVRAEDGGEGRKEIVQLDDTSPKAPAVVPVNSVDTDFTKPSF

SEQ ID NO: 20211 - protein, 268 aa, Zea mays subsp. mays
  peptide (1)..(268): Ceres Seq. ID no. 15174336
  misc_feature (13)..(80): Pfam Name: a.k.a. RRM, RBD, or RNP domain Pfam Description: RNA recognition motif.
  misc_feature (1)..(256): NCBI GI NO: 30697598 NR Description: RNA recognition motif (RRM)-containing protein
  misc_feature (1)..(256): NCBI GI NO: 18408904 NR Description: RNA recognition motif (RRM)-containing protein
  misc_feature (1)..(256): NCBI GI NO: 30697595 NR Description: RNA recognition motif (RRM)-containing protein
  misc_feature (1)..(229): NCBI GI NO: 26450623 NR Description: unknown protein [Arabidopsis thaliana]
  misc_feature (42)..(256): NCBI GI NO: 25404689 NR Description: unknown protein, 64612-65506
  misc_feature (42)..(256): NCBI GI NO: 30697600 NR Description: RNA recognition motif (RRM)-containing protein
  misc_feature (10)..(265): NCBI GI NO: 18071362 NR Description: putative splicing regulatory protein
  misc_feature (12)..(253): NCBI GI NO: 18414951 NR Description: RNA recognition motif (RRM)-containing protein
  misc_feature (10)..(245): NCBI GI NO: 38344181 NR Description: OSJNBa0053K19.20
  misc_feature (8)..(239): NCBI GI NO: 38347069 NR Description: OSJNBa0006A01.10
MDSQPTTSPVKTVKISNVSLNVSKKDLNEFFSFSGDIHYIEMRSETQETQLAYVTFKDPQGAETAMLLTGAVIADHRVSITPAVNYDLPPEALALDSQEYSFNGFTVKKAEHVVSTMMERGYAVGKDAMEKAKAFDDRHNLVSNASATIASLDNKMGLSEKLSIGTTVVNEKLREVDERYQVREITKSALAAAEERAISAGTALMANPYVSSGASWLSNAFGAVTKAVRAEDGGEGRKEIVQLDDTSPKAPAVVPVNSVDTDFTKPSF

SEQ ID NO: 20212 - DNA, 1347 bp, Zea mays subsp. mays
  misc_feature (1)..(1347): Ceres Seq. ID no. 15179513
aacatcctcatagcaattaaacaccactgttctatatataaagctaaacggctttagctttacatgagtttcttgttttttttttaacttatttaaaaaagtcctcacatatatttctagtgataagagggagaggtttctcagcttttgtaatggaggagaagatacaaggacaaaacaagctctctgtaagttctttggatcagaaagtgattgtgagaagaagcttacaagttcaaggatcatcagaggatcaaagatttgtccttgaggaagatacgatgcaacaaagtgaagacctttcttctgttttgtcattcaaagacccaaactttctaagactactctctcttcagacactccaaaagccgccttgggagctcggagactatctcccacatgaagttccagagtttcattcacccaccaactactaccatcagaacccatctctggaaagaatcaatgaagccatctcaagccaagaacttcagttaaacccacaacgcaagcgcagaaacaacaacaacttggtagcagcatcagtgagcagagagaagagaaagagaaagagaacgaaaccaacaaagaacacagaagagatggagagtcagagaatgacgcacataacggttgaacgaaaccgcagacgccaaatgaacgtttatctcagctcactccgctctctcatcccatcttcttacatccttaggggagaccaagcgtcaatagtaggaggagctatagacttcgtgaagctcctcgagcaacagttacaatcactcgaagcgcaaaagataactcaacaaactgataccaaagacatttcgttagaacaaagtagtaaactgagaatcgatgccacggtgatagagagccacgtgaatctcaagatacagtgccagaagaaacaaggacagcttctcagatcaatcatttggttagagaagcttaggttcactgttcttcatctcaacgttacatctccatgcaatgcatctgcctcttattccttcaacctcaaggtacttaagaaaactaataacacaaatgaataaaacaaaaactcaatctcatgtttgttatttctcagatggaggacgactgtactttgacatcggccgatgagataacggcggcggttcgtcagatattggactgctgagttaagaacaagaaacccaaaaagcaaaaaaagtaacgttctttcataataataataagatgttttgttggtatgtaattggagtcttctcggcatggcactttgactttatttaaaagggttactctacagtactggggacaccatttgatagatgtatatcaagtttgaccttcgtattc

SEQ ID NO: 20213 - protein, 301 aa, Zea mays subsp. mays
  peptide (1)..(301): Ceres Seq. ID no. 15179514
  misc_feature (154)..(205): Pfam Name: Pfam Description:  Helix-loop-helix DNA-binding domain
  misc_feature (44)..(280): NCBI GI NO: 15226442 NR Description: bHLH protein family [Arabidopsis thaliana]
  misc_feature (1)..(65): NCBI GI NO: 15226442 NR Description: bHLH protein family [Arabidopsis thaliana]
  misc_feature (44)..(225): NCBI GI NO: 11282339 NR Description: hypothetical protein F21F14
  misc_feature (44)..(225): NCBI GI NO: 30695519 NR Description: bHLH protein family [Arabidopsis thaliana]
  misc_feature (44)..(225): NCBI GI NO: 21618009 NR Description: unknown [Arabidopsis thaliana]
  misc_feature (44)..(225): NCBI GI NO: 18412203 NR Description: bHLH protein family [Arabidopsis thaliana]
  misc_feature (228)..(294): NCBI GI NO: 11282339 NR Description: hypothetical protein F21F14
  misc_feature (228)..(292): NCBI GI NO: 18412203 NR Description: bHLH protein family [Arabidopsis thaliana]
  misc_feature (228)..(292): NCBI GI NO: 21618009 NR Description: unknown [Arabidopsis thaliana]
  misc_feature (228)..(292): NCBI GI NO: 30695519 NR Description: bHLH protein family [Arabidopsis thaliana]
MEEKIQGQNKLSVSSLDQKVIVRRSLQVQGSSEDQRFVLEEDTMQQSEDLSSVLSFKDPNFLRLLSLQTLQKPPWELGDYLPHEVPEFHSPTNYYHQNPSLERINEAISSQELQLNPQRKRRNNNNLVAASVSREKRKRKRTKPTKNTEEMESQRMTHITVERNRRRQMNVYLSSLRSLIPSSYILRGDQASIVGGAIDFVKLLEQQLQSLEAQKITQQTDTKDISLEQSSKLRIDATVIESHVNLKIQCQKKQGQLLRSIIWLEKLRFTVLHLNVTSPCNASASYSFNLKVLKKTNNTNE

SEQ ID NO: 20214 - protein, 258 aa, Zea mays subsp. mays
  peptide (1)..(258): Ceres Seq. ID no. 15179515
  misc_feature (111)..(162): Pfam Name: Pfam Description:  Helix-loop-helix DNA-binding domain
  misc_feature (1)..(237): NCBI GI NO: 15226442 NR Description: bHLH protein family [Arabidopsis thaliana]
  misc_feature (1)..(22): NCBI GI NO: 15226442 NR Description: bHLH protein family [Arabidopsis thaliana]
  misc_feature (1)..(182): NCBI GI NO: 11282339 NR Description: hypothetical protein F21F14
  misc_feature (1)..(182): NCBI GI NO: 30695519 NR Description: bHLH protein family [Arabidopsis thaliana]
  misc_feature (1)..(182): NCBI GI NO: 21618009 NR Description: unknown [Arabidopsis thaliana]
  misc_feature (1)..(182): NCBI GI NO: 18412203 NR Description: bHLH protein family [Arabidopsis thaliana]
  misc_feature (185)..(251): NCBI GI NO: 11282339 NR Description: hypothetical protein F21F14
  misc_feature (185)..(249): NCBI GI NO: 18412203 NR Description: bHLH protein family [Arabidopsis thaliana]
  misc_feature (185)..(249): NCBI GI NO: 30695519 NR Description: bHLH protein family [Arabidopsis thaliana]
  misc_feature (185)..(249): NCBI GI NO: 21618009 NR Description: unknown [Arabidopsis thaliana]
MQQSEDLSSVLSFKDPNFLRLLSLQTLQKPPWELGDYLPHEVPEFHSPTNYYHQNPSLERINEAISSQELQLNPQRKRRNNNNLVAASVSREKRKRKRTKPTKNTEEMESQRMTHITVERNRRRQMNVYLSSLRSLIPSSYILRGDQASIVGGAIDFVKLLEQQLQSLEAQKITQQTDTKDISLEQSSKLRIDATVIESHVNLKIQCQKKQGQLLRSIIWLEKLRFTVLHLNVTSPCNASASYSFNLKVLKKTNNTNE

SEQ ID NO: 20215 - protein, 151 aa, Zea mays subsp. mays
  peptide (1)..(151): Ceres Seq. ID no. 15179516
  misc_feature (4)..(55): Pfam Name: Pfam Description:  Helix-loop-helix DNA-binding domain
  misc_feature (1)..(130): NCBI GI NO: 15226442 NR Description: bHLH protein family [Arabidopsis thaliana]
  misc_feature (1)..(75): NCBI GI NO: 11282339 NR Description: hypothetical protein F21F14
  misc_feature (1)..(75): NCBI GI NO: 21618009 NR Description: unknown [Arabidopsis thaliana]
  misc_feature (1)..(75): NCBI GI NO: 30695519 NR Description: bHLH protein family [Arabidopsis thaliana]
  misc_feature (1)..(75): NCBI GI NO: 18412203 NR Description: bHLH protein family [Arabidopsis thaliana]
  misc_feature (78)..(144): NCBI GI NO: 11282339 NR Description: hypothetical protein F21F14
  misc_feature (78)..(142): NCBI GI NO: 18412203 NR Description: bHLH protein family [Arabidopsis thaliana]
  misc_feature (78)..(142): NCBI GI NO: 21618009 NR Description: unknown [Arabidopsis thaliana]
  misc_feature (78)..(142): NCBI GI NO: 30695519 NR Description: bHLH protein family [Arabidopsis thaliana]
  misc_feature (1)..(92): NCBI GI NO: 15234187 NR Description: bHLH protein family [Arabidopsis thaliana]
MESQRMTHITVERNRRRQMNVYLSSLRSLIPSSYILRGDQASIVGGAIDFVKLLEQQLQSLEAQKITQQTDTKDISLEQSSKLRIDATVIESHVNLKIQCQKKQGQLLRSIIWLEKLRFTVLHLNVTSPCNASASYSFNLKVLKKTNNTNE

SEQ ID NO: 20216 - DNA, 813 bp, Zea mays subsp. mays
  misc_feature (1)..(813): Ceres Seq. ID no. 14309260
agagatgtgtacgttggagaagcgtggtcaactcttcttgctgaaactcaccggcgacggcgaacaccgtctcaaccccaccttactcgacagcatcacctccgccatcacacagatccgttccgatccctcctcctcccaatcggtcctcatcacaacctccgacggcaaattcttctccaacggctacgatctcgccttggccgagtccaatccttctctccgccctgtcatggactccaaactccgatccctggtcgccgacctcatctccctccctatgccgacgatcgccgccgtgaccggccacgcctccgccgcggggttcgttctcgcgatgagccacgactatgtactgatgcgtagggatagagggtttttgtatatgagtgagttggacatcgagcttgtgattcctccgtggtttgcggcgatgatacggatgaagatcggttctcccgcggcgaggagagatgtgatgctgacggcggagaaggttacggcggagcggggtttggagatgggaatcgtggattctagttatggtagtgcggcggagacggttgaaggcgccgttaagttgggggaggagttagttagacgcgatgttgatggacacgtgtacggtgggatgagagaggctcttttaaaacaggttctccacacgattggttcaaatgagagcgtttccaatagaatgcgaaacagtggatctaaactgtaggttttttttttgtcaagtgtaggttgttcaaccacgaatataatttgtacgagttgataaaataaaaaataaaataaaaaatagagacc

SEQ ID NO: 20217 - protein, 240 aa, Zea mays subsp. mays
  peptide (1)..(240): Ceres Seq. ID no. 14309261
  misc_feature (14)..(182): Pfam Name: Pfam Description:  Enoyl-CoA hydratase/isomerase family
  misc_feature (2)..(240): NCBI GI NO: 15218713 NR Description: enoyl-CoA hydratase/isomerase family
  misc_feature (2)..(224): NCBI GI NO: 21555734 NR Description: carnitine racemase like protein
  misc_feature (2)..(224): NCBI GI NO: 15236498 NR Description: enoyl-CoA hydratase/isomerase family
  misc_feature (2)..(223): NCBI GI NO: 15236499 NR Description: enoyl-CoA hydratase/isomerase family
  misc_feature (2)..(215): NCBI GI NO: 34903766 NR Description: unnamed protein product
  misc_feature (2)..(180): NCBI GI NO: 23017142 NR Description: hypothetical protein [Thermobifida fusca]
  misc_feature (8)..(234): NCBI GI NO: 32404374 NR Description: hypothetical protein ( hypothetical proteinB2A19
  misc_feature (10)..(202): NCBI GI NO: 15828352 NR Description: possible enoyl-CoA hydratase
  misc_feature (4)..(239): NCBI GI NO: 40739395 NR Description: hypothetical protein AN6767.2
  misc_feature (7)..(209): NCBI GI NO: 24214965 NR Description: enoyl-CoA hydratase
EMCTLEKRGQLFLLKLTGDGEHRLNPTLLDSITSAITQIRSDPSSSQSVLITTSDGKFFSNGYDLALAESNPSLRPVMDSKLRSLVADLISLPMPTIAAVTGHASAAGFVLAMSHDYVLMRRDRGFLYMSELDIELVIPPWFAAMIRMKIGSPAARRDVMLTAEKVTAERGLEMGIVDSSYGSAAETVEGAVKLGEELVRRDVDGHVYGGMREALLKQVLHTIGSNESVSNRMRNSGSKL

SEQ ID NO: 20218 - protein, 239 aa, Zea mays subsp. mays
  peptide (1)..(239): Ceres Seq. ID no. 14309262
  misc_feature (13)..(181): Pfam Name: Pfam Description:  Enoyl-CoA hydratase/isomerase family
  misc_feature (1)..(239): NCBI GI NO: 15218713 NR Description: enoyl-CoA hydratase/isomerase family
  misc_feature (1)..(223): NCBI GI NO: 21555734 NR Description: carnitine racemase like protein
  misc_feature (1)..(223): NCBI GI NO: 15236498 NR Description: enoyl-CoA hydratase/isomerase family
  misc_feature (1)..(222): NCBI GI NO: 15236499 NR Description: enoyl-CoA hydratase/isomerase family
  misc_feature (1)..(214): NCBI GI NO: 34903766 NR Description: unnamed protein product
  misc_feature (1)..(179): NCBI GI NO: 23017142 NR Description: hypothetical protein [Thermobifida fusca]
  misc_feature (7)..(233): NCBI GI NO: 32404374 NR Description: hypothetical protein ( hypothetical proteinB2A19
  misc_feature (9)..(201): NCBI GI NO: 15828352 NR Description: possible enoyl-CoA hydratase
  misc_feature (3)..(238): NCBI GI NO: 40739395 NR Description: hypothetical protein AN6767.2
  misc_feature (6)..(208): NCBI GI NO: 24214965 NR Description: enoyl-CoA hydratase
MCTLEKRGQLFLLKLTGDGEHRLNPTLLDSITSAITQIRSDPSSSQSVLITTSDGKFFSNGYDLALAESNPSLRPVMDSKLRSLVADLISLPMPTIAAVTGHASAAGFVLAMSHDYVLMRRDRGFLYMSELDIELVIPPWFAAMIRMKIGSPAARRDVMLTAEKVTAERGLEMGIVDSSYGSAAETVEGAVKLGEELVRRDVDGHVYGGMREALLKQVLHTIGSNESVSNRMRNSGSKL

SEQ ID NO: 20219 - protein, 163 aa, Zea mays subsp. mays
  peptide (1)..(163): Ceres Seq. ID no. 14309263
  misc_feature (1)..(105): Pfam Name: Pfam Description:  Enoyl-CoA hydratase/isomerase family
  misc_feature (1)..(163): NCBI GI NO: 15218713 NR Description: enoyl-CoA hydratase/isomerase family
  misc_feature (1)..(147): NCBI GI NO: 21555734 NR Description: carnitine racemase like protein
  misc_feature (1)..(147): NCBI GI NO: 15236498 NR Description: enoyl-CoA hydratase/isomerase family
  misc_feature (1)..(146): NCBI GI NO: 15236499 NR Description: enoyl-CoA hydratase/isomerase family
  misc_feature (1)..(138): NCBI GI NO: 34903766 NR Description: unnamed protein product
  misc_feature (1)..(103): NCBI GI NO: 23017142 NR Description: hypothetical protein [Thermobifida fusca]
  misc_feature (1)..(157): NCBI GI NO: 32404374 NR Description: hypothetical protein ( hypothetical proteinB2A19
  misc_feature (1)..(125): NCBI GI NO: 15828352 NR Description: possible enoyl-CoA hydratase
  misc_feature (1)..(162): NCBI GI NO: 40739395 NR Description: hypothetical protein AN6767.2
  misc_feature (1)..(132): NCBI GI NO: 24214965 NR Description: enoyl-CoA hydratase
MDSKLRSLVADLISLPMPTIAAVTGHASAAGFVLAMSHDYVLMRRDRGFLYMSELDIELVIPPWFAAMIRMKIGSPAARRDVMLTAEKVTAERGLEMGIVDSSYGSAAETVEGAVKLGEELVRRDVDGHVYGGMREALLKQVLHTIGSNESVSNRMRNSGSKL

SEQ ID NO: 20220 - DNA, 1049 bp, Zea mays subsp. mays
  misc_feature (1)..(1049): Ceres Seq. ID no. 14309256
aagattacagaggcgatggcgattaacggcgaagatcgcatctccggcgaacgcccgatcatcatggtcaccaacgacgacgggatagacgcgcctggtctccgttctctcgttcgcgtcctcgtctccaccaacctctacgacgtccgcgtctgcgctcccgattcggagaagtctgctgttagtcacagtatcatatggagtagacctctcactgcacaccgtgttgagattgaaggagctgaggcctatgctgtttctggaacccctgcggattgcactgggttgggcttatcggaagcgctcttcccttctcttcctgacctggttcttagtggtataaacgttggtagcaactgtggctacaacatcgtctactctggaactgttgctggtgctcgtgaagccttcatttatgatgtgccttctgcctccatatcttatgattggaaacgtggagacatcaatgttaatgattttgttctctctgcccaagcttgcttgcctattatcaacggcatgctcagtgccatcaagaacaaaactcacccaacaaactgctttctgaacattgatttgcctactgatattgctaaccataagggatacaagctaactacacaaggtaaaagcttgggtaaaatgggttggagacaagtggaggaggaagcacaaggtgcgaagatgttgtcaacaatgtcaatggaaacagattcaggagtagtctcagacaacaacgacacttctgctcatcattcaaacgatagccgtttgttcaagagagagctaaggactgtggtggtggaagaaggcactgatcttcactttctgcgagaaggatatattacagtgacgccgataggagctctctctcaggttgatgtggattgccaaaactactacaaagaatggcttcccaagatttcttcatccttgtgatttcaccaaatgaaaacataaaactcttgtgatgatttatccattatggaccacagtttgtggtagacctattatcagtactcttttaagttattagctagttttcttgc

SEQ ID NO: 20221 - protein, 312 aa, Zea mays subsp. mays
  peptide (1)..(312): Ceres Seq. ID no. 14309257
  misc_feature (19)..(217): Pfam Name: Pfam Description:  Survival protein SurE
  misc_feature (6)..(310): NCBI GI NO: 18414342 NR Description: expressed protein [Arabidopsis thaliana]
  misc_feature (6)..(124): NCBI GI NO: 7485145 NR Description: hypothetical protein - Arabidopsis thaliana
  misc_feature (125)..(201): NCBI GI NO: 7485145 NR Description: hypothetical protein - Arabidopsis thaliana
  misc_feature (19)..(308): NCBI GI NO: 33146601 NR Description: putative stationary phase survival protein SurE
  misc_feature (11)..(267): NCBI GI NO: 15218620 NR Description: expressed protein [Arabidopsis thaliana]
  misc_feature (144)..(267): NCBI GI NO: 25406225 NR Description: hypothetical protein F3N23.8
  misc_feature (11)..(124): NCBI GI NO: 25406225 NR Description: hypothetical protein F3N23.8
  misc_feature (209)..(311): NCBI GI NO: 25406225 NR Description: hypothetical protein F3N23.8
  misc_feature (21)..(226): NCBI GI NO: 23475842 NR Description: hypothetical protein
  misc_feature (21)..(210): NCBI GI NO: 15791661 NR Description: SurE protein homolog [Campylobacter jejuni]
KITEAMAINGEDRISGERPIIMVTNDDGIDAPGLRSLVRVLVSTNLYDVRVCAPDSEKSAVSHSIIWSRPLTAHRVEIEGAEAYAVSGTPADCTGLGLSEALFPSLPDLVLSGINVGSNCGYNIVYSGTVAGAREAFIYDVPSASISYDWKRGDINVNDFVLSAQACLPIINGMLSAIKNKTHPTNCFLNIDLPTDIANHKGYKLTTQGKSLGKMGWRQVEEEAQGAKMLSTMSMETDSGVVSDNNDTSAHHSNDSRLFKRELRTVVVEEGTDLHFLREGYITVTPIGALSQVDVDCQNYYKEWLPKISSSL

SEQ ID NO: 20222 - protein, 307 aa, Zea mays subsp. mays
  peptide (1)..(307): Ceres Seq. ID no. 14309258
  misc_feature (14)..(212): Pfam Name: Pfam Description:  Survival protein SurE
  misc_feature (1)..(305): NCBI GI NO: 18414342 NR Description: expressed protein [Arabidopsis thaliana]
  misc_feature (1)..(119): NCBI GI NO: 7485145 NR Description: hypothetical protein - Arabidopsis thaliana
  misc_feature (120)..(196): NCBI GI NO: 7485145 NR Description: hypothetical protein - Arabidopsis thaliana
  misc_feature (14)..(303): NCBI GI NO: 33146601 NR Description: putative stationary phase survival protein SurE
  misc_feature (6)..(262): NCBI GI NO: 15218620 NR Description: expressed protein [Arabidopsis thaliana]
  misc_feature (139)..(262): NCBI GI NO: 25406225 NR Description: hypothetical protein F3N23.8
  misc_feature (6)..(119): NCBI GI NO: 25406225 NR Description: hypothetical protein F3N23.8
  misc_feature (204)..(306): NCBI GI NO: 25406225 NR Description: hypothetical protein F3N23.8
  misc_feature (16)..(221): NCBI GI NO: 23475842 NR Description: hypothetical protein
  misc_feature (16)..(205): NCBI GI NO: 15791661 NR Description: SurE protein homolog [Campylobacter jejuni]
MAINGEDRISGERPIIMVTNDDGIDAPGLRSLVRVLVSTNLYDVRVCAPDSEKSAVSHSIIWSRPLTAHRVEIEGAEAYAVSGTPADCTGLGLSEALFPSLPDLVLSGINVGSNCGYNIVYSGTVAGAREAFIYDVPSASISYDWKRGDINVNDFVLSAQACLPIINGMLSAIKNKTHPTNCFLNIDLPTDIANHKGYKLTTQGKSLGKMGWRQVEEEAQGAKMLSTMSMETDSGVVSDNNDTSAHHSNDSRLFKRELRTVVVEEGTDLHFLREGYITVTPIGALSQVDVDCQNYYKEWLPKISSSL

SEQ ID NO: 20223 - protein, 291 aa, Zea mays subsp. mays
  peptide (1)..(291): Ceres Seq. ID no. 14309259
  misc_feature (1)..(196): Pfam Name: Pfam Description:  Survival protein SurE
  misc_feature (1)..(289): NCBI GI NO: 18414342 NR Description: expressed protein [Arabidopsis thaliana]
  misc_feature (1)..(103): NCBI GI NO: 7485145 NR Description: hypothetical protein - Arabidopsis thaliana
  misc_feature (104)..(180): NCBI GI NO: 7485145 NR Description: hypothetical protein - Arabidopsis thaliana
  misc_feature (1)..(287): NCBI GI NO: 33146601 NR Description: putative stationary phase survival protein SurE
  misc_feature (1)..(246): NCBI GI NO: 15218620 NR Description: expressed protein [Arabidopsis thaliana]
  misc_feature (123)..(246): NCBI GI NO: 25406225 NR Description: hypothetical protein F3N23.8
  misc_feature (1)..(103): NCBI GI NO: 25406225 NR Description: hypothetical protein F3N23.8
  misc_feature (188)..(290): NCBI GI NO: 25406225 NR Description: hypothetical protein F3N23.8
  misc_feature (1)..(205): NCBI GI NO: 23475842 NR Description: hypothetical protein
  misc_feature (1)..(189): NCBI GI NO: 15791661 NR Description: SurE protein homolog [Campylobacter jejuni]
MVTNDDGIDAPGLRSLVRVLVSTNLYDVRVCAPDSEKSAVSHSIIWSRPLTAHRVEIEGAEAYAVSGTPADCTGLGLSEALFPSLPDLVLSGINVGSNCGYNIVYSGTVAGAREAFIYDVPSASISYDWKRGDINVNDFVLSAQACLPIINGMLSAIKNKTHPTNCFLNIDLPTDIANHKGYKLTTQGKSLGKMGWRQVEEEAQGAKMLSTMSMETDSGVVSDNNDTSAHHSNDSRLFKRELRTVVVEEGTDLHFLREGYITVTPIGALSQVDVDCQNYYKEWLPKISSSL

SEQ ID NO: 20224 - DNA, 1342 bp, Zea mays subsp. mays
  misc_feature (1)..(1342): Ceres Seq. ID no. 15179486
atcgcgaaagcgagcgcgaggcgagtcggccggcgaagggggcggatggcgcgcgggctgcgcggcgtccgcgacgacctatccgagctggggcgccacctgctcgacatcgcctgcttcctgcacccgctcctcaacccggcccacaccgactccccgccacccacccccacgggccgccgccgcccgcgccgctccccgtccccgcaccccgccgcgccgccgtcaccgtcgctcctcgcgggcatcctctccgacctcgccgagatcggcggctccttccgcggcggcttctcccgctcctcgccggcgcccgaccaccccgcccccgacgcgctcgagtcacagcaggccgcctcgtccccgtccccgcgtccgcctcctcctgctgctgccgaccagatcgcagatgatgtcgtgggagcagcgcgtgccctcgccgcgcggcccgaggcgtggatcgacttccccgtgctcgccctagatgagggttctgtaatttctggtatccaaagagatcatatggaatccattgaaaaacttgtcccagatttagcatctctacggggtaggctctgtccttcttacatggatgaagacatattctggaagatttactttaggttgcttgagtcaaacataaatgagcatagttctgaggaagatatccggagcgtgccaaattctgtacatcacaacaatgagatagagtctgattctccacctcacgtctgtgagatagaaagtgtgaaaagcaaccaagaagggtaccaatcttcggatggtcgtgctttccccaagacaagatctgagcgaagcattgaccaatgggtatttgcaaaatcaaaatctgaagaaagcatggatcagtggtctgaaataccttcagatgtggaatccttcagagaaggtaaaaggtacctcagtagcgaggagctgagtgacgttgatagtgccaacgttgttgtcatggacaaatacatggattcactcctctctgaccggaggaaccttccctacgctagctcctcggtgcgccgggattcagtcagacgaaaacctgcttcgtccgccgattacagccgccgacctccgcagccaactccacctgcatcgctgtcaaagaaggaatcgtgggatgtcattgaagattcggagttcgatatacttgacagttagtaattgagatctttgcgatctcaaggctgtttatccttctattttcttccatgtttccccacacttcacctcgtttgtaaatgtggacgtgcaggtggcgtcagtgatagtgggaaaggactaatgttctttttaccaatatattataacagtgtgtgcatat

SEQ ID NO: 20225 - protein, 392 aa, Zea mays subsp. mays
  peptide (1)..(392): Ceres Seq. ID no. 15179487
  misc_feature (165)..(210): Pfam Name: Pfam Description:  BSD domain
  misc_feature (16)..(351): NCBI GI NO: 34898448 NR Description: hypothetical protein
  misc_feature (135)..(230): NCBI GI NO: 28273391 NR Description: putative BSD domain containing protein
  misc_feature (22)..(102): NCBI GI NO: 28273391 NR Description: putative BSD domain containing protein
  misc_feature (22)..(349): NCBI GI NO: 34909848 NR Description: OSJNBb0053G03.5
  misc_feature (21)..(219): NCBI GI NO: 21555533 NR Description: unknown [Arabidopsis thaliana]
  misc_feature (21)..(219): NCBI GI NO: 18391195 NR Description: expressed protein [Arabidopsis thaliana]
  misc_feature (21)..(218): NCBI GI NO: 18425006 NR Description: expressed protein [Arabidopsis thaliana]
  misc_feature (21)..(219): NCBI GI NO: 15229611 NR Description: expressed protein [Arabidopsis thaliana]
  misc_feature (52)..(317): NCBI GI NO: 18396945 NR Description: expressed protein [Arabidopsis thaliana]
  misc_feature (21)..(158): NCBI GI NO: 6573740 NR Description: F20B24.15 [Arabidopsis thaliana]
IAKASARRVGRRRGRMARGLRGVRDDLSELGRHLLDIACFLHPLLNPAHTDSPPPTPTGRRRPRRSPSPHPAAPPSPSLLAGILSDLAEIGGSFRGGFSRSSPAPDHPAPDALESQQAASSPSPRPPPPAAADQIADDVVGAARALAARPEAWIDFPVLALDEGSVISGIQRDHMESIEKLVPDLASLRGRLCPSYMDEDIFWKIYFRLLESNINEHSSEEDIRSVPNSVHHNNEIESDSPPHVCEIESVKSNQEGYQSSDGRAFPKTRSERSIDQWVFAKSKSEESMDQWSEIPSDVESFREGKRYLSSEELSDVDSANVVVMDKYMDSLLSDRRNLPYASSSVRRDSVRRKPASSADYSRRPPQPTPPASLSKKESWDVIEDSEFDILDS

SEQ ID NO: 20226 - protein, 377 aa, Zea mays subsp. mays
  peptide (1)..(377): Ceres Seq. ID no. 15179488
  misc_feature (150)..(195): Pfam Name: Pfam Description:  BSD domain
  misc_feature (1)..(336): NCBI GI NO: 34898448 NR Description: hypothetical protein
  misc_feature (120)..(215): NCBI GI NO: 28273391 NR Description: putative BSD domain containing protein
  misc_feature (7)..(87): NCBI GI NO: 28273391 NR Description: putative BSD domain containing protein
  misc_feature (7)..(334): NCBI GI NO: 34909848 NR Description: OSJNBb0053G03.5
  misc_feature (6)..(204): NCBI GI NO: 21555533 NR Description: unknown [Arabidopsis thaliana]
  misc_feature (6)..(204): NCBI GI NO: 18391195 NR Description: expressed protein [Arabidopsis thaliana]
  misc_feature (6)..(203): NCBI GI NO: 18425006 NR Description: expressed protein [Arabidopsis thaliana]
  misc_feature (6)..(204): NCBI GI NO: 15229611 NR Description: expressed protein [Arabidopsis thaliana]
  misc_feature (37)..(302): NCBI GI NO: 18396945 NR Description: expressed protein [Arabidopsis thaliana]
  misc_feature (6)..(143): NCBI GI NO: 6573740 NR Description: F20B24.15 [Arabidopsis thaliana]
MARGLRGVRDDLSELGRHLLDIACFLHPLLNPAHTDSPPPTPTGRRRPRRSPSPHPAAPPSPSLLAGILSDLAEIGGSFRGGFSRSSPAPDHPAPDALESQQAASSPSPRPPPPAAADQIADDVVGAARALAARPEAWIDFPVLALDEGSVISGIQRDHMESIEKLVPDLASLRGRLCPSYMDEDIFWKIYFRLLESNINEHSSEEDIRSVPNSVHHNNEIESDSPPHVCEIESVKSNQEGYQSSDGRAFPKTRSERSIDQWVFAKSKSEESMDQWSEIPSDVESFREGKRYLSSEELSDVDSANVVVMDKYMDSLLSDRRNLPYASSSVRRDSVRRKPASSADYSRRPPQPTPPASLSKKESWDVIEDSEFDILDS

SEQ ID NO: 20227 - protein, 218 aa, Zea mays subsp. mays
  peptide (1)..(218): Ceres Seq. ID no. 15179489
  misc_feature (1)..(36): Pfam Name: Pfam Description:  BSD domain
  misc_feature (1)..(177): NCBI GI NO: 34898448 NR Description: hypothetical protein
  misc_feature (1)..(56): NCBI GI NO: 28273391 NR Description: putative BSD domain containing protein
  misc_feature (1)..(175): NCBI GI NO: 34909848 NR Description: OSJNBb0053G03.5
  misc_feature (1)..(45): NCBI GI NO: 21555533 NR Description: unknown [Arabidopsis thaliana]
  misc_feature (1)..(45): NCBI GI NO: 18391195 NR Description: expressed protein [Arabidopsis thaliana]
  misc_feature (1)..(44): NCBI GI NO: 18425006 NR Description: expressed protein [Arabidopsis thaliana]
  misc_feature (1)..(45): NCBI GI NO: 15229611 NR Description: expressed protein [Arabidopsis thaliana]
  misc_feature (1)..(143): NCBI GI NO: 18396945 NR Description: expressed protein [Arabidopsis thaliana]
  misc_feature (1)..(45): NCBI GI NO: 6573740 NR Description: F20B24.15 [Arabidopsis thaliana]
  misc_feature (1)..(46): NCBI GI NO: 25411374 NR Description: hypothetical protein At2g10950
MESIEKLVPDLASLRGRLCPSYMDEDIFWKIYFRLLESNINEHSSEEDIRSVPNSVHHNNEIESDSPPHVCEIESVKSNQEGYQSSDGRAFPKTRSERSIDQWVFAKSKSEESMDQWSEIPSDVESFREGKRYLSSEELSDVDSANVVVMDKYMDSLLSDRRNLPYASSSVRRDSVRRKPASSADYSRRPPQPTPPASLSKKESWDVIEDSEFDILDS

SEQ ID NO: 20228 - DNA, 1205 bp, Zea mays subsp. mays
  misc_feature (1)..(1205): Ceres Seq. ID no. 14309252
cttcgattcgattcgtttcttcttcattcgacgccaaaaaaaacctaagtgctctgctgcaaactctttgttcctcagcgagaagaaaatctataaccaagagattggtttcaccgatctctctttctctatatctcctcgctgggtacggtctgtttaaaatcaaatctcaatgtcgtggaggaggattctccataatcactaggctctcttaccttctcaatctcatgctcacattctcttccttgtctatggcgtttactctcacctctcaaaagctctgcgtctttggccctgtgttgaatccttctttcccttactgcatcgccaatcactcctctgcctcccgttaattcatttacacaactcttgcctccttcaggctctactctcgatattttacttgtggtaccttctttacacattcctgtgagtctctactttaactgaagctcaagacctataatgatccaagaccagcctcttgttgtattctccctccggcgcaactctttcagacgccgatcctccataaccaacctcgacgacagaggctggactccgctccacgtcaaagctcgaaaaggcgatttgaaatccgtcaagcagctgctcgaccaagggtttgatgtcaacgctctagcgtggggacctaagtcgaaaggagtgagccctcttcaccttgctgcagagggaggtcatatagaagtcatggatctgcttcttgagcgtggggctaacattgatgcgaggacatggggctcctgcgggtggactcctctccacgctgcggctaaagagcggaagagagaagctgtgaagtttctggtggagaatggtgcgttcttgccggatgatataagtgatacgaggtttaatccgccggtgcattactgtcatgggctggagtgggcgtatgaggagatgaagaagcttaacagcgagtcttcctcttctggtggagacacatcttccagttctgagaactgagtctttgttgctgtgtttttttttttctcaggtcttgccgttgagaaaatgtcagaactcagcgttatggtttgtcagagaatgttatggttttgtgtttggtttaaaattgctatatgtgaaactgctggtatgctatgcataataaatcttctgtatgtgatacttttgtttgttctggatgaagcaaatatgagcacactggttttgatttc

SEQ ID NO: 20229 - protein, 174 aa, Zea mays subsp. mays
  peptide (1)..(174): Ceres Seq. ID no. 14309253
  misc_feature (29)..(61): Pfam Name: Pfam Description:  Ankyrin repeat
  misc_feature (1)..(174): NCBI GI NO: 15240185 NR Description: expressed protein [Arabidopsis thaliana]
  misc_feature (1)..(174): NCBI GI NO: 11357401 NR Description: hypothetical protein F13G24
  misc_feature (1)..(174): NCBI GI NO: 18415625 NR Description: expressed protein [Arabidopsis thaliana]
  misc_feature (27)..(127): NCBI GI NO: 28373837 NR Description: Chain A
  misc_feature (30)..(142): NCBI GI NO: 28373837 NR Description: Chain A
  misc_feature (30)..(127): NCBI GI NO: 28373835 NR Description: Chain A
  misc_feature (25)..(142): NCBI GI NO: 28274852 NR Description: ankyrin repeat protein E4_2 [synthetic construct]
  misc_feature (21)..(138): NCBI GI NO: 28373666 NR Description: Chain A
  misc_feature (25)..(138): NCBI GI NO: 28274854 NR Description: ankyrin repeat protein E4_8 [synthetic construct]
  misc_feature (27)..(138): NCBI GI NO: 28274850 NR Description: ankyrin repeat protein E3_19 [synthetic construct]
MIQDQPLVVFSLRRNSFRRRSSITNLDDRGWTPLHVKARKGDLKSVKQLLDQGFDVNALAWGPKSKGVSPLHLAAEGGHIEVMDLLLERGANIDARTWGSCGWTPLHAAAKERKREAVKFLVENGAFLPDDISDTRFNPPVHYCHGLEWAYEEMKKLNSESSSSGGDTSSSSEN

SEQ ID NO: 20230 - protein, 116 aa, Zea mays subsp. mays
  peptide (1)..(116): Ceres Seq. ID no. 14309254
SIRFVSSSFDAKKNLSALLQTLCSSARRKSITKRLVSPISLSLYLLAGYGLFKIKSQCRGGGFSIITRLSYLLNLMLTFSSLSMAFTLTSQKLCVFGPVLNPSFPYCIANHSSASR

SEQ ID NO: 20231 - protein, 92 aa, Zea mays subsp. mays
  peptide (1)..(92): Ceres Seq. ID no. 14309255
  misc_feature (1)..(92): NCBI GI NO: 15240185 NR Description: expressed protein [Arabidopsis thaliana]
  misc_feature (1)..(92): NCBI GI NO: 11357401 NR Description: hypothetical protein F13G24
  misc_feature (1)..(92): NCBI GI NO: 18415625 NR Description: expressed protein [Arabidopsis thaliana]
  misc_feature (1)..(45): NCBI GI NO: 28373837 NR Description: Chain A
  misc_feature (1)..(60): NCBI GI NO: 28373837 NR Description: Chain A
  misc_feature (1)..(45): NCBI GI NO: 28373835 NR Description: Chain A
  misc_feature (1)..(60): NCBI GI NO: 28274852 NR Description: ankyrin repeat protein E4_2 [synthetic construct]
  misc_feature (1)..(56): NCBI GI NO: 28373666 NR Description: Chain A
  misc_feature (1)..(56): NCBI GI NO: 28274854 NR Description: ankyrin repeat protein E4_8 [synthetic construct]
  misc_feature (1)..(56): NCBI GI NO: 28274850 NR Description: ankyrin repeat protein E3_19 [synthetic construct]
MDLLLERGANIDARTWGSCGWTPLHAAAKERKREAVKFLVENGAFLPDDISDTRFNPPVHYCHGLEWAYEEMKKLNSESSSSGGDTSSSSEN

SEQ ID NO: 20232 - DNA, 1434 bp, Zea mays subsp. mays
  misc_feature (1)..(1434): Ceres Seq. ID no. 15179482
ccctttcgtcgtcgttttcttcttcaatcagacttttccaatcgccgacaccgttttaacttcgatggttccgtcaccgttaaacccgcaacagatccaacaattcctctcctccgtcctctcacagcgcgggcccaactccgtcccctacgacgagtccaccaagtggctaatccgccaacatctcctcaacctaatctcatcctacccttccctcgagcccaaaacggcgacgtttatccacaacgacggccgttccgtaaacctcctccaagctgacggaaccatcccgatgccttaccacggcgtcacctacaacatccccgtcatcatctggctcctcgagtcctaccctcgccaccctccttgcgtctacgtgaaccccaccgccgacatgatcatcaaacggccccacgcgcacgtcaccccctcggggctcgtctctctcccttatctgcagaactgggtttaccctagctccaatctcgtggatctcgtctccgatctcggcgccgccttcgctaacgatcctcctctctactcccgccgccgtccggggccttcaccgactccgccgccgtacgagacacgcccccctcctcctccgacggttgatcagagaccgttcccgccgtctccttacggcagagtgcagcacgttcaccaccaggacgacgcggcggaggttttcaagagaaacgcgatcaacaagatggtggaggtggtccacggcgatctagcctcgatgcggagagataaggaagccgaggcggagtcgatgctgagcttgcaaggaggtttgaagaggagagaggaggagatcaacagagggatgaaggagatggtggaggagaaggagacgctcgagcagcagctacagatcatctccatgaacaccgacgttctcgactcttgggttagagagaatcaagggaagactaatactgtagttgatgttgataaggcctttgagtgtgtggacgcgctctctaagcagatgctggagtgtactgcttcggatttggctatcgaagatgcggtttatgcgttggacaaggggtttcaagacggggttgttccgtttgatcagtacttgaggagtgtgaggttgctttcgagggaacagttctttcatagagccacggggtctaaagttagagctgcgcagatggaagctcaggttcatgccatcgcaggtagattacattcgtgaatgtgtctttggtgtgatggttgttcctctgtcagattgaatttaaagtgtctatatggctatatatacatctgtgtggacatacaagtttgaatggatcacgcctttttcttctttgttcggtttgtgttataagagaaccatctacattttgtgttttattgatctctttgatgaacgttattttctagtgcatcaattaggcttgataatgttactct

SEQ ID NO: 20233 - protein, 403 aa, Zea mays subsp. mays
  peptide (1)..(403): Ceres Seq. ID no. 15179483
  misc_feature (52)..(390): Pfam Name: TSG101 Pfam Description: Tumour susceptibility gene 101 protein
  misc_feature (22)..(403): NCBI GI NO: 18399596 NR Description: expressed protein [Arabidopsis thaliana]
  misc_feature (22)..(403): NCBI GI NO: 15240732 NR Description: hypothetical protein [Arabidopsis thaliana]
  misc_feature (185)..(386): NCBI GI NO: 11230780 NR Description: tumor susceptibility gene 101 protein
  misc_feature (58)..(215): NCBI GI NO: 11230780 NR Description: tumor susceptibility gene 101 protein
  misc_feature (185)..(386): NCBI GI NO: 31745166 NR Description: Tumor supressor gene
  misc_feature (58)..(215): NCBI GI NO: 31745166 NR Description: Tumor supressor gene
  misc_feature (185)..(394): NCBI GI NO: 40745470 NR Description: hypothetical protein AN2521.2
  misc_feature (29)..(213): NCBI GI NO: 40745470 NR Description: hypothetical protein AN2521.2
  misc_feature (60)..(293): NCBI GI NO: 39795834 NR Description: Unknown (protein for MGC:76193)
  misc_feature (63)..(214): NCBI GI NO: 5454140 NR Description: tumor susceptibility gene 101
PFVVVFFFNQTFPIADTVLTSMVPSPLNPQQIQQFLSSVLSQRGPNSVPYDESTKWLIRQHLLNLISSYPSLEPKTATFIHNDGRSVNLLQADGTIPMPYHGVTYNIPVIIWLLESYPRHPPCVYVNPTADMIIKRPHAHVTPSGLVSLPYLQNWVYPSSNLVDLVSDLGAAFANDPPLYSRRRPGPSPTPPPYETRPPPPPTVDQRPFPPSPYGRVQHVHHQDDAAEVFKRNAINKMVEVVHGDLASMRRDKEAEAESMLSLQGGLKRREEEINRGMKEMVEEKETLEQQLQIISMNTDVLDSWVRENQGKTNTVVDVDKAFECVDALSKQMLECTASDLAIEDAVYALDKGFQDGVVPFDQYLRSVRLLSREQFFHRATGSKVRAAQMEAQVHAIAGRLHS

SEQ ID NO: 20234 - protein, 382 aa, Zea mays subsp. mays
  peptide (1)..(382): Ceres Seq. ID no. 15179484
  misc_feature (31)..(369): Pfam Name: TSG101 Pfam Description: Tumour susceptibility gene 101 protein
  misc_feature (1)..(382): NCBI GI NO: 18399596 NR Description: expressed protein [Arabidopsis thaliana]
  misc_feature (1)..(382): NCBI GI NO: 15240732 NR Description: hypothetical protein [Arabidopsis thaliana]
  misc_feature (164)..(365): NCBI GI NO: 11230780 NR Description: tumor susceptibility gene 101 protein
  misc_feature (37)..(194): NCBI GI NO: 11230780 NR Description: tumor susceptibility gene 101 protein
  misc_feature (164)..(365): NCBI GI NO: 31745166 NR Description: Tumor supressor gene
  misc_feature (37)..(194): NCBI GI NO: 31745166 NR Description: Tumor supressor gene
  misc_feature (164)..(373): NCBI GI NO: 40745470 NR Description: hypothetical protein AN2521.2
  misc_feature (8)..(192): NCBI GI NO: 40745470 NR Description: hypothetical protein AN2521.2
  misc_feature (39)..(272): NCBI GI NO: 39795834 NR Description: Unknown (protein for MGC:76193)
  misc_feature (42)..(193): NCBI GI NO: 5454140 NR Description: tumor susceptibility gene 101
MVPSPLNPQQIQQFLSSVLSQRGPNSVPYDESTKWLIRQHLLNLISSYPSLEPKTATFIHNDGRSVNLLQADGTIPMPYHGVTYNIPVIIWLLESYPRHPPCVYVNPTADMIIKRPHAHVTPSGLVSLPYLQNWVYPSSNLVDLVSDLGAAFANDPPLYSRRRPGPSPTPPPYETRPPPPPTVDQRPFPPSPYGRVQHVHHQDDAAEVFKRNAINKMVEVVHGDLASMRRDKEAEAESMLSLQGGLKRREEEINRGMKEMVEEKETLEQQLQIISMNTDVLDSWVRENQGKTNTVVDVDKAFECVDALSKQMLECTASDLAIEDAVYALDKGFQDGVVPFDQYLRSVRLLSREQFFHRATGSKVRAAQMEAQVHAIAGRLHS

SEQ ID NO: 20235 - protein, 306 aa, Zea mays subsp. mays
  peptide (1)..(306): Ceres Seq. ID no. 15179485
  misc_feature (1)..(293): Pfam Name: TSG101 Pfam Description: Tumour susceptibility gene 101 protein
  misc_feature (1)..(306): NCBI GI NO: 18399596 NR Description: expressed protein [Arabidopsis thaliana]
  misc_feature (1)..(306): NCBI GI NO: 15240732 NR Description: hypothetical protein [Arabidopsis thaliana]
  misc_feature (88)..(289): NCBI GI NO: 11230780 NR Description: tumor susceptibility gene 101 protein
  misc_feature (1)..(118): NCBI GI NO: 11230780 NR Description: tumor susceptibility gene 101 protein
  misc_feature (88)..(289): NCBI GI NO: 31745166 NR Description: Tumor supressor gene
  misc_feature (1)..(118): NCBI GI NO: 31745166 NR Description: Tumor supressor gene
  misc_feature (88)..(297): NCBI GI NO: 40745470 NR Description: hypothetical protein AN2521.2
  misc_feature (1)..(116): NCBI GI NO: 40745470 NR Description: hypothetical protein AN2521.2
  misc_feature (1)..(196): NCBI GI NO: 39795834 NR Description: Unknown (protein for MGC:76193)
  misc_feature (1)..(117): NCBI GI NO: 5454140 NR Description: tumor susceptibility gene 101
MPYHGVTYNIPVIIWLLESYPRHPPCVYVNPTADMIIKRPHAHVTPSGLVSLPYLQNWVYPSSNLVDLVSDLGAAFANDPPLYSRRRPGPSPTPPPYETRPPPPPTVDQRPFPPSPYGRVQHVHHQDDAAEVFKRNAINKMVEVVHGDLASMRRDKEAEAESMLSLQGGLKRREEEINRGMKEMVEEKETLEQQLQIISMNTDVLDSWVRENQGKTNTVVDVDKAFECVDALSKQMLECTASDLAIEDAVYALDKGFQDGVVPFDQYLRSVRLLSREQFFHRATGSKVRAAQMEAQVHAIAGRLHS

SEQ ID NO: 20236 - DNA, 841 bp, Zea mays subsp. mays
  misc_feature (1)..(841): Ceres Seq. ID no. 14309248
actattcgagcctccgccggattacaaatcgaagatgtcgtcgtcgccgttcgtgaagtcttatctcttcgcttacaattttctccaagcttcgtcatggacgatttcgcttctgagtatcgttagcagcgttttgtcgagcaagacgatcaatggcggcgcttactctgccgccggatatttgataagtgtgatgcaaactgctgctgttctagaagttcttcacggagccatgggaattgttccgagtggattcttgtctccgctgatgcaatggagtggaagaacacacttcatattggccattgttggacagatcaatgaggtccaggatttgccgtggctgtcaataactcttgtagcttggtgtatcggcgagatgattagatatcctcactatgctttaacttgccttggtagatgtccctattggctaacctatctcaggtacactggattcatcatcatctatccaacggggctggtgggtgaattgttgatcatgtacaaagcgcttccacatgttaaagaaaggaacctttatgcgaatttcttctctgttttccccttcagttactaccaattcctttgggccgtccttttggtctacccgttcctttggttgaagctttatctccagctgttcaaacaaagaaagtccaagcttggaaaagcagagaagcatcacggcaagagaaagagaatgtgaaaggcccttcaatcatctcctcagatatgtctatctttatccttgtttatgttatcgctctatgtgctgcctttaatttttgttttttcctttttttttttttaaagtttaaataatttaattatcatggcc

SEQ ID NO: 20237 - protein, 235 aa, Zea mays subsp. mays
  peptide (1)..(235): Ceres Seq. ID no. 14309249
  misc_feature (66)..(226): Pfam Name: Pfam Description:  Protein tyrosine phosphatase-like protein
  misc_feature (15)..(235): NCBI GI NO: 26453242 NR Description: unknown protein [Arabidopsis thaliana]
  misc_feature (131)..(235): NCBI GI NO: 9758842 NR Description: gene_id:MTH12.2~unknown protein
  misc_feature (35)..(85): NCBI GI NO: 9758842 NR Description: gene_id:MTH12.2~unknown protein
  misc_feature (35)..(131): NCBI GI NO: 15238517 NR Description: expressed protein [Arabidopsis thaliana]
  misc_feature (198)..(235): NCBI GI NO: 15238517 NR Description: expressed protein [Arabidopsis thaliana]
  misc_feature (8)..(228): NCBI GI NO: 27882121 NR Description: Similar to RIKEN cDNA 6330408J20 gene
  misc_feature (9)..(228): NCBI GI NO: 34869216 NR Description: similar to protein tyrosine phosphatase-likeprotein PTPLB
  misc_feature (15)..(234): NCBI GI NO: 31202853 NR Description: ENSANGP00000018910 [Anopheles gambiae]
  misc_feature (9)..(228): NCBI GI NO: 20892371 NR Description: similar to protein tyrosine phosphatase-likeprotein PTPLB
  misc_feature (9)..(228): NCBI GI NO: 12963741 NR Description: protein tyrosine phosphatase-like protein PTPLB
LFEPPPDYKSKMSSSPFVKSYLFAYNFLQASSWTISLLSIVSSVLSSKTINGGAYSAAGYLISVMQTAAVLEVLHGAMGIVPSGFLSPLMQWSGRTHFILAIVGQINEVQDLPWLSITLVAWCIGEMIRYPHYALTCLGRCPYWLTYLRYTGFIIIYPTGLVGELLIMYKALPHVKERNLYANFFSVFPFSYYQFLWAVLLVYPFLWLKLYLQLFKQRKSKLGKAEKHHGKRKRM

SEQ ID NO: 20238 - protein, 224 aa, Zea mays subsp. mays
  peptide (1)..(224): Ceres Seq. ID no. 14309250
  misc_feature (55)..(215): Pfam Name: Pfam Description:  Protein tyrosine phosphatase-like protein
  misc_feature (4)..(224): NCBI GI NO: 26453242 NR Description: unknown protein [Arabidopsis thaliana]
  misc_feature (120)..(224): NCBI GI NO: 9758842 NR Description: gene_id:MTH12.2~unknown protein
  misc_feature (24)..(74): NCBI GI NO: 9758842 NR Description: gene_id:MTH12.2~unknown protein
  misc_feature (24)..(120): NCBI GI NO: 15238517 NR Description: expressed protein [Arabidopsis thaliana]
  misc_feature (187)..(224): NCBI GI NO: 15238517 NR Description: expressed protein [Arabidopsis thaliana]
  misc_feature (1)..(217): NCBI GI NO: 27882121 NR Description: Similar to RIKEN cDNA 6330408J20 gene
  misc_feature (1)..(217): NCBI GI NO: 34869216 NR Description: similar to protein tyrosine phosphatase-likeprotein PTPLB
  misc_feature (4)..(223): NCBI GI NO: 31202853 NR Description: ENSANGP00000018910 [Anopheles gambiae]
  misc_feature (1)..(217): NCBI GI NO: 20892371 NR Description: similar to protein tyrosine phosphatase-likeprotein PTPLB
  misc_feature (1)..(217): NCBI GI NO: 12963741 NR Description: protein tyrosine phosphatase-like protein PTPLB
MSSSPFVKSYLFAYNFLQASSWTISLLSIVSSVLSSKTINGGAYSAAGYLISVMQTAAVLEVLHGAMGIVPSGFLSPLMQWSGRTHFILAIVGQINEVQDLPWLSITLVAWCIGEMIRYPHYALTCLGRCPYWLTYLRYTGFIIIYPTGLVGELLIMYKALPHVKERNLYANFFSVFPFSYYQFLWAVLLVYPFLWLKLYLQLFKQRKSKLGKAEKHHGKRKRM

SEQ ID NO: 20239 - protein, 171 aa, Zea mays subsp. mays
  peptide (1)..(171): Ceres Seq. ID no. 14309251
  misc_feature (2)..(162): Pfam Name: Pfam Description:  Protein tyrosine phosphatase-like protein
  misc_feature (1)..(171): NCBI GI NO: 26453242 NR Description: unknown protein [Arabidopsis thaliana]
  misc_feature (67)..(171): NCBI GI NO: 9758842 NR Description: gene_id:MTH12.2~unknown protein
  misc_feature (1)..(21): NCBI GI NO: 9758842 NR Description: gene_id:MTH12.2~unknown protein
  misc_feature (1)..(67): NCBI GI NO: 15238517 NR Description: expressed protein [Arabidopsis thaliana]
  misc_feature (134)..(171): NCBI GI NO: 15238517 NR Description: expressed protein [Arabidopsis thaliana]
  misc_feature (1)..(164): NCBI GI NO: 27882121 NR Description: Similar to RIKEN cDNA 6330408J20 gene
  misc_feature (1)..(164): NCBI GI NO: 34869216 NR Description: similar to protein tyrosine phosphatase-likeprotein PTPLB
  misc_feature (1)..(170): NCBI GI NO: 31202853 NR Description: ENSANGP00000018910 [Anopheles gambiae]
  misc_feature (1)..(164): NCBI GI NO: 20892371 NR Description: similar to protein tyrosine phosphatase-likeprotein PTPLB
  misc_feature (1)..(164): NCBI GI NO: 12963741 NR Description: protein tyrosine phosphatase-like protein PTPLB
MQTAAVLEVLHGAMGIVPSGFLSPLMQWSGRTHFILAIVGQINEVQDLPWLSITLVAWCIGEMIRYPHYALTCLGRCPYWLTYLRYTGFIIIYPTGLVGELLIMYKALPHVKERNLYANFFSVFPFSYYQFLWAVLLVYPFLWLKLYLQLFKQRKSKLGKAEKHHGKRKRM

SEQ ID NO: 20240 - DNA, 917 bp, Zea mays subsp. mays
  misc_feature (1)..(917): Ceres Seq. ID no. 15179452
gattctagggttttcacactttcacagcaatcggcgagaacttcaacaaccacaaaatggcgacgcaaatcagcaagaagagaaagtttgtagctgacggtgtgttctacgctgagctgaacgaggtcttaaccagagagcttgcggaagatggttactctggtgtggaggttagggttactccaatgaggactgagatcatcatcagagccacacgtacccaaaatgttctcggtgagaagggaaggaggatcagagagttgacatctcttgtgcagaagagattcaggttccctcaagacagtgttgagctttacgctgagaaggttgccaacagaggtctctgcgccattgctcaggccgagtctctccgttacaagctcctcggtggtcttgctgtccgcagggcttgctatggtgtcttgagattcgtcatggagagtggtgctaagggttgtgaggtgattgtgagtggaaagctccgtgcagcacgtgccaagtccatgaaattcaaggacggttacatggtttcctctggtcaaccaaccaaggattacatcgactctgctgtcagacatgttcttcttagacagggtgtgcttggaatcaaggtgaaggtcatgcttgactgggaccctaagggaataaatggaccaaagacaccattgcctgatgttgtcatcatccatgctcccaaggaggaagacgtcaactctgcacctgctcaggtttctgctccggctgctcttgcaccagaagctcccctcactgccgtagactaccctgagatgatcccagtcgcctagaagaaactcttttttttactagtactctgtgatttcgcccttataacttttctgctttttgacagtttatagtttatcgttatctcatcttcgaatcagacaccgttctcc

SEQ ID NO: 20241 - protein, 249 aa, Zea mays subsp. mays
  peptide (1)..(249): Ceres Seq. ID no. 15179453
  misc_feature (104)..(188): Pfam Name: Pfam Description:  Ribosomal protein S3, C-terminal domain
  misc_feature (1)..(249): NCBI GI NO: 15232352 NR Description: 40S ribosomal protein S3 (RPS3B)
  misc_feature (1)..(247): NCBI GI NO: 15225107 NR Description: 40S ribosomal protein S3 (RPS3A)
  misc_feature (1)..(249): NCBI GI NO: 15238533 NR Description: 40S ribosomal protein S3 (RPS3C)
  misc_feature (3)..(230): NCBI GI NO: 14192875 NR Description: Putative 40S ribosomal protein
  misc_feature (1)..(225): NCBI GI NO: 22204124 NR Description: putative 40S ribosomal protein S3
  misc_feature (1)..(249): NCBI GI NO: 38512247 NR Description: Ribosomal protein S3 [Silurana tropicalis]
  misc_feature (1)..(249): NCBI GI NO: 37595356 NR Description: ribosomal protein S3 [Danio rerio]
  misc_feature (1)..(249): NCBI GI NO: 12847921 NR Description: unnamed protein product [Mus musculus]
  misc_feature (1)..(249): NCBI GI NO: 22001962 NR Description: 40S ribosomal protein S3
  misc_feature (1)..(249): NCBI GI NO: 28374213 NR Description: similar to 40S ribosomal protein S3 [Danio rerio]
MATQISKKRKFVADGVFYAELNEVLTRELAEDGYSGVEVRVTPMRTEIIIRATRTQNVLGEKGRRIRELTSLVQKRFRFPQDSVELYAEKVANRGLCAIAQAESLRYKLLGGLAVRRACYGVLRFVMESGAKGCEVIVSGKLRAARAKSMKFKDGYMVSSGQPTKDYIDSAVRHVLLRQGVLGIKVKVMLDWDPKGINGPKTPLPDVVIIHAPKEEDVNSAPAQVSAPAALAPEAPLTAVDYPEMIPVA

SEQ ID NO: 20242 - protein, 206 aa, Zea mays subsp. mays
  peptide (1)..(206): Ceres Seq. ID no. 15179454
  misc_feature (61)..(145): Pfam Name: Pfam Description:  Ribosomal protein S3, C-terminal domain
  misc_feature (1)..(206): NCBI GI NO: 15232352 NR Description: 40S ribosomal protein S3 (RPS3B)
  misc_feature (1)..(204): NCBI GI NO: 15225107 NR Description: 40S ribosomal protein S3 (RPS3A)
  misc_feature (1)..(206): NCBI GI NO: 15238533 NR Description: 40S ribosomal protein S3 (RPS3C)
  misc_feature (1)..(187): NCBI GI NO: 14192875 NR Description: Putative 40S ribosomal protein
  misc_feature (1)..(182): NCBI GI NO: 22204124 NR Description: putative 40S ribosomal protein S3
  misc_feature (1)..(206): NCBI GI NO: 38512247 NR Description: Ribosomal protein S3 [Silurana tropicalis]
  misc_feature (1)..(206): NCBI GI NO: 37595356 NR Description: ribosomal protein S3 [Danio rerio]
  misc_feature (1)..(206): NCBI GI NO: 12847921 NR Description: unnamed protein product [Mus musculus]
  misc_feature (1)..(206): NCBI GI NO: 22001962 NR Description: 40S ribosomal protein S3
  misc_feature (1)..(206): NCBI GI NO: 28374213 NR Description: similar to 40S ribosomal protein S3 [Danio rerio]
MRTEIIIRATRTQNVLGEKGRRIRELTSLVQKRFRFPQDSVELYAEKVANRGLCAIAQAESLRYKLLGGLAVRRACYGVLRFVMESGAKGCEVIVSGKLRAARAKSMKFKDGYMVSSGQPTKDYIDSAVRHVLLRQGVLGIKVKVMLDWDPKGINGPKTPLPDVVIIHAPKEEDVNSAPAQVSAPAALAPEAPLTAVDYPEMIPVA

SEQ ID NO: 20243 - DNA, 731 bp, Zea mays subsp. mays
  misc_feature (1)..(731): Ceres Seq. ID no. 15179455
attaattcgataaaggctcctcaaatggattctaaaatgggaaatttcttcgactccatcggttccttcttcagcggcggcgataagatcccttggtgcgaccgtgatgtcatccttgaatgtgagaaagaagttaagacagcaactgagggtgactcggaagaccaaaagaaagagagcattatgcgattgtcttgggctcttgtccattcccgacaagccgaagatatccagcgtggaatcgccatgctcgaagcttctctagcaagtagtagccctcctttgcaggaccgggagaagatttatcttctcgctgttggttattatcgcactggagactactctagaagcaggcagctcgtggaacgctgtctcgaggttcaacctgattggaggcaagctttagccttaaagaaaaccattgaagacaaaattgcaaaagatggtgttattgggataggcatcacggctacggccgttggcctcatagccggtggaatcgctgctgctttggctcgcaaaaagtgaccctcgcagattccctgtgcatataaataacatatgctttcttttaagttctttttttttttgttttttcagctttcagatgttccattactttattttctatgctctgttcaaatagtaactctcccctcacgcctatatcccaaagtcagagccaaacttattgtctttctacggtcataatctgataattgtttgtttgt

SEQ ID NO: 20244 - protein, 175 aa, Zea mays subsp. mays
  peptide (1)..(175): Ceres Seq. ID no. 15179456
  misc_feature (9)..(175): NCBI GI NO: 18410639 NR Description: expressed protein [Arabidopsis thaliana]
  misc_feature (9)..(173): NCBI GI NO: 18416852 NR Description: expressed protein [Arabidopsis thaliana]
  misc_feature (3)..(174): NCBI GI NO: 19386833 NR Description: B1147A04.28
  misc_feature (44)..(175): NCBI GI NO: 13384998 NR Description: tetratricopeptide repeat domain 11 [Mus musculus]
  misc_feature (44)..(175): NCBI GI NO: 27664028 NR Description: similar to RIKEN cDNA 2010003O14
  misc_feature (38)..(175): NCBI GI NO: 7705632 NR Description: tetratricopeptide repeat domain 11
  misc_feature (38)..(175): NCBI GI NO: 33112470 NR Description: Tetratricopeptide repeat protein 11
  misc_feature (58)..(175): NCBI GI NO: 39590223 NR Description: Hypothetical protein CBG11144
  misc_feature (38)..(165): NCBI GI NO: 40889302 NR Description: Chain A
  misc_feature (65)..(175): NCBI GI NO: 32408377 NR Description: hypothetical protein [Neurospora crassa]
INSIKAPQMDSKMGNFFDSIGSFFSGGDKIPWCDRDVILECEKEVKTATEGDSEDQKKESIMRLSWALVHSRQAEDIQRGIAMLEASLASSSPPLQDREKIYLLAVGYYRTGDYSRSRQLVERCLEVQPDWRQALALKKTIEDKIAKDGVIGIGITATAVGLIAGGIAAALARKK

SEQ ID NO: 20245 - protein, 167 aa, Zea mays subsp. mays
  peptide (1)..(167): Ceres Seq. ID no. 15179457
  misc_feature (1)..(167): NCBI GI NO: 18410639 NR Description: expressed protein [Arabidopsis thaliana]
  misc_feature (1)..(165): NCBI GI NO: 18416852 NR Description: expressed protein [Arabidopsis thaliana]
  misc_feature (1)..(166): NCBI GI NO: 19386833 NR Description: B1147A04.28
  misc_feature (36)..(167): NCBI GI NO: 13384998 NR Description: tetratricopeptide repeat domain 11 [Mus musculus]
  misc_feature (36)..(167): NCBI GI NO: 27664028 NR Description: similar to RIKEN cDNA 2010003O14
  misc_feature (30)..(167): NCBI GI NO: 7705632 NR Description: tetratricopeptide repeat domain 11
  misc_feature (30)..(167): NCBI GI NO: 33112470 NR Description: Tetratricopeptide repeat protein 11
  misc_feature (50)..(167): NCBI GI NO: 39590223 NR Description: Hypothetical protein CBG11144
  misc_feature (30)..(157): NCBI GI NO: 40889302 NR Description: Chain A
  misc_feature (57)..(167): NCBI GI NO: 32408377 NR Description: hypothetical protein [Neurospora crassa]
MDSKMGNFFDSIGSFFSGGDKIPWCDRDVILECEKEVKTATEGDSEDQKKESIMRLSWALVHSRQAEDIQRGIAMLEASLASSSPPLQDREKIYLLAVGYYRTGDYSRSRQLVERCLEVQPDWRQALALKKTIEDKIAKDGVIGIGITATAVGLIAGGIAAALARKK

SEQ ID NO: 20246 - protein, 163 aa, Zea mays subsp. mays
  peptide (1)..(163): Ceres Seq. ID no. 15179458
  misc_feature (1)..(163): NCBI GI NO: 18410639 NR Description: expressed protein [Arabidopsis thaliana]
  misc_feature (1)..(161): NCBI GI NO: 18416852 NR Description: expressed protein [Arabidopsis thaliana]
  misc_feature (1)..(162): NCBI GI NO: 19386833 NR Description: B1147A04.28
  misc_feature (32)..(163): NCBI GI NO: 13384998 NR Description: tetratricopeptide repeat domain 11 [Mus musculus]
  misc_feature (32)..(163): NCBI GI NO: 27664028 NR Description: similar to RIKEN cDNA 2010003O14
  misc_feature (26)..(163): NCBI GI NO: 7705632 NR Description: tetratricopeptide repeat domain 11
  misc_feature (26)..(163): NCBI GI NO: 33112470 NR Description: Tetratricopeptide repeat protein 11
  misc_feature (46)..(163): NCBI GI NO: 39590223 NR Description: Hypothetical protein CBG11144
  misc_feature (26)..(153): NCBI GI NO: 40889302 NR Description: Chain A
  misc_feature (53)..(163): NCBI GI NO: 32408377 NR Description: hypothetical protein [Neurospora crassa]
MGNFFDSIGSFFSGGDKIPWCDRDVILECEKEVKTATEGDSEDQKKESIMRLSWALVHSRQAEDIQRGIAMLEASLASSSPPLQDREKIYLLAVGYYRTGDYSRSRQLVERCLEVQPDWRQALALKKTIEDKIAKDGVIGIGITATAVGLIAGGIAAALARKK

SEQ ID NO: 20247 - DNA, 752 bp, Zea mays subsp. mays
  misc_feature (1)..(752): Ceres Seq. ID no. 15175141
aagccggtcggtgagtgcactccctctctcactgtagttgttgtgtgcatctgcgttttctctgtgcttcgagatctcgacgaaaaaaatggctgcaagattcttgtgggcttccagggtcgcttctcatctaaggatctccatcgcccaacgagggtttgcgtcagttgttttgaaggatctgaagtatgctgagtcacatgaatgggtgaagattgatgggaacaaagcaaccttcggtataacggatcacgctcaggaccacttgggtgatgtggtctatgttgagttgcctgacttgggacgttccgtgtcacaaggtgagagctttggagcggttgagagtgtgaaagctaccagtgatatcaattctccagtctccggtaaggtggttgaagtcaatgaggtgctgagtgagtcccctggattggtgaacacgagcccgtatgaagatggatggatcataaaggtggagctgagtgatgcagaagaggcaaagaagctgatggattctgacaagtactccaagttctgcgaagaagaagacgccaagcactgagctttttttttttttttccttttcttctggaagtttccattgcaacatagattgttgttttcttaaatgaaatcttgatctatgtaacatggatgaatcaagaaaatcctgaagatctccatctctgcttctcttttttatgtttttgaactctctattgtttgaataatggtacaaaataacaagctttggc

SEQ ID NO: 20248 - protein, 156 aa, Zea mays subsp. mays
  peptide (1)..(156): Ceres Seq. ID no. 15175142
  misc_feature (32)..(152): Pfam Name: Pfam Description:  Glycine cleavage H-protein
  misc_feature (1)..(156): NCBI GI NO: 15226906 NR Description: glycine decarboxylase complex H-protein
  misc_feature (1)..(156): NCBI GI NO: 29124971 NR Description: glycine decarboxylase complex H-protein
  misc_feature (1)..(156): NCBI GI NO: 3688309 NR Description: H-Protein precursor [Flaveria pringlei]
  misc_feature (1)..(156): NCBI GI NO: 2147453 NR Description: glycine cleavage system protein H precursor
  misc_feature (1)..(156): NCBI GI NO: 2499417 NR Description: Glycine cleavage system H protein
  misc_feature (1)..(156): NCBI GI NO: 2887286 NR Description: H protein [Flaveria anomala]
  misc_feature (1)..(156): NCBI GI NO: 1346118 NR Description: Glycine cleavage system H protein
  misc_feature (6)..(156): NCBI GI NO: 2119600 NR Description: glycine cleavage system protein H precursor
  misc_feature (1)..(154): NCBI GI NO: 37536058 NR Description: putative glycine decarboxylase subunit
  misc_feature (34)..(156): NCBI GI NO: 39596544 NR Description: Hypothetical protein CBG07481
MAARFLWASRVASHLRISIAQRGFASVVLKDLKYAESHEWVKIDGNKATFGITDHAQDHLGDVVYVELPDLGRSVSQGESFGAVESVKATSDINSPVSGKVVEVNEVLSESPGLVNTSPYEDGWIIKVELSDAEEAKKLMDSDKYSKFCEEEDAKH

SEQ ID NO: 20249 - DNA, 1023 bp, Zea mays subsp. mays
  misc_feature (1)..(1023): Ceres Seq. ID no. 14309224
acaatttaaactctctttttttttgtaatgacaggttgcttcagcttctctgaagtaatagaacgggcttacaaatacgggttcaaaagatccggtttacgacccgtaaccatcgacttgaaagacggaaccgtggtccatttctgggtatccaagacccgagacgaatccaaacccaacctcctcctcatccacgggctcggagcttctgccatctggcaatggtacgacgtcgcacgacgcctctctcctcatttcaacctcttcatccccgacctcgttttcttcggcggatcctccacgacccgacccgaaagatccgacgttttccaggcccagacgcttatgcgggccttagaggcccagtccgtgaaacgtttcagcctcgtcggccttagctacggcgggttcgtcggttaccgaatggcgtcgatgtacggagacgccgtggagaaggtggtgatatgctgcgccgccgtgtgcgtggaggagaaggacatgagggacggcgttttctccgtgtcggatcttgatgaagcttccaagattctcgtgccggagtctgtgaagaagctacgggaacttatcggttacatcttctacaagccggcgttggcgagactggttcctccttgtctgctccatgatttcatcgaacatgcattgaccagagataatttaaaagaaaagagggagatgatcaaagacataccaaaagatagaatagtctcagagattccaaaactcgcacagccaactttgattatatggggagagcatgatcacgtgtttccactggagatgggatacagacttaagaagcacttaggagataatgggaagcttgttgtcatcaaaagaactggtcatatctttaactttgaaaaacctaaaacttatgttaaacatctgaagtcttttcttatgcagactaaacaacatgttcctgtctctaacggatctgttaagtcttaaacatctgtattattttcatatcttgtaacgattattaacgcatgtagc

SEQ ID NO: 20250 - protein, 315 aa, Zea mays subsp. mays
  peptide (1)..(315): Ceres Seq. ID no. 14309225
  misc_feature (77)..(297): Pfam Name: Pfam Description:  alpha/beta hydrolase fold
  misc_feature (1)..(310): NCBI GI NO: 18411865 NR Description: hydrolase, alpha/beta fold family
  misc_feature (1)..(211): NCBI GI NO: 25406548 NR Description: hypothetical protein T11I11.15
  misc_feature (4)..(302): NCBI GI NO: 15242419 NR Description: hydrolase, alpha/beta fold family
  misc_feature (1)..(307): NCBI GI NO: 18420566 NR Description: hydrolase, alpha/beta fold family
  misc_feature (1)..(307): NCBI GI NO: 21536873 NR Description: putative hydrolase [Arabidopsis thaliana]
  misc_feature (6)..(301): NCBI GI NO: 33146617 NR Description: hydrolase-like protein
  misc_feature (12)..(297): NCBI GI NO: 37533664 NR Description: putative hydrolase
  misc_feature (6)..(300): NCBI GI NO: 22326938 NR Description: hydrolase, alpha/beta fold family
  misc_feature (1)..(300): NCBI GI NO: 21592821 NR Description: unknown [Arabidopsis thaliana]
  misc_feature (1)..(300): NCBI GI NO: 18394481 NR Description: hydrolase, alpha/beta fold family
MTGCFSFSEVIERAYKYGFKRSGLRPVTIDLKDGTVVHFWVSKTRDESKPNLLLIHGLGASAIWQWYDVARRLSPHFNLFIPDLVFFGGSSTTRPERSDVFQAQTLMRALEAQSVKRFSLVGLSYGGFVGYRMASMYGDAVEKVVICCAAVCVEEKDMRDGVFSVSDLDEASKILVPESVKKLRELIGYIFYKPALARLVPPCLLHDFIEHALTRDNLKEKREMIKDIPKDRIVSEIPKLAQPTLIIWGEHDHVFPLEMGYRLKKHLGDNGKLVVIKRTGHIFNFEKPKTYVKHLKSFLMQTKQHVPVSNGSVKS

SEQ ID NO: 20251 - protein, 209 aa, Zea mays subsp. mays
  peptide (1)..(209): Ceres Seq. ID no. 14309226
  misc_feature (1)..(191): Pfam Name: Pfam Description:  alpha/beta hydrolase fold
  misc_feature (1)..(204): NCBI GI NO: 18411865 NR Description: hydrolase, alpha/beta fold family
  misc_feature (1)..(105): NCBI GI NO: 25406548 NR Description: hypothetical protein T11I11.15
  misc_feature (1)..(196): NCBI GI NO: 15242419 NR Description: hydrolase, alpha/beta fold family
  misc_feature (1)..(201): NCBI GI NO: 18420566 NR Description: hydrolase, alpha/beta fold family
  misc_feature (1)..(201): NCBI GI NO: 21536873 NR Description: putative hydrolase [Arabidopsis thaliana]
  misc_feature (1)..(195): NCBI GI NO: 33146617 NR Description: hydrolase-like protein
  misc_feature (1)..(191): NCBI GI NO: 37533664 NR Description: putative hydrolase
  misc_feature (1)..(194): NCBI GI NO: 22326938 NR Description: hydrolase, alpha/beta fold family
  misc_feature (1)..(194): NCBI GI NO: 21592821 NR Description: unknown [Arabidopsis thaliana]
  misc_feature (1)..(194): NCBI GI NO: 18394481 NR Description: hydrolase, alpha/beta fold family
MRALEAQSVKRFSLVGLSYGGFVGYRMASMYGDAVEKVVICCAAVCVEEKDMRDGVFSVSDLDEASKILVPESVKKLRELIGYIFYKPALARLVPPCLLHDFIEHALTRDNLKEKREMIKDIPKDRIVSEIPKLAQPTLIIWGEHDHVFPLEMGYRLKKHLGDNGKLVVIKRTGHIFNFEKPKTYVKHLKSFLMQTKQHVPVSNGSVKS

SEQ ID NO: 20252 - protein, 183 aa, Zea mays subsp. mays
  peptide (1)..(183): Ceres Seq. ID no. 14309227
  misc_feature (1)..(165): Pfam Name: Pfam Description:  alpha/beta hydrolase fold
  misc_feature (1)..(178): NCBI GI NO: 18411865 NR Description: hydrolase, alpha/beta fold family
  misc_feature (1)..(79): NCBI GI NO: 25406548 NR Description: hypothetical protein T11I11.15
  misc_feature (1)..(170): NCBI GI NO: 15242419 NR Description: hydrolase, alpha/beta fold family
  misc_feature (1)..(175): NCBI GI NO: 18420566 NR Description: hydrolase, alpha/beta fold family
  misc_feature (1)..(175): NCBI GI NO: 21536873 NR Description: putative hydrolase [Arabidopsis thaliana]
  misc_feature (1)..(169): NCBI GI NO: 33146617 NR Description: hydrolase-like protein
  misc_feature (1)..(165): NCBI GI NO: 37533664 NR Description: putative hydrolase
  misc_feature (1)..(168): NCBI GI NO: 22326938 NR Description: hydrolase, alpha/beta fold family
  misc_feature (1)..(168): NCBI GI NO: 21592821 NR Description: unknown [Arabidopsis thaliana]
  misc_feature (1)..(168): NCBI GI NO: 18394481 NR Description: hydrolase, alpha/beta fold family
MASMYGDAVEKVVICCAAVCVEEKDMRDGVFSVSDLDEASKILVPESVKKLRELIGYIFYKPALARLVPPCLLHDFIEHALTRDNLKEKREMIKDIPKDRIVSEIPKLAQPTLIIWGEHDHVFPLEMGYRLKKHLGDNGKLVVIKRTGHIFNFEKPKTYVKHLKSFLMQTKQHVPVSNGSVKS

SEQ ID NO: 20253 - DNA, 719 bp, Zea mays subsp. mays
  misc_feature (1)..(719): Ceres Seq. ID no. 15174108
atcgccgtttgttctttcgtcctccttctctctctctctcttgaagttggggtgatcgtcttctttgggtaaattgagtctctatagcatcattcagacatgcagcaatcacgagcgagactgttcaaggaatacaaggaggttcagcgagagaaagtagctgatcctgatatccaattggtgtgtgatgataccaacattttcaaatggactgcacttatcaagggaccgtcggagactccttatgaaggcggagtgtttcagcttgcattcgctgttcccgaaccgtatcctctgcagcctcctcaagtgcgcttcttgaccaaaatattccatcccaatgtgcatttcaagactggagaaatatgtctcgacatattgaagaacgcgtggagccctgcgtggacgcttcagtctgtgtgtagagcgatcatagcactgatggctcatcctgaggcagacagtcctctcaactgcgactcaggtaaccttctaagatctggagatgtgagagggttcaattcaatggcacgcatgtacacacgcctcgccgctatgcctaagaaaggatgatcctctcttgctttccttttcttatgtcatcgggttataactcgttttctttgaatatgtaatgagaaatgatttgggaaaatgaatacattattaacaattcatatgtaaggtaacaattttattcaactagacacaagttactc

SEQ ID NO: 20254 - protein, 157 aa, Zea mays subsp. mays
  peptide (1)..(157): Ceres Seq. ID no. 15174109
  misc_feature (1)..(157): NCBI GI NO: 18420949 NR Description: ubiquitin-conjugating enzyme, putative
  misc_feature (7)..(153): NCBI GI NO: 34391431 NR Description: ubiquitin-conjugating enzyme E2 [Pavlova lutheri]
  misc_feature (6)..(150): NCBI GI NO: 28829309 NR Description: similar to Arabidopsis thaliana (Mouse-ear cress)
  misc_feature (4)..(153): NCBI GI NO: 23612144 NR Description: ubiquitin-conjugating enzyme E2, putative
  misc_feature (31)..(153): NCBI GI NO: 23491070 NR Description: probable ubiquitin-conjugating enzyme e2-17 kDa
  misc_feature (4)..(145): NCBI GI NO: 13812330 NR Description: ubiquitin-conjugating enzyme E2-21 KD
  misc_feature (1)..(155): NCBI GI NO: 19111870 NR Description: putative ubiquitin conjugating enzyme, e2
  misc_feature (1)..(74): NCBI GI NO: 3915186 NR Description: Ubiquitin-conjugating enzyme E2-21 kDa
  misc_feature (76)..(147): NCBI GI NO: 3915186 NR Description: Ubiquitin-conjugating enzyme E2-21 kDa
  misc_feature (7)..(156): NCBI GI NO: 23487093 NR Description: ubiquitin conjugating enzyme
MQQSRARLFKEYKEVQREKVADPDIQLVCDDTNIFKWTALIKGPSETPYEGGVFQLAFAVPEPYPLQPPQVRFLTKIFHPNVHFKTGEICLDILKNAWSPAWTLQSVCRAIIALMAHPEADSPLNCDSGNLLRSGDVRGFNSMARMYTRLAAMPKKG

SEQ ID NO: 20255 - DNA, 795 bp, Zea mays subsp. mays
  misc_feature (1)..(795): Ceres Seq. ID no. 14309220
attcacaaccacacctctaaacatttctcacaattttttggtctaaagaaggaatataactctttttctcttttcctttttgcttttacacaatcttataagaaactttagcctgagagagcgagagacggtgtaggatgcactacacgcgcatctcaccaattatattgccttctccaccacccaccatcaccgccaccgttgaatccagtggtagaggaaccatgttagccaccctattcatggccctccttctcccttgcgttggcatgtgcattgtcttcctcatatatctcttcttcttgtggtgctccacacgtcgccgtattgagcgtctaagattttctgaaccggttaagctggtcaccggtaaaggtctctctgtctcggagctcgagaaactcccaaaactcaccggaaaagagcttgccttagaagtgaggtcgacagagtgccctgtttgccttgaaaatatcgagagttgccaatcggcccgtctggttcccggttgcaaccatgggtttcaccaattatgtgctgacacgtggttatctaaccacacggtgtgtcctgtttgtcgtggcgatcttgctcagaaggttcctcaacttagtaacaatcatagtccatgttgaaaacatgatcccaaatactcttcttctttattcattttcttctacttgtcttgttttctctctgttaacattttagttttttcatcgtttgctgtagtaggtggatatggtttgtacagtaaattgtaatagagtcaagtacaaaatttcctgttttgtc

SEQ ID NO: 20256 - protein, 165 aa, Zea mays subsp. mays
  peptide (1)..(165): Ceres Seq. ID no. 14309221
  misc_feature (106)..(147): Pfam Name: RING finger Pfam Description: Zinc finger, C3HC4 type
  misc_feature (1)..(165): NCBI GI NO: 15238323 NR Description: zinc finger
  misc_feature (1)..(165): NCBI GI NO: 21593762 NR Description: unknown [Arabidopsis thaliana]
  misc_feature (13)..(163): NCBI GI NO: 15222071 NR Description: RING-H2 finger protein RHA3a -related
  misc_feature (13)..(163): NCBI GI NO: 15222069 NR Description: RING-H2 finger protein RHA3a -related
  misc_feature (13)..(163): NCBI GI NO: 7770352 NR Description: F27J15.3 [Arabidopsis thaliana]
  misc_feature (13)..(163): NCBI GI NO: 25405963 NR Description: protein F27J15.2 [imported] - Arabidopsis thaliana
  misc_feature (19)..(148): NCBI GI NO: 15223041 NR Description: RING zinc finger protein -related
  misc_feature (19)..(148): NCBI GI NO: 21555237 NR Description: putative RING zinc finger protein
  misc_feature (12)..(148): NCBI GI NO: 15218042 NR Description: RING zinc finger protein -related
  misc_feature (13)..(163): NCBI GI NO: 15222068 NR Description: RING-H2 finger protein RHA3a -related
MHYTRISPIILPSPPPTITATVESSGRGTMLATLFMALLLPCVGMCIVFLIYLFFLWCSTRRRIERLRFSEPVKLVTGKGLSVSELEKLPKLTGKELALEVRSTECPVCLENIESCQSARLVPGCNHGFHQLCADTWLSNHTVCPVCRGDLAQKVPQLSNNHSPC

SEQ ID NO: 20257 - protein, 136 aa, Zea mays subsp. mays
  peptide (1)..(136): Ceres Seq. ID no. 14309222
  misc_feature (77)..(118): Pfam Name: RING finger Pfam Description: Zinc finger, C3HC4 type
  misc_feature (1)..(136): NCBI GI NO: 15238323 NR Description: zinc finger
  misc_feature (1)..(136): NCBI GI NO: 21593762 NR Description: unknown [Arabidopsis thaliana]
  misc_feature (1)..(134): NCBI GI NO: 15222071 NR Description: RING-H2 finger protein RHA3a -related
  misc_feature (1)..(134): NCBI GI NO: 15222069 NR Description: RING-H2 finger protein RHA3a -related
  misc_feature (1)..(134): NCBI GI NO: 7770352 NR Description: F27J15.3 [Arabidopsis thaliana]
  misc_feature (1)..(134): NCBI GI NO: 25405963 NR Description: protein F27J15.2 [imported] - Arabidopsis thaliana
  misc_feature (1)..(119): NCBI GI NO: 15223041 NR Description: RING zinc finger protein -related
  misc_feature (1)..(119): NCBI GI NO: 21555237 NR Description: putative RING zinc finger protein
  misc_feature (1)..(119): NCBI GI NO: 15218042 NR Description: RING zinc finger protein -related
  misc_feature (1)..(134): NCBI GI NO: 15222068 NR Description: RING-H2 finger protein RHA3a -related
MLATLFMALLLPCVGMCIVFLIYLFFLWCSTRRRIERLRFSEPVKLVTGKGLSVSELEKLPKLTGKELALEVRSTECPVCLENIESCQSARLVPGCNHGFHQLCADTWLSNHTVCPVCRGDLAQKVPQLSNNHSPC

SEQ ID NO: 20258 - protein, 130 aa, Zea mays subsp. mays
  peptide (1)..(130): Ceres Seq. ID no. 14309223
  misc_feature (71)..(112): Pfam Name: RING finger Pfam Description: Zinc finger, C3HC4 type
  misc_feature (1)..(130): NCBI GI NO: 15238323 NR Description: zinc finger
  misc_feature (1)..(130): NCBI GI NO: 21593762 NR Description: unknown [Arabidopsis thaliana]
  misc_feature (1)..(128): NCBI GI NO: 15222071 NR Description: RING-H2 finger protein RHA3a -related
  misc_feature (1)..(128): NCBI GI NO: 15222069 NR Description: RING-H2 finger protein RHA3a -related
  misc_feature (1)..(128): NCBI GI NO: 7770352 NR Description: F27J15.3 [Arabidopsis thaliana]
  misc_feature (1)..(128): NCBI GI NO: 25405963 NR Description: protein F27J15.2 [imported] - Arabidopsis thaliana
  misc_feature (1)..(113): NCBI GI NO: 15223041 NR Description: RING zinc finger protein -related
  misc_feature (1)..(113): NCBI GI NO: 21555237 NR Description: putative RING zinc finger protein
  misc_feature (1)..(113): NCBI GI NO: 15218042 NR Description: RING zinc finger protein -related
  misc_feature (1)..(128): NCBI GI NO: 15222068 NR Description: RING-H2 finger protein RHA3a -related
MALLLPCVGMCIVFLIYLFFLWCSTRRRIERLRFSEPVKLVTGKGLSVSELEKLPKLTGKELALEVRSTECPVCLENIESCQSARLVPGCNHGFHQLCADTWLSNHTVCPVCRGDLAQKVPQLSNNHSPC

SEQ ID NO: 20259 - DNA, 1049 bp, Zea mays subsp. mays
  misc_feature (1)..(1049): Ceres Seq. ID no. 15179151
gctgttcttgttcttgttgttccttccccctcattggagagagtaagcgagtctcttccgatcccagagagagagagagaagcgcttgttcttcttcaaaggagtctcagcagggtgggcaaagatggtcgcagaacgcttcactgtcgatttggataagccacttgtctttcaggttggtcatcttggggaagaatatcaggaatggattcatcaacctattgtatgtgtagagggtcctcgttttttccagagtgatttctgggagttcttgacccgcactgtttggtgggctatcccaacgatctggcttccagttgtctgctacgttctttcaatctccgcgaggaagggactgacatttccccagatcggtttaatagttgcctttggcgtactcacctggacactgctcgagtacacgcttcatcgtttccttttccatatagacaccaagagttactgggcaaacactgcacactatcttcttcatggatgccatcacaagcacccacaagacggccttcgtcttgttttccctcctaccgccacagccattctcttggttccactatggaagcttctccacctcatagctactcctgctacagctcctgctatgcttggaggcattttgtttggctatgtgatgtatgatgttactcattactatctacaccatggccaacctaaagaaccaacctttaagcatctcaagaaataccacctgaatcatcacttcagaatccaggacaaaggatatgggatcacttcctctctctgggatagagtctttggaacacttcccggtacaaaggctgctcagaagaagctctaaaccggagatttcgttttgcctttctctcagtgtgttaaaaactcacttcttgattcatcatgtgattcaaatgactgttttaactgatgctgtatacgatctatcaccatattttgaacatatctagtggtgtgtgtaccggttttatggtgtggtcatagaaaattgaaatcatactggtttattttctattcaatttggtctttgaatc

SEQ ID NO: 20260 - protein, 237 aa, Zea mays subsp. mays
  peptide (1)..(237): Ceres Seq. ID no. 15179152
  misc_feature (86)..(229): Pfam Name: Pfam Description:  Fatty acid hydroxylase
  misc_feature (1)..(236): NCBI GI NO: 15233426 NR Description: fatty acid hydroxylase, putative
  misc_feature (1)..(236): NCBI GI NO: 15226828 NR Description: fatty acid hydroxylase (FAH1)
  misc_feature (1)..(235): NCBI GI NO: 34897078 NR Description: putative fatty acid hydroxylase
  misc_feature (90)..(227): NCBI GI NO: 32766618 NR Description: Unknown (protein for IMAGE:6878212)
  misc_feature (1)..(109): NCBI GI NO: 32766618 NR Description: Unknown (protein for IMAGE:6878212)
  misc_feature (14)..(227): NCBI GI NO: 39589620 NR Description: Hypothetical protein CBG12227
  misc_feature (14)..(227): NCBI GI NO: 17505701 NR Description: fatty acid hydroxylase (36.3 kD) (1K755)
  misc_feature (8)..(226): NCBI GI NO: 32404274 NR Description: hypothetical protein [Neurospora crassa]
  misc_feature (8)..(237): NCBI GI NO: 6323928 NR Description: Required for the hydroxylation of the very longchain fatty acid
  misc_feature (6)..(226): NCBI GI NO: 31200833 NR Description: ENSANGP00000014963 [Anopheles gambiae]
MVAERFTVDLDKPLVFQVGHLGEEYQEWIHQPIVCVEGPRFFQSDFWEFLTRTVWWAIPTIWLPVVCYVLSISARKGLTFPQIGLIVAFGVLTWTLLEYTLHRFLFHIDTKSYWANTAHYLLHGCHHKHPQDGLRLVFPPTATAILLVPLWKLLHLIATPATAPAMLGGILFGYVMYDVTHYYLHHGQPKEPTFKHLKKYHLNHHFRIQDKGYGITSSLWDRVFGTLPGTKAAQKKL

SEQ ID NO: 20261 - DNA, 1270 bp, Zea mays subsp. mays
  misc_feature (1)..(1270): Ceres Seq. ID no. 15180043
atagtctttcgcagctttttttagggtttctcttttctcctctaactcacaaaaacacttgcggaggttaaagcgacggcgccaattcgctgtccgccttgtacgagctcgagcttcgtctaggccctcactttatctttaccatcctctctcaatccaagtatcaatggcggtgaaagcaacgaaggcggagaagaagatcgtttacgactcgaagctttgccagcttctgaatgagttccctcagatcctcatcgtcgcggcggataacgtcgggtccactcagcttcagaacatcaggaaagggttacgtggagactccgttgttctcatggggaagaacacgatgatgaagaggtctgttaagcttcatgctcagaaaactggaaatgatgggtttcttaatcttatgcctcttcttcagggtaatgttgggcttatcttcaccaagggtgacttgaaggaagtcagcgaggaggttgctaagtacaaggttggagctccagctcgtgttggcttagttgctccaatcgatgtggttgtgcaaccaggcaacactggcctcgacccatcgcagacctctttcttccaagtgctcaacattccaaccaagatcaacaaaggtaccgttgagatcattacccctgtggagctcatcaagaaaggcgacaaggtcggttcatccgaggctgcgcttctagccaaactcggaatcaggccgttctcttacggtctcgtcgtggagtcggtctacgacaacggctcagtgtttgaccccgaggtgcttaacctcactgaagacgaccttgttgaaaagtttgcagctggcgtctcgctggtgtcggcgctttctcttgccatctcttacccaaccattgcagctgcgcctcacatgttcatcaatgcttacaagaatgttctcgctgttgccttggctactgagtattctttccctcaggctgagaatgtgaaggagttcctcaaggatccaagcaagtttgcagttgctgctgctgcggttgcacctgtttccggagaatttggtggagctcctgtggcggctgctgtggtggaagaagctgcggaggagtctgatggggacatgggtttcgatcttttcggctaaaatatatgccgtcttatgctttgcaccagtttatctttatgattatcagttaaagttcaacactttttattttcactttcagaattttgttggtgcattcttatggatattttggttatttatctaaatcaactttttggtttt

SEQ ID NO: 20262 - protein, 319 aa, Zea mays subsp. mays
  peptide (1)..(319): Ceres Seq. ID no. 15180044
  misc_feature (6)..(110): Pfam Name: Pfam Description:  Ribosomal protein L10
  misc_feature (1)..(319): NCBI GI NO: 15225613 NR Description: 60S acidic ribosomal protein P0 (RPP0A)
  misc_feature (3)..(319): NCBI GI NO: 15232603 NR Description: 60S acidic ribosomal protein P0 (RPP0B)
  misc_feature (3)..(319): NCBI GI NO: 21554645 NR Description: putative 60S acidic ribosomal protein P0
  misc_feature (3)..(318): NCBI GI NO: 15229706 NR Description: 60S acidic ribosomal protein P0 (RPP0C)
  misc_feature (3)..(318): NCBI GI NO: 21593316 NR Description: 60S acidic ribosomal protein P0-C
  misc_feature (1)..(318): NCBI GI NO: 1710587 NR Description: 60S ACIDIC RIBOSOMAL PROTEIN P0
  misc_feature (6)..(318): NCBI GI NO: 6984134 NR Description: 60S acidic ribosomal protein PO [Euphorbia esula]
  misc_feature (1)..(318): NCBI GI NO: 1710585 NR Description: 60S ACIDIC RIBOSOMAL PROTEIN P0
  misc_feature (1)..(318): NCBI GI NO: 730580 NR Description: 60S ACIDIC RIBOSOMAL PROTEIN P0
  misc_feature (1)..(318): NCBI GI NO: 6094102 NR Description: 60S ACIDIC RIBOSOMAL PROTEIN P0
MAVKATKAEKKIVYDSKLCQLLNEFPQILIVAADNVGSTQLQNIRKGLRGDSVVLMGKNTMMKRSVKLHAQKTGNDGFLNLMPLLQGNVGLIFTKGDLKEVSEEVAKYKVGAPARVGLVAPIDVVVQPGNTGLDPSQTSFFQVLNIPTKINKGTVEIITPVELIKKGDKVGSSEAALLAKLGIRPFSYGLVVESVYDNGSVFDPEVLNLTEDDLVEKFAAGVSLVSALSLAISYPTIAAAPHMFINAYKNVLAVALATEYSFPQAENVKEFLKDPSKFAVAAAAVAPVSGEFGGAPVAAAVVEEAAEESDGDMGFDLFG

SEQ ID NO: 20263 - protein, 264 aa, Zea mays subsp. mays
  peptide (1)..(264): Ceres Seq. ID no. 15180045
  misc_feature (1)..(55): Pfam Name: Pfam Description:  Ribosomal protein L10
  misc_feature (1)..(264): NCBI GI NO: 15225613 NR Description: 60S acidic ribosomal protein P0 (RPP0A)
  misc_feature (1)..(264): NCBI GI NO: 15232603 NR Description: 60S acidic ribosomal protein P0 (RPP0B)
  misc_feature (1)..(264): NCBI GI NO: 21554645 NR Description: putative 60S acidic ribosomal protein P0
  misc_feature (1)..(263): NCBI GI NO: 15229706 NR Description: 60S acidic ribosomal protein P0 (RPP0C)
  misc_feature (1)..(263): NCBI GI NO: 21593316 NR Description: 60S acidic ribosomal protein P0-C
  misc_feature (1)..(263): NCBI GI NO: 1710587 NR Description: 60S ACIDIC RIBOSOMAL PROTEIN P0
  misc_feature (1)..(263): NCBI GI NO: 6984134 NR Description: 60S acidic ribosomal protein PO [Euphorbia esula]
  misc_feature (1)..(263): NCBI GI NO: 1710585 NR Description: 60S ACIDIC RIBOSOMAL PROTEIN P0
  misc_feature (1)..(263): NCBI GI NO: 730580 NR Description: 60S ACIDIC RIBOSOMAL PROTEIN P0
  misc_feature (1)..(263): NCBI GI NO: 6094102 NR Description: 60S ACIDIC RIBOSOMAL PROTEIN P0
MGKNTMMKRSVKLHAQKTGNDGFLNLMPLLQGNVGLIFTKGDLKEVSEEVAKYKVGAPARVGLVAPIDVVVQPGNTGLDPSQTSFFQVLNIPTKINKGTVEIITPVELIKKGDKVGSSEAALLAKLGIRPFSYGLVVESVYDNGSVFDPEVLNLTEDDLVEKFAAGVSLVSALSLAISYPTIAAAPHMFINAYKNVLAVALATEYSFPQAENVKEFLKDPSKFAVAAAAVAPVSGEFGGAPVAAAVVEEAAEESDGDMGFDLFG

SEQ ID NO: 20264 - protein, 259 aa, Zea mays subsp. mays
  peptide (1)..(259): Ceres Seq. ID no. 15180046
  misc_feature (176)..(258): Pfam Name: Pfam Description:  60s Acidic ribosomal protein
  misc_feature (1)..(259): NCBI GI NO: 15225613 NR Description: 60S acidic ribosomal protein P0 (RPP0A)
  misc_feature (1)..(259): NCBI GI NO: 15232603 NR Description: 60S acidic ribosomal protein P0 (RPP0B)
  misc_feature (1)..(259): NCBI GI NO: 21554645 NR Description: putative 60S acidic ribosomal protein P0
  misc_feature (1)..(258): NCBI GI NO: 15229706 NR Description: 60S acidic ribosomal protein P0 (RPP0C)
  misc_feature (1)..(258): NCBI GI NO: 21593316 NR Description: 60S acidic ribosomal protein P0-C
  misc_feature (1)..(258): NCBI GI NO: 1710587 NR Description: 60S ACIDIC RIBOSOMAL PROTEIN P0
  misc_feature (1)..(258): NCBI GI NO: 6984134 NR Description: 60S acidic ribosomal protein PO [Euphorbia esula]
  misc_feature (1)..(258): NCBI GI NO: 1710585 NR Description: 60S ACIDIC RIBOSOMAL PROTEIN P0
  misc_feature (1)..(258): NCBI GI NO: 730580 NR Description: 60S ACIDIC RIBOSOMAL PROTEIN P0
  misc_feature (1)..(258): NCBI GI NO: 6094102 NR Description: 60S ACIDIC RIBOSOMAL PROTEIN P0
MMKRSVKLHAQKTGNDGFLNLMPLLQGNVGLIFTKGDLKEVSEEVAKYKVGAPARVGLVAPIDVVVQPGNTGLDPSQTSFFQVLNIPTKINKGTVEIITPVELIKKGDKVGSSEAALLAKLGIRPFSYGLVVESVYDNGSVFDPEVLNLTEDDLVEKFAAGVSLVSALSLAISYPTIAAAPHMFINAYKNVLAVALATEYSFPQAENVKEFLKDPSKFAVAAAAVAPVSGEFGGAPVAAAVVEEAAEESDGDMGFDLFG

SEQ ID NO: 20265 - DNA, 940 bp, Zea mays subsp. mays
  misc_feature (1)..(940): Ceres Seq. ID no. 14309205
cagccccaggaaacctataaaattccttagatccaaactccgagaatggccggtggatttaccatcaacataaacattccggctggtgaaggatttaccattagcattaacccaaactctgctgcagcggtaggggctgcctttggccgaattcaacctccggctggtgaaggacttaacattagtattaacccaaactctgcaccagctggtaatctatgtacgaatccgtcctctcaaaagcccctagaatgctctccaggaaaggctaaccctaaggttttctttgatatggcggtgcgcggcaaagctgttggtcggatcgtgatggagctctttgccgacacgaccccacggacggcagagaatttccgcgccctctgtacaggcgagaaaggcatggggaagaagggtaagccacttcattacaaaggatcaatcatccaccatatgtgccccgattatatcattggcggaggagatttcacttacgaaaggaaaggatacggaggcgaatcaatctacgccggaggttttttcgaggatgagaacttcatcaaaaagcacaccggtccgggtatcctctccatgaacaacaatggtcctgacaccaaccaatctcagtttttgatctccttgaccgagaactgggaactcgacgatctacacgtcgtcttcggccaagttgttgaaggattggatgtggtcaggatcatatcacacgaacctcttaaggacaagttttccaagcccgtcgtgatcgactgcggtcagattaaatagatctgacagagatattttccaactacaatggttgcttgcttgctctgtgtccttttgatgcttggtgcgtttttaattttgttacttttgtttttttatcttttttcttgaaatttagattggctaccattgaataatgattacaaccatcatcagt

SEQ ID NO: 20266 - protein, 245 aa, Zea mays subsp. mays
  peptide (1)..(245): Ceres Seq. ID no. 14309206
  misc_feature (76)..(244): NCBI GI NO: 18146786 NR Description: CYP1 [Vigna radiata]
  misc_feature (75)..(244): NCBI GI NO: 18076088 NR Description: cyclophilin [Ricinus communis]
  misc_feature (75)..(244): NCBI GI NO: 11270316 NR Description: peptidylprolyl isomerase (EC 5.2.1.8)
  misc_feature (75)..(244): NCBI GI NO: 21886603 NR Description: peptidylprolyl isomerase (cyclophilin)
  misc_feature (76)..(244): NCBI GI NO: 15227259 NR Description: cytosolic cyclophilin (ROC3)
  misc_feature (75)..(244): NCBI GI NO: 118103 NR Description: Peptidyl-prolyl cis-trans isomerase
  misc_feature (75)..(244): NCBI GI NO: 15236211 NR Description: peptidylprolyl isomerase (cyclophilin)
  misc_feature (76)..(244): NCBI GI NO: 1076510 NR Description: peptidylprolyl isomerase (EC 5
  misc_feature (75)..(244): NCBI GI NO: 29124975 NR Description: cyclophilin [Populus tremuloides]
  misc_feature (75)..(244): NCBI GI NO: 68406 NR Description: peptidylprolyl isomerase (EC 5.2.1.8) - tomato
MAGGFTININIPAGEGFTISINPNSAAAVGAAFGRIQPPAGEGLNISINPNSAPAGNLCTNPSSQKPLECSPGKANPKVFFDMAVRGKAVGRIVMELFADTTPRTAENFRALCTGEKGMGKKGKPLHYKGSIIHHMCPDYIIGGGDFTYERKGYGGESIYAGGFFEDENFIKKHTGPGILSMNNNGPDTNQSQFLISLTENWELDDLHVVFGQVVEGLDVVRIISHEPLKDKFSKPVVIDCGQIK

SEQ ID NO: 20267 - protein, 163 aa, Zea mays subsp. mays
  peptide (1)..(163): Ceres Seq. ID no. 14309207
  misc_feature (1)..(162): NCBI GI NO: 18146786 NR Description: CYP1 [Vigna radiata]
  misc_feature (1)..(162): NCBI GI NO: 18076088 NR Description: cyclophilin [Ricinus communis]
  misc_feature (1)..(162): NCBI GI NO: 11270316 NR Description: peptidylprolyl isomerase (EC 5.2.1.8)
  misc_feature (1)..(162): NCBI GI NO: 21886603 NR Description: peptidylprolyl isomerase (cyclophilin)
  misc_feature (1)..(162): NCBI GI NO: 15227259 NR Description: cytosolic cyclophilin (ROC3)
  misc_feature (1)..(162): NCBI GI NO: 118103 NR Description: Peptidyl-prolyl cis-trans isomerase
  misc_feature (1)..(162): NCBI GI NO: 15236211 NR Description: peptidylprolyl isomerase (cyclophilin)
  misc_feature (1)..(162): NCBI GI NO: 1076510 NR Description: peptidylprolyl isomerase (EC 5
  misc_feature (1)..(162): NCBI GI NO: 29124975 NR Description: cyclophilin [Populus tremuloides]
  misc_feature (1)..(162): NCBI GI NO: 68406 NR Description: peptidylprolyl isomerase (EC 5.2.1.8) - tomato
MAVRGKAVGRIVMELFADTTPRTAENFRALCTGEKGMGKKGKPLHYKGSIIHHMCPDYIIGGGDFTYERKGYGGESIYAGGFFEDENFIKKHTGPGILSMNNNGPDTNQSQFLISLTENWELDDLHVVFGQVVEGLDVVRIISHEPLKDKFSKPVVIDCGQIK

SEQ ID NO: 20268 - protein, 151 aa, Zea mays subsp. mays
  peptide (1)..(151): Ceres Seq. ID no. 14309208
  misc_feature (1)..(150): NCBI GI NO: 18146786 NR Description: CYP1 [Vigna radiata]
  misc_feature (1)..(150): NCBI GI NO: 18076088 NR Description: cyclophilin [Ricinus communis]
  misc_feature (1)..(150): NCBI GI NO: 11270316 NR Description: peptidylprolyl isomerase (EC 5.2.1.8)
  misc_feature (1)..(150): NCBI GI NO: 21886603 NR Description: peptidylprolyl isomerase (cyclophilin)
  misc_feature (1)..(150): NCBI GI NO: 15227259 NR Description: cytosolic cyclophilin (ROC3)
  misc_feature (1)..(150): NCBI GI NO: 118103 NR Description: Peptidyl-prolyl cis-trans isomerase
  misc_feature (1)..(150): NCBI GI NO: 15236211 NR Description: peptidylprolyl isomerase (cyclophilin)
  misc_feature (1)..(150): NCBI GI NO: 1076510 NR Description: peptidylprolyl isomerase (EC 5
  misc_feature (1)..(150): NCBI GI NO: 29124975 NR Description: cyclophilin [Populus tremuloides]
  misc_feature (1)..(150): NCBI GI NO: 68406 NR Description: peptidylprolyl isomerase (EC 5.2.1.8) - tomato
MELFADTTPRTAENFRALCTGEKGMGKKGKPLHYKGSIIHHMCPDYIIGGGDFTYERKGYGGESIYAGGFFEDENFIKKHTGPGILSMNNNGPDTNQSQFLISLTENWELDDLHVVFGQVVEGLDVVRIISHEPLKDKFSKPVVIDCGQIK

SEQ ID NO: 20269 - DNA, 1117 bp, Zea mays subsp. mays
  misc_feature (1)..(1117): Ceres Seq. ID no. 14309202
aaagcttctcctctcttcctccgcccatctcggctttgcttcctccggtgaggcgtttaaaatggcggcagccttacctttatctccggttagccatcagttatgtcggagaagcaacaggttctggtacaacgctttgactcccaggttctgttcgccggttttctcgactacttctccctgtctcatcggcgtgaaaggaatcggctcgtcgagtcagttacggccacgccaccctctgatctcttcagcggcttcgactgattatctattgcatgacgtcggagccacggtggcagttcttggtggagcctacgcgcttgtcttactcttcgagagtctcacgaagcgagacgtgattccacagagattgagcagaaagcttgtgcatatactctcaggtctgcttttcgtactctcgtggccaatcttcagcgcatcaacggaggctcgatactttgctgcttttgttccgttagtgaatggcctaaggcttgttgtcaatggattatctgtctcccctaactccacgctaatccaatccgtcactagggaaggacgaccagaagagttgcttaaaggtccattgttctacgttctagcccttctcgttgctgcggttttcttctggagagattctcctaccggtatgatctcgctggcaatgatgtgtggtggcgacggaatagctgatatcatgggacgtaagtacggatcatataagataccttacaacccaagaaagagcttggcgggaagtatctccatgttcatattcggcttcttcatctccatcggattactttactattactcaagccttgggtatcttcacatgaactgggaaacaacctttacgagagtcgcgattgtctcattggtcgctacgttggttgagtcactacccatcaccgatcaaatagacgacaacgtttcggttcctctggcttcaattttggctgcttacctaagttttggatattagactcatccctcataaactgtataagttgtatttgtatgaatacgacctgggaatgcagctacgaatatgctaccagttgtatatattttactattactgctcaaagattcataactaatacaatttcgggtt

SEQ ID NO: 20270 - protein, 327 aa, Zea mays subsp. mays
  peptide (1)..(327): Ceres Seq. ID no. 14309203
  misc_feature (21)..(327): NCBI GI NO: 15238184 NR Description: expressed protein [Arabidopsis thaliana]
  misc_feature (21)..(327): NCBI GI NO: 21537252 NR Description: unknown [Arabidopsis thaliana]
  misc_feature (21)..(327): NCBI GI NO: 28393229 NR Description: unknown protein [Arabidopsis thaliana]
  misc_feature (22)..(327): NCBI GI NO: 32488404 NR Description: OSJNBa0043A12.34
  misc_feature (90)..(325): NCBI GI NO: 34907982 NR Description: P0446G04.23
  misc_feature (90)..(325): NCBI GI NO: 21593148 NR Description: unknown [Arabidopsis thaliana]
  misc_feature (90)..(325): NCBI GI NO: 15237702 NR Description: expressed protein [Arabidopsis thaliana]
  misc_feature (90)..(277): NCBI GI NO: 8843778 NR Description: emb|CAB85555
  misc_feature (95)..(327): NCBI GI NO: 28850457 NR Description: similar to Oryza sativa (japonica cultivar-group)
  misc_feature (92)..(323): NCBI GI NO: 21674801 NR Description: conserved hypothetical protein
KLLLSSSAHLGFASSGEAFKMAAALPLSPVSHQLCRRSNRFWYNALTPRFCSPVFSTTSPCLIGVKGIGSSSQLRPRHPLISSAASTDYLLHDVGATVAVLGGAYALVLLFESLTKRDVIPQRLSRKLVHILSGLLFVLSWPIFSASTEARYFAAFVPLVNGLRLVVNGLSVSPNSTLIQSVTREGRPEELLKGPLFYVLALLVAAVFFWRDSPTGMISLAMMCGGDGIADIMGRKYGSYKIPYNPRKSLAGSISMFIFGFFISIGLLYYYSSLGYLHMNWETTFTRVAIVSLVATLVESLPITDQIDDNVSVPLASILAAYLSFGY

SEQ ID NO: 20271 - protein, 307 aa, Zea mays subsp. mays
  peptide (1)..(307): Ceres Seq. ID no. 14309204
  misc_feature (1)..(307): NCBI GI NO: 15238184 NR Description: expressed protein [Arabidopsis thaliana]
  misc_feature (1)..(307): NCBI GI NO: 21537252 NR Description: unknown [Arabidopsis thaliana]
  misc_feature (1)..(307): NCBI GI NO: 28393229 NR Description: unknown protein [Arabidopsis thaliana]
  misc_feature (2)..(307): NCBI GI NO: 32488404 NR Description: OSJNBa0043A12.34
  misc_feature (70)..(305): NCBI GI NO: 34907982 NR Description: P0446G04.23
  misc_feature (70)..(305): NCBI GI NO: 21593148 NR Description: unknown [Arabidopsis thaliana]
  misc_feature (70)..(305): NCBI GI NO: 15237702 NR Description: expressed protein [Arabidopsis thaliana]
  misc_feature (70)..(257): NCBI GI NO: 8843778 NR Description: emb|CAB85555
  misc_feature (75)..(307): NCBI GI NO: 28850457 NR Description: similar to Oryza sativa (japonica cultivar-group)
  misc_feature (72)..(303): NCBI GI NO: 21674801 NR Description: conserved hypothetical protein
MAAALPLSPVSHQLCRRSNRFWYNALTPRFCSPVFSTTSPCLIGVKGIGSSSQLRPRHPLISSAASTDYLLHDVGATVAVLGGAYALVLLFESLTKRDVIPQRLSRKLVHILSGLLFVLSWPIFSASTEARYFAAFVPLVNGLRLVVNGLSVSPNSTLIQSVTREGRPEELLKGPLFYVLALLVAAVFFWRDSPTGMISLAMMCGGDGIADIMGRKYGSYKIPYNPRKSLAGSISMFIFGFFISIGLLYYYSSLGYLHMNWETTFTRVAIVSLVATLVESLPITDQIDDNVSVPLASILAAYLSFGY

SEQ ID NO: 20272 - DNA, 863 bp, Zea mays subsp. mays
  misc_feature (1)..(863): Ceres Seq. ID no. 15174341
atccaaacacttatctttttctctctcttccctcttcaatcttcacattttctctatggagaatcatggcaacaagcgagtctgggaccagtcctctgactccaacactcagcgggtcgactcgcccgagtctaagattcgtcgagttgactcgtccgattcgggtattaactcgtccgagtctcaactcgaatcggtcctcgactcgtcggaggtgcagctacaagacgacatttttaacatgcttgacgacacggacaatgtgcccgagcgtgactcggtgcagggtcttgactcagtgatcaaaagcttcgaggatgagataaatgctccaggttcggattctggttccggtgacccggcccaggaacccgactccggggagctacaatctaacttgggctatcttctagaagcctccgacgacgagctcgggttgccgccgacggtgggtgacggcgaggaaatgggtcgggctgccccggaaatggcggagcttgccaggttcgtgggatttgaagacgacatacccagttatgatgcattcgggtttgggtcggggtttacggcggagaatgacggaggtgccggaggttttgtgacggtggatgggttgtttgactattcggacccgtcggcggatgttttgtggcggtcggagtcattacaagctatgtaggtggtggcggtggttttagtgaaacggtgcgtaggggtggaaaatgtaaatctgggaaaatattggcgttaaaaataggaggaggggtagcacagaaaggtaggaggtagatgtgaaaaagttgtagggttaggatttgtttgttgttttggttttttcgttgaattcaattgaaacaaacccc

SEQ ID NO: 20273 - protein, 225 aa, Zea mays subsp. mays
  peptide (1)..(225): Ceres Seq. ID no. 15174342
  misc_feature (46)..(224): NCBI GI NO: 22329538 NR Description: expressed protein [Arabidopsis thaliana]
  misc_feature (49)..(184): NCBI GI NO: 34895572 NR Description: unnamed protein product
  misc_feature (67)..(224): NCBI GI NO: 18404714 NR Description: expressed protein [Arabidopsis thaliana]
SKHLSFSLSSLFNLHIFSMENHGNKRVWDQSSDSNTQRVDSPESKIRRVDSSDSGINSSESQLESVLDSSEVQLQDDIFNMLDDTDNVPERDSVQGLDSVIKSFEDEINAPGSDSGSGDPAQEPDSGELQSNLGYLLEASDDELGLPPTVGDGEEMGRAAPEMAELARFVGFEDDIPSYDAFGFGSGFTAENDGGAGGFVTVDGLFDYSDPSADVLWRSESLQAM

SEQ ID NO: 20274 - protein, 207 aa, Zea mays subsp. mays
  peptide (1)..(207): Ceres Seq. ID no. 15174343
  misc_feature (28)..(206): NCBI GI NO: 22329538 NR Description: expressed protein [Arabidopsis thaliana]
  misc_feature (31)..(166): NCBI GI NO: 34895572 NR Description: unnamed protein product
  misc_feature (49)..(206): NCBI GI NO: 18404714 NR Description: expressed protein [Arabidopsis thaliana]
MENHGNKRVWDQSSDSNTQRVDSPESKIRRVDSSDSGINSSESQLESVLDSSEVQLQDDIFNMLDDTDNVPERDSVQGLDSVIKSFEDEINAPGSDSGSGDPAQEPDSGELQSNLGYLLEASDDELGLPPTVGDGEEMGRAAPEMAELARFVGFEDDIPSYDAFGFGSGFTAENDGGAGGFVTVDGLFDYSDPSADVLWRSESLQAM

SEQ ID NO: 20275 - protein, 145 aa, Zea mays subsp. mays
  peptide (1)..(145): Ceres Seq. ID no. 15174344
  misc_feature (1)..(144): NCBI GI NO: 22329538 NR Description: expressed protein [Arabidopsis thaliana]
  misc_feature (1)..(104): NCBI GI NO: 34895572 NR Description: unnamed protein product
  misc_feature (1)..(144): NCBI GI NO: 18404714 NR Description: expressed protein [Arabidopsis thaliana]
MLDDTDNVPERDSVQGLDSVIKSFEDEINAPGSDSGSGDPAQEPDSGELQSNLGYLLEASDDELGLPPTVGDGEEMGRAAPEMAELARFVGFEDDIPSYDAFGFGSGFTAENDGGAGGFVTVDGLFDYSDPSADVLWRSESLQAM

SEQ ID NO: 20276 - DNA, 1025 bp, Zea mays subsp. mays
  misc_feature (1)..(1025): Ceres Seq. ID no. 14309181
atcaacggataaaaaaaaaaaaaacgaaaccaacacaagaacagaagaagctctcatccttaaagggcaaagcttcctctgtaactacaatcaatggctcacttcatagaccttaacacttttaccaacactttactctcgacatctaaactacgtgagactcggaagatcgtaaaatcgagcgggtttgtttgtaggaaaaccaccactgatgactcggtacagcttccaagacggatgatgacacttggatttgctgtctccatagctctcactggaactttcagcggtaatgatgtttcgttggcacaagacaacaatgggttttggatagatggtcctcttccaactcctcctatttacaacaatatcgtgaacgagcagacaggaacgagatctttcttgaagaaaggagtgtatgtagctgacatcgggaccaaaggaagaacgtatagagttaaaaagtatgctttcgatctcttagctatggaggatttgatcggaccagacactttaaactatgttaaaaagtacttgaggcttaaatccaccttcttgttctacgatttcgacaatctcatctctgctgctgcctcccaagacaagctgcctctcactgatttggccaatagattgttcgacaactttgaaaagcttgaagatgcagctaaaacgaagaacttagccgagacagaatcgtgttacaaagatacaaagtttcttctccaagaagttatgaccagaatggcctgaagccagttcagttttcactggtttacttgctgctgaagatcactcattcacggtggataacactctgtgatcatgaaatgtaatcttgcataccaacacaaaaaaaaaaaaccttaaaagctaataagaaaaatgtaatattgggagaatgataatctagccaattctcttgtatgtataaatgcttgttttaagctgcttggaccagtttatctcccaacccttatatatagtttctacacattaatgaatgagagtatacacattgacat

SEQ ID NO: 20277 - protein, 219 aa, Zea mays subsp. mays
  peptide (1)..(219): Ceres Seq. ID no. 14309182
  misc_feature (16)..(219): Pfam Name: PsbQ Pfam Description: Oxygen evolving enhancer protein 3
  misc_feature (1)..(219): NCBI GI NO: 18395819 NR Description: PsbQ domain protein family, putative
  misc_feature (1)..(219): NCBI GI NO: 21537394 NR Description: unknown [Arabidopsis thaliana]
  misc_feature (47)..(219): NCBI GI NO: 34915502 NR Description: hypothetical protein~similar to Arabidopsisthaliana chromosome 3
  misc_feature (104)..(214): NCBI GI NO: 8131595 NR Description: oxygen evolving enhancer protein 3
  misc_feature (82)..(218): NCBI GI NO: 15233587 NR Description: oxygen-evolving complex protein 16
  misc_feature (33)..(218): NCBI GI NO: 11134057 NR Description: Oxygen-evolving enhancer protein 3-1
  misc_feature (83)..(218): NCBI GI NO: 11134066 NR Description: Oxygen-evolving enhancer protein 3-2
  misc_feature (23)..(218): NCBI GI NO: 131397 NR Description: Oxygen-evolving enhancer protein 3
  misc_feature (85)..(218): NCBI GI NO: 34810268 NR Description: Chain A
  misc_feature (83)..(218): NCBI GI NO: 15234637 NR Description: oxygen-evolving complex protein 16
MAHFIDLNTFTNTLLSTSKLRETRKIVKSSGFVCRKTTTDDSVQLPRRMMTLGFAVSIALTGTFSGNDVSLAQDNNGFWIDGPLPTPPIYNNIVNEQTGTRSFLKKGVYVADIGTKGRTYRVKKYAFDLLAMEDLIGPDTLNYVKKYLRLKSTFLFYDFDNLISAAASQDKLPLTDLANRLFDNFEKLEDAAKTKNLAETESCYKDTKFLLQEVMTRMA

SEQ ID NO: 20278 - protein, 171 aa, Zea mays subsp. mays
  peptide (1)..(171): Ceres Seq. ID no. 14309183
  misc_feature (1)..(171): Pfam Name: PsbQ Pfam Description: Oxygen evolving enhancer protein 3
  misc_feature (1)..(171): NCBI GI NO: 18395819 NR Description: PsbQ domain protein family, putative
  misc_feature (1)..(171): NCBI GI NO: 21537394 NR Description: unknown [Arabidopsis thaliana]
  misc_feature (1)..(171): NCBI GI NO: 34915502 NR Description: hypothetical protein~similar to Arabidopsisthaliana chromosome 3
  misc_feature (56)..(166): NCBI GI NO: 8131595 NR Description: oxygen evolving enhancer protein 3
  misc_feature (34)..(170): NCBI GI NO: 15233587 NR Description: oxygen-evolving complex protein 16
  misc_feature (1)..(170): NCBI GI NO: 11134057 NR Description: Oxygen-evolving enhancer protein 3-1
  misc_feature (35)..(170): NCBI GI NO: 11134066 NR Description: Oxygen-evolving enhancer protein 3-2
  misc_feature (1)..(170): NCBI GI NO: 131397 NR Description: Oxygen-evolving enhancer protein 3
  misc_feature (37)..(170): NCBI GI NO: 34810268 NR Description: Chain A
  misc_feature (35)..(170): NCBI GI NO: 15234637 NR Description: oxygen-evolving complex protein 16
MMTLGFAVSIALTGTFSGNDVSLAQDNNGFWIDGPLPTPPIYNNIVNEQTGTRSFLKKGVYVADIGTKGRTYRVKKYAFDLLAMEDLIGPDTLNYVKKYLRLKSTFLFYDFDNLISAAASQDKLPLTDLANRLFDNFEKLEDAAKTKNLAETESCYKDTKFLLQEVMTRMA

SEQ ID NO: 20279 - protein, 170 aa, Zea mays subsp. mays
  peptide (1)..(170): Ceres Seq. ID no. 14309184
  misc_feature (1)..(170): Pfam Name: PsbQ Pfam Description: Oxygen evolving enhancer protein 3
  misc_feature (1)..(170): NCBI GI NO: 18395819 NR Description: PsbQ domain protein family, putative
  misc_feature (1)..(170): NCBI GI NO: 21537394 NR Description: unknown [Arabidopsis thaliana]
  misc_feature (1)..(170): NCBI GI NO: 34915502 NR Description: hypothetical protein~similar to Arabidopsisthaliana chromosome 3
  misc_feature (55)..(165): NCBI GI NO: 8131595 NR Description: oxygen evolving enhancer protein 3
  misc_feature (33)..(169): NCBI GI NO: 15233587 NR Description: oxygen-evolving complex protein 16
  misc_feature (1)..(169): NCBI GI NO: 11134057 NR Description: Oxygen-evolving enhancer protein 3-1
  misc_feature (34)..(169): NCBI GI NO: 11134066 NR Description: Oxygen-evolving enhancer protein 3-2
  misc_feature (1)..(169): NCBI GI NO: 131397 NR Description: Oxygen-evolving enhancer protein 3
  misc_feature (36)..(169): NCBI GI NO: 34810268 NR Description: Chain A
  misc_feature (34)..(169): NCBI GI NO: 15234637 NR Description: oxygen-evolving complex protein 16
MTLGFAVSIALTGTFSGNDVSLAQDNNGFWIDGPLPTPPIYNNIVNEQTGTRSFLKKGVYVADIGTKGRTYRVKKYAFDLLAMEDLIGPDTLNYVKKYLRLKSTFLFYDFDNLISAAASQDKLPLTDLANRLFDNFEKLEDAAKTKNLAETESCYKDTKFLLQEVMTRMA

SEQ ID NO: 20280 - DNA, 1317 bp, Zea mays subsp. mays
  misc_feature (1)..(1317): Ceres Seq. ID no. 15179344
aagacctgttcttcagtttgctgagagagtgaactaacaattatggcgaagatgatgatgatgcaacagagccagccttctttatctctccttacttcttctgtctctgactttaatggcgctaagctccacttacaagtccagtacaagaggaaggttcaacagccaaaaggagcactctatgtatcagcctccagcgaaaagaagattctcataatgggtggcactcgattcatcggtatcttcttatccaggctccttgtcaaagaaggacatcaggttacgttgttcacaagaggtaaatctcctattgccaaacaactccctggcgaatctgaccaagactttgctgatttttcctccaagattcttcacttgaaaggagacagaaaggactatgactttgtgaagtcaagtctttcagctgaaggctttgatgttgtttatgatatcaacgggagggaggctgaagaagttgagcccatattagatgcacttcctaaactagaacagtacatctactgttcttcagctggtgtttacttgaaatctgatgtcttgccacactgtgaggtggatgcagttgacccaaagagcaggcacaaggggaagctggagactgagagcttactgcaatcaaaaggtgtaaactggacttccatacgccctgtctacatctacggtccgttgaactacaaccccgttgaagaatggttcttccaccgtctcaaagctggccgccctatcccagttccaaactctggaatccagatctcacagctcggtcacgttaaggacttggcaacagcctttctggccgtgcttggtaacgagaaagccagcagagagatattcaacatctcgggagagaagtacgtcacctttgatggcttagcaagagcttgcgcaaaggctggtgggtttccagagccagagattgttcactacaaccctaaagagtttgactttggaaagaagaaggctttccctttccgtgaccagcatttctttgcctcggtggagaaagcaaagcatgtgcttggatggaaaccagagttcgatttggtggagggtctcactgactcatacaaccttgatttcggtcgtggaactttcagaaaagaggcggatttcaccactgacgacatgattctaagcaagaaacttgttcttcaatagaaacatattgatttgtatggttgtgtgatctcacactgaagaacattcgcaagtttattgtcgtctcaaatgtattttggtttcggattgtgttcgacttcttctaagaagaggcggtctggctcttgaagtttactt

SEQ ID NO: 20281 - protein, 378 aa, Zea mays subsp. mays
  peptide (1)..(378): Ceres Seq. ID no. 15179345
  misc_feature (56)..(348): Pfam Name: Pfam Description:  NAD dependent epimerase/dehydratase family
  misc_feature (1)..(378): NCBI GI NO: 15217485 NR Description: RNA-binding protein -related
  misc_feature (1)..(378): NCBI GI NO: 21593201 NR Description: putative RNA-binding protein
  misc_feature (1)..(378): NCBI GI NO: 17064988 NR Description: g5bf protein [Arabidopsis thaliana]
  misc_feature (1)..(378): NCBI GI NO: 25454619 NR Description: hypothetical protein g5bf
  misc_feature (5)..(378): NCBI GI NO: 25456171 NR Description: probable RNA binding protein
  misc_feature (47)..(374): NCBI GI NO: 34398360 NR Description: 38 kDa ribosome-associated protein precursor
  misc_feature (55)..(371): NCBI GI NO: 17232323 NR Description: mRNA-binding protein [Nostoc sp. PCC 7120]
  misc_feature (55)..(371): NCBI GI NO: 23040971 NR Description: hypothetical protein
  misc_feature (55)..(371): NCBI GI NO: 23128166 NR Description: hypothetical protein [Nostoc punctiforme]
  misc_feature (49)..(371): NCBI GI NO: 32746733 NR Description: mRNA-binding protein precursor [Nicotiana tabacum]
MAKMMMMQQSQPSLSLLTSSVSDFNGAKLHLQVQYKRKVQQPKGALYVSASSEKKILIMGGTRFIGIFLSRLLVKEGHQVTLFTRGKSPIAKQLPGESDQDFADFSSKILHLKGDRKDYDFVKSSLSAEGFDVVYDINGREAEEVEPILDALPKLEQYIYCSSAGVYLKSDVLPHCEVDAVDPKSRHKGKLETESLLQSKGVNWTSIRPVYIYGPLNYNPVEEWFFHRLKAGRPIPVPNSGIQISQLGHVKDLATAFLAVLGNEKASREIFNISGEKYVTFDGLARACAKAGGFPEPEIVHYNPKEFDFGKKKAFPFRDQHFFASVEKAKHVLGWKPEFDLVEGLTDSYNLDFGRGTFRKEADFTTDDMILSKKLVLQ

SEQ ID NO: 20282 - protein, 375 aa, Zea mays subsp. mays
  peptide (1)..(375): Ceres Seq. ID no. 15179346
  misc_feature (53)..(345): Pfam Name: Pfam Description:  NAD dependent epimerase/dehydratase family
  misc_feature (1)..(375): NCBI GI NO: 15217485 NR Description: RNA-binding protein -related
  misc_feature (1)..(375): NCBI GI NO: 21593201 NR Description: putative RNA-binding protein
  misc_feature (1)..(375): NCBI GI NO: 17064988 NR Description: g5bf protein [Arabidopsis thaliana]
  misc_feature (1)..(375): NCBI GI NO: 25454619 NR Description: hypothetical protein g5bf
  misc_feature (2)..(375): NCBI GI NO: 25456171 NR Description: probable RNA binding protein
  misc_feature (44)..(371): NCBI GI NO: 34398360 NR Description: 38 kDa ribosome-associated protein precursor
  misc_feature (52)..(368): NCBI GI NO: 17232323 NR Description: mRNA-binding protein [Nostoc sp. PCC 7120]
  misc_feature (52)..(368): NCBI GI NO: 23040971 NR Description: hypothetical protein
  misc_feature (52)..(368): NCBI GI NO: 23128166 NR Description: hypothetical protein [Nostoc punctiforme]
  misc_feature (46)..(368): NCBI GI NO: 32746733 NR Description: mRNA-binding protein precursor [Nicotiana tabacum]
MMMMQQSQPSLSLLTSSVSDFNGAKLHLQVQYKRKVQQPKGALYVSASSEKKILIMGGTRFIGIFLSRLLVKEGHQVTLFTRGKSPIAKQLPGESDQDFADFSSKILHLKGDRKDYDFVKSSLSAEGFDVVYDINGREAEEVEPILDALPKLEQYIYCSSAGVYLKSDVLPHCEVDAVDPKSRHKGKLETESLLQSKGVNWTSIRPVYIYGPLNYNPVEEWFFHRLKAGRPIPVPNSGIQISQLGHVKDLATAFLAVLGNEKASREIFNISGEKYVTFDGLARACAKAGGFPEPEIVHYNPKEFDFGKKKAFPFRDQHFFASVEKAKHVLGWKPEFDLVEGLTDSYNLDFGRGTFRKEADFTTDDMILSKKLVLQ

SEQ ID NO: 20283 - protein, 374 aa, Zea mays subsp. mays
  peptide (1)..(374): Ceres Seq. ID no. 15179347
  misc_feature (52)..(344): Pfam Name: Pfam Description:  NAD dependent epimerase/dehydratase family
  misc_feature (1)..(374): NCBI GI NO: 15217485 NR Description: RNA-binding protein -related
  misc_feature (1)..(374): NCBI GI NO: 21593201 NR Description: putative RNA-binding protein
  misc_feature (1)..(374): NCBI GI NO: 17064988 NR Description: g5bf protein [Arabidopsis thaliana]
  misc_feature (1)..(374): NCBI GI NO: 25454619 NR Description: hypothetical protein g5bf
  misc_feature (1)..(374): NCBI GI NO: 25456171 NR Description: probable RNA binding protein
  misc_feature (43)..(370): NCBI GI NO: 34398360 NR Description: 38 kDa ribosome-associated protein precursor
  misc_feature (51)..(367): NCBI GI NO: 17232323 NR Description: mRNA-binding protein [Nostoc sp. PCC 7120]
  misc_feature (51)..(367): NCBI GI NO: 23040971 NR Description: hypothetical protein
  misc_feature (51)..(367): NCBI GI NO: 23128166 NR Description: hypothetical protein [Nostoc punctiforme]
  misc_feature (45)..(367): NCBI GI NO: 32746733 NR Description: mRNA-binding protein precursor [Nicotiana tabacum]
MMMQQSQPSLSLLTSSVSDFNGAKLHLQVQYKRKVQQPKGALYVSASSEKKILIMGGTRFIGIFLSRLLVKEGHQVTLFTRGKSPIAKQLPGESDQDFADFSSKILHLKGDRKDYDFVKSSLSAEGFDVVYDINGREAEEVEPILDALPKLEQYIYCSSAGVYLKSDVLPHCEVDAVDPKSRHKGKLETESLLQSKGVNWTSIRPVYIYGPLNYNPVEEWFFHRLKAGRPIPVPNSGIQISQLGHVKDLATAFLAVLGNEKASREIFNISGEKYVTFDGLARACAKAGGFPEPEIVHYNPKEFDFGKKKAFPFRDQHFFASVEKAKHVLGWKPEFDLVEGLTDSYNLDFGRGTFRKEADFTTDDMILSKKLVLQ

SEQ ID NO: 20284 - DNA, 623 bp, Zea mays subsp. mays
  misc_feature (1)..(623): Ceres Seq. ID no. 15174293
aatcagagtagtgagtgccaaaaaaaagattcaaaagtcgccgagagcacaaaccctcctctaatggcgtctctctccatggcttccgttaaccttagcttctctcccttacgctctcctccaaaggtttccactcacgcttccgttcaattcgctcggttcagctcgtcgattcttgcctcagctcactgcatttctgggcttcgcgcggttcttcctcagaagatatccaccgttgtctctcagagttctcagaggcttcagactcttaccgttttcgctcataagggctacaagatgaagacccacaaggcctcagcgaagaggttcagggtgacgggtagagggaagatagtgaggaggagatccgggaagcagcatttgttagctaagaagaacaacaagaggaagctgcgtctttccaaaatgcatgaagtgagccggagtgactatgacaatgtgatcggcgctcttccctacctgaaagtcaaccgaaaggcgacttaagcagagccgagcttgattctttttcttacctacatttctcattttgtaatctaagttgtgataatactctctcttttgttttgtgattttttggtcaatgagttgatccttcttct

SEQ ID NO: 20285 - protein, 168 aa, Zea mays subsp. mays
  peptide (1)..(168): Ceres Seq. ID no. 15174294
  misc_feature (100)..(158): Pfam Name: Pfam Description:  Ribosomal protein L35
  misc_feature (22)..(168): NCBI GI NO: 30682291 NR Description: chloroplast ribosomal protein L35 -related
  misc_feature (27)..(168): NCBI GI NO: 7572943 NR Description: ribosomal protein L35 [Arabidopsis thaliana]
  misc_feature (22)..(143): NCBI GI NO: 25295676 NR Description: probable chloroplast ribosomal protein L35
  misc_feature (23)..(166): NCBI GI NO: 132918 NR Description: 50S RIBOSOMAL PROTEIN L35, CHLOROPLAST PRECURSOR
  misc_feature (24)..(167): NCBI GI NO: 28411202 NR Description: putative plastid ribosomal protein L35 [Zea mays]
  misc_feature (54)..(167): NCBI GI NO: 28411216 NR Description: putative plastid ribosomal protein L35 [Zea mays]
  misc_feature (96)..(167): NCBI GI NO: 28411206 NR Description: putative plastid ribosomal protein L35 [Zea mays]
  misc_feature (96)..(167): NCBI GI NO: 28411209 NR Description: putative plastid ribosomal protein L35 [Zea mays]
  misc_feature (96)..(167): NCBI GI NO: 28411204 NR Description: putative plastid ribosomal protein L35 [Zea mays]
  misc_feature (99)..(161): NCBI GI NO: 17230919 NR Description: 50S ribosomal protein L35 [Nostoc sp. PCC 7120]
NQSSECQKKDSKVAESTNPPLMASLSMASVNLSFSPLRSPPKVSTHASVQFARFSSSILASAHCISGLRAVLPQKISTVVSQSSQRLQTLTVFAHKGYKMKTHKASAKRFRVTGRGKIVRRRSGKQHLLAKKNNKRKLRLSKMHEVSRSDYDNVIGALPYLKVNRKAT

SEQ ID NO: 20286 - protein, 147 aa, Zea mays subsp. mays
  peptide (1)..(147): Ceres Seq. ID no. 15174295
  misc_feature (79)..(137): Pfam Name: Pfam Description:  Ribosomal protein L35
  misc_feature (1)..(147): NCBI GI NO: 30682291 NR Description: chloroplast ribosomal protein L35 -related
  misc_feature (6)..(147): NCBI GI NO: 7572943 NR Description: ribosomal protein L35 [Arabidopsis thaliana]
  misc_feature (1)..(122): NCBI GI NO: 25295676 NR Description: probable chloroplast ribosomal protein L35
  misc_feature (2)..(145): NCBI GI NO: 132918 NR Description: 50S RIBOSOMAL PROTEIN L35, CHLOROPLAST PRECURSOR
  misc_feature (3)..(146): NCBI GI NO: 28411202 NR Description: putative plastid ribosomal protein L35 [Zea mays]
  misc_feature (33)..(146): NCBI GI NO: 28411216 NR Description: putative plastid ribosomal protein L35 [Zea mays]
  misc_feature (75)..(146): NCBI GI NO: 28411206 NR Description: putative plastid ribosomal protein L35 [Zea mays]
  misc_feature (75)..(146): NCBI GI NO: 28411209 NR Description: putative plastid ribosomal protein L35 [Zea mays]
  misc_feature (75)..(146): NCBI GI NO: 28411204 NR Description: putative plastid ribosomal protein L35 [Zea mays]
  misc_feature (78)..(140): NCBI GI NO: 17230919 NR Description: 50S ribosomal protein L35 [Nostoc sp. PCC 7120]
MASLSMASVNLSFSPLRSPPKVSTHASVQFARFSSSILASAHCISGLRAVLPQKISTVVSQSSQRLQTLTVFAHKGYKMKTHKASAKRFRVTGRGKIVRRRSGKQHLLAKKNNKRKLRLSKMHEVSRSDYDNVIGALPYLKVNRKAT

SEQ ID NO: 20287 - protein, 142 aa, Zea mays subsp. mays
  peptide (1)..(142): Ceres Seq. ID no. 15174296
  misc_feature (74)..(132): Pfam Name: Pfam Description:  Ribosomal protein L35
  misc_feature (1)..(142): NCBI GI NO: 30682291 NR Description: chloroplast ribosomal protein L35 -related
  misc_feature (1)..(142): NCBI GI NO: 7572943 NR Description: ribosomal protein L35 [Arabidopsis thaliana]
  misc_feature (1)..(117): NCBI GI NO: 25295676 NR Description: probable chloroplast ribosomal protein L35
  misc_feature (1)..(140): NCBI GI NO: 132918 NR Description: 50S RIBOSOMAL PROTEIN L35, CHLOROPLAST PRECURSOR
  misc_feature (1)..(141): NCBI GI NO: 28411202 NR Description: putative plastid ribosomal protein L35 [Zea mays]
  misc_feature (28)..(141): NCBI GI NO: 28411216 NR Description: putative plastid ribosomal protein L35 [Zea mays]
  misc_feature (70)..(141): NCBI GI NO: 28411206 NR Description: putative plastid ribosomal protein L35 [Zea mays]
  misc_feature (70)..(141): NCBI GI NO: 28411209 NR Description: putative plastid ribosomal protein L35 [Zea mays]
  misc_feature (70)..(141): NCBI GI NO: 28411204 NR Description: putative plastid ribosomal protein L35 [Zea mays]
  misc_feature (73)..(135): NCBI GI NO: 17230919 NR Description: 50S ribosomal protein L35 [Nostoc sp. PCC 7120]
MASVNLSFSPLRSPPKVSTHASVQFARFSSSILASAHCISGLRAVLPQKISTVVSQSSQRLQTLTVFAHKGYKMKTHKASAKRFRVTGRGKIVRRRSGKQHLLAKKNNKRKLRLSKMHEVSRSDYDNVIGALPYLKVNRKAT

SEQ ID NO: 20288 - DNA, 904 bp, Zea mays subsp. mays
  misc_feature (1)..(904): Ceres Seq. ID no. 15174088
accggtctcaatggcgaagctcctctcccgctccaccgcctcgcgcgtcgcaaatcgtttcttctccacctccagagccgccgctccttctcgctctaacctcatctcccgtcgatcttcaccggcgctgttccaagccatgggattcatccctgattcgacccgtttgacgacgatccggacccggatggataggtccggtggatcgtattccccgctcaaatccggatccaatttcagcgacagggcacctacggagatggcgccgctgtttcccggctgcgactacgagcattggctcatcgtcatggagaagcccggcggcgaaaacgcgagtagacagcagatgatcgattgctatgttcagactcttgccaaaattgtcggaagtgaggaagaagctaagaggaagatctataatgtctcgtgcgagaggtattttgggtttggttgtgagatcgatgaggagacatcaaataaactcgaagggattcctggtgttctcttcgtgcttccggattcctatgttgatccagagtacaaagactacggagctgagttgtttgtgaatggagaagtagttccgcgtccaccagagagacagaggaagatactggagttaacgactcaaagaagctcggataaaccgaggtacaatgacagaaccagaaatgttcgacggagagataacatgcgttaagaccttcagtactcaagagtcttttgctaaacatctcctttcccttttgaacttcgttcgtattgcctttcttggtgtttgttatttgctccactctatacgaataatgtaaattgtgatcatggtgatgatggtattatggattatgttgtttctgttcgatcgcgcgaagcttattcaatagtacctcttagtattattttc

SEQ ID NO: 20289 - protein, 232 aa, Zea mays subsp. mays
  peptide (1)..(232): Ceres Seq. ID no. 15174089
  misc_feature (4)..(232): NCBI GI NO: 15226934 NR Description: expressed protein [Arabidopsis thaliana]
  misc_feature (4)..(232): NCBI GI NO: 15223247 NR Description: plastid protein -related [Arabidopsis thaliana]
  misc_feature (53)..(232): NCBI GI NO: 15226108 NR Description: plastid protein [Arabidopsis thaliana]
  misc_feature (53)..(232): NCBI GI NO: 25370552 NR Description: DAG protein homolog
  misc_feature (53)..(232): NCBI GI NO: 21617909 NR Description: plastid protein [Arabidopsis thaliana]
  misc_feature (53)..(232): NCBI GI NO: 2440029 NR Description: DAL1 protein [Arabidopsis thaliana]
  misc_feature (11)..(232): NCBI GI NO: 34897972 NR Description: putative plastid protein
  misc_feature (11)..(230): NCBI GI NO: 38344141 NR Description: OSJNBa0041A02.8
  misc_feature (19)..(231): NCBI GI NO: 18400602 NR Description: expressed protein [Arabidopsis thaliana]
  misc_feature (70)..(229): NCBI GI NO: 15220382 NR Description: DAG protein -related [Arabidopsis thaliana]
PVSMAKLLSRSTASRVANRFFSTSRAAAPSRSNLISRRSSPALFQAMGFIPDSTRLTTIRTRMDRSGGSYSPLKSGSNFSDRAPTEMAPLFPGCDYEHWLIVMEKPGGENASRQQMIDCYVQTLAKIVGSEEEAKRKIYNVSCERYFGFGCEIDEETSNKLEGIPGVLFVLPDSYVDPEYKDYGAELFVNGEVVPRPPERQRKILELTTQRSSDKPRYNDRTRNVRRRDNMR

SEQ ID NO: 20290 - protein, 229 aa, Zea mays subsp. mays
  peptide (1)..(229): Ceres Seq. ID no. 15174090
  misc_feature (1)..(229): NCBI GI NO: 15226934 NR Description: expressed protein [Arabidopsis thaliana]
  misc_feature (1)..(229): NCBI GI NO: 15223247 NR Description: plastid protein -related [Arabidopsis thaliana]
  misc_feature (50)..(229): NCBI GI NO: 15226108 NR Description: plastid protein [Arabidopsis thaliana]
  misc_feature (50)..(229): NCBI GI NO: 25370552 NR Description: DAG protein homolog
  misc_feature (50)..(229): NCBI GI NO: 21617909 NR Description: plastid protein [Arabidopsis thaliana]
  misc_feature (50)..(229): NCBI GI NO: 2440029 NR Description: DAL1 protein [Arabidopsis thaliana]
  misc_feature (8)..(229): NCBI GI NO: 34897972 NR Description: putative plastid protein
  misc_feature (8)..(227): NCBI GI NO: 38344141 NR Description: OSJNBa0041A02.8
  misc_feature (16)..(228): NCBI GI NO: 18400602 NR Description: expressed protein [Arabidopsis thaliana]
  misc_feature (67)..(226): NCBI GI NO: 15220382 NR Description: DAG protein -related [Arabidopsis thaliana]
MAKLLSRSTASRVANRFFSTSRAAAPSRSNLISRRSSPALFQAMGFIPDSTRLTTIRTRMDRSGGSYSPLKSGSNFSDRAPTEMAPLFPGCDYEHWLIVMEKPGGENASRQQMIDCYVQTLAKIVGSEEEAKRKIYNVSCERYFGFGCEIDEETSNKLEGIPGVLFVLPDSYVDPEYKDYGAELFVNGEVVPRPPERQRKILELTTQRSSDKPRYNDRTRNVRRRDNMR

SEQ ID NO: 20291 - protein, 186 aa, Zea mays subsp. mays
  peptide (1)..(186): Ceres Seq. ID no. 15174091
  misc_feature (1)..(186): NCBI GI NO: 15226934 NR Description: expressed protein [Arabidopsis thaliana]
  misc_feature (1)..(186): NCBI GI NO: 15223247 NR Description: plastid protein -related [Arabidopsis thaliana]
  misc_feature (7)..(186): NCBI GI NO: 15226108 NR Description: plastid protein [Arabidopsis thaliana]
  misc_feature (7)..(186): NCBI GI NO: 25370552 NR Description: DAG protein homolog
  misc_feature (7)..(186): NCBI GI NO: 21617909 NR Description: plastid protein [Arabidopsis thaliana]
  misc_feature (7)..(186): NCBI GI NO: 2440029 NR Description: DAL1 protein [Arabidopsis thaliana]
  misc_feature (1)..(186): NCBI GI NO: 34897972 NR Description: putative plastid protein
  misc_feature (1)..(184): NCBI GI NO: 38344141 NR Description: OSJNBa0041A02.8
  misc_feature (1)..(185): NCBI GI NO: 18400602 NR Description: expressed protein [Arabidopsis thaliana]
  misc_feature (24)..(183): NCBI GI NO: 15220382 NR Description: DAG protein -related [Arabidopsis thaliana]
MGFIPDSTRLTTIRTRMDRSGGSYSPLKSGSNFSDRAPTEMAPLFPGCDYEHWLIVMEKPGGENASRQQMIDCYVQTLAKIVGSEEEAKRKIYNVSCERYFGFGCEIDEETSNKLEGIPGVLFVLPDSYVDPEYKDYGAELFVNGEVVPRPPERQRKILELTTQRSSDKPRYNDRTRNVRRRDNMR

SEQ ID NO: 20292 - DNA, 736 bp, Zea mays subsp. mays
  misc_feature (1)..(736): Ceres Seq. ID no. 14309166
aaaaatctcagaagaagctacgaggcagccatggcttccatttcatcatgcacagctccttgtgcgagcttattctcctctaccaccaaacctatcaacagttcttcttcttcttcttcctcctcagtaaggctctcctctcggtttcttggaactcgggttgtgaagctcagtatccgactcggaccctccaatgggtctagagccacttgctggttcaagttcggaaagaacggcgtcgatgctgagaatgctggaatctatggcagccaatcacgtgatgatttcgatagagacgatgtcgaacagtatttcaactacatggggatgcttgcggttgaaggtacctatgataagatggaggctcttctaaaccaaaacattcatcctgtagatattcttctgatgttagcagcctcagaaggagacaagcctaagatagaggagctcctcagagccggcgctgactacactgttaaggacgctgatggaagaaccgctcttgacagagccagcagtgaggagatccgtgatttgatccttggatctctcactcaaaaggcttgacaagatctcctctagcttcttcttacagagaaggtgatgtctgttttttggtaccttggaatcttagtcgtttcaatgttctcttacttttacgtaattggtccgaaccctaagtgtgcttcaactttaaagtaaagattgaatctattaccagaagctttacaaaacc

SEQ ID NO: 20293 - protein, 188 aa, Zea mays subsp. mays
  peptide (1)..(188): Ceres Seq. ID no. 14309167
  misc_feature (18)..(188): NCBI GI NO: 25373264 NR Description: unknown protein [imported] - Arabidopsis thaliana
  misc_feature (25)..(188): NCBI GI NO: 18403267 NR Description: expressed protein [Arabidopsis thaliana]
  misc_feature (11)..(182): NCBI GI NO: 34901972 NR Description: hypothetical protein~similar to Arabidopsisthaliana chromosome 1
  misc_feature (108)..(182): NCBI GI NO: 33146521 NR Description: unknown protein
  misc_feature (153)..(169): NCBI GI NO: 11994141 NR Description: contains similarity to DNA polymeraseI~gene_id:K10D20
KNLRRSYEAAMASISSCTAPCASLFSSTTKPINSSSSSSSSSVRLSSRFLGTRVVKLSIRLGPSNGSRATCWFKFGKNGVDAENAGIYGSQSRDDFDRDDVEQYFNYMGMLAVEGTYDKMEALLNQNIHPVDILLMLAASEGDKPKIEELLRAGADYTVKDADGRTALDRASSEEIRDLILGSLTQKA

SEQ ID NO: 20294 - protein, 178 aa, Zea mays subsp. mays
  peptide (1)..(178): Ceres Seq. ID no. 14309168
  misc_feature (8)..(178): NCBI GI NO: 25373264 NR Description: unknown protein [imported] - Arabidopsis thaliana
  misc_feature (15)..(178): NCBI GI NO: 18403267 NR Description: expressed protein [Arabidopsis thaliana]
  misc_feature (1)..(172): NCBI GI NO: 34901972 NR Description: hypothetical protein~similar to Arabidopsisthaliana chromosome 1
  misc_feature (98)..(172): NCBI GI NO: 33146521 NR Description: unknown protein
  misc_feature (143)..(159): NCBI GI NO: 11994141 NR Description: contains similarity to DNA polymeraseI~gene_id:K10D20
MASISSCTAPCASLFSSTTKPINSSSSSSSSSVRLSSRFLGTRVVKLSIRLGPSNGSRATCWFKFGKNGVDAENAGIYGSQSRDDFDRDDVEQYFNYMGMLAVEGTYDKMEALLNQNIHPVDILLMLAASEGDKPKIEELLRAGADYTVKDADGRTALDRASSEEIRDLILGSLTQKA

SEQ ID NO: 20295 - DNA, 1099 bp, Zea mays subsp. mays
  misc_feature (1)..(1099): Ceres Seq. ID no. 14309162
acaactaaatctaattaagaaaaaaacagagtctgtctttgactttccaaaaacagagcctttttttttgccttaacacacatcaatggcgattcctgtgattgatttctccaagatcaatggcgaagaaagggagaaaacactctctgaaatcgctaaagcttgcgaagaatgggggtttttccagctggtgaaccatgggatcccattggagcttcttaacaaggtgaagaagctggcctcagattgctacaaaacagagagagaagaagcgttcaagacctcaactcccgtgaagctactcaacgagttgcttgagaaaaactctggagagaagctcgagaacgttgactgggaagatgtcttcactctattagaccacaaccaaaacgaatggccatccaacacttctggcctcaaagagacgatggtagaatacagagaagaagtgaggaaactagcgagcaagatgatggaagtgatggacgagaacttgggtttgcctaaaggttacataaagaaagcttttaacgaaggcatggaagacggagaagagacggctttctttggaaccaaagttagccattacccaccttgtcctcatccagagcttgtcaatggccttaggtctcataccgatgcaggaggtgtcgttttgttgttccaagacgatgagtacgatggccttcaagtgttgaaagatggagagtggatcgatgttcagccgatgcctaatgctattgttatcaacactggtgatcagattgaagttcttagcaacggaaggtacaagagtgcatggcacagggtgttggcgagggaggaaggaaacaggaggtccattgcttccttctacaatccgtcgtacaaggcggccattgggccagcggcggaggaaggaagtgagaagaagtatccaaagtttgtgtttggagattatatggatgtctatgcaaaccagaagttcatgcctaaggagcctcgttttcttgctgtgaagactctctaaatgttgttaattgaatcactcttttattcaacgtcatgatgtattttcacttttaagttattaaatgccaagtttaataattgataaaat

SEQ ID NO: 20296 - protein, 307 aa, Zea mays subsp. mays
  peptide (1)..(307): Ceres Seq. ID no. 14309163
  misc_feature (159)..(259): Pfam Name: II Pfam Description: 2OG-Fe
  misc_feature (1)..(307): NCBI GI NO: 18411485 NR Description: 1-aminocyclopropane-1-carboxylate oxidase
  misc_feature (1)..(307): NCBI GI NO: 21555054 NR Description: 1-aminocyclopropane-1-carboxylate oxidase
  misc_feature (1)..(307): NCBI GI NO: 25285689 NR Description: hypothetical protein F2P24.4
  misc_feature (1)..(307): NCBI GI NO: 28949891 NR Description: 1-aminocyclopropane-1-carboxylic acid oxidase
  misc_feature (1)..(307): NCBI GI NO: 27371996 NR Description: 1-aminocyclopropane-1-carboxylic acid oxidase
  misc_feature (1)..(307): NCBI GI NO: 12001828 NR Description: 1-aminocyclopropane-1-carboxylate oxidase
  misc_feature (1)..(307): NCBI GI NO: 25452792 NR Description: 1-aminocyclopropane-1-carboxylate oxidase
  misc_feature (1)..(305): NCBI GI NO: 7433217 NR Description: 1-aminocyclopropane-1-carboxylate oxidase (EC1
  misc_feature (1)..(305): NCBI GI NO: 15220770 NR Description: 1-aminocyclopropane-1-carboxylate oxidase
  misc_feature (1)..(305): NCBI GI NO: 25285704 NR Description: 1-aminocyclopropane-1-carboxylate oxidase (EC1
MAIPVIDFSKINGEEREKTLSEIAKACEEWGFFQLVNHGIPLELLNKVKKLASDCYKTEREEAFKTSTPVKLLNELLEKNSGEKLENVDWEDVFTLLDHNQNEWPSNTSGLKETMVEYREEVRKLASKMMEVMDENLGLPKGYIKKAFNEGMEDGEETAFFGTKVSHYPPCPHPELVNGLRSHTDAGGVVLLFQDDEYDGLQVLKDGEWIDVQPMPNAIVINTGDQIEVLSNGRYKSAWHRVLAREEGNRRSIASFYNPSYKAAIGPAAEEGSEKKYPKFVFGDYMDVYANQKFMPKEPRFLAVKTL

SEQ ID NO: 20297 - protein, 193 aa, Zea mays subsp. mays
  peptide (1)..(193): Ceres Seq. ID no. 14309164
  misc_feature (45)..(145): Pfam Name: II Pfam Description: 2OG-Fe
  misc_feature (1)..(193): NCBI GI NO: 18411485 NR Description: 1-aminocyclopropane-1-carboxylate oxidase
  misc_feature (1)..(193): NCBI GI NO: 21555054 NR Description: 1-aminocyclopropane-1-carboxylate oxidase
  misc_feature (1)..(193): NCBI GI NO: 25285689 NR Description: hypothetical protein F2P24.4
  misc_feature (1)..(193): NCBI GI NO: 28949891 NR Description: 1-aminocyclopropane-1-carboxylic acid oxidase
  misc_feature (1)..(193): NCBI GI NO: 27371996 NR Description: 1-aminocyclopropane-1-carboxylic acid oxidase
  misc_feature (1)..(193): NCBI GI NO: 12001828 NR Description: 1-aminocyclopropane-1-carboxylate oxidase
  misc_feature (1)..(193): NCBI GI NO: 25452792 NR Description: 1-aminocyclopropane-1-carboxylate oxidase
  misc_feature (1)..(191): NCBI GI NO: 7433217 NR Description: 1-aminocyclopropane-1-carboxylate oxidase (EC1
  misc_feature (1)..(191): NCBI GI NO: 15220770 NR Description: 1-aminocyclopropane-1-carboxylate oxidase
  misc_feature (1)..(191): NCBI GI NO: 25285704 NR Description: 1-aminocyclopropane-1-carboxylate oxidase (EC1
MVEYREEVRKLASKMMEVMDENLGLPKGYIKKAFNEGMEDGEETAFFGTKVSHYPPCPHPELVNGLRSHTDAGGVVLLFQDDEYDGLQVLKDGEWIDVQPMPNAIVINTGDQIEVLSNGRYKSAWHRVLAREEGNRRSIASFYNPSYKAAIGPAAEEGSEKKYPKFVFGDYMDVYANQKFMPKEPRFLAVKTL

SEQ ID NO: 20298 - protein, 179 aa, Zea mays subsp. mays
  peptide (1)..(179): Ceres Seq. ID no. 14309165
  misc_feature (31)..(131): Pfam Name: II Pfam Description: 2OG-Fe
  misc_feature (1)..(179): NCBI GI NO: 18411485 NR Description: 1-aminocyclopropane-1-carboxylate oxidase
  misc_feature (1)..(179): NCBI GI NO: 21555054 NR Description: 1-aminocyclopropane-1-carboxylate oxidase
  misc_feature (1)..(179): NCBI GI NO: 25285689 NR Description: hypothetical protein F2P24.4
  misc_feature (1)..(179): NCBI GI NO: 28949891 NR Description: 1-aminocyclopropane-1-carboxylic acid oxidase
  misc_feature (1)..(179): NCBI GI NO: 27371996 NR Description: 1-aminocyclopropane-1-carboxylic acid oxidase
  misc_feature (1)..(179): NCBI GI NO: 12001828 NR Description: 1-aminocyclopropane-1-carboxylate oxidase
  misc_feature (1)..(179): NCBI GI NO: 25452792 NR Description: 1-aminocyclopropane-1-carboxylate oxidase
  misc_feature (1)..(177): NCBI GI NO: 7433217 NR Description: 1-aminocyclopropane-1-carboxylate oxidase (EC1
  misc_feature (1)..(177): NCBI GI NO: 15220770 NR Description: 1-aminocyclopropane-1-carboxylate oxidase
  misc_feature (1)..(177): NCBI GI NO: 25285704 NR Description: 1-aminocyclopropane-1-carboxylate oxidase (EC1
MMEVMDENLGLPKGYIKKAFNEGMEDGEETAFFGTKVSHYPPCPHPELVNGLRSHTDAGGVVLLFQDDEYDGLQVLKDGEWIDVQPMPNAIVINTGDQIEVLSNGRYKSAWHRVLAREEGNRRSIASFYNPSYKAAIGPAAEEGSEKKYPKFVFGDYMDVYANQKFMPKEPRFLAVKTL

SEQ ID NO: 20299 - DNA, 493 bp, Zea mays subsp. mays
  misc_feature (1)..(493): Ceres Seq. ID no. 14309158
atattatattaaacacagtaaaaattcaaacaacttaacatatacaaataattaactagacatgaagatcatggtcttgacactcatggttttcgtcatacttctgacattgtttccggctccaaacgaagcggcagacacaaatgtggaagcagcatgtgacccaaagcagcttcagccttgcctggccgcgattactggaggaggacagccctcgggtgactgttgtgcaaagctgaaggagcaacaaccatgcttgtgtgggttttctaagaaccctgcttttgctcagtacattagctctcccaactctcgcaaagtcctaaccgcttgtggtattccttacccaagttgttaaaactcttaagagtttttacaaataaataaataacgagtaaggaagatgaataaattatatctagctgttttttatgaaataaaataaccgttagtatgtaatgtttatatggttaaataaagtttaccttctcat

SEQ ID NO: 20300 - protein, 98 aa, Zea mays subsp. mays
  peptide (1)..(98): Ceres Seq. ID no. 14309159
  misc_feature (33)..(98): Pfam Name: Pfam Description:  Protease inhibitor/seed storage/LTP family
  misc_feature (13)..(98): NCBI GI NO: 7488524 NR Description: lipid transfer like protein - turnip (fragment)
  misc_feature (1)..(98): NCBI GI NO: 15219758 NR Description: lipid transfer protein family
  misc_feature (1)..(98): NCBI GI NO: 18421731 NR Description: protease inhibitor/seed storage/lipid transfer
  misc_feature (1)..(98): NCBI GI NO: 21555147 NR Description: lipid transfer-like protein [Arabidopsis thaliana]
  misc_feature (1)..(98): NCBI GI NO: 3183088 NR Description: Probable nonspecific lipid-transfer protein AKCS9precursor
  misc_feature (1)..(98): NCBI GI NO: 32395583 NR Description: seed specific protein Bn15D80B [Brassica napus]
  misc_feature (1)..(98): NCBI GI NO: 18402345 NR Description: protease inhibitor/seed storage/lipid transfer
  misc_feature (1)..(98): NCBI GI NO: 15229614 NR Description: protease inhibitor/seed storage/lipid transfer
  misc_feature (1)..(98): NCBI GI NO: 15240847 NR Description: protease inhibitor/seed storage/lipid transfer
  misc_feature (1)..(98): NCBI GI NO: 543565 NR Description: hypothetical 10.0K protein - Zinnia elegans
MKIMVLTLMVFVILLTLFPAPNEAADTNVEAACDPKQLQPCLAAITGGGQPSGDCCAKLKEQQPCLCGFSKNPAFAQYISSPNSRKVLTACGIPYPSC

SEQ ID NO: 20301 - protein, 95 aa, Zea mays subsp. mays
  peptide (1)..(95): Ceres Seq. ID no. 14309160
  misc_feature (30)..(95): Pfam Name: Pfam Description:  Protease inhibitor/seed storage/LTP family
  misc_feature (10)..(95): NCBI GI NO: 7488524 NR Description: lipid transfer like protein - turnip (fragment)
  misc_feature (1)..(95): NCBI GI NO: 15219758 NR Description: lipid transfer protein family
  misc_feature (1)..(95): NCBI GI NO: 18421731 NR Description: protease inhibitor/seed storage/lipid transfer
  misc_feature (1)..(95): NCBI GI NO: 21555147 NR Description: lipid transfer-like protein [Arabidopsis thaliana]
  misc_feature (1)..(95): NCBI GI NO: 3183088 NR Description: Probable nonspecific lipid-transfer protein AKCS9precursor
  misc_feature (1)..(95): NCBI GI NO: 32395583 NR Description: seed specific protein Bn15D80B [Brassica napus]
  misc_feature (1)..(95): NCBI GI NO: 18402345 NR Description: protease inhibitor/seed storage/lipid transfer
  misc_feature (1)..(95): NCBI GI NO: 15229614 NR Description: protease inhibitor/seed storage/lipid transfer
  misc_feature (1)..(95): NCBI GI NO: 15240847 NR Description: protease inhibitor/seed storage/lipid transfer
  misc_feature (1)..(95): NCBI GI NO: 543565 NR Description: hypothetical 10.0K protein - Zinnia elegans
MVLTLMVFVILLTLFPAPNEAADTNVEAACDPKQLQPCLAAITGGGQPSGDCCAKLKEQQPCLCGFSKNPAFAQYISSPNSRKVLTACGIPYPSC

SEQ ID NO: 20302 - protein, 90 aa, Zea mays subsp. mays
  peptide (1)..(90): Ceres Seq. ID no. 14309161
  misc_feature (25)..(90): Pfam Name: Pfam Description:  Protease inhibitor/seed storage/LTP family
  misc_feature (5)..(90): NCBI GI NO: 7488524 NR Description: lipid transfer like protein - turnip (fragment)
  misc_feature (1)..(90): NCBI GI NO: 15219758 NR Description: lipid transfer protein family
  misc_feature (1)..(90): NCBI GI NO: 18421731 NR Description: protease inhibitor/seed storage/lipid transfer
  misc_feature (1)..(90): NCBI GI NO: 21555147 NR Description: lipid transfer-like protein [Arabidopsis thaliana]
  misc_feature (1)..(90): NCBI GI NO: 3183088 NR Description: Probable nonspecific lipid-transfer protein AKCS9precursor
  misc_feature (1)..(90): NCBI GI NO: 32395583 NR Description: seed specific protein Bn15D80B [Brassica napus]
  misc_feature (1)..(90): NCBI GI NO: 18402345 NR Description: protease inhibitor/seed storage/lipid transfer
  misc_feature (1)..(90): NCBI GI NO: 15229614 NR Description: protease inhibitor/seed storage/lipid transfer
  misc_feature (1)..(90): NCBI GI NO: 15240847 NR Description: protease inhibitor/seed storage/lipid transfer
  misc_feature (1)..(90): NCBI GI NO: 543565 NR Description: hypothetical 10.0K protein - Zinnia elegans
MVFVILLTLFPAPNEAADTNVEAACDPKQLQPCLAAITGGGQPSGDCCAKLKEQQPCLCGFSKNPAFAQYISSPNSRKVLTACGIPYPSC

SEQ ID NO: 20303 - DNA, 719 bp, Zea mays subsp. mays
  misc_feature (1)..(719): Ceres Seq. ID no. 14309154
aagagataaagaaaataaaacttcacaagacagaacacagagagagagagatgagccgttgctgctctcttgggctctgtgccccgaatgcgttgtctctttcttcaacccctcgcagtgtcaaagctcctctctctattacatctcacaccaaacccatctctaacaccgattctcttcttcataatattgccaagatgagagcaaaggctggtgacttctttggagcaaagaagacaatctttgcagctcaactcgggacagttcttgccacgattgatcacccggccttggcaataactggagtcaaccacgagcaggaactgagcagcgtcgtgctcgatatcagtatcatatcggtctggtacttcctagtaatgccaccaattatcatgaactggctgagagtaagatggtacagaaggaagttcttcgagatgtatctacagttcatgtgcgtcttcatgttcttccccgggctacttctatgggcaccatttctcaatttcagaaagttcccaagagatccgtctatgaagtatccttgggacaaaccaaaagacccttccactatcaagaacggttaccttaagtacccatttgctcagccagaagattatgactactaaaatcttgatttacagaaagtttgttatatatatcttgtgactgtatatactcttcttgcctactcaggcttaaggctctatattcaatat

SEQ ID NO: 20304 - protein, 208 aa, Zea mays subsp. mays
  peptide (1)..(208): Ceres Seq. ID no. 14309155
  misc_feature (17)..(207): NCBI GI NO: 15223241 NR Description: expressed protein [Arabidopsis thaliana]
  misc_feature (17)..(159): NCBI GI NO: 25373317 NR Description: hypothetical protein F15H11.1
  misc_feature (122)..(174): NCBI GI NO: 22298248 NR Description: NADH dehydrogenase subunit
  misc_feature (106)..(170): NCBI GI NO: 33866055 NR Description: possible inorganic carbon transport protein
  misc_feature (109)..(170): NCBI GI NO: 33861127 NR Description: NADH dehydrogenase subunit NdhL (ndhL)
EIKKIKLHKTEHREREMSRCCSLGLCAPNALSLSSTPRSVKAPLSITSHTKPISNTDSLLHNIAKMRAKAGDFFGAKKTIFAAQLGTVLATIDHPALAITGVNHEQELSSVVLDISIISVWYFLVMPPIIMNWLRVRWYRRKFFEMYLQFMCVFMFFPGLLLWAPFLNFRKFPRDPSMKYPWDKPKDPSTIKNGYLKYPFAQPEDYDY

SEQ ID NO: 20305 - protein, 192 aa, Zea mays subsp. mays
  peptide (1)..(192): Ceres Seq. ID no. 14309156
  misc_feature (1)..(191): NCBI GI NO: 15223241 NR Description: expressed protein [Arabidopsis thaliana]
  misc_feature (1)..(143): NCBI GI NO: 25373317 NR Description: hypothetical protein F15H11.1
  misc_feature (106)..(158): NCBI GI NO: 22298248 NR Description: NADH dehydrogenase subunit
  misc_feature (90)..(154): NCBI GI NO: 33866055 NR Description: possible inorganic carbon transport protein
  misc_feature (93)..(154): NCBI GI NO: 33861127 NR Description: NADH dehydrogenase subunit NdhL (ndhL)
MSRCCSLGLCAPNALSLSSTPRSVKAPLSITSHTKPISNTDSLLHNIAKMRAKAGDFFGAKKTIFAAQLGTVLATIDHPALAITGVNHEQELSSVVLDISIISVWYFLVMPPIIMNWLRVRWYRRKFFEMYLQFMCVFMFFPGLLLWAPFLNFRKFPRDPSMKYPWDKPKDPSTIKNGYLKYPFAQPEDYDY

SEQ ID NO: 20306 - protein, 143 aa, Zea mays subsp. mays
  peptide (1)..(143): Ceres Seq. ID no. 14309157
  misc_feature (1)..(142): NCBI GI NO: 15223241 NR Description: expressed protein [Arabidopsis thaliana]
  misc_feature (1)..(94): NCBI GI NO: 25373317 NR Description: hypothetical protein F15H11.1
  misc_feature (57)..(109): NCBI GI NO: 22298248 NR Description: NADH dehydrogenase subunit
  misc_feature (41)..(105): NCBI GI NO: 33866055 NR Description: possible inorganic carbon transport protein
  misc_feature (44)..(105): NCBI GI NO: 33861127 NR Description: NADH dehydrogenase subunit NdhL (ndhL)
MRAKAGDFFGAKKTIFAAQLGTVLATIDHPALAITGVNHEQELSSVVLDISIISVWYFLVMPPIIMNWLRVRWYRRKFFEMYLQFMCVFMFFPGLLLWAPFLNFRKFPRDPSMKYPWDKPKDPSTIKNGYLKYPFAQPEDYDY

SEQ ID NO: 20307 - DNA, 618 bp, Zea mays subsp. mays
  misc_feature (1)..(618): Ceres Seq. ID no. 15174406
acccaaatatcttacttgtttacatcttcttttgcaaaccaacagaaacactaatagaaaaatggccggtgtaatgaagttggcatgcttggtcttggcctgcatgattgtggcaggtccgatcacagcgaacgcagctatgacctgtggcaccgttaacagcaacgtggcaccgtgcattggctacataacccaaggtggaccccttcccggagcgtgctgcaccggtgttagtaaacttaacagcatggcccgtacaactccggaccgtcagcaagcttgtcgttgccttaaaactgctgctagcgccttaggccctaatctcaacgctggccgtgcagctggaattcccaaggcatgtggagtcagtgttcctttcccaatcagcaccaacaccaactgcaacatcgtgaaatgagcgacagtgtgatgaagcttcaggggacgtttcgaatattataatatggatcagaatattaaataagatatgttcgaatgcatgttttaaaaatgttttataatttcctttttttttaatatggtgatcctatattcctatgaactggtcgtttgtactatgttatcgaacaacgttatatgaaattcagatttgaagtt

SEQ ID NO: 20308 - protein, 138 aa, Zea mays subsp. mays
  peptide (1)..(138): Ceres Seq. ID no. 15174407
  misc_feature (49)..(134): Pfam Name: Pfam Description:  Protease inhibitor/seed storage/LTP family
  misc_feature (21)..(138): NCBI GI NO: 11273805 NR Description: lipid transfer protein [imported] - wild cabbage
  misc_feature (21)..(138): NCBI GI NO: 2497738 NR Description: NONSPECIFIC LIPID-TRANSFER PROTEIN A PRECURSOR
  misc_feature (21)..(138): NCBI GI NO: 7438295 NR Description: lipid transfer protein wax9C - broccoli
  misc_feature (21)..(138): NCBI GI NO: 15224899 NR Description: nonspecific lipid transfer protein 1 (LTP 1)
  misc_feature (21)..(138): NCBI GI NO: 2497736 NR Description: NONSPECIFIC LIPID-TRANSFER PROTEIN 2 PRECURSOR
  misc_feature (21)..(138): NCBI GI NO: 2497735 NR Description: NONSPECIFIC LIPID-TRANSFER PROTEIN 1 PRECURSOR
  misc_feature (21)..(138): NCBI GI NO: 2497737 NR Description: NONSPECIFIC LIPID-TRANSFER PROTEIN 3 PRECURSOR
  misc_feature (21)..(138): NCBI GI NO: 2497739 NR Description: NONSPECIFIC LIPID-TRANSFER PROTEIN B PRECURSOR
  misc_feature (21)..(138): NCBI GI NO: 5777389 NR Description: non-specific lipid transfer protein
  misc_feature (21)..(138): NCBI GI NO: 15224898 NR Description: nonspecific lipid transfer protein 2 (LTP 2)
PKYLTCLHLLLQTNRNTNRKMAGVMKLACLVLACMIVAGPITANAAMTCGTVNSNVAPCIGYITQGGPLPGACCTGVSKLNSMARTTPDRQQACRCLKTAASALGPNLNAGRAAGIPKACGVSVPFPISTNTNCNIVK

SEQ ID NO: 20309 - protein, 118 aa, Zea mays subsp. mays
  peptide (1)..(118): Ceres Seq. ID no. 15174408
  misc_feature (29)..(114): Pfam Name: Pfam Description:  Protease inhibitor/seed storage/LTP family
  misc_feature (1)..(118): NCBI GI NO: 11273805 NR Description: lipid transfer protein [imported] - wild cabbage
  misc_feature (1)..(118): NCBI GI NO: 2497738 NR Description: NONSPECIFIC LIPID-TRANSFER PROTEIN A PRECURSOR
  misc_feature (1)..(118): NCBI GI NO: 7438295 NR Description: lipid transfer protein wax9C - broccoli
  misc_feature (1)..(118): NCBI GI NO: 15224899 NR Description: nonspecific lipid transfer protein 1 (LTP 1)
  misc_feature (1)..(118): NCBI GI NO: 2497736 NR Description: NONSPECIFIC LIPID-TRANSFER PROTEIN 2 PRECURSOR
  misc_feature (1)..(118): NCBI GI NO: 2497735 NR Description: NONSPECIFIC LIPID-TRANSFER PROTEIN 1 PRECURSOR
  misc_feature (1)..(118): NCBI GI NO: 2497737 NR Description: NONSPECIFIC LIPID-TRANSFER PROTEIN 3 PRECURSOR
  misc_feature (1)..(118): NCBI GI NO: 2497739 NR Description: NONSPECIFIC LIPID-TRANSFER PROTEIN B PRECURSOR
  misc_feature (1)..(118): NCBI GI NO: 5777389 NR Description: non-specific lipid transfer protein
  misc_feature (1)..(118): NCBI GI NO: 15224898 NR Description: nonspecific lipid transfer protein 2 (LTP 2)
MAGVMKLACLVLACMIVAGPITANAAMTCGTVNSNVAPCIGYITQGGPLPGACCTGVSKLNSMARTTPDRQQACRCLKTAASALGPNLNAGRAAGIPKACGVSVPFPISTNTNCNIVK

SEQ ID NO: 20310 - protein, 114 aa, Zea mays subsp. mays
  peptide (1)..(114): Ceres Seq. ID no. 15174409
  misc_feature (25)..(110): Pfam Name: Pfam Description:  Protease inhibitor/seed storage/LTP family
  misc_feature (1)..(114): NCBI GI NO: 11273805 NR Description: lipid transfer protein [imported] - wild cabbage
  misc_feature (1)..(114): NCBI GI NO: 2497738 NR Description: NONSPECIFIC LIPID-TRANSFER PROTEIN A PRECURSOR
  misc_feature (1)..(114): NCBI GI NO: 7438295 NR Description: lipid transfer protein wax9C - broccoli
  misc_feature (1)..(114): NCBI GI NO: 15224899 NR Description: nonspecific lipid transfer protein 1 (LTP 1)
  misc_feature (1)..(114): NCBI GI NO: 2497736 NR Description: NONSPECIFIC LIPID-TRANSFER PROTEIN 2 PRECURSOR
  misc_feature (1)..(114): NCBI GI NO: 2497735 NR Description: NONSPECIFIC LIPID-TRANSFER PROTEIN 1 PRECURSOR
  misc_feature (1)..(114): NCBI GI NO: 2497737 NR Description: NONSPECIFIC LIPID-TRANSFER PROTEIN 3 PRECURSOR
  misc_feature (1)..(114): NCBI GI NO: 2497739 NR Description: NONSPECIFIC LIPID-TRANSFER PROTEIN B PRECURSOR
  misc_feature (1)..(114): NCBI GI NO: 5777389 NR Description: non-specific lipid transfer protein
  misc_feature (1)..(114): NCBI GI NO: 15224898 NR Description: nonspecific lipid transfer protein 2 (LTP 2)
MKLACLVLACMIVAGPITANAAMTCGTVNSNVAPCIGYITQGGPLPGACCTGVSKLNSMARTTPDRQQACRCLKTAASALGPNLNAGRAAGIPKACGVSVPFPISTNTNCNIVK

SEQ ID NO: 20311 - DNA, 1241 bp, Zea mays subsp. mays
  misc_feature (1)..(1241): Ceres Seq. ID no. 15178884
atcacaaagctaaatacgaaagaaacatggggttcttgggtaagagtatattgtcgagtctccttgcaatatggttcttcacttcctgtgctttcactgaagaagtgaaccatgttaaccaaacgccttcctctgctcctgctccatctccttaccaccacggccaccaccacccacatcctccccatcaccaccaccctcaccctcacccaccggcaaaagcccctgtcaagccgccggtttctccaccttctaaacctccggttaagcctccagtttaccccccaaccaaatccccggttaagcccccaactaaacctccggttaagccaccagtttccccaccagcaaaacctcctgttaaacctccggtttaccctccgaccaaagctccagttaagcccccagtcaaacctccggttaagccaccagtttcaccaccggccaaacctccaataaagccaccagtttcaccaccggccaaacctccggttaagcccccggtttaccctccgaccaaagcccctgttaagcccccgaccaaagccccggctaagcctccggtctctcctccagccaaaccaccagtatcccctccagctaagccaccggtgaagccaccggtttacccgccaaaattcaacagaagcctaatcgcggttcagggtacggtcttctgcaaaagctgccagtacgcttctttcgattcactcattggcgccaaacccgttgaaggtgctcttgtgagactactgtgtaagagcaagaagaacatagtcgcggagaccaagacggacaagaacggatacttcttgttgttgggcccgaagacggtgacaaactacggtttcagaggatgtcgtgtgtatcttgtgaaatcaaaggactacaaatgcaataaagtgtcaaagctattcggtggagatgtcggtgccgtactcaagccggagaaaaggaaggggaaatctgcggtggtcattaatcagctcatctacggtatctttaacgttggaccgtttgcgttcgacccggtctgccccaaataaagatgatgatgatgctttgttactttcttgattatatcatgctcaaaagagttcgagggagacagagagttatgtctttatgcgttcgaattgtaatgttagctatagttttaagctaaatgcttgtgtttttatgaatgtgtccttaagagacgtcgtttgggtttcgtttgaataaaaatcgtcagctttaag

SEQ ID NO: 20312 - protein, 347 aa, Zea mays subsp. mays
  peptide (1)..(347): Ceres Seq. ID no. 15178885
  misc_feature (220)..(347): Pfam Name: Pfam Description:  Pollen proteins Ole e I family
  misc_feature (42)..(347): NCBI GI NO: 15217879 NR Description: prolin-rich protein -related
  misc_feature (9)..(211): NCBI GI NO: 15217879 NR Description: prolin-rich protein -related
  misc_feature (150)..(347): NCBI GI NO: 15226166 NR Description: proline-rich protein -related
  misc_feature (57)..(345): NCBI GI NO: 478673 NR Description: proline-rich protein precursor - kidney bean
  misc_feature (40)..(226): NCBI GI NO: 480109 NR Description: EPPT protein - hydromedusa
  misc_feature (40)..(211): NCBI GI NO: 480109 NR Description: EPPT protein - hydromedusa
  misc_feature (40)..(211): NCBI GI NO: 480109 NR Description: EPPT protein - hydromedusa
  misc_feature (40)..(211): NCBI GI NO: 480109 NR Description: EPPT protein - hydromedusa
  misc_feature (40)..(211): NCBI GI NO: 480109 NR Description: EPPT protein - hydromedusa
  misc_feature (40)..(211): NCBI GI NO: 480109 NR Description: EPPT protein - hydromedusa
HKAKYERNMGFLGKSILSSLLAIWFFTSCAFTEEVNHVNQTPSSAPAPSPYHHGHHHPHPPHHHHPHPHPPAKAPVKPPVSPPSKPPVKPPVYPPTKSPVKPPTKPPVKPPVSPPAKPPVKPPVYPPTKAPVKPPVKPPVKPPVSPPAKPPIKPPVSPPAKPPVKPPVYPPTKAPVKPPTKAPAKPPVSPPAKPPVSPPAKPPVKPPVYPPKFNRSLIAVQGTVFCKSCQYASFDSLIGAKPVEGALVRLLCKSKKNIVAETKTDKNGYFLLLGPKTVTNYGFRGCRVYLVKSKDYKCNKVSKLFGGDVGAVLKPEKRKGKSAVVINQLIYGIFNVGPFAFDPVCPK

SEQ ID NO: 20313 - protein, 339 aa, Zea mays subsp. mays
  peptide (1)..(339): Ceres Seq. ID no. 15178886
  misc_feature (212)..(339): Pfam Name: Pfam Description:  Pollen proteins Ole e I family
  misc_feature (34)..(339): NCBI GI NO: 15217879 NR Description: prolin-rich protein -related
  misc_feature (1)..(203): NCBI GI NO: 15217879 NR Description: prolin-rich protein -related
  misc_feature (142)..(339): NCBI GI NO: 15226166 NR Description: proline-rich protein -related
  misc_feature (49)..(337): NCBI GI NO: 478673 NR Description: proline-rich protein precursor - kidney bean
  misc_feature (32)..(218): NCBI GI NO: 480109 NR Description: EPPT protein - hydromedusa
  misc_feature (32)..(203): NCBI GI NO: 480109 NR Description: EPPT protein - hydromedusa
  misc_feature (32)..(203): NCBI GI NO: 480109 NR Description: EPPT protein - hydromedusa
  misc_feature (32)..(203): NCBI GI NO: 480109 NR Description: EPPT protein - hydromedusa
  misc_feature (32)..(203): NCBI GI NO: 480109 NR Description: EPPT protein - hydromedusa
  misc_feature (32)..(203): NCBI GI NO: 480109 NR Description: EPPT protein - hydromedusa
MGFLGKSILSSLLAIWFFTSCAFTEEVNHVNQTPSSAPAPSPYHHGHHHPHPPHHHHPHPHPPAKAPVKPPVSPPSKPPVKPPVYPPTKSPVKPPTKPPVKPPVSPPAKPPVKPPVYPPTKAPVKPPVKPPVKPPVSPPAKPPIKPPVSPPAKPPVKPPVYPPTKAPVKPPTKAPAKPPVSPPAKPPVSPPAKPPVKPPVYPPKFNRSLIAVQGTVFCKSCQYASFDSLIGAKPVEGALVRLLCKSKKNIVAETKTDKNGYFLLLGPKTVTNYGFRGCRVYLVKSKDYKCNKVSKLFGGDVGAVLKPEKRKGKSAVVINQLIYGIFNVGPFAFDPVCPK

SEQ ID NO: 20314 - DNA, 830 bp, Zea mays subsp. mays
  misc_feature (1)..(830): Ceres Seq. ID no. 14309148
ctgttctgtcttaaatcagagtttttgctcctttctccactcatctcttcgctagaaacaaaaaaaatggctttgcaaatgcagacctccactacgatcttcaaaaaccccacaccatctactgccgccgatgcgctcactggaagattcttcccagcaactgtcgcggttcgccgggaaacgttaacggcgtggcgtgaagtcatatgcagcagcggtggagttggagacgccgggaagaaaaaagcggtacctaactcgaactacgtagtgcctttggacaagttctcgtcctcttcctccatcactcggcctttgattgagatacttcgcgatctcaacaagaagatccctgataacatcgtcaagagccacgatcctggatccagtgctgcttcttctggctttatcccttggttccatgctaatcgtatgctcagcttctacgcacctggttggtgtggggaggttcgtgacgtcattttctcagagaatggtaatgtcactgttgtttatcgtcttaccattcgtggctctgatggtgaggcacaccgcgaatcgacagggacagtaacgatcactgatgatcacatcgaggatccagttgctgcagctgaggaaatggcattttgcagagcatgtgctcgatttggtctcggcttgtatctctatcacgaagagtaggcccgtgtacacttcaagtgtgcttaccgtttttggttgaacaagtctctatcaacttgttgagagacccttatgcgttctagaatgctaaaatatatgtaatgatgtctacaaacaaagttataataacattataagcatatgat

SEQ ID NO: 20315 - protein, 227 aa, Zea mays subsp. mays
  peptide (1)..(227): Ceres Seq. ID no. 14309149
  misc_feature (23)..(226): NCBI GI NO: 15238827 NR Description: expressed protein [Arabidopsis thaliana]
  misc_feature (23)..(226): NCBI GI NO: 21593360 NR Description: unknown [Arabidopsis thaliana]
  misc_feature (99)..(227): NCBI GI NO: 15224018 NR Description: expressed protein [Arabidopsis thaliana]
  misc_feature (64)..(182): NCBI GI NO: 27573357 NR Description: hypothetical protein
  misc_feature (99)..(227): NCBI GI NO: 9367245 NR Description: SnRK1-interacting protein 1
  misc_feature (99)..(227): NCBI GI NO: 34907336 NR Description: putative SnRK1-interacting protein 1
LFCLKSEFLLLSPLISSLETKKMALQMQTSTTIFKNPTPSTAADALTGRFFPATVAVRRETLTAWREVICSSGGVGDAGKKKAVPNSNYVVPLDKFSSSSSITRPLIEILRDLNKKIPDNIVKSHDPGSSAASSGFIPWFHANRMLSFYAPGWCGEVRDVIFSENGNVTVVYRLTIRGSDGEAHRESTGTVTITDDHIEDPVAAAEEMAFCRACARFGLGLYLYHEE

SEQ ID NO: 20316 - protein, 205 aa, Zea mays subsp. mays
  peptide (1)..(205): Ceres Seq. ID no. 14309150
  misc_feature (1)..(204): NCBI GI NO: 15238827 NR Description: expressed protein [Arabidopsis thaliana]
  misc_feature (1)..(204): NCBI GI NO: 21593360 NR Description: unknown [Arabidopsis thaliana]
  misc_feature (77)..(205): NCBI GI NO: 15224018 NR Description: expressed protein [Arabidopsis thaliana]
  misc_feature (42)..(160): NCBI GI NO: 27573357 NR Description: hypothetical protein
  misc_feature (77)..(205): NCBI GI NO: 9367245 NR Description: SnRK1-interacting protein 1
  misc_feature (77)..(205): NCBI GI NO: 34907336 NR Description: putative SnRK1-interacting protein 1
MALQMQTSTTIFKNPTPSTAADALTGRFFPATVAVRRETLTAWREVICSSGGVGDAGKKKAVPNSNYVVPLDKFSSSSSITRPLIEILRDLNKKIPDNIVKSHDPGSSAASSGFIPWFHANRMLSFYAPGWCGEVRDVIFSENGNVTVVYRLTIRGSDGEAHRESTGTVTITDDHIEDPVAAAEEMAFCRACARFGLGLYLYHEE

SEQ ID NO: 20317 - protein, 201 aa, Zea mays subsp. mays
  peptide (1)..(201): Ceres Seq. ID no. 14309151
  misc_feature (1)..(200): NCBI GI NO: 15238827 NR Description: expressed protein [Arabidopsis thaliana]
  misc_feature (1)..(200): NCBI GI NO: 21593360 NR Description: unknown [Arabidopsis thaliana]
  misc_feature (73)..(201): NCBI GI NO: 15224018 NR Description: expressed protein [Arabidopsis thaliana]
  misc_feature (38)..(156): NCBI GI NO: 27573357 NR Description: hypothetical protein
  misc_feature (73)..(201): NCBI GI NO: 9367245 NR Description: SnRK1-interacting protein 1
  misc_feature (73)..(201): NCBI GI NO: 34907336 NR Description: putative SnRK1-interacting protein 1
MQTSTTIFKNPTPSTAADALTGRFFPATVAVRRETLTAWREVICSSGGVGDAGKKKAVPNSNYVVPLDKFSSSSSITRPLIEILRDLNKKIPDNIVKSHDPGSSAASSGFIPWFHANRMLSFYAPGWCGEVRDVIFSENGNVTVVYRLTIRGSDGEAHRESTGTVTITDDHIEDPVAAAEEMAFCRACARFGLGLYLYHEE

SEQ ID NO: 20318 - DNA, 947 bp, Zea mays subsp. mays
  misc_feature (1)..(947): Ceres Seq. ID no. 15174396
ataacttgtttcttctcctctatcaaatcagatcaaaacttgtgtttcttgctcccaaaatattggataaatattctcataagttttgaaattgtgtttctttgttagcaaataaatatgagttgcaatggatgtagagttcttcgaaaaggttgcagcgaaacatgcatccttcgtccttgccttcaatggatcgaatccgccgagtcacaaggccacgctaccgtcttcgtggctaaattctttggccgtgccggtctaatgtcattcatctccgccgtacccgaaccaaaccgccctgctttgtttcagtcgttgttgtttgaagcgtgtgggaggacggtgaatccggttaacggagcggttggtatgttatggaccgggaactggcacgtgtgccaagcggcggttgaaactgttcttcgcggcggaactttacgacctatctcagatctacacgaatctccttcgttgaactcctcagatgagtctaccgagatctggcggatgcagcgtccagagggttccaggaaagaatctttggtcaaccgtaaacgatctaagaccgagcggtctgatccggaactgatccacgggttagctctaaccggtccggttgtcccggctccttttcttccaccgccgccgtttagcaaggcggttaatggggatcatccgggaagtccatcagaggagtctgtaacgacgacgtcgtgttatgaatatggaatcagcggcgatggatacggaaacaaaagagagagaaagttattaaacctttttgtttaaaaccgacgacgcaaactcttcgcactcagtttttttcgacggtcctttttagggcttttttttcggggtgaagccgcataattattggctaacataattattttctctatcgagaaatatgataattttggtgatataatactttgcggatgatgagt

SEQ ID NO: 20319 - protein, 223 aa, Zea mays subsp. mays
  peptide (1)..(223): Ceres Seq. ID no. 15174397
  misc_feature (2)..(107): Pfam Name: Pfam Description:  Protein of unknown function DUF260
  misc_feature (1)..(216): NCBI GI NO: 21592894 NR Description: unknown [Arabidopsis thaliana]
  misc_feature (1)..(216): NCBI GI NO: 15235604 NR Description: lateral organ boundaries (LOB) domain family
  misc_feature (1)..(153): NCBI GI NO: 21593577 NR Description: unknown [Arabidopsis thaliana]
  misc_feature (1)..(153): NCBI GI NO: 15240739 NR Description: lateral organ boundaries
  misc_feature (1)..(223): NCBI GI NO: 34394489 NR Description: putative lateral organ boundaries
  misc_feature (1)..(153): NCBI GI NO: 21553886 NR Description: unknown [Arabidopsis thaliana]
  misc_feature (1)..(153): NCBI GI NO: 15229644 NR Description: lateral organ boundaries
  misc_feature (1)..(164): NCBI GI NO: 15219829 NR Description: lateral organ boundaries (LOB) domain family
  misc_feature (1)..(222): NCBI GI NO: 40539088 NR Description: expressed protein
  misc_feature (1)..(123): NCBI GI NO: 34895540 NR Description: unnamed protein product
MSCNGCRVLRKGCSETCILRPCLQWIESAESQGHATVFVAKFFGRAGLMSFISAVPEPNRPALFQSLLFEACGRTVNPVNGAVGMLWTGNWHVCQAAVETVLRGGTLRPISDLHESPSLNSSDESTEIWRMQRPEGSRKESLVNRKRSKTERSDPELIHGLALTGPVVPAPFLPPPPFSKAVNGDHPGSPSEESVTTTSCYEYGISGDGYGNKRERKLLNLFV

SEQ ID NO: 20320 - protein, 175 aa, Zea mays subsp. mays
  peptide (1)..(175): Ceres Seq. ID no. 15174398
  misc_feature (1)..(59): Pfam Name: Pfam Description:  Protein of unknown function DUF260
  misc_feature (1)..(168): NCBI GI NO: 21592894 NR Description: unknown [Arabidopsis thaliana]
  misc_feature (1)..(168): NCBI GI NO: 15235604 NR Description: lateral organ boundaries (LOB) domain family
  misc_feature (1)..(105): NCBI GI NO: 21593577 NR Description: unknown [Arabidopsis thaliana]
  misc_feature (1)..(105): NCBI GI NO: 15240739 NR Description: lateral organ boundaries
  misc_feature (1)..(175): NCBI GI NO: 34394489 NR Description: putative lateral organ boundaries
  misc_feature (1)..(105): NCBI GI NO: 21553886 NR Description: unknown [Arabidopsis thaliana]
  misc_feature (1)..(105): NCBI GI NO: 15229644 NR Description: lateral organ boundaries
  misc_feature (1)..(116): NCBI GI NO: 15219829 NR Description: lateral organ boundaries (LOB) domain family
  misc_feature (1)..(174): NCBI GI NO: 40539088 NR Description: expressed protein
  misc_feature (1)..(75): NCBI GI NO: 34895540 NR Description: unnamed protein product
MSFISAVPEPNRPALFQSLLFEACGRTVNPVNGAVGMLWTGNWHVCQAAVETVLRGGTLRPISDLHESPSLNSSDESTEIWRMQRPEGSRKESLVNRKRSKTERSDPELIHGLALTGPVVPAPFLPPPPFSKAVNGDHPGSPSEESVTTTSCYEYGISGDGYGNKRERKLLNLFV

SEQ ID NO: 20321 - protein, 139 aa, Zea mays subsp. mays
  peptide (1)..(139): Ceres Seq. ID no. 15174399
  misc_feature (1)..(132): NCBI GI NO: 21592894 NR Description: unknown [Arabidopsis thaliana]
  misc_feature (1)..(132): NCBI GI NO: 15235604 NR Description: lateral organ boundaries (LOB) domain family
  misc_feature (1)..(69): NCBI GI NO: 21593577 NR Description: unknown [Arabidopsis thaliana]
  misc_feature (1)..(69): NCBI GI NO: 15240739 NR Description: lateral organ boundaries
  misc_feature (1)..(139): NCBI GI NO: 34394489 NR Description: putative lateral organ boundaries
  misc_feature (1)..(69): NCBI GI NO: 21553886 NR Description: unknown [Arabidopsis thaliana]
  misc_feature (1)..(69): NCBI GI NO: 15229644 NR Description: lateral organ boundaries
  misc_feature (1)..(80): NCBI GI NO: 15219829 NR Description: lateral organ boundaries (LOB) domain family
  misc_feature (1)..(138): NCBI GI NO: 40539088 NR Description: expressed protein
  misc_feature (1)..(39): NCBI GI NO: 34895540 NR Description: unnamed protein product
MLWTGNWHVCQAAVETVLRGGTLRPISDLHESPSLNSSDESTEIWRMQRPEGSRKESLVNRKRSKTERSDPELIHGLALTGPVVPAPFLPPPPFSKAVNGDHPGSPSEESVTTTSCYEYGISGDGYGNKRERKLLNLFV

SEQ ID NO: 20322 - DNA, 1041 bp, Zea mays subsp. mays
  misc_feature (1)..(1041): Ceres Seq. ID no. 15179463
atcatcatcaacagcagcagccataaacctaaacacctttcccattccaatagaaaagaaaaccttatggcctccaaggcgctctcttctttcacggctaagcccgctgtgtcactgctcccccatggcgtctcctcctctgcctctccgtctgttacgtctctgagcttctcaaggcatactggcggcagaggagtggtggttgcgtcctcaacggtagacacaaacaatatgccgatgacaggagtggtgttccagccgttcgaggaggtgaagaaagccgatctggccattccaatcacatctaatgcctccctcgctcgccagaggtatgccgactcttgcgaggctgccattaacgagcaaatcaatgtggaatacaacgtgtcgtatgtttaccattcaatgtacgcctacttcgacagagacaacgttgctctcatgggtcttgccaaatttttcaaggaatcaagtgatgaagaaagagagcacgctgagaagtttatggagtaccagaacaaaagaggaggaagagtgacactccaccctatcgtctcccctatctctgattttgaacatgctgaaaaaggagatgccttatatgcaatggagttggccctgtctctggagaaactgaccaacgagaagcttctaaaccttcacagagtggcatcagagaacaatgacccacagttagctgattttgttgagagtgagtttcttggagagcagattaaagcaatcaagaagatctcagacttcatcacccagctaaggatggttggcaaaggacacggagtttggcacttcgaccagatgcttctgaactagactgggaaattcactttatgctctgggagattaaaagagaagtaaaccgaagaagattgattctgtaaaagtttctagagtactggaagttattattggagcaaaataagattgtagtagtaataatagtaagcttttgtgtgttaagatgatgttttttttgtaataatttcctaagtttaatctatgaagaaggtttttttttgtttc

SEQ ID NO: 20323 - protein, 276 aa, Zea mays subsp. mays
  peptide (1)..(276): Ceres Seq. ID no. 15179464
  misc_feature (116)..(261): Pfam Name: Pfam Description:  Ferritin-like domain
  misc_feature (23)..(276): NCBI GI NO: 29839389 NR Description: Ferritin 1, chloroplast precursor
  misc_feature (23)..(276): NCBI GI NO: 15241018 NR Description: ferritin 1 precursor [Arabidopsis thaliana]
  misc_feature (23)..(276): NCBI GI NO: 21536745 NR Description: ferritin 1 precursor [Arabidopsis thaliana]
  misc_feature (23)..(276): NCBI GI NO: 29839387 NR Description: Ferritin 3, chloroplast precursor (SFerH-3)
  misc_feature (29)..(276): NCBI GI NO: 120532 NR Description: Ferritin 1, chloroplast precursor
  misc_feature (29)..(276): NCBI GI NO: 170078 NR Description: ferritin light chain
  misc_feature (29)..(276): NCBI GI NO: 29839253 NR Description: Ferritin, chloroplast precursor (Apf1)
  misc_feature (40)..(276): NCBI GI NO: 120531 NR Description: Ferritin, chloroplast precursor
  misc_feature (22)..(276): NCBI GI NO: 4469288 NR Description: ferritin [Medicago sativa]
  misc_feature (40)..(276): NCBI GI NO: 21027 NR Description: ferritin [Phaseolus vulgaris]
IIINSSSHKPKHLSHSNRKENLMASKALSSFTAKPAVSLLPHGVSSSASPSVTSLSFSRHTGGRGVVVASSTVDTNNMPMTGVVFQPFEEVKKADLAIPITSNASLARQRYADSCEAAINEQINVEYNVSYVYHSMYAYFDRDNVALMGLAKFFKESSDEEREHAEKFMEYQNKRGGRVTLHPIVSPISDFEHAEKGDALYAMELALSLEKLTNEKLLNLHRVASENNDPQLADFVESEFLGEQIKAIKKISDFITQLRMVGKGHGVWHFDQMLLN

SEQ ID NO: 20324 - protein, 254 aa, Zea mays subsp. mays
  peptide (1)..(254): Ceres Seq. ID no. 15179465
  misc_feature (94)..(239): Pfam Name: Pfam Description:  Ferritin-like domain
  misc_feature (1)..(254): NCBI GI NO: 29839389 NR Description: Ferritin 1, chloroplast precursor
  misc_feature (1)..(254): NCBI GI NO: 15241018 NR Description: ferritin 1 precursor [Arabidopsis thaliana]
  misc_feature (1)..(254): NCBI GI NO: 21536745 NR Description: ferritin 1 precursor [Arabidopsis thaliana]
  misc_feature (1)..(254): NCBI GI NO: 29839387 NR Description: Ferritin 3, chloroplast precursor (SFerH-3)
  misc_feature (7)..(254): NCBI GI NO: 120532 NR Description: Ferritin 1, chloroplast precursor
  misc_feature (7)..(254): NCBI GI NO: 170078 NR Description: ferritin light chain
  misc_feature (7)..(254): NCBI GI NO: 29839253 NR Description: Ferritin, chloroplast precursor (Apf1)
  misc_feature (18)..(254): NCBI GI NO: 120531 NR Description: Ferritin, chloroplast precursor
  misc_feature (1)..(254): NCBI GI NO: 4469288 NR Description: ferritin [Medicago sativa]
  misc_feature (18)..(254): NCBI GI NO: 21027 NR Description: ferritin [Phaseolus vulgaris]
MASKALSSFTAKPAVSLLPHGVSSSASPSVTSLSFSRHTGGRGVVVASSTVDTNNMPMTGVVFQPFEEVKKADLAIPITSNASLARQRYADSCEAAINEQINVEYNVSYVYHSMYAYFDRDNVALMGLAKFFKESSDEEREHAEKFMEYQNKRGGRVTLHPIVSPISDFEHAEKGDALYAMELALSLEKLTNEKLLNLHRVASENNDPQLADFVESEFLGEQIKAIKKISDFITQLRMVGKGHGVWHFDQMLLN

SEQ ID NO: 20325 - protein, 199 aa, Zea mays subsp. mays
  peptide (1)..(199): Ceres Seq. ID no. 15179466
  misc_feature (39)..(184): Pfam Name: Pfam Description:  Ferritin-like domain
  misc_feature (1)..(199): NCBI GI NO: 29839389 NR Description: Ferritin 1, chloroplast precursor
  misc_feature (1)..(199): NCBI GI NO: 15241018 NR Description: ferritin 1 precursor [Arabidopsis thaliana]
  misc_feature (1)..(199): NCBI GI NO: 21536745 NR Description: ferritin 1 precursor [Arabidopsis thaliana]
  misc_feature (1)..(199): NCBI GI NO: 29839387 NR Description: Ferritin 3, chloroplast precursor (SFerH-3)
  misc_feature (1)..(199): NCBI GI NO: 120532 NR Description: Ferritin 1, chloroplast precursor
  misc_feature (1)..(199): NCBI GI NO: 170078 NR Description: ferritin light chain
  misc_feature (1)..(199): NCBI GI NO: 29839253 NR Description: Ferritin, chloroplast precursor (Apf1)
  misc_feature (1)..(199): NCBI GI NO: 120531 NR Description: Ferritin, chloroplast precursor
  misc_feature (1)..(199): NCBI GI NO: 4469288 NR Description: ferritin [Medicago sativa]
  misc_feature (1)..(199): NCBI GI NO: 21027 NR Description: ferritin [Phaseolus vulgaris]
MPMTGVVFQPFEEVKKADLAIPITSNASLARQRYADSCEAAINEQINVEYNVSYVYHSMYAYFDRDNVALMGLAKFFKESSDEEREHAEKFMEYQNKRGGRVTLHPIVSPISDFEHAEKGDALYAMELALSLEKLTNEKLLNLHRVASENNDPQLADFVESEFLGEQIKAIKKISDFITQLRMVGKGHGVWHFDQMLLN

SEQ ID NO: 20326 - DNA, 940 bp, Zea mays subsp. mays
  misc_feature (1)..(940): Ceres Seq. ID no. 14309137
aattaaagttttcccgaagaagaagtcctttttccttcattttatctttctctctctctcttttgtttttttttttgtaatgaaatgggagagatggagatggaagaaatcgaagcagttctcgagaaaatctgcgatctgcacgacaagctcagcgacgagattcacttgatttcgcgctctcacttcctcaaatcggttaaaccagctaccagatcggagaagaggaagagccacggcttaaactccgccgaagagaagccacagggatacgtcttcatcaagggcttccccgttaacgataacgacgcagcgattcaagaggccaagagtcttaacgcgattcgaaccgcgcttgagcacctcgaagaccagctcgagttcttccatacgatacatacacagcaacgaacagagagggatgtagcagttgctcggcttgaacaaagcaggatgttactagcgaagagattggctgaacaccacggcaagagctacggagttctagatgaaactcttgccttcgttgggagcattaaaacctccacaaattttgtttacaactcctctccaaacacagccggggcatactctactcctcctgatggaccaaagtcgaactttgtaatcaacgcctttgcgtggactttcgggttggccaaaagagcacttggattcaaccatgtgagaggcgtactaggaaacgccgctatattcgctataagcatggtcgctatgctacatcttcagcaagttgcttctactgaacatcatcgtctagggaagaaacagaggaaaacatacagaagagagatgtcttcatctgacataagcttggaccacttggacgtcatgatggctcgtggttaaagattaaagaccagatatcgaacttgtctacacgtgatactctgacttgcagccatgggaatataatacc

SEQ ID NO: 20327 - protein, 261 aa, Zea mays subsp. mays
  peptide (1)..(261): Ceres Seq. ID no. 14309138
  misc_feature (1)..(261): NCBI GI NO: 15238704 NR Description: expressed protein [Arabidopsis thaliana]
  misc_feature (4)..(261): NCBI GI NO: 21592900 NR Description: unknown [Arabidopsis thaliana]
  misc_feature (4)..(261): NCBI GI NO: 34904152 NR Description: P0417G05.19
MGEMEMEEIEAVLEKICDLHDKLSDEIHLISRSHFLKSVKPATRSEKRKSHGLNSAEEKPQGYVFIKGFPVNDNDAAIQEAKSLNAIRTALEHLEDQLEFFHTIHTQQRTERDVAVARLEQSRMLLAKRLAEHHGKSYGVLDETLAFVGSIKTSTNFVYNSSPNTAGAYSTPPDGPKSNFVINAFAWTFGLAKRALGFNHVRGVLGNAAIFAISMVAMLHLQQVASTEHHRLGKKQRKTYRREMSSSDISLDHLDVMMARG

SEQ ID NO: 20328 - protein, 258 aa, Zea mays subsp. mays
  peptide (1)..(258): Ceres Seq. ID no. 14309139
  misc_feature (1)..(258): NCBI GI NO: 15238704 NR Description: expressed protein [Arabidopsis thaliana]
  misc_feature (1)..(258): NCBI GI NO: 21592900 NR Description: unknown [Arabidopsis thaliana]
  misc_feature (1)..(258): NCBI GI NO: 34904152 NR Description: P0417G05.19
MEMEEIEAVLEKICDLHDKLSDEIHLISRSHFLKSVKPATRSEKRKSHGLNSAEEKPQGYVFIKGFPVNDNDAAIQEAKSLNAIRTALEHLEDQLEFFHTIHTQQRTERDVAVARLEQSRMLLAKRLAEHHGKSYGVLDETLAFVGSIKTSTNFVYNSSPNTAGAYSTPPDGPKSNFVINAFAWTFGLAKRALGFNHVRGVLGNAAIFAISMVAMLHLQQVASTEHHRLGKKQRKTYRREMSSSDISLDHLDVMMARG

SEQ ID NO: 20329 - protein, 256 aa, Zea mays subsp. mays
  peptide (1)..(256): Ceres Seq. ID no. 14309140
  misc_feature (1)..(256): NCBI GI NO: 15238704 NR Description: expressed protein [Arabidopsis thaliana]
  misc_feature (1)..(256): NCBI GI NO: 21592900 NR Description: unknown [Arabidopsis thaliana]
  misc_feature (1)..(256): NCBI GI NO: 34904152 NR Description: P0417G05.19
MEEIEAVLEKICDLHDKLSDEIHLISRSHFLKSVKPATRSEKRKSHGLNSAEEKPQGYVFIKGFPVNDNDAAIQEAKSLNAIRTALEHLEDQLEFFHTIHTQQRTERDVAVARLEQSRMLLAKRLAEHHGKSYGVLDETLAFVGSIKTSTNFVYNSSPNTAGAYSTPPDGPKSNFVINAFAWTFGLAKRALGFNHVRGVLGNAAIFAISMVAMLHLQQVASTEHHRLGKKQRKTYRREMSSSDISLDHLDVMMARG

SEQ ID NO: 20330 - DNA, 688 bp, Zea mays subsp. mays
  misc_feature (1)..(688): Ceres Seq. ID no. 14309133
aaattaaattaattaattttatttctgatatttctctcctctctgttcatcaatggcgatgaggaagcttttatcgaagcgtatcttcaacatctcgaaccaatcgtcgcagagtctaacgaattgccgcacatcgtcttcttcggtatccgtgcgaaccagaatcgctccagagcccggagactccgggatctcgcggcggttcttccacaacaccgccgtgattaggccggagatgatgcagatgccggtgggagggagcttgatcgagaagctccgcgaaatcgacggtagcaaggatcgaatccgattagacgggatcgctccgccgatgagggagacggcgagtttgacggtggaggatacgaagaaagttctgagagcggcgcagatggagatggtgaagacgaagcttagagagacggggagaagctggatgacgtattcggagtttgctagcgtttgcggtgaagcttcgtcggatccggaggacggagctagaatagcgaagatgcttgatgattcagcaaacgtcatcgttttgggaggttccgtttgtcttagaccagatcaggtactttcctcatcttgttacctgtgaaatgaatctctgagtgtgcagctgcttgaactgattgggagaggttaaggctctctgaaaataaaaaacatgaattaggttttcttc

SEQ ID NO: 20331 - protein, 182 aa, Zea mays subsp. mays
  peptide (1)..(182): Ceres Seq. ID no. 14309134
  misc_feature (1)..(178): NCBI GI NO: 15224063 NR Description: expressed protein [Arabidopsis thaliana]
  misc_feature (1)..(178): NCBI GI NO: 24496456 NR Description: hypothetical protein [Arabidopsis thaliana]
  misc_feature (3)..(176): NCBI GI NO: 15234535 NR Description: hypothetical protein [Arabidopsis thaliana]
  misc_feature (1)..(178): NCBI GI NO: 14596231 NR Description: Unknown protein [Arabidopsis thaliana]
  misc_feature (1)..(178): NCBI GI NO: 15240047 NR Description: expressed protein [Arabidopsis thaliana]
  misc_feature (1)..(175): NCBI GI NO: 20330769 NR Description: Hypothetical protein
  misc_feature (58)..(178): NCBI GI NO: 15239011 NR Description: hypothetical protein [Arabidopsis thaliana]
  misc_feature (71)..(178): NCBI GI NO: 37535778 NR Description: unknown protein
MAMRKLLSKRIFNISNQSSQSLTNCRTSSSSVSVRTRIAPEPGDSGISRRFFHNTAVIRPEMMQMPVGGSLIEKLREIDGSKDRIRLDGIAPPMRETASLTVEDTKKVLRAAQMEMVKTKLRETGRSWMTYSEFASVCGEASSDPEDGARIAKMLDDSANVIVLGGSVCLRPDQVLSSSCYL

SEQ ID NO: 20332 - protein, 180 aa, Zea mays subsp. mays
  peptide (1)..(180): Ceres Seq. ID no. 14309135
  misc_feature (1)..(176): NCBI GI NO: 15224063 NR Description: expressed protein [Arabidopsis thaliana]
  misc_feature (1)..(176): NCBI GI NO: 24496456 NR Description: hypothetical protein [Arabidopsis thaliana]
  misc_feature (1)..(174): NCBI GI NO: 15234535 NR Description: hypothetical protein [Arabidopsis thaliana]
  misc_feature (1)..(176): NCBI GI NO: 14596231 NR Description: Unknown protein [Arabidopsis thaliana]
  misc_feature (1)..(176): NCBI GI NO: 15240047 NR Description: expressed protein [Arabidopsis thaliana]
  misc_feature (1)..(173): NCBI GI NO: 20330769 NR Description: Hypothetical protein
  misc_feature (56)..(176): NCBI GI NO: 15239011 NR Description: hypothetical protein [Arabidopsis thaliana]
  misc_feature (69)..(176): NCBI GI NO: 37535778 NR Description: unknown protein
MRKLLSKRIFNISNQSSQSLTNCRTSSSSVSVRTRIAPEPGDSGISRRFFHNTAVIRPEMMQMPVGGSLIEKLREIDGSKDRIRLDGIAPPMRETASLTVEDTKKVLRAAQMEMVKTKLRETGRSWMTYSEFASVCGEASSDPEDGARIAKMLDDSANVIVLGGSVCLRPDQVLSSSCYL

SEQ ID NO: 20333 - protein, 121 aa, Zea mays subsp. mays
  peptide (1)..(121): Ceres Seq. ID no. 14309136
  misc_feature (1)..(117): NCBI GI NO: 15224063 NR Description: expressed protein [Arabidopsis thaliana]
  misc_feature (1)..(117): NCBI GI NO: 24496456 NR Description: hypothetical protein [Arabidopsis thaliana]
  misc_feature (1)..(115): NCBI GI NO: 15234535 NR Description: hypothetical protein [Arabidopsis thaliana]
  misc_feature (1)..(117): NCBI GI NO: 14596231 NR Description: Unknown protein [Arabidopsis thaliana]
  misc_feature (1)..(117): NCBI GI NO: 15240047 NR Description: expressed protein [Arabidopsis thaliana]
  misc_feature (1)..(114): NCBI GI NO: 20330769 NR Description: Hypothetical protein
  misc_feature (1)..(117): NCBI GI NO: 15239011 NR Description: hypothetical protein [Arabidopsis thaliana]
  misc_feature (10)..(117): NCBI GI NO: 37535778 NR Description: unknown protein
MMQMPVGGSLIEKLREIDGSKDRIRLDGIAPPMRETASLTVEDTKKVLRAAQMEMVKTKLRETGRSWMTYSEFASVCGEASSDPEDGARIAKMLDDSANVIVLGGSVCLRPDQVLSSSCYL

SEQ ID NO: 20334 - DNA, 1002 bp, Zea mays subsp. mays
  misc_feature (1)..(1002): Ceres Seq. ID no. 15179474
attccactaaaaaaatattgttattatatagagaaaatcaaaactggttatctggaaggcgctaaaaaaatggaaaacggcgacgagagcccggtggttctgataacgggatgctcgcaaggaggaatcggccacgcgctggcacgtgagttctcagataagggatgtcgagtggtggcgacgagccgttcgcggagtacgatgacggatctggagcaggatccgaggttgttcgtgcaggagctcgatgtgcaatcggagcagagcgtgagcaaagtcatgtcgaacgttatcgataagttcggacagatcgacgttcttgtcaacaacgcaggcgttcagtgcgttggacctcttgcggagattccaatgtccgccgtggagaatacattcaacaccaatgttttcggttccatgaggatgactcaagcagttgtacctcacatggtgtctaagaagaagggaaagattgtcaacgttgggagtatcactgttatggcaccaggtccatgggcaggtgtctatacagctaccaaagctgctatccatgctcttaccgacacactcaggttggagctcggcccctttggcattgatgtaatcaatgttgtgccaggaggaatacgaacgaacatagcaaactcagctgtagcaaccttcaacaagatgccagagctgaaactattcaagccttacgaagaagctatcagagagagggcctttatatcacagaggatgaagccaactcctgcagaaacattcgctaaagacaccgtagctgcagtgctaaagaagaacccacctgcttggttctcttccggcagatactcaactctcatggcaatcatgtaccatatgcccctctggttcaaagattttgtccagaagaaggctttaatgaaaaaggactagacagcttccggttttaaagtctctctttctctcttacgataacgaaatgtaaaagattattcagacttgataatgtaatcttatgtcccc

SEQ ID NO: 20335 - protein, 303 aa, Zea mays subsp. mays
  peptide (1)..(303): Ceres Seq. ID no. 15179475
  misc_feature (24)..(302): NCBI GI NO: 30682984 NR Description: short-chain dehydrogenase/reductase family protein
  misc_feature (24)..(302): NCBI GI NO: 26453106 NR Description: unknown protein [Arabidopsis thaliana]
  misc_feature (130)..(302): NCBI GI NO: 11358313 NR Description: hypothetical protein T31P16
  misc_feature (24)..(138): NCBI GI NO: 11358313 NR Description: hypothetical protein T31P16
  misc_feature (26)..(302): NCBI GI NO: 18424923 NR Description: short-chain dehydrogenase/reductase family protein
  misc_feature (26)..(303): NCBI GI NO: 10178182 NR Description: contains similarity todehydrogenase~gene_id:MQN23
  misc_feature (68)..(302): NCBI GI NO: 26450169 NR Description: unknown protein [Arabidopsis thaliana]
  misc_feature (68)..(301): NCBI GI NO: 38567881 NR Description: OSJNBa0036B21.7
  misc_feature (31)..(283): NCBI GI NO: 23058177 NR Description: hypothetical protein
  misc_feature (31)..(297): NCBI GI NO: 28868436 NR Description: oxidoreductase
IPLKKYCYYIEKIKTGYLEGAKKMENGDESPVVLITGCSQGGIGHALAREFSDKGCRVVATSRSRSTMTDLEQDPRLFVQELDVQSEQSVSKVMSNVIDKFGQIDVLVNNAGVQCVGPLAEIPMSAVENTFNTNVFGSMRMTQAVVPHMVSKKKGKIVNVGSITVMAPGPWAGVYTATKAAIHALTDTLRLELGPFGIDVINVVPGGIRTNIANSAVATFNKMPELKLFKPYEEAIRERAFISQRMKPTPAETFAKDTVAAVLKKNPPAWFSSGRYSTLMAIMYHMPLWFKDFVQKKALMKKD

SEQ ID NO: 20336 - protein, 280 aa, Zea mays subsp. mays
  peptide (1)..(280): Ceres Seq. ID no. 15179476
  misc_feature (1)..(279): NCBI GI NO: 30682984 NR Description: short-chain dehydrogenase/reductase family protein
  misc_feature (1)..(279): NCBI GI NO: 26453106 NR Description: unknown protein [Arabidopsis thaliana]
  misc_feature (107)..(279): NCBI GI NO: 11358313 NR Description: hypothetical protein T31P16
  misc_feature (1)..(115): NCBI GI NO: 11358313 NR Description: hypothetical protein T31P16
  misc_feature (3)..(279): NCBI GI NO: 18424923 NR Description: short-chain dehydrogenase/reductase family protein
  misc_feature (3)..(280): NCBI GI NO: 10178182 NR Description: contains similarity todehydrogenase~gene_id:MQN23
  misc_feature (45)..(279): NCBI GI NO: 26450169 NR Description: unknown protein [Arabidopsis thaliana]
  misc_feature (45)..(278): NCBI GI NO: 38567881 NR Description: OSJNBa0036B21.7
  misc_feature (8)..(260): NCBI GI NO: 23058177 NR Description: hypothetical protein
  misc_feature (8)..(274): NCBI GI NO: 28868436 NR Description: oxidoreductase
MENGDESPVVLITGCSQGGIGHALAREFSDKGCRVVATSRSRSTMTDLEQDPRLFVQELDVQSEQSVSKVMSNVIDKFGQIDVLVNNAGVQCVGPLAEIPMSAVENTFNTNVFGSMRMTQAVVPHMVSKKKGKIVNVGSITVMAPGPWAGVYTATKAAIHALTDTLRLELGPFGIDVINVVPGGIRTNIANSAVATFNKMPELKLFKPYEEAIRERAFISQRMKPTPAETFAKDTVAAVLKKNPPAWFSSGRYSTLMAIMYHMPLWFKDFVQKKALMKKD

SEQ ID NO: 20337 - protein, 236 aa, Zea mays subsp. mays
  peptide (1)..(236): Ceres Seq. ID no. 15179477
  misc_feature (1)..(235): NCBI GI NO: 30682984 NR Description: short-chain dehydrogenase/reductase family protein
  misc_feature (1)..(235): NCBI GI NO: 26453106 NR Description: unknown protein [Arabidopsis thaliana]
  misc_feature (63)..(235): NCBI GI NO: 11358313 NR Description: hypothetical protein T31P16
  misc_feature (1)..(71): NCBI GI NO: 11358313 NR Description: hypothetical protein T31P16
  misc_feature (1)..(235): NCBI GI NO: 18424923 NR Description: short-chain dehydrogenase/reductase family protein
  misc_feature (1)..(236): NCBI GI NO: 10178182 NR Description: contains similarity todehydrogenase~gene_id:MQN23
  misc_feature (1)..(235): NCBI GI NO: 26450169 NR Description: unknown protein [Arabidopsis thaliana]
  misc_feature (1)..(234): NCBI GI NO: 38567881 NR Description: OSJNBa0036B21.7
  misc_feature (1)..(216): NCBI GI NO: 23058177 NR Description: hypothetical protein
  misc_feature (1)..(230): NCBI GI NO: 28868436 NR Description: oxidoreductase
MTDLEQDPRLFVQELDVQSEQSVSKVMSNVIDKFGQIDVLVNNAGVQCVGPLAEIPMSAVENTFNTNVFGSMRMTQAVVPHMVSKKKGKIVNVGSITVMAPGPWAGVYTATKAAIHALTDTLRLELGPFGIDVINVVPGGIRTNIANSAVATFNKMPELKLFKPYEEAIRERAFISQRMKPTPAETFAKDTVAAVLKKNPPAWFSSGRYSTLMAIMYHMPLWFKDFVQKKALMKKD

SEQ ID NO: 20338 - DNA, 825 bp, Zea mays subsp. mays
  misc_feature (1)..(825): Ceres Seq. ID no. 14309121
aattaattaaaaatgattccacagtagatgcgaaaaagcagtcgtctcctctcaccggcattaaaccaaaccaaaccagaaatctagagactccttcctttctccttgttcctccgagagagagtattgtgtgaatctgggttttcgaatcgtgatattgttgtggaatagatcggatcgatggcgaatctgtacgtgaaagcggctccaccgccggatatgaacaggaacacggagtggttcatgtacccaggggtgtggaccacttatatactcatcctcttcttcggatggctcgttgttctctccctctctggctgttcccctgggatggcttggactgttgttaatctcgctcacttcgttgtaacgtatcactcctttcactggatgaaaggaacgccttttgcagacgaccagggagtctacaatggtctcacctggtgggaacagatggacaacggtcagcaacttacccgcaaccgcaagttccttaccgttgttcctgttgtcctgtacttgatagcatcacatacaacagattacaggcatccatggctattcctcaacacactcgctgtgatggttctagttgtggccaagttccctaacatgcacaaggtgcgcatcttcgggatcaacggtgataagtaacgttctttagcaaaactcagatccatttcttttctggcaagagaaaagtggatataaccaaacacatgtatgtataaaatgttgatatgagttggtttggagttgtcggatattttgtaagtaactttgaagctttgaatttcttcttttttatgttttcttttttaatat

SEQ ID NO: 20339 - protein, 157 aa, Zea mays subsp. mays
  peptide (1)..(157): Ceres Seq. ID no. 14309122
  misc_feature (14)..(156): Pfam Name: Pfam Description:  ORMDL family
  misc_feature (1)..(157): NCBI GI NO: 18378814 NR Description: expressed protein [Arabidopsis thaliana]
  misc_feature (1)..(147): NCBI GI NO: 25513580 NR Description: F6F3.4 protein - Arabidopsis thaliana
  misc_feature (4)..(157): NCBI GI NO: 15238262 NR Description: expressed protein [Arabidopsis thaliana]
  misc_feature (1)..(154): NCBI GI NO: 38344271 NR Description: OSJNBa0005N02.9
  misc_feature (5)..(156): NCBI GI NO: 34394897 NR Description: putative ORMDL2
  misc_feature (5)..(147): NCBI GI NO: 34901370 NR Description: OSJNBb0062P14.15
  misc_feature (56)..(156): NCBI GI NO: 18419644 NR Description: unknown [Narcissus pseudonarcissus]
  misc_feature (15)..(153): NCBI GI NO: 19112082 NR Description: hypothetical protein; similar to S
  misc_feature (15)..(146): NCBI GI NO: 40745942 NR Description: hypothetical protein AN1933.2
  misc_feature (15)..(155): NCBI GI NO: 6323382 NR Description: Homologous to ORM1.; Orm2p
MANLYVKAAPPPDMNRNTEWFMYPGVWTTYILILFFGWLVVLSLSGCSPGMAWTVVNLAHFVVTYHSFHWMKGTPFADDQGVYNGLTWWEQMDNGQQLTRNRKFLTVVPVVLYLIASHTTDYRHPWLFLNTLAVMVLVVAKFPNMHKVRIFGINGDK

SEQ ID NO: 20340 - protein, 144 aa, Zea mays subsp. mays
  peptide (1)..(144): Ceres Seq. ID no. 14309123
  misc_feature (1)..(143): Pfam Name: Pfam Description:  ORMDL family
  misc_feature (1)..(144): NCBI GI NO: 18378814 NR Description: expressed protein [Arabidopsis thaliana]
  misc_feature (1)..(134): NCBI GI NO: 25513580 NR Description: F6F3.4 protein - Arabidopsis thaliana
  misc_feature (1)..(144): NCBI GI NO: 15238262 NR Description: expressed protein [Arabidopsis thaliana]
  misc_feature (1)..(141): NCBI GI NO: 38344271 NR Description: OSJNBa0005N02.9
  misc_feature (1)..(143): NCBI GI NO: 34394897 NR Description: putative ORMDL2
  misc_feature (1)..(134): NCBI GI NO: 34901370 NR Description: OSJNBb0062P14.15
  misc_feature (43)..(143): NCBI GI NO: 18419644 NR Description: unknown [Narcissus pseudonarcissus]
  misc_feature (2)..(140): NCBI GI NO: 19112082 NR Description: hypothetical protein; similar to S
  misc_feature (2)..(133): NCBI GI NO: 40745942 NR Description: hypothetical protein AN1933.2
  misc_feature (2)..(142): NCBI GI NO: 6323382 NR Description: Homologous to ORM1.; Orm2p
MNRNTEWFMYPGVWTTYILILFFGWLVVLSLSGCSPGMAWTVVNLAHFVVTYHSFHWMKGTPFADDQGVYNGLTWWEQMDNGQQLTRNRKFLTVVPVVLYLIASHTTDYRHPWLFLNTLAVMVLVVAKFPNMHKVRIFGINGDK

SEQ ID NO: 20341 - protein, 136 aa, Zea mays subsp. mays
  peptide (1)..(136): Ceres Seq. ID no. 14309124
  misc_feature (1)..(135): Pfam Name: Pfam Description:  ORMDL family
  misc_feature (1)..(136): NCBI GI NO: 18378814 NR Description: expressed protein [Arabidopsis thaliana]
  misc_feature (1)..(126): NCBI GI NO: 25513580 NR Description: F6F3.4 protein - Arabidopsis thaliana
  misc_feature (1)..(136): NCBI GI NO: 15238262 NR Description: expressed protein [Arabidopsis thaliana]
  misc_feature (1)..(133): NCBI GI NO: 38344271 NR Description: OSJNBa0005N02.9
  misc_feature (1)..(135): NCBI GI NO: 34394897 NR Description: putative ORMDL2
  misc_feature (1)..(126): NCBI GI NO: 34901370 NR Description: OSJNBb0062P14.15
  misc_feature (35)..(135): NCBI GI NO: 18419644 NR Description: unknown [Narcissus pseudonarcissus]
  misc_feature (1)..(132): NCBI GI NO: 19112082 NR Description: hypothetical protein; similar to S
  misc_feature (1)..(125): NCBI GI NO: 40745942 NR Description: hypothetical protein AN1933.2
  misc_feature (1)..(134): NCBI GI NO: 6323382 NR Description: Homologous to ORM1.; Orm2p
MYPGVWTTYILILFFGWLVVLSLSGCSPGMAWTVVNLAHFVVTYHSFHWMKGTPFADDQGVYNGLTWWEQMDNGQQLTRNRKFLTVVPVVLYLIASHTTDYRHPWLFLNTLAVMVLVVAKFPNMHKVRIFGINGDK

SEQ ID NO: 20342 - DNA, 1057 bp, Zea mays subsp. mays
  misc_feature (1)..(1057): Ceres Seq. ID no. 15179562
cctttccttctcgagctcttcgtccttcctctgtttccttcattcacacagagagagaaacgcaaaagactaaaactttgagaaaagagatgatggagtgggacaatcagcagcaacccagtaacaatccttcttcaaatcttcaagggatcgacgttaatggaggctcaggctcaggaggaatgtacgtgaaggtgatgaccgacgagcagctcgaaactctgaggaagcagattgctatctacgccaccatttgtgaacgtctcgttgagatgcacaaaaccctcacttctcaacaagatcttgcagggagagtgggaggtctatatgcagacccaacgtttggtcacaagatgacaggtggtaggcagaggtggactcctactccagttcagcttcagattctggagcgtatattcgaccaagggatagggacaccgagcaagcagaagatcaaagacataaccgaggagctgagccagcacggtcagatagctgagcaaaacgtctacaattggtttcagaaccggcgcgctcggtccaagaggaagcagcatggtggtggtggtggtggtgttggttcttctagtaacaacaacaatggtgagtctgaggtggaggctgaaactgagacggtgaatgagaagagaaagatgccagagagtcttcttgtgtttcctgatggaaacaagaatgccattgggacaacaagtgctactagtcctaggcctgaagatctttacttccagagccctgagatgagctctgatcttgacttgctaggagtcctatcaaacccaagggatgagcattttgtaggaaagatggggctgtctgaaagctacaacatgtatgatcatgttgaagattatggcatgtagggctgattaatacaagctgaggaaattggttcagtagtcagtcttaagcagttttagacacttttttaattattttgtttctgggtgttttaatcaaagtttgtgatgcattactttaatgtttactggatttagagtgattcctatctccttaacaataataatatttttctaag

SEQ ID NO: 20343 - protein, 292 aa, Zea mays subsp. mays
  peptide (1)..(292): Ceres Seq. ID no. 15179563
  misc_feature (122)..(182): Pfam Name: Pfam Description:  Homeobox domain
  misc_feature (30)..(292): NCBI GI NO: 15237035 NR Description: homeodomain protein HB2, putative
  misc_feature (31)..(220): NCBI GI NO: 3955021 NR Description: HB2 homeodomain protein
  misc_feature (196)..(292): NCBI GI NO: 3955021 NR Description: HB2 homeodomain protein
  misc_feature (31)..(220): NCBI GI NO: 40233087 NR Description: homeodomain protein HB2 [Populus tomentosa]
  misc_feature (31)..(221): NCBI GI NO: 34909272 NR Description: putative HB2 homeodomain protein
  misc_feature (59)..(229): NCBI GI NO: 3955019 NR Description: HB1 homeodomain protein
  misc_feature (59)..(229): NCBI GI NO: 40233067 NR Description: homeodomain protein HB1 [Populus tomentosa]
  misc_feature (36)..(184): NCBI GI NO: 30686974 NR Description: homeodomain protein PALE-2, putative
  misc_feature (52)..(184): NCBI GI NO: 15218015 NR Description: homeodomain protein [Arabidopsis thaliana]
  misc_feature (102)..(226): NCBI GI NO: 34910936 NR Description: OSJNBb0063G05.13
FPSRALRPSSVSFIHTERETQKTKTLRKEMMEWDNQQQPSNNPSSNLQGIDVNGGSGSGGMYVKVMTDEQLETLRKQIAIYATICERLVEMHKTLTSQQDLAGRVGGLYADPTFGHKMTGGRQRWTPTPVQLQILERIFDQGIGTPSKQKIKDITEELSQHGQIAEQNVYNWFQNRRARSKRKQHGGGGGGVGSSSNNNNGESEVEAETETVNEKRKMPESLLVFPDGNKNAIGTTSATSPRPEDLYFQSPEMSSDLDLLGVLSNPRDEHFVGKMGLSESYNMYDHVEDYGM

SEQ ID NO: 20344 - protein, 263 aa, Zea mays subsp. mays
  peptide (1)..(263): Ceres Seq. ID no. 15179564
  misc_feature (93)..(153): Pfam Name: Pfam Description:  Homeobox domain
  misc_feature (1)..(263): NCBI GI NO: 15237035 NR Description: homeodomain protein HB2, putative
  misc_feature (2)..(191): NCBI GI NO: 3955021 NR Description: HB2 homeodomain protein
  misc_feature (167)..(263): NCBI GI NO: 3955021 NR Description: HB2 homeodomain protein
  misc_feature (2)..(191): NCBI GI NO: 40233087 NR Description: homeodomain protein HB2 [Populus tomentosa]
  misc_feature (2)..(192): NCBI GI NO: 34909272 NR Description: putative HB2 homeodomain protein
  misc_feature (30)..(200): NCBI GI NO: 3955019 NR Description: HB1 homeodomain protein
  misc_feature (30)..(200): NCBI GI NO: 40233067 NR Description: homeodomain protein HB1 [Populus tomentosa]
  misc_feature (7)..(155): NCBI GI NO: 30686974 NR Description: homeodomain protein PALE-2, putative
  misc_feature (23)..(155): NCBI GI NO: 15218015 NR Description: homeodomain protein [Arabidopsis thaliana]
  misc_feature (73)..(197): NCBI GI NO: 34910936 NR Description: OSJNBb0063G05.13
MMEWDNQQQPSNNPSSNLQGIDVNGGSGSGGMYVKVMTDEQLETLRKQIAIYATICERLVEMHKTLTSQQDLAGRVGGLYADPTFGHKMTGGRQRWTPTPVQLQILERIFDQGIGTPSKQKIKDITEELSQHGQIAEQNVYNWFQNRRARSKRKQHGGGGGGVGSSSNNNNGESEVEAETETVNEKRKMPESLLVFPDGNKNAIGTTSATSPRPEDLYFQSPEMSSDLDLLGVLSNPRDEHFVGKMGLSESYNMYDHVEDYGM

SEQ ID NO: 20345 - protein, 262 aa, Zea mays subsp. mays
  peptide (1)..(262): Ceres Seq. ID no. 15179565
  misc_feature (92)..(152): Pfam Name: Pfam Description:  Homeobox domain
  misc_feature (1)..(262): NCBI GI NO: 15237035 NR Description: homeodomain protein HB2, putative
  misc_feature (1)..(190): NCBI GI NO: 3955021 NR Description: HB2 homeodomain protein
  misc_feature (166)..(262): NCBI GI NO: 3955021 NR Description: HB2 homeodomain protein
  misc_feature (1)..(190): NCBI GI NO: 40233087 NR Description: homeodomain protein HB2 [Populus tomentosa]
  misc_feature (1)..(191): NCBI GI NO: 34909272 NR Description: putative HB2 homeodomain protein
  misc_feature (29)..(199): NCBI GI NO: 3955019 NR Description: HB1 homeodomain protein
  misc_feature (29)..(199): NCBI GI NO: 40233067 NR Description: homeodomain protein HB1 [Populus tomentosa]
  misc_feature (6)..(154): NCBI GI NO: 30686974 NR Description: homeodomain protein PALE-2, putative
  misc_feature (22)..(154): NCBI GI NO: 15218015 NR Description: homeodomain protein [Arabidopsis thaliana]
  misc_feature (72)..(196): NCBI GI NO: 34910936 NR Description: OSJNBb0063G05.13
MEWDNQQQPSNNPSSNLQGIDVNGGSGSGGMYVKVMTDEQLETLRKQIAIYATICERLVEMHKTLTSQQDLAGRVGGLYADPTFGHKMTGGRQRWTPTPVQLQILERIFDQGIGTPSKQKIKDITEELSQHGQIAEQNVYNWFQNRRARSKRKQHGGGGGGVGSSSNNNNGESEVEAETETVNEKRKMPESLLVFPDGNKNAIGTTSATSPRPEDLYFQSPEMSSDLDLLGVLSNPRDEHFVGKMGLSESYNMYDHVEDYGM

SEQ ID NO: 20346 - DNA, 636 bp, Zea mays subsp. mays
  misc_feature (1)..(636): Ceres Seq. ID no. 14309116
aatagattttcagttgtgtcggctgaagaagcacacagatggcggcgagcgcgtgtctccggctgccggcggcgatggctgtccggcgagaggaaggcgttccgaattcaaaatcttcgcaggaaaaaccgagaatttatctcaacaaaccttcatggatagtcacaactcagtgtggcgctaagacgagtagaaaggagaagggtcgatgcgtaatctgccatggaactggaagagtcgactgtttcaattgtagcgggaaagggaggactaactgcgtggatatggagatgcttccaagaggagagtggcccaaatggtgcaggagctgtggagggagtggtttatgtgaatgctctcgctgtcttggcaccggagagtacagatacattatgggtttccgcttcttgaacaaacacgatgacgtggatccacagttatgagttgctgaaacggtggtggtgatgtttccttaccagtttctttttgtatatgttcagtgaagactttagtatgttttgatatgtttgctccagacttgtttggttttagtgtgttaaatgtctgtcacttttaagtgtaattcttttctctgtaagaacgctacaataattaatgtcttctctttacttgggt

SEQ ID NO: 20347 - protein, 134 aa, Zea mays subsp. mays
  peptide (1)..(134): Ceres Seq. ID no. 14309117
  misc_feature (1)..(133): NCBI GI NO: 9294155 NR Description: gene_id:MKP6.23~unknown protein
  misc_feature (1)..(114): NCBI GI NO: 15229091 NR Description: hypothetical protein [Arabidopsis thaliana]
  misc_feature (31)..(127): NCBI GI NO: 38346709 NR Description: OSJNBa0086O06.7
MAASACLRLPAAMAVRREEGVPNSKSSQEKPRIYLNKPSWIVTTQCGAKTSRKEKGRCVICHGTGRVDCFNCSGKGRTNCVDMEMLPRGEWPKWCRSCGGSGLCECSRCLGTGEYRYIMGFRFLNKHDDVDPQL

SEQ ID NO: 20348 - protein, 122 aa, Zea mays subsp. mays
  peptide (1)..(122): Ceres Seq. ID no. 14309118
  misc_feature (1)..(121): NCBI GI NO: 9294155 NR Description: gene_id:MKP6.23~unknown protein
  misc_feature (1)..(102): NCBI GI NO: 15229091 NR Description: hypothetical protein [Arabidopsis thaliana]
  misc_feature (19)..(115): NCBI GI NO: 38346709 NR Description: OSJNBa0086O06.7
MAVRREEGVPNSKSSQEKPRIYLNKPSWIVTTQCGAKTSRKEKGRCVICHGTGRVDCFNCSGKGRTNCVDMEMLPRGEWPKWCRSCGGSGLCECSRCLGTGEYRYIMGFRFLNKHDDVDPQL

SEQ ID NO: 20349 - DNA, 863 bp, Zea mays subsp. mays
  misc_feature (1)..(863): Ceres Seq. ID no. 14309113
aaaaacctaacaagaaagcttgtgttaaacttgtttccttactaacttgtccgattttctcattaggccatggctccttccgctgcctcttcaaacactaaagaaggagaatctggtgaggaaggatatactgcattggagaaacatgtagccttcttcgacaggaacggagacggcgtcatttatccttgggaaacctaccaaggatttagagcgataggggtagggcgtctcccgtcagctattgctggtctctttatcaacatgggacttagccagaaaactcgcccggggaagggattctcgctgttgtttccaatagaagtgaagaatagtcacttttgcatccatggtagtgtcactgaagtatacgacaagaacggaagatttgtggaatcgaaattcgaggagatattcaagaagcatgctcgctcacatcgaaatgctctcacttacaaggaacttcttcaattgcttaagtctaacagagaccctggagactttggaggatggattgcagcatacggagaatggaaattattatatgaattatgcaaagatgaagatggtttattgacgagagaggcagtaaaaggcgccttcgatggcagcattttcagaaaattggagaaagaacgattatcttcttctcataagaagaaagaaaaaagaagacgttaaatattcccaaagcccattcatccatcatcttcaacgttacaaattaatagatacacttatgtgactagtgtgtatcttatatgaaaatggtttgttgttgtgatgcattctttacataaacatatatgatatttttgtgtaatattccgataataccattagaaaatatagttatgacatgc

SEQ ID NO: 20350 - protein, 203 aa, Zea mays subsp. mays
  peptide (1)..(203): Ceres Seq. ID no. 14309114
  misc_feature (21)..(188): Pfam Name: Pfam Description:  Caleosin related protein
  misc_feature (21)..(200): NCBI GI NO: 15220687 NR Description: pollen coat EF-hand protein [Arabidopsis thaliana]
  misc_feature (13)..(200): NCBI GI NO: 9295714 NR Description: F26F24.9 [Arabidopsis thaliana]
  misc_feature (23)..(197): NCBI GI NO: 18409649 NR Description: Ca2+-binding EF-hand common family protein
  misc_feature (23)..(197): NCBI GI NO: 21593851 NR Description: unknown [Arabidopsis thaliana]
  misc_feature (5)..(194): NCBI GI NO: 18409651 NR Description: Ca2+-binding EF-hand common family protein
  misc_feature (5)..(194): NCBI GI NO: 21617961 NR Description: unknown [Arabidopsis thaliana]
  misc_feature (1)..(198): NCBI GI NO: 37652831 NR Description: calcium binding protein [Fagus sylvatica]
  misc_feature (1)..(193): NCBI GI NO: 34902470 NR Description: Putative abscisic acid-induced protein - rice
  misc_feature (45)..(200): NCBI GI NO: 15220688 NR Description: Ca2+-binding EF-hand common family protein
  misc_feature (2)..(193): NCBI GI NO: 15226103 NR Description: RD20 protein [Arabidopsis thaliana]
MAPSAASSNTKEGESGEEGYTALEKHVAFFDRNGDGVIYPWETYQGFRAIGVGRLPSAIAGLFINMGLSQKTRPGKGFSLLFPIEVKNSHFCIHGSVTEVYDKNGRFVESKFEEIFKKHARSHRNALTYKELLQLLKSNRDPGDFGGWIAAYGEWKLLYELCKDEDGLLTREAVKGAFDGSIFRKLEKERLSSSHKKKEKRRR

SEQ ID NO: 20351 - protein, 138 aa, Zea mays subsp. mays
  peptide (1)..(138): Ceres Seq. ID no. 14309115
  misc_feature (1)..(123): Pfam Name: Pfam Description:  Caleosin related protein
  misc_feature (1)..(135): NCBI GI NO: 15220687 NR Description: pollen coat EF-hand protein [Arabidopsis thaliana]
  misc_feature (1)..(135): NCBI GI NO: 9295714 NR Description: F26F24.9 [Arabidopsis thaliana]
  misc_feature (1)..(132): NCBI GI NO: 18409649 NR Description: Ca2+-binding EF-hand common family protein
  misc_feature (1)..(132): NCBI GI NO: 21593851 NR Description: unknown [Arabidopsis thaliana]
  misc_feature (1)..(129): NCBI GI NO: 18409651 NR Description: Ca2+-binding EF-hand common family protein
  misc_feature (1)..(129): NCBI GI NO: 21617961 NR Description: unknown [Arabidopsis thaliana]
  misc_feature (1)..(133): NCBI GI NO: 37652831 NR Description: calcium binding protein [Fagus sylvatica]
  misc_feature (1)..(128): NCBI GI NO: 34902470 NR Description: Putative abscisic acid-induced protein - rice
  misc_feature (1)..(135): NCBI GI NO: 15220688 NR Description: Ca2+-binding EF-hand common family protein
  misc_feature (1)..(128): NCBI GI NO: 15226103 NR Description: RD20 protein [Arabidopsis thaliana]
MGLSQKTRPGKGFSLLFPIEVKNSHFCIHGSVTEVYDKNGRFVESKFEEIFKKHARSHRNALTYKELLQLLKSNRDPGDFGGWIAAYGEWKLLYELCKDEDGLLTREAVKGAFDGSIFRKLEKERLSSSHKKKEKRRR

SEQ ID NO: 20352 - DNA, 923 bp, Zea mays subsp. mays
  misc_feature (1)..(923): Ceres Seq. ID no. 14309110
atctcactcactctcgtctcttctctatctctctgcgtgggtgaaatttagatggctggagttgtgcgattatcaacgacgtcggttcagacccttggcgtctcttctccgcccttcacctcctttgcagccactctcagttctcctcccttacctcctcctactccgaatctgaattccgacaagagattgcgtccgctctcatcttctccctcgtgctcgtctcctcattacccagcttctggtctcgcaagccatagcctccttagacgtcccaacagcaaagtggttcgcgtcaaggtagatgagagtgtggccgagacagagccacctaaatggtgggagaggaatgctccaaacatggtagacattcattccaccgaagagttcttgaaggctctgagcgaagcgggtgaaagactagtgattgtagagttctatggaacttggtgcgcttcttgtagagcattgttccctaagctttgcaaaacggcggtggagaatcccaatatattgttcctcaaagtaaactttgatgagaataaaccaatgtgcaagagtttgaacgtgaaagtgcttccttatttccacttctaccgtggtgctgatggccagctcgagtccttctcatgttctcttgctaagtttcagaagataaaagatgccatcagactacacaacactgatcgttgcagcatcggtccagccaagggacctgaagggtttacgttggattctttatccgtccagacgaatgcagccaaaccagctggatcaagttgaaatgccagatactgagctcaatattctgtacatccgagatcttctgctactgtaacaatctttggttgctgaagcaaatactgagcttaatattctgtatatcagtaatttttttggtataaatggataactcctgaagc

SEQ ID NO: 20353 - protein, 243 aa, Zea mays subsp. mays
  peptide (1)..(243): Ceres Seq. ID no. 14309111
  misc_feature (104)..(211): Pfam Name: Pfam Description:  Thioredoxin
  misc_feature (1)..(243): NCBI GI NO: 18417441 NR Description: thioredoxin family [Arabidopsis thaliana]
  misc_feature (1)..(243): NCBI GI NO: 21554313 NR Description: thioredoxin-like protein [Arabidopsis thaliana]
  misc_feature (1)..(201): NCBI GI NO: 30688403 NR Description: thioredoxin family [Arabidopsis thaliana]
  misc_feature (11)..(215): NCBI GI NO: 15236134 NR Description: thioredoxin family [Arabidopsis thaliana]
  misc_feature (11)..(215): NCBI GI NO: 21553512 NR Description: putative thioredoxin [Arabidopsis thaliana]
  misc_feature (22)..(215): NCBI GI NO: 4973258 NR Description: thioredoxin-like 2 [Arabidopsis thaliana]
  misc_feature (104)..(201): NCBI GI NO: 14423392 NR Description: Thioredoxin-like protein [Arabidopsis thaliana]
  misc_feature (68)..(231): NCBI GI NO: 308906 NR Description: thioredoxin
  misc_feature (95)..(232): NCBI GI NO: 34394520 NR Description: putative thioredoxin
  misc_feature (95)..(231): NCBI GI NO: 15223262 NR Description: thioredoxin family [Arabidopsis thaliana]
MAGVVRLSTTSVQTLGVSSPPFTSFAATLSSPPLPPPTPNLNSDKRLRPLSSSPSCSSPHYPASGLASHSLLRRPNSKVVRVKVDESVAETEPPKWWERNAPNMVDIHSTEEFLKALSEAGERLVIVEFYGTWCASCRALFPKLCKTAVENPNILFLKVNFDENKPMCKSLNVKVLPYFHFYRGADGQLESFSCSLAKFQKIKDAIRLHNTDRCSIGPAKGPEGFTLDSLSVQTNAAKPAGSS

SEQ ID NO: 20354 - protein, 140 aa, Zea mays subsp. mays
  peptide (1)..(140): Ceres Seq. ID no. 14309112
  misc_feature (1)..(108): Pfam Name: Pfam Description:  Thioredoxin
  misc_feature (1)..(140): NCBI GI NO: 18417441 NR Description: thioredoxin family [Arabidopsis thaliana]
  misc_feature (1)..(140): NCBI GI NO: 21554313 NR Description: thioredoxin-like protein [Arabidopsis thaliana]
  misc_feature (1)..(98): NCBI GI NO: 30688403 NR Description: thioredoxin family [Arabidopsis thaliana]
  misc_feature (1)..(112): NCBI GI NO: 15236134 NR Description: thioredoxin family [Arabidopsis thaliana]
  misc_feature (1)..(112): NCBI GI NO: 21553512 NR Description: putative thioredoxin [Arabidopsis thaliana]
  misc_feature (1)..(112): NCBI GI NO: 4973258 NR Description: thioredoxin-like 2 [Arabidopsis thaliana]
  misc_feature (1)..(98): NCBI GI NO: 14423392 NR Description: Thioredoxin-like protein [Arabidopsis thaliana]
  misc_feature (1)..(128): NCBI GI NO: 308906 NR Description: thioredoxin
  misc_feature (1)..(129): NCBI GI NO: 34394520 NR Description: putative thioredoxin
  misc_feature (1)..(128): NCBI GI NO: 15223262 NR Description: thioredoxin family [Arabidopsis thaliana]
MVDIHSTEEFLKALSEAGERLVIVEFYGTWCASCRALFPKLCKTAVENPNILFLKVNFDENKPMCKSLNVKVLPYFHFYRGADGQLESFSCSLAKFQKIKDAIRLHNTDRCSIGPAKGPEGFTLDSLSVQTNAAKPAGSS

SEQ ID NO: 20355 - DNA, 1352 bp, Zea mays subsp. mays
  misc_feature (1)..(1352): Ceres Seq. ID no. 15180047
aacgaagaaccgaatgcccagtcctgaatcacgtcttcacccgtgctcgtgcgctgcgcccatcccttccgcctccacgctccccacgtgcaccgtgcacagcaccacacagccaggtccccatggcggcggcggcggcggttgcgtctgcgacgacggcggaagacgaagcgcgcctgctgcgcctggaggagcaggcggagcacggcggcggcggcgcctgggaatacctctgcctcgcccgccggctccgcgcccgccgccccgctcacgtcctccgcgtcggcctcgccctcctcaacaacgcctccgcgcgctccggccttgcctcagaacagtggacgctctacgagcaggtggccacggcggccatggattgccagcgtctcgatgtggcaaaggactgtattggagtcctttcaaaacaatttcctgggagcacacgggttgcccggctagaagctcgtctgtttgaagcaaaaggtgaatgggctgaagctgaaagagcctacgcgctaatcctggaaaacaatccatttgaccagattgtccacaagaggaaaattgctatcgcaaaagcacaaggtggtatgtcgatagtgattgattatctcaataagtatctggaattgtttatggctgatcatgatgcttggagagaacttgctgaaacatacagttccttacaaatgtacaagcaagctgccttttgttatgaggagctaatattagcccaaccaactattccactatatcatatagcctacgctgaggttctgtacactatgggtggcttggaaaatctccaaacagctaagaagtattatgcatcaacaatccagttaactggaggcaagaatacaagagccctctttggtgtatgtctgtgtacttcggcaatcaatcagttgacgaaaggaaggaataaagaggaagaggactcggagctgcagagcttggctgcagaggtactgctgaagaattacaagcagcaggctccatcaaaggcgccccttatcagcagcatgttgaagaacatgaaactcagctgataccaaccagctccacacattcagagtggcctgatttgatagatagttaagttaaattgatgtggcttaatatatgcttgtttttttatatataaaaaaattgtggcaccaacattgtgcaaggcttaaaagtagatgctcccaaggccatgggttgtacaacacctgcttgcttacctcgaaatatgcatggcttcttcagtggatgttctactatatagatcaacaaacccccgattgtacttgagcacaaacaaaattttgaatcagtcgctggtgaagttgtacgtgttgattttc

SEQ ID NO: 20356 - protein, 349 aa, Zea mays subsp. mays
  peptide (1)..(349): Ceres Seq. ID no. 15180048
  misc_feature (52)..(349): NCBI GI NO: 30679284 NR Description: expressed protein [Arabidopsis thaliana]
  misc_feature (52)..(349): NCBI GI NO: 22330847 NR Description: expressed protein [Arabidopsis thaliana]
  misc_feature (52)..(347): NCBI GI NO: 5732436 NR Description: contains similarity to O-linked GlcNAc transferases
  misc_feature (52)..(347): NCBI GI NO: 30690960 NR Description: expressed protein [Arabidopsis thaliana]
  misc_feature (138)..(348): NCBI GI NO: 10799830 NR Description: O-linked GlcNAc transferase like
  misc_feature (81)..(335): NCBI GI NO: 13385196 NR Description: RIKEN cDNA 4921531G14 [Mus musculus]
  misc_feature (81)..(335): NCBI GI NO: 14193698 NR Description: KIAA0103 protein [Mus musculus]
  misc_feature (81)..(342): NCBI GI NO: 34866113 NR Description: similar to RIKEN cDNA 4921531G14
  misc_feature (81)..(335): NCBI GI NO: 7661910 NR Description: KIAA0103 gene product [Homo sapiens]
  misc_feature (81)..(335): NCBI GI NO: 18088455 NR Description: KIAA0103 gene product [Homo sapiens]
RRTECPVLNHVFTRARALRPSLPPPRSPRAPCTAPHSQVPMAAAAAVASATTAEDEARLLRLEEQAEHGGGGAWEYLCLARRLRARRPAHVLRVGLALLNNASARSGLASEQWTLYEQVATAAMDCQRLDVAKDCIGVLSKQFPGSTRVARLEARLFEAKGEWAEAERAYALILENNPFDQIVHKRKIAIAKAQGGMSIVIDYLNKYLELFMADHDAWRELAETYSSLQMYKQAAFCYEELILAQPTIPLYHIAYAEVLYTMGGLENLQTAKKYYASTIQLTGGKNTRALFGVCLCTSAINQLTKGRNKEEEDSELQSLAAEVLLKNYKQQAPSKAPLISSMLKNMKLS

SEQ ID NO: 20357 - protein, 309 aa, Zea mays subsp. mays
  peptide (1)..(309): Ceres Seq. ID no. 15180049
  misc_feature (12)..(309): NCBI GI NO: 30679284 NR Description: expressed protein [Arabidopsis thaliana]
  misc_feature (12)..(309): NCBI GI NO: 22330847 NR Description: expressed protein [Arabidopsis thaliana]
  misc_feature (12)..(307): NCBI GI NO: 5732436 NR Description: contains similarity to O-linked GlcNAc transferases
  misc_feature (12)..(307): NCBI GI NO: 30690960 NR Description: expressed protein [Arabidopsis thaliana]
  misc_feature (98)..(308): NCBI GI NO: 10799830 NR Description: O-linked GlcNAc transferase like
  misc_feature (41)..(295): NCBI GI NO: 13385196 NR Description: RIKEN cDNA 4921531G14 [Mus musculus]
  misc_feature (41)..(295): NCBI GI NO: 14193698 NR Description: KIAA0103 protein [Mus musculus]
  misc_feature (41)..(302): NCBI GI NO: 34866113 NR Description: similar to RIKEN cDNA 4921531G14
  misc_feature (41)..(295): NCBI GI NO: 7661910 NR Description: KIAA0103 gene product [Homo sapiens]
  misc_feature (41)..(295): NCBI GI NO: 18088455 NR Description: KIAA0103 gene product [Homo sapiens]
MAAAAAVASATTAEDEARLLRLEEQAEHGGGGAWEYLCLARRLRARRPAHVLRVGLALLNNASARSGLASEQWTLYEQVATAAMDCQRLDVAKDCIGVLSKQFPGSTRVARLEARLFEAKGEWAEAERAYALILENNPFDQIVHKRKIAIAKAQGGMSIVIDYLNKYLELFMADHDAWRELAETYSSLQMYKQAAFCYEELILAQPTIPLYHIAYAEVLYTMGGLENLQTAKKYYASTIQLTGGKNTRALFGVCLCTSAINQLTKGRNKEEEDSELQSLAAEVLLKNYKQQAPSKAPLISSMLKNMKLS

SEQ ID NO: 20358 - protein, 226 aa, Zea mays subsp. mays
  peptide (1)..(226): Ceres Seq. ID no. 15180050
  misc_feature (1)..(226): NCBI GI NO: 30679284 NR Description: expressed protein [Arabidopsis thaliana]
  misc_feature (1)..(226): NCBI GI NO: 22330847 NR Description: expressed protein [Arabidopsis thaliana]
  misc_feature (1)..(224): NCBI GI NO: 5732436 NR Description: contains similarity to O-linked GlcNAc transferases
  misc_feature (1)..(224): NCBI GI NO: 30690960 NR Description: expressed protein [Arabidopsis thaliana]
  misc_feature (15)..(225): NCBI GI NO: 10799830 NR Description: O-linked GlcNAc transferase like
  misc_feature (1)..(212): NCBI GI NO: 13385196 NR Description: RIKEN cDNA 4921531G14 [Mus musculus]
  misc_feature (1)..(212): NCBI GI NO: 14193698 NR Description: KIAA0103 protein [Mus musculus]
  misc_feature (1)..(219): NCBI GI NO: 34866113 NR Description: similar to RIKEN cDNA 4921531G14
  misc_feature (1)..(212): NCBI GI NO: 7661910 NR Description: KIAA0103 gene product [Homo sapiens]
  misc_feature (1)..(212): NCBI GI NO: 18088455 NR Description: KIAA0103 gene product [Homo sapiens]
MDCQRLDVAKDCIGVLSKQFPGSTRVARLEARLFEAKGEWAEAERAYALILENNPFDQIVHKRKIAIAKAQGGMSIVIDYLNKYLELFMADHDAWRELAETYSSLQMYKQAAFCYEELILAQPTIPLYHIAYAEVLYTMGGLENLQTAKKYYASTIQLTGGKNTRALFGVCLCTSAINQLTKGRNKEEEDSELQSLAAEVLLKNYKQQAPSKAPLISSMLKNMKLS

SEQ ID NO: 20359 - DNA, 858 bp, Zea mays subsp. mays
  misc_feature (1)..(858): Ceres Seq. ID no. 15174056
gtggaaaatgttgagatcctcgtttcggcttctctatataacaagaaccaatcttctggttcgagcttcaccatcatcgctctctcgactcccatctaagttcacttctgcgaaaccacttgtcagttctcatcatcagattccgttatcaacaacgggagctaaactttctaggtcggaacattccatggctgcttcctccgaacccaaatccatctatgatttcatcgtcaaggatgcgaagggaaacgatgttgatctaagcacttacaaggggaaggttctgttgattgtcaacgttgcttctcagtgtggcttgaccaattcgaactatactgagcttgcacagctgtaccagaagtacaaagaccatgggtttgagatccttgcattcccctgtaaccagtttggtaatcaagaacctggttctaatgaagagattgttcagtttgcttgtacccgtttcaaggccgagtaccccatcttcgacaaggttgatgtgaacggtgactcggctgctccaatctataagttcctgaaatcaagcaaaggagggctttttggagacggaatcaagtggaacttcgccaagttcttggttgacaaagatgggaatgttgtggaccgttacgctccaactacttcccctctcagcattgagaaggacctgaagaaactgttgggagttactgcttaagcaactaataggcgcaagtattcaaataaaagctcctatagtattgtaataagctgtgtctatgttcttgagtgtctttgggatgagtcgtctcctactacttaaactcctcctttttagttactgatgtgtgtaacatcgttgacctaaaacacatattt

SEQ ID NO: 20360 - protein, 231 aa, Zea mays subsp. mays
  peptide (1)..(231): Ceres Seq. ID no. 15174057
  misc_feature (71)..(180): Pfam Name: Pfam Description:  Glutathione peroxidase
  misc_feature (3)..(231): NCBI GI NO: 30681827 NR Description: glutathione peroxidase, putative
  misc_feature (63)..(231): NCBI GI NO: 20138157 NR Description: Probable phospholipid hydroperoxide glutathioneperoxidase
  misc_feature (12)..(227): NCBI GI NO: 6179600 NR Description: GPX12Hv, glutathione peroxidase-like protein
  misc_feature (64)..(227): NCBI GI NO: 27544804 NR Description: phospholipid hydroperoxide glutathione peroxidase-like
  misc_feature (63)..(228): NCBI GI NO: 22268405 NR Description: putative glutathione peroxidase [Zea mays]
  misc_feature (65)..(229): NCBI GI NO: 20138151 NR Description: Probable phospholipid hydroperoxide glutathioneperoxidase
  misc_feature (63)..(228): NCBI GI NO: 34334012 NR Description: cytosolic glutathione peroxidase
  misc_feature (63)..(228): NCBI GI NO: 21360380 NR Description: glutathione peroxidase 1 [Oryza sativa]
  misc_feature (63)..(230): NCBI GI NO: 20138384 NR Description: Probable phospholipid hydroperoxide glutathioneperoxidase
  misc_feature (57)..(227): NCBI GI NO: 20138099 NR Description: Phospholipid hydroperoxide glutathione peroxidase
WKMLRSSFRLLYITRTNLLVRASPSSLSRLPSKFTSAKPLVSSHHQIPLSTTGAKLSRSEHSMAASSEPKSIYDFIVKDAKGNDVDLSTYKGKVLLIVNVASQCGLTNSNYTELAQLYQKYKDHGFEILAFPCNQFGNQEPGSNEEIVQFACTRFKAEYPIFDKVDVNGDSAAPIYKFLKSSKGGLFGDGIKWNFAKFLVDKDGNVVDRYAPTTSPLSIEKDLKKLLGVTA

SEQ ID NO: 20361 - protein, 229 aa, Zea mays subsp. mays
  peptide (1)..(229): Ceres Seq. ID no. 15174058
  misc_feature (69)..(178): Pfam Name: Pfam Description:  Glutathione peroxidase
  misc_feature (1)..(229): NCBI GI NO: 30681827 NR Description: glutathione peroxidase, putative
  misc_feature (61)..(229): NCBI GI NO: 20138157 NR Description: Probable phospholipid hydroperoxide glutathioneperoxidase
  misc_feature (10)..(225): NCBI GI NO: 6179600 NR Description: GPX12Hv, glutathione peroxidase-like protein
  misc_feature (62)..(225): NCBI GI NO: 27544804 NR Description: phospholipid hydroperoxide glutathione peroxidase-like
  misc_feature (61)..(226): NCBI GI NO: 22268405 NR Description: putative glutathione peroxidase [Zea mays]
  misc_feature (63)..(227): NCBI GI NO: 20138151 NR Description: Probable phospholipid hydroperoxide glutathioneperoxidase
  misc_feature (61)..(226): NCBI GI NO: 34334012 NR Description: cytosolic glutathione peroxidase
  misc_feature (61)..(226): NCBI GI NO: 21360380 NR Description: glutathione peroxidase 1 [Oryza sativa]
  misc_feature (61)..(228): NCBI GI NO: 20138384 NR Description: Probable phospholipid hydroperoxide glutathioneperoxidase
  misc_feature (55)..(225): NCBI GI NO: 20138099 NR Description: Phospholipid hydroperoxide glutathione peroxidase
MLRSSFRLLYITRTNLLVRASPSSLSRLPSKFTSAKPLVSSHHQIPLSTTGAKLSRSEHSMAASSEPKSIYDFIVKDAKGNDVDLSTYKGKVLLIVNVASQCGLTNSNYTELAQLYQKYKDHGFEILAFPCNQFGNQEPGSNEEIVQFACTRFKAEYPIFDKVDVNGDSAAPIYKFLKSSKGGLFGDGIKWNFAKFLVDKDGNVVDRYAPTTSPLSIEKDLKKLLGVTA

SEQ ID NO: 20362 - protein, 169 aa, Zea mays subsp. mays
  peptide (1)..(169): Ceres Seq. ID no. 15174059
  misc_feature (9)..(118): Pfam Name: Pfam Description:  Glutathione peroxidase
  misc_feature (1)..(169): NCBI GI NO: 30681827 NR Description: glutathione peroxidase, putative
  misc_feature (1)..(169): NCBI GI NO: 20138157 NR Description: Probable phospholipid hydroperoxide glutathioneperoxidase
  misc_feature (1)..(165): NCBI GI NO: 6179600 NR Description: GPX12Hv, glutathione peroxidase-like protein
  misc_feature (2)..(165): NCBI GI NO: 27544804 NR Description: phospholipid hydroperoxide glutathione peroxidase-like
  misc_feature (1)..(166): NCBI GI NO: 22268405 NR Description: putative glutathione peroxidase [Zea mays]
  misc_feature (3)..(167): NCBI GI NO: 20138151 NR Description: Probable phospholipid hydroperoxide glutathioneperoxidase
  misc_feature (1)..(166): NCBI GI NO: 34334012 NR Description: cytosolic glutathione peroxidase
  misc_feature (1)..(166): NCBI GI NO: 21360380 NR Description: glutathione peroxidase 1 [Oryza sativa]
  misc_feature (1)..(168): NCBI GI NO: 20138384 NR Description: Probable phospholipid hydroperoxide glutathioneperoxidase
  misc_feature (1)..(165): NCBI GI NO: 20138099 NR Description: Phospholipid hydroperoxide glutathione peroxidase
MAASSEPKSIYDFIVKDAKGNDVDLSTYKGKVLLIVNVASQCGLTNSNYTELAQLYQKYKDHGFEILAFPCNQFGNQEPGSNEEIVQFACTRFKAEYPIFDKVDVNGDSAAPIYKFLKSSKGGLFGDGIKWNFAKFLVDKDGNVVDRYAPTTSPLSIEKDLKKLLGVTA

SEQ ID NO: 20363 - DNA, 1103 bp, Zea mays subsp. mays
  misc_feature (1)..(1103): Ceres Seq. ID no. 14309100
gcttcattctctcaatctcgctcgctctcctttggcagatctgagagttttggacaaagaataaaaacttgggaaacatgcctccgcagaagatcgagacaggtcacagcgacattgtccatgatgtcgtcatggattactacggaaagcgaatagcaactgcctcatcagacggcaccatcaagataaccggagtgagcaacagcggcggatctcagcagctagctaccttaaccggccaccgaggtcccgtctggcaagtcgcctgggcccacccgaagtacgattcgctcctcgcttcgtgctcctacgatgggcaaatcataatatggaaagaaggaaaccaaaacgagtggacgcagtctcacgtcttcacagaccacaaagtatcagtcaactccatcgcttgggctcctcacgagctcggtctctccttagcttgcggagcatccgacggaaacatctctgtcttctcggccagagccgatggcggttgggacacaacgaggatagaccaagctcacccggtcggagtcacttcggtgtcgtgggcaccagcgacggagccaggggcgctcgttagctccggtatgcacgagccggtttacaagttagcgtcgggagggtgtgatagtacggtgaaggtgtggaaattcgcaaacgggtcgtggaagatggactgtttcccggcgctacacaagcacaaggactgggtgagggacgtggcgtgggcaccgaacttgggtctgccgaagtcgacgatagcgagtgggtcggaggatgggagtgtgatcatatggacggtggggaaagaaggagagcagtgggaagggaaggtattgaaagatttcaagacgccggtgtggagggtgacgtggtcgatgacgggtaacttgctggcggtgtcggatgggaacaataacgtaacggtgtggaaagaggctgtggatggagagtgggaacaagtgactgtcgttgagccttagattgtgttgttcctgtttgtttgattgtgatttattttgttgtagtaagtatcaaatgtggttgctttatacatttttttgtttcttaccatcctctagatacttgctttctctgct

SEQ ID NO: 20364 - protein, 302 aa, Zea mays subsp. mays
  peptide (1)..(302): Ceres Seq. ID no. 14309101
  misc_feature (141)..(192): Pfam Name: Pfam Description:  WD domain, G-beta repeat
  misc_feature (1)..(302): NCBI GI NO: 15232095 NR Description: protein transport protein SEC13 family / WD-40repeat protein family
  misc_feature (1)..(302): NCBI GI NO: 21593236 NR Description: transport protein SEC13, putative
  misc_feature (1)..(302): NCBI GI NO: 15227692 NR Description: transducin / WD-40 repeat protein family
  misc_feature (1)..(302): NCBI GI NO: 21593146 NR Description: putative protein transport protein SEC13
  misc_feature (1)..(301): NCBI GI NO: 18147582 NR Description: Sec13p [Oryza sativa]
  misc_feature (1)..(302): NCBI GI NO: 34393220 NR Description: putative Sec13p
  misc_feature (1)..(302): NCBI GI NO: 34897242 NR Description: putative coat protein complex II (COPII) component
  misc_feature (6)..(300): NCBI GI NO: 32451650 NR Description: Unknown (protein for MGC:63980) [Danio rerio]
  misc_feature (6)..(300): NCBI GI NO: 38174439 NR Description: Unknown (protein for MGC:76017)
  misc_feature (6)..(300): NCBI GI NO: 27696242 NR Description: Similar to RIKEN cDNA 1110003H02 gene
MPPQKIETGHSDIVHDVVMDYYGKRIATASSDGTIKITGVSNSGGSQQLATLTGHRGPVWQVAWAHPKYDSLLASCSYDGQIIIWKEGNQNEWTQSHVFTDHKVSVNSIAWAPHELGLSLACGASDGNISVFSARADGGWDTTRIDQAHPVGVTSVSWAPATEPGALVSSGMHEPVYKLASGGCDSTVKVWKFANGSWKMDCFPALHKHKDWVRDVAWAPNLGLPKSTIASGSEDGSVIIWTVGKEGEQWEGKVLKDFKTPVWRVTWSMTGNLLAVSDGNNNVTVWKEAVDGEWEQVTVVEP

SEQ ID NO: 20365 - protein, 284 aa, Zea mays subsp. mays
  peptide (1)..(284): Ceres Seq. ID no. 14309102
  misc_feature (123)..(174): Pfam Name: Pfam Description:  WD domain, G-beta repeat
  misc_feature (1)..(284): NCBI GI NO: 15232095 NR Description: protein transport protein SEC13 family / WD-40repeat protein family
  misc_feature (1)..(284): NCBI GI NO: 21593236 NR Description: transport protein SEC13, putative
  misc_feature (1)..(284): NCBI GI NO: 15227692 NR Description: transducin / WD-40 repeat protein family
  misc_feature (1)..(284): NCBI GI NO: 21593146 NR Description: putative protein transport protein SEC13
  misc_feature (1)..(283): NCBI GI NO: 18147582 NR Description: Sec13p [Oryza sativa]
  misc_feature (1)..(284): NCBI GI NO: 34393220 NR Description: putative Sec13p
  misc_feature (1)..(284): NCBI GI NO: 34897242 NR Description: putative coat protein complex II (COPII) component
  misc_feature (1)..(282): NCBI GI NO: 32451650 NR Description: Unknown (protein for MGC:63980) [Danio rerio]
  misc_feature (1)..(282): NCBI GI NO: 38174439 NR Description: Unknown (protein for MGC:76017)
  misc_feature (1)..(282): NCBI GI NO: 27696242 NR Description: Similar to RIKEN cDNA 1110003H02 gene
MDYYGKRIATASSDGTIKITGVSNSGGSQQLATLTGHRGPVWQVAWAHPKYDSLLASCSYDGQIIIWKEGNQNEWTQSHVFTDHKVSVNSIAWAPHELGLSLACGASDGNISVFSARADGGWDTTRIDQAHPVGVTSVSWAPATEPGALVSSGMHEPVYKLASGGCDSTVKVWKFANGSWKMDCFPALHKHKDWVRDVAWAPNLGLPKSTIASGSEDGSVIIWTVGKEGEQWEGKVLKDFKTPVWRVTWSMTGNLLAVSDGNNNVTVWKEAVDGEWEQVTVVEP

SEQ ID NO: 20366 - DNA, 692 bp, Zea mays subsp. mays
  misc_feature (1)..(692): Ceres Seq. ID no. 14309080
aaaatatatataatcttgtcatacttctctcaaacccggttcttgtctgaagaaagcagaatcaatccatgtctttcagaggacttcgcaagccaaatgcaacatccggaatgggtgttgcggaccagagcaagaccacataccacgagctccagaggaagaagactcatcgctacgtcgtcttcaagatcgacgaactcaaaaaccaagtggtggttgagaagacaggaaacccagcggagagctacgatgacttcttagcttctctccccgacaatgattgcagatacgccgtttacgactttgatttcgtcaccgctgagaattgccagaaaagcaaaatcttcttcgtcgcttggtctccagacacttcaagagtcagggcgaagatggtttacgcgacttcgaaagagaggtttaggagggagcttcaagggattcactatgagattcaagctactgatcctactgaggttgatcttgatgtcctacgcgaacgagccgactgaggattatttgttctctattaagacgattacttatggtaatgtaatgaaaataatcattcaggatttctcgtattctcgtctcgtgggtggatttgtgtaaccacagtttcatgttctatggacaagtgtactaaactcagttgatgtttcagattgctcatctataaaacctctttgtaactc

SEQ ID NO: 20367 - protein, 146 aa, Zea mays subsp. mays
  peptide (1)..(146): Ceres Seq. ID no. 14309081
  misc_feature (19)..(146): Pfam Name: Pfam Description:  Cofilin/tropomyosin-type actin-binding protein
  misc_feature (1)..(146): NCBI GI NO: 18402587 NR Description: actin depolymerizing factor 6
  misc_feature (1)..(146): NCBI GI NO: 21554405 NR Description: Actin-depolymerizing factor ADF-6
  misc_feature (1)..(145): NCBI GI NO: 32363121 NR Description: Actin-depolymerizing factor (ADF)
  misc_feature (1)..(145): NCBI GI NO: 24745620 NR Description: actin depolymerizing factor 6 [Solanum tuberosum]
  misc_feature (9)..(146): NCBI GI NO: 4566614 NR Description: actin depolymerizing factor [Populus x canescens]
  misc_feature (15)..(146): NCBI GI NO: 25295741 NR Description: actin depolymerizing factor 6
  misc_feature (13)..(146): NCBI GI NO: 7330254 NR Description: actin depolymerizing factor [Elaeis guineensis]
  misc_feature (10)..(145): NCBI GI NO: 34897072 NR Description: putative actin-depolymerizing factor
  misc_feature (10)..(146): NCBI GI NO: 17366768 NR Description: Actin-depolymerizing factor 1 (ADF 1)
  misc_feature (10)..(146): NCBI GI NO: 30697300 NR Description: actin depolymerizing factor 4 - like protein
MSFRGLRKPNATSGMGVADQSKTTYHELQRKKTHRYVVFKIDELKNQVVVEKTGNPAESYDDFLASLPDNDCRYAVYDFDFVTAENCQKSKIFFVAWSPDTSRVRAKMVYATSKERFRRELQGIHYEIQATDPTEVDLDVLRERAD

SEQ ID NO: 20368 - protein, 132 aa, Zea mays subsp. mays
  peptide (1)..(132): Ceres Seq. ID no. 14309082
  misc_feature (5)..(132): Pfam Name: Pfam Description:  Cofilin/tropomyosin-type actin-binding protein
  misc_feature (1)..(132): NCBI GI NO: 18402587 NR Description: actin depolymerizing factor 6
  misc_feature (1)..(132): NCBI GI NO: 21554405 NR Description: Actin-depolymerizing factor ADF-6
  misc_feature (1)..(131): NCBI GI NO: 32363121 NR Description: Actin-depolymerizing factor (ADF)
  misc_feature (1)..(131): NCBI GI NO: 24745620 NR Description: actin depolymerizing factor 6 [Solanum tuberosum]
  misc_feature (1)..(132): NCBI GI NO: 4566614 NR Description: actin depolymerizing factor [Populus x canescens]
  misc_feature (1)..(132): NCBI GI NO: 25295741 NR Description: actin depolymerizing factor 6
  misc_feature (1)..(132): NCBI GI NO: 7330254 NR Description: actin depolymerizing factor [Elaeis guineensis]
  misc_feature (1)..(131): NCBI GI NO: 34897072 NR Description: putative actin-depolymerizing factor
  misc_feature (1)..(132): NCBI GI NO: 17366768 NR Description: Actin-depolymerizing factor 1 (ADF 1)
  misc_feature (1)..(132): NCBI GI NO: 30697300 NR Description: actin depolymerizing factor 4 - like protein
MGVADQSKTTYHELQRKKTHRYVVFKIDELKNQVVVEKTGNPAESYDDFLASLPDNDCRYAVYDFDFVTAENCQKSKIFFVAWSPDTSRVRAKMVYATSKERFRRELQGIHYEIQATDPTEVDLDVLRERAD

SEQ ID NO: 20369 - protein, 110 aa, Zea mays subsp. mays
  peptide (1)..(110): Ceres Seq. ID no. 14309083
MIADTPFTTLISSPLRIARKAKSSSSLGLQTLQESGRRWFTRLRKRGLGGSFKGFTMRFKLLILLRLILMSYANEPTEDYLFSIKTITYGNVMKIIIQDFSYSRLVGGFV

SEQ ID NO: 20370 - DNA, 1177 bp, Zea mays subsp. mays
  misc_feature (1)..(1177): Ceres Seq. ID no. 14309076
aggacaaaaaaaaagatagtggagggatcctctcgggaaccgggaccgtgattggtctcgtcgaggccgagagtgagaggatgatgatgatgatgcgaagaatcatctccgagagagctacttgtgtctctaagaactttattctcagatcctctgcttcgcggtttcacggcgagtctctcgattcctccgtctcacccgttctcattcccggcgtccatgtcttccactgccaggacgcagttggaatcgtagcaaagctatcagattgtattgcagctaaaggcggaaacattctcggctacgatgtctttgttcctgagaacaacaacgtcttctactctcgcagtgagtttatatttgatccggtgaaatggccgagagagcaaatgagtgaagactttcaagctattgcgcaaagattcggtgccatgaactctgttgttcgtgttccttctatagatcccaagtataagattgctcttctactttctaaacaggatcattgtctggtggaaatgttgcatagatggcaagacggaaaactccctgtggatataacatgtgtgataagcaatcatgagagagcttcaaacactcatgttatgcggtttcttgagaggcatggcattccgtatcattatgtagccacaactaaagataataaacgagaagatgagattttggatttggttaaagacactgacttcttagttctcgctagatacatgcagattctatcgggtaagttcttgaaaggttatggaaaggatgtaatcaatattcaccatggtctcttgccatcattcaagggcggatatccagccaaacaggcgtttgatgcaggtgtgaagctgattggagcaacaagtcactttgttactgaggaacttgatgcagggcctatcattgaacaaatggttgagagtgtttcccaccgggacaatctaaggagctttgtccagaaatctgaggacctcgagaaaaaatgcctaacaaaagctataaagtcatactgcgaactacgtgtgttaccttatggagcaaacaagactgttgtattctaatagaacaagcaaagactatttgttgtatgaataactcaaaagaaagttataacaattctcttgaagatttctgattcacttgcagttaatgtgaacaagttatttacagg

SEQ ID NO: 20371 - protein, 354 aa, Zea mays subsp. mays
  peptide (1)..(354): Ceres Seq. ID no. 14309077
  misc_feature (157)..(335): Pfam Name: Pfam Description:  Formyl transferase
  misc_feature (30)..(354): NCBI GI NO: 18422794 NR Description: formyltetrahydrofolate deformylase, putative
  misc_feature (30)..(354): NCBI GI NO: 15236046 NR Description: formyltetrahydrofolate deformylase, putative
  misc_feature (89)..(354): NCBI GI NO: 7433570 NR Description: probable formyltransferase purU - Arabidopsisthaliana
  misc_feature (77)..(354): NCBI GI NO: 15606867 NR Description: formyltetrahydrofolate deformylase
  misc_feature (61)..(354): NCBI GI NO: 37523894 NR Description: formyltetrahydrofolate deformylase
  misc_feature (77)..(354): NCBI GI NO: 27381066 NR Description: formyltetrahydrofolate deformylase
  misc_feature (74)..(354): NCBI GI NO: 15599510 NR Description: formyltetrahydrofolate deformylase
  misc_feature (74)..(354): NCBI GI NO: 23063861 NR Description: hypothetical protein
  misc_feature (77)..(354): NCBI GI NO: 15805611 NR Description: formyltetrahydrofolate deformylase
  misc_feature (77)..(354): NCBI GI NO: 36958741 NR Description: Formyltetrahydrofolate deformylase
DKKKDSGGILSGTGTVIGLVEAESERMMMMMRRIISERATCVSKNFILRSSASRFHGESLDSSVSPVLIPGVHVFHCQDAVGIVAKLSDCIAAKGGNILGYDVFVPENNNVFYSRSEFIFDPVKWPREQMSEDFQAIAQRFGAMNSVVRVPSIDPKYKIALLLSKQDHCLVEMLHRWQDGKLPVDITCVISNHERASNTHVMRFLERHGIPYHYVATTKDNKREDEILDLVKDTDFLVLARYMQILSGKFLKGYGKDVINIHHGLLPSFKGGYPAKQAFDAGVKLIGATSHFVTEELDAGPIIEQMVESVSHRDNLRSFVQKSEDLEKKCLTKAIKSYCELRVLPYGANKTVVF

SEQ ID NO: 20372 - protein, 328 aa, Zea mays subsp. mays
  peptide (1)..(328): Ceres Seq. ID no. 14309078
  misc_feature (131)..(309): Pfam Name: Pfam Description:  Formyl transferase
  misc_feature (4)..(328): NCBI GI NO: 18422794 NR Description: formyltetrahydrofolate deformylase, putative
  misc_feature (4)..(328): NCBI GI NO: 15236046 NR Description: formyltetrahydrofolate deformylase, putative
  misc_feature (63)..(328): NCBI GI NO: 7433570 NR Description: probable formyltransferase purU - Arabidopsisthaliana
  misc_feature (51)..(328): NCBI GI NO: 15606867 NR Description: formyltetrahydrofolate deformylase
  misc_feature (35)..(328): NCBI GI NO: 37523894 NR Description: formyltetrahydrofolate deformylase
  misc_feature (51)..(328): NCBI GI NO: 27381066 NR Description: formyltetrahydrofolate deformylase
  misc_feature (48)..(328): NCBI GI NO: 15599510 NR Description: formyltetrahydrofolate deformylase
  misc_feature (48)..(328): NCBI GI NO: 23063861 NR Description: hypothetical protein
  misc_feature (51)..(328): NCBI GI NO: 15805611 NR Description: formyltetrahydrofolate deformylase
  misc_feature (51)..(328): NCBI GI NO: 36958741 NR Description: Formyltetrahydrofolate deformylase
MMMMMRRIISERATCVSKNFILRSSASRFHGESLDSSVSPVLIPGVHVFHCQDAVGIVAKLSDCIAAKGGNILGYDVFVPENNNVFYSRSEFIFDPVKWPREQMSEDFQAIAQRFGAMNSVVRVPSIDPKYKIALLLSKQDHCLVEMLHRWQDGKLPVDITCVISNHERASNTHVMRFLERHGIPYHYVATTKDNKREDEILDLVKDTDFLVLARYMQILSGKFLKGYGKDVINIHHGLLPSFKGGYPAKQAFDAGVKLIGATSHFVTEELDAGPIIEQMVESVSHRDNLRSFVQKSEDLEKKCLTKAIKSYCELRVLPYGANKTVVF

SEQ ID NO: 20373 - protein, 327 aa, Zea mays subsp. mays
  peptide (1)..(327): Ceres Seq. ID no. 14309079
  misc_feature (130)..(308): Pfam Name: Pfam Description:  Formyl transferase
  misc_feature (3)..(327): NCBI GI NO: 18422794 NR Description: formyltetrahydrofolate deformylase, putative
  misc_feature (3)..(327): NCBI GI NO: 15236046 NR Description: formyltetrahydrofolate deformylase, putative
  misc_feature (62)..(327): NCBI GI NO: 7433570 NR Description: probable formyltransferase purU - Arabidopsisthaliana
  misc_feature (50)..(327): NCBI GI NO: 15606867 NR Description: formyltetrahydrofolate deformylase
  misc_feature (34)..(327): NCBI GI NO: 37523894 NR Description: formyltetrahydrofolate deformylase
  misc_feature (50)..(327): NCBI GI NO: 27381066 NR Description: formyltetrahydrofolate deformylase
  misc_feature (47)..(327): NCBI GI NO: 15599510 NR Description: formyltetrahydrofolate deformylase
  misc_feature (47)..(327): NCBI GI NO: 23063861 NR Description: hypothetical protein
  misc_feature (50)..(327): NCBI GI NO: 15805611 NR Description: formyltetrahydrofolate deformylase
  misc_feature (50)..(327): NCBI GI NO: 36958741 NR Description: Formyltetrahydrofolate deformylase
MMMMRRIISERATCVSKNFILRSSASRFHGESLDSSVSPVLIPGVHVFHCQDAVGIVAKLSDCIAAKGGNILGYDVFVPENNNVFYSRSEFIFDPVKWPREQMSEDFQAIAQRFGAMNSVVRVPSIDPKYKIALLLSKQDHCLVEMLHRWQDGKLPVDITCVISNHERASNTHVMRFLERHGIPYHYVATTKDNKREDEILDLVKDTDFLVLARYMQILSGKFLKGYGKDVINIHHGLLPSFKGGYPAKQAFDAGVKLIGATSHFVTEELDAGPIIEQMVESVSHRDNLRSFVQKSEDLEKKCLTKAIKSYCELRVLPYGANKTVVF

SEQ ID NO: 20374 - DNA, 780 bp, Zea mays subsp. mays
  misc_feature (1)..(780): Ceres Seq. ID no. 15178116
aagaaaggattcttattcgttctctctcttttgcacgccattaacaaaaaagaaagaaagaaagaaagctcatcggtttctcagatccacttcttcttcggttaatctcttgtcttttctgatcgctcgttaggtctgagccatggcttctaagaggattctgaaagagcttaaggatttgcagaaggatcctccttctaactgcagcgcaggtcctgtggctgaggacatgttccattggcaagcaactatcatgggacctcctgacagtccttacgctggaggagtctttttggtttccattcactttccgccggattatcctttcaagcccccaaaggtgtcttttaagacaagggtgtaccatcccaacatcaacagcaatggaagcatttgccttgatatcctgaaagaacagtggagtcctgctcttaccatatcaaaggtattgctgtcgatctgctcattgctgacagacccgaacccagatgatcctcttgtgccagagattgcgcatatgtacaagacggataagaccaagtacgagtcaactgcccgaagctggacgcagaagtacgccatgggatgatgaagagtcaagttgtggtcgaacacaagcaaaagcataacgttatttctcatctaaatatattgaactgcatttgtttggtttagttaaacgctattattatgtgatcataattgagcaacttatatgctattgctcttactctgttccaactgatatcattattattcacgttacttaaggttttaatc

SEQ ID NO: 20375 - protein, 148 aa, Zea mays subsp. mays
  peptide (1)..(148): Ceres Seq. ID no. 15178117
  misc_feature (1)..(148): NCBI GI NO: 18398206 NR Description: ubiquitin-conjugating enzyme 11 (UBC11)
  misc_feature (1)..(148): NCBI GI NO: 2668744 NR Description: ubiquitin conjugating enzyme [Zea mays]
  misc_feature (1)..(148): NCBI GI NO: 34909292 NR Description: ubiquitin conjugating enzyme
  misc_feature (1)..(148): NCBI GI NO: 464981 NR Description: Ubiquitin-conjugating enzyme E2-17 kDa
  misc_feature (1)..(148): NCBI GI NO: 40287554 NR Description: ubiquitin-conjugating enzyme 8 [Capsicum annuum]
  misc_feature (1)..(148): NCBI GI NO: 18423494 NR Description: ubiquitin-conjugating enzyme 10 (UBC10)
  misc_feature (1)..(148): NCBI GI NO: 456568 NR Description: ubiquitin conjugating enzyme
  misc_feature (1)..(148): NCBI GI NO: 11762186 NR Description: AT4g27960 [Arabidopsis thaliana]
  misc_feature (1)..(148): NCBI GI NO: 18417097 NR Description: ubiquitin-conjugating enzyme 9 (UBC9)
  misc_feature (1)..(148): NCBI GI NO: 30687803 NR Description: ubiquitin-conjugating enzyme 9 (UBC9)
MASKRILKELKDLQKDPPSNCSAGPVAEDMFHWQATIMGPPDSPYAGGVFLVSIHFPPDYPFKPPKVSFKTRVYHPNINSNGSICLDILKEQWSPALTISKVLLSICSLLTDPNPDDPLVPEIAHMYKTDKTKYESTARSWTQKYAMG

SEQ ID NO: 20376 - protein, 119 aa, Zea mays subsp. mays
  peptide (1)..(119): Ceres Seq. ID no. 15178118
  misc_feature (1)..(119): NCBI GI NO: 18398206 NR Description: ubiquitin-conjugating enzyme 11 (UBC11)
  misc_feature (1)..(119): NCBI GI NO: 2668744 NR Description: ubiquitin conjugating enzyme [Zea mays]
  misc_feature (1)..(119): NCBI GI NO: 34909292 NR Description: ubiquitin conjugating enzyme
  misc_feature (1)..(119): NCBI GI NO: 464981 NR Description: Ubiquitin-conjugating enzyme E2-17 kDa
  misc_feature (1)..(119): NCBI GI NO: 40287554 NR Description: ubiquitin-conjugating enzyme 8 [Capsicum annuum]
  misc_feature (1)..(119): NCBI GI NO: 18423494 NR Description: ubiquitin-conjugating enzyme 10 (UBC10)
  misc_feature (1)..(119): NCBI GI NO: 456568 NR Description: ubiquitin conjugating enzyme
  misc_feature (1)..(119): NCBI GI NO: 11762186 NR Description: AT4g27960 [Arabidopsis thaliana]
  misc_feature (1)..(119): NCBI GI NO: 30687803 NR Description: ubiquitin-conjugating enzyme 9 (UBC9)
  misc_feature (1)..(119): NCBI GI NO: 18417097 NR Description: ubiquitin-conjugating enzyme 9 (UBC9)
MFHWQATIMGPPDSPYAGGVFLVSIHFPPDYPFKPPKVSFKTRVYHPNINSNGSICLDILKEQWSPALTISKVLLSICSLLTDPNPDDPLVPEIAHMYKTDKTKYESTARSWTQKYAMG

SEQ ID NO: 20377 - protein, 111 aa, Zea mays subsp. mays
  peptide (1)..(111): Ceres Seq. ID no. 15178119
  misc_feature (1)..(111): NCBI GI NO: 18398206 NR Description: ubiquitin-conjugating enzyme 11 (UBC11)
  misc_feature (1)..(111): NCBI GI NO: 2668744 NR Description: ubiquitin conjugating enzyme [Zea mays]
  misc_feature (1)..(111): NCBI GI NO: 34909292 NR Description: ubiquitin conjugating enzyme
  misc_feature (1)..(111): NCBI GI NO: 464981 NR Description: Ubiquitin-conjugating enzyme E2-17 kDa
  misc_feature (1)..(111): NCBI GI NO: 40287554 NR Description: ubiquitin-conjugating enzyme 8 [Capsicum annuum]
  misc_feature (1)..(111): NCBI GI NO: 18423494 NR Description: ubiquitin-conjugating enzyme 10 (UBC10)
  misc_feature (1)..(111): NCBI GI NO: 456568 NR Description: ubiquitin conjugating enzyme
  misc_feature (1)..(111): NCBI GI NO: 11762186 NR Description: AT4g27960 [Arabidopsis thaliana]
  misc_feature (1)..(111): NCBI GI NO: 18417097 NR Description: ubiquitin-conjugating enzyme 9 (UBC9)
  misc_feature (1)..(111): NCBI GI NO: 30687803 NR Description: ubiquitin-conjugating enzyme 9 (UBC9)
MGPPDSPYAGGVFLVSIHFPPDYPFKPPKVSFKTRVYHPNINSNGSICLDILKEQWSPALTISKVLLSICSLLTDPNPDDPLVPEIAHMYKTDKTKYESTARSWTQKYAMG

SEQ ID NO: 20378 - DNA, 984 bp, Zea mays subsp. mays
  misc_feature (1)..(984): Ceres Seq. ID no. 15177541
aaaaaaggcttttgtcttcttgtcggagtgaaaatggcttcgtcgtacacgctttcctttatccctatgacggtcgtcgtttcgcggcggagtgcatctccctcgccttcttcttccctgattcctcctccgtctctgctaggtaagaagcttctggtgacacaaccgtcgcgccgccgcttcttctccaagaagcaccggtgcttgacgtcggccagcacggtctttagcgtcccaactgcgcagccggagaatggttcttcggacaagatcccaaaatggtcggcgagagcgataaaatcactggcgatgggggaattggaggctaggaagctcaagtatccaactaccggaagcgaagccattctcatgggaattttggtcgaaggtactagtacagctgctaagttcctgagggcgaatggaatcacactttttaaggtgagagatgagattataaagctgctagggaaatcagatatgtacttcttcagccctgagcatcctcctctaaccgaacccgctcgcaaggccgttgactgggctattgatgagaagaagaaatctggtgtggatggggaactaaccactgcctacttgcttcttggggtttggtctcaaaaggactcagcaggccgccagattttggaggcgctcgggtttaacgaagataaagccaaacaagttgctgaagcgatgaatgaagatgtagatttgagcttcaagaaacaaagtcaatagtgatgaaggttttattacaatcagcaaagcttatgcaactgtatggagtagcaaaaaccaactcctgattcaagacaaaccagtctcactctttattagcatttcagtatttggttgtttaagttttatttatttttgcattatacagctattgtgcatcttatcacaagttcttcacaactccaaaatataattcagttgcttttgcttcccggtctggtttatgttatttctattaaatac

SEQ ID NO: 20379 - protein, 246 aa, Zea mays subsp. mays
  peptide (1)..(246): Ceres Seq. ID no. 15177542
  misc_feature (182)..(234): Pfam Name: Pfam Description:  Clp amino terminal domain
  misc_feature (14)..(246): NCBI GI NO: 18416540 NR Description: expressed protein [Arabidopsis thaliana]
  misc_feature (14)..(234): NCBI GI NO: 7487579 NR Description: hypothetical protein T30C3
  misc_feature (28)..(235): NCBI GI NO: 21592785 NR Description: unknown [Arabidopsis thaliana]
  misc_feature (73)..(235): NCBI GI NO: 18413740 NR Description: expressed protein [Arabidopsis thaliana]
  misc_feature (73)..(227): NCBI GI NO: 7485569 NR Description: hypothetical protein F16J13
  misc_feature (85)..(245): NCBI GI NO: 17230491 NR Description: endopeptidase Clp ATP-binding chain
  misc_feature (93)..(235): NCBI GI NO: 23039549 NR Description: hypothetical protein
  misc_feature (86)..(240): NCBI GI NO: 7428213 NR Description: endopeptidase Clp ATP-binding chain C -Synechococcus sp
  misc_feature (93)..(240): NCBI GI NO: 22297851 NR Description: ATP-dependent Clp protease regulatory subunit
  misc_feature (93)..(240): NCBI GI NO: 37521633 NR Description: endopeptidase Clp ATP-binding chain
KKGFCLLVGVKMASSYTLSFIPMTVVVSRRSASPSPSSSLIPPPSLLGKKLLVTQPSRRRFFSKKHRCLTSASTVFSVPTAQPENGSSDKIPKWSARAIKSLAMGELEARKLKYPTTGSEAILMGILVEGTSTAAKFLRANGITLFKVRDEIIKLLGKSDMYFFSPEHPPLTEPARKAVDWAIDEKKKSGVDGELTTAYLLLGVWSQKDSAGRQILEALGFNEDKAKQVAEAMNEDVDLSFKKQSQ

SEQ ID NO: 20380 - protein, 235 aa, Zea mays subsp. mays
  peptide (1)..(235): Ceres Seq. ID no. 15177543
  misc_feature (171)..(223): Pfam Name: Pfam Description:  Clp amino terminal domain
  misc_feature (3)..(235): NCBI GI NO: 18416540 NR Description: expressed protein [Arabidopsis thaliana]
  misc_feature (3)..(223): NCBI GI NO: 7487579 NR Description: hypothetical protein T30C3
  misc_feature (17)..(224): NCBI GI NO: 21592785 NR Description: unknown [Arabidopsis thaliana]
  misc_feature (62)..(224): NCBI GI NO: 18413740 NR Description: expressed protein [Arabidopsis thaliana]
  misc_feature (62)..(216): NCBI GI NO: 7485569 NR Description: hypothetical protein F16J13
  misc_feature (74)..(234): NCBI GI NO: 17230491 NR Description: endopeptidase Clp ATP-binding chain
  misc_feature (82)..(224): NCBI GI NO: 23039549 NR Description: hypothetical protein
  misc_feature (75)..(229): NCBI GI NO: 7428213 NR Description: endopeptidase Clp ATP-binding chain C -Synechococcus sp
  misc_feature (82)..(229): NCBI GI NO: 22297851 NR Description: ATP-dependent Clp protease regulatory subunit
  misc_feature (82)..(229): NCBI GI NO: 23128552 NR Description: hypothetical protein [Nostoc punctiforme]
MASSYTLSFIPMTVVVSRRSASPSPSSSLIPPPSLLGKKLLVTQPSRRRFFSKKHRCLTSASTVFSVPTAQPENGSSDKIPKWSARAIKSLAMGELEARKLKYPTTGSEAILMGILVEGTSTAAKFLRANGITLFKVRDEIIKLLGKSDMYFFSPEHPPLTEPARKAVDWAIDEKKKSGVDGELTTAYLLLGVWSQKDSAGRQILEALGFNEDKAKQVAEAMNEDVDLSFKKQSQ

SEQ ID NO: 20381 - protein, 224 aa, Zea mays subsp. mays
  peptide (1)..(224): Ceres Seq. ID no. 15177544
  misc_feature (160)..(212): Pfam Name: Pfam Description:  Clp amino terminal domain
  misc_feature (1)..(224): NCBI GI NO: 18416540 NR Description: expressed protein [Arabidopsis thaliana]
  misc_feature (1)..(212): NCBI GI NO: 7487579 NR Description: hypothetical protein T30C3
  misc_feature (6)..(213): NCBI GI NO: 21592785 NR Description: unknown [Arabidopsis thaliana]
  misc_feature (51)..(213): NCBI GI NO: 18413740 NR Description: expressed protein [Arabidopsis thaliana]
  misc_feature (51)..(205): NCBI GI NO: 7485569 NR Description: hypothetical protein F16J13
  misc_feature (63)..(223): NCBI GI NO: 17230491 NR Description: endopeptidase Clp ATP-binding chain
  misc_feature (71)..(213): NCBI GI NO: 23039549 NR Description: hypothetical protein
  misc_feature (64)..(218): NCBI GI NO: 7428213 NR Description: endopeptidase Clp ATP-binding chain C -Synechococcus sp
  misc_feature (71)..(218): NCBI GI NO: 22297851 NR Description: ATP-dependent Clp protease regulatory subunit
  misc_feature (71)..(218): NCBI GI NO: 23128552 NR Description: hypothetical protein [Nostoc punctiforme]
MTVVVSRRSASPSPSSSLIPPPSLLGKKLLVTQPSRRRFFSKKHRCLTSASTVFSVPTAQPENGSSDKIPKWSARAIKSLAMGELEARKLKYPTTGSEAILMGILVEGTSTAAKFLRANGITLFKVRDEIIKLLGKSDMYFFSPEHPPLTEPARKAVDWAIDEKKKSGVDGELTTAYLLLGVWSQKDSAGRQILEALGFNEDKAKQVAEAMNEDVDLSFKKQSQ

SEQ ID NO: 20382 - DNA, 837 bp, Zea mays subsp. mays
  misc_feature (1)..(837): Ceres Seq. ID no. 14309072
aataatttctgtaagatcatcaaaagttgatacaccaagctgatttataaacctctacacactcaatttctagcatacaaaaataaaagaaatgggaacagagatggtaatgattcacgaggttccttttcctccacagatcatcacttccaagcccttctctcttcttggccaaggcatcactgacatcgagatccatttccttcaagtgaagttcacggccataggagtttacttagatccttcagatgttaaaacccatcttgacaaatggaaaggcaagaccggaaaggatcttgccggtgatgacgacttcttcgacgccctggcctccggggagattgaaaaggttataagagtggtggtgataaaggaaataaaaggagctcagtacggtgtgcagctagagaattcggtgagagatcgtttggctgctgaggataagtacgaggaagaagaagaaaacgagctcgagaaagttgtaggattttttcagtctaagtacttcaagactcattccatcatcacttaccgtttctcagccaaagatggtatctgcgagattggatttgagacggaaggtaaagaagaggacaaattgaaagtagagaatgcgaatgtggtagggatgatgcagaaatggtacttgtctggaagtcgaggagtttcaccgtccaccatcgtctccctcgccgattctctgtccgcagttttaacctaaaactccttatataagcctatatcatctatgtgtgtgttttatgttgttgtattatgtcgttcttaagtgagacatcgtgtttggttatctttataaaatgttgaatggttgtcttt

SEQ ID NO: 20383 - protein, 209 aa, Zea mays subsp. mays
  peptide (1)..(209): Ceres Seq. ID no. 14309073
  misc_feature (1)..(209): Pfam Name: Pfam Description:  Chalcone-flavanone isomerase
  misc_feature (1)..(209): NCBI GI NO: 18414838 NR Description: chalcone-flavanone isomerase family
  misc_feature (5)..(209): NCBI GI NO: 10176739 NR Description: contains similarity to chalcone-flavonone isomerase
  misc_feature (3)..(208): NCBI GI NO: 4126399 NR Description: chalcone isomerase [Citrus sinensis]
  misc_feature (6)..(208): NCBI GI NO: 3041652 NR Description: CHALCONE--FLAVONONE ISOMERASE (CHALCONE ISOMERASE)
  misc_feature (3)..(209): NCBI GI NO: 5921722 NR Description: Chalcone--flavonone isomerase (Chalcone isomerase)
  misc_feature (6)..(208): NCBI GI NO: 116134 NR Description: CHALCONE--FLAVONONE ISOMERASE 1
  misc_feature (6)..(209): NCBI GI NO: 14582263 NR Description: chalcone isomerase [Glycine max]
  misc_feature (1)..(208): NCBI GI NO: 20152986 NR Description: chalcone isomerase
  misc_feature (6)..(208): NCBI GI NO: 22218879 NR Description: Chain A, Chalcone Isomerase--Y106f Mutant
  misc_feature (6)..(205): NCBI GI NO: 1705761 NR Description: CHALCONE--FLAVONONE ISOMERASE (CHALCONE ISOMERASE)
MGTEMVMIHEVPFPPQIITSKPFSLLGQGITDIEIHFLQVKFTAIGVYLDPSDVKTHLDKWKGKTGKDLAGDDDFFDALASGEIEKVIRVVVIKEIKGAQYGVQLENSVRDRLAAEDKYEEEEENELEKVVGFFQSKYFKTHSIITYRFSAKDGICEIGFETEGKEEDKLKVENANVVGMMQKWYLSGSRGVSPSTIVSLADSLSAVLT

SEQ ID NO: 20384 - protein, 205 aa, Zea mays subsp. mays
  peptide (1)..(205): Ceres Seq. ID no. 14309074
  misc_feature (1)..(205): Pfam Name: Pfam Description:  Chalcone-flavanone isomerase
  misc_feature (1)..(205): NCBI GI NO: 18414838 NR Description: chalcone-flavanone isomerase family
  misc_feature (1)..(205): NCBI GI NO: 10176739 NR Description: contains similarity to chalcone-flavonone isomerase
  misc_feature (1)..(204): NCBI GI NO: 4126399 NR Description: chalcone isomerase [Citrus sinensis]
  misc_feature (2)..(204): NCBI GI NO: 3041652 NR Description: CHALCONE--FLAVONONE ISOMERASE (CHALCONE ISOMERASE)
  misc_feature (1)..(205): NCBI GI NO: 5921722 NR Description: Chalcone--flavonone isomerase (Chalcone isomerase)
  misc_feature (2)..(204): NCBI GI NO: 116134 NR Description: CHALCONE--FLAVONONE ISOMERASE 1
  misc_feature (2)..(205): NCBI GI NO: 14582263 NR Description: chalcone isomerase [Glycine max]
  misc_feature (1)..(204): NCBI GI NO: 20152986 NR Description: chalcone isomerase
  misc_feature (2)..(204): NCBI GI NO: 22218879 NR Description: Chain A, Chalcone Isomerase--Y106f Mutant
  misc_feature (2)..(201): NCBI GI NO: 1705761 NR Description: CHALCONE--FLAVONONE ISOMERASE (CHALCONE ISOMERASE)
MVMIHEVPFPPQIITSKPFSLLGQGITDIEIHFLQVKFTAIGVYLDPSDVKTHLDKWKGKTGKDLAGDDDFFDALASGEIEKVIRVVVIKEIKGAQYGVQLENSVRDRLAAEDKYEEEEENELEKVVGFFQSKYFKTHSIITYRFSAKDGICEIGFETEGKEEDKLKVENANVVGMMQKWYLSGSRGVSPSTIVSLADSLSAVLT

SEQ ID NO: 20385 - protein, 203 aa, Zea mays subsp. mays
  peptide (1)..(203): Ceres Seq. ID no. 14309075
  misc_feature (1)..(203): Pfam Name: Pfam Description:  Chalcone-flavanone isomerase
  misc_feature (1)..(203): NCBI GI NO: 18414838 NR Description: chalcone-flavanone isomerase family
  misc_feature (1)..(203): NCBI GI NO: 10176739 NR Description: contains similarity to chalcone-flavonone isomerase
  misc_feature (1)..(202): NCBI GI NO: 4126399 NR Description: chalcone isomerase [Citrus sinensis]
  misc_feature (1)..(202): NCBI GI NO: 3041652 NR Description: CHALCONE--FLAVONONE ISOMERASE (CHALCONE ISOMERASE)
  misc_feature (1)..(203): NCBI GI NO: 5921722 NR Description: Chalcone--flavonone isomerase (Chalcone isomerase)
  misc_feature (1)..(202): NCBI GI NO: 116134 NR Description: CHALCONE--FLAVONONE ISOMERASE 1
  misc_feature (1)..(203): NCBI GI NO: 14582263 NR Description: chalcone isomerase [Glycine max]
  misc_feature (1)..(202): NCBI GI NO: 20152986 NR Description: chalcone isomerase
  misc_feature (1)..(202): NCBI GI NO: 22218879 NR Description: Chain A, Chalcone Isomerase--Y106f Mutant
  misc_feature (1)..(199): NCBI GI NO: 1705761 NR Description: CHALCONE--FLAVONONE ISOMERASE (CHALCONE ISOMERASE)
MIHEVPFPPQIITSKPFSLLGQGITDIEIHFLQVKFTAIGVYLDPSDVKTHLDKWKGKTGKDLAGDDDFFDALASGEIEKVIRVVVIKEIKGAQYGVQLENSVRDRLAAEDKYEEEEENELEKVVGFFQSKYFKTHSIITYRFSAKDGICEIGFETEGKEEDKLKVENANVVGMMQKWYLSGSRGVSPSTIVSLADSLSAVLT

SEQ ID NO: 20386 - DNA, 913 bp, Zea mays subsp. mays
  misc_feature (1)..(913): Ceres Seq. ID no. 15177534
acatttaataatgatttcactcatcaatcaaacaaaaccttttgtatttgatttttggttcttctctctctctctctatcgattagatctctgaatacgaagatcataaaagttttctgaagacgactttgtcatgtttttgttcgattggttctatggaatcctggccacgctaggcttgtggcagaaagaggcgaagatcttgtttctaggtctcgacaatgccggaaaaacaactctgcttcacatgctcaaagacgagagattagttcagcaccagccaacacagcatcccacatctgaggaactgagcattggcaaaatcaagttcaaggcctttgacttgggtggccatcagattgcacgtagggtctggaaagactactatgccaaggttgatgctgttgtgtacctagttgatgcttacgacaaggagaggtttgtggagtcaaaaagagagcttgacgctcttctatctgatgaagcattagctagtgtcccttttcttatccttgggaacaagattgatattccttatgcagcctctgaagatgagctcaggtatcatttgggtctcaccaatttcactaccggtaaaagcaacgtgagtcttggagaatctggtgttcgtccccttgaggtcttcatgtgcagcatcgtccgcaaaatgggatatggtgagggcttcaagtggctgtcttactacatcaagtaggaaaccaaacaagcattggtgatttgcttcacggttttatgaatcagacatctcaaattttttcctctttgaaaagacaaactgtttctctcttgtagtttcctcttaaagttctaatactatatgttaagtctgatggcttacaactctaaaacaaaaatgtgattctgattgtgaagtagtaatcattattatttc

SEQ ID NO: 20387 - protein, 193 aa, Zea mays subsp. mays
  peptide (1)..(193): Ceres Seq. ID no. 15177535
  misc_feature (5)..(192): Pfam Name: Pfam Description:  ADP-ribosylation factor family
  misc_feature (1)..(192): NCBI GI NO: 15223516 NR Description: GTP-binding protein SAR1B [Arabidopsis thaliana]
  misc_feature (1)..(193): NCBI GI NO: 34894960 NR Description: putative GTP-binding protein
  misc_feature (1)..(193): NCBI GI NO: 15235226 NR Description: GTP-binding protein SAR1A [Arabidopsis thaliana]
  misc_feature (1)..(192): NCBI GI NO: 3334322 NR Description: GTP-binding protein SAR1B
  misc_feature (1)..(193): NCBI GI NO: 3334321 NR Description: GTP-binding protein SAR1A
  misc_feature (1)..(192): NCBI GI NO: 15228793 NR Description: GTP-binding protein SAR1A, putative
  misc_feature (1)..(193): NCBI GI NO: 1549222 NR Description: NtSar1 protein [Nicotiana tabacum]
  misc_feature (1)..(192): NCBI GI NO: 25294172 NR Description: ras-like small monomeric GTP-binding protein
  misc_feature (1)..(193): NCBI GI NO: 25294173 NR Description: small GTP-binding protein Sar1BNt
  misc_feature (1)..(191): NCBI GI NO: 32403708 NR Description: hypothetical protein [Neurospora crassa]
MFLFDWFYGILATLGLWQKEAKILFLGLDNAGKTTLLHMLKDERLVQHQPTQHPTSEELSIGKIKFKAFDLGGHQIARRVWKDYYAKVDAVVYLVDAYDKERFVESKRELDALLSDEALASVPFLILGNKIDIPYAASEDELRYHLGLTNFTTGKSNVSLGESGVRPLEVFMCSIVRKMGYGEGFKWLSYYIK

SEQ ID NO: 20388 - protein, 155 aa, Zea mays subsp. mays
  peptide (1)..(155): Ceres Seq. ID no. 15177536
  misc_feature (1)..(154): Pfam Name: Pfam Description:  ADP-ribosylation factor family
  misc_feature (1)..(154): NCBI GI NO: 15223516 NR Description: GTP-binding protein SAR1B [Arabidopsis thaliana]
  misc_feature (1)..(155): NCBI GI NO: 34894960 NR Description: putative GTP-binding protein
  misc_feature (1)..(155): NCBI GI NO: 15235226 NR Description: GTP-binding protein SAR1A [Arabidopsis thaliana]
  misc_feature (1)..(154): NCBI GI NO: 3334322 NR Description: GTP-binding protein SAR1B
  misc_feature (1)..(155): NCBI GI NO: 3334321 NR Description: GTP-binding protein SAR1A
  misc_feature (1)..(154): NCBI GI NO: 15228793 NR Description: GTP-binding protein SAR1A, putative
  misc_feature (1)..(155): NCBI GI NO: 1549222 NR Description: NtSar1 protein [Nicotiana tabacum]
  misc_feature (1)..(154): NCBI GI NO: 25294172 NR Description: ras-like small monomeric GTP-binding protein
  misc_feature (1)..(155): NCBI GI NO: 25294173 NR Description: small GTP-binding protein Sar1BNt
  misc_feature (1)..(153): NCBI GI NO: 32403708 NR Description: hypothetical protein [Neurospora crassa]
MLKDERLVQHQPTQHPTSEELSIGKIKFKAFDLGGHQIARRVWKDYYAKVDAVVYLVDAYDKERFVESKRELDALLSDEALASVPFLILGNKIDIPYAASEDELRYHLGLTNFTTGKSNVSLGESGVRPLEVFMCSIVRKMGYGEGFKWLSYYIK

SEQ ID NO: 20389 - DNA, 1566 bp, Zea mays subsp. mays
  misc_feature (1)..(1566): Ceres Seq. ID no. 15179015
attactaacccattttcccaatcaatcactcttcacttctcccactcctactcctttttctcctttctaagcaatctctctctctctccttatattctcaaatttgattctctctctctcatacctgcacaccactaccaacagagctaaattgctacactgtaaaaaagaagatgtttggacaaagcttcccggaggatattgattgtggcaacttctttgacaacatggacgacattcttgactttcccggttgtgatatggatgtcggtttcaacatcggtgactccgactctttccctaacatctggaccaatcatcaggacacatggcccgccgcttctgaccctctcttctcttccaacacaaactctgactcatcacctgagctctatgttccgtttgaagatattgtgaaagtggaaaggccagcaagctttgtatcggagtctttggtcgcgaagaaggaagattcgttttccacaaacacggactcatcttcttctcacagccagttcaggagctcaagtccagtgtcggtactcgaaagcagctcctcatcgtctcaaaccaccaacgcaacctcacttgtcctctctggaaagcacggtcgtccacgcacaaaacgccctcgcccaccggttcaggagatggacagagtcaatgtttgcggggcggattcgcgtctcatcgttagaataccaaagcagtttctctctgaccacagcaagatgatcaccaagaagaagaagaagaaggccaaggttacttcttcctattcttcgtcggggattgatcttgaaaccaacggaagcaacaacaacaacaacgttgattcatatgattcagagcagcatccggttaggaaatgtatgcactgtgaggtcaccaagactccacagtggaggcttgggcctatgggtccaaagacgctttgcaacgcgtgtggcgtgcgttacaagtctggaaggcttttcccggagtaccgtccagctaatagtccaacattcactccagctcttcactcaaactcacacaagaaggtggctgaaatgagaagcaagagatgcagcggtggaagctacacaaacgaagagagtgatctgcaagatttgattccgaacaatgcctacattggtgtggattaagatcgaaaaaagatggttcagtttccaagcgttgaagtgattagagttgcgaggagtaggaaagagtcagtgagcagaaaagttttagctttagaagagatgaatgaagaagagaggatcaagagttagatgaaaagtgattgtgtttgtattttgtatttgtagtgtgtatgtgcaaaactcttgaacacaaaagaagagcagaagattttgaagacactagagaacgttaggttttacattaaatcttcctctccttttcttctttcaattctttgtatttttactgtgaggattctttttgtagttgatttgtttatttttttgtttttgttaaaattttattttattcattagctgcacttaagagcatctccaaaccattgttatttttgcttctattatagcatttagaatc

SEQ ID NO: 20390 - protein, 324 aa, Zea mays subsp. mays
  peptide (1)..(324): Ceres Seq. ID no. 15179016
  misc_feature (1)..(324): NCBI GI NO: 15233101 NR Description: GATA zinc finger protein [Arabidopsis thaliana]
  misc_feature (3)..(297): NCBI GI NO: 37572443 NR Description: AG-motif binding protein-1 [Nicotiana tabacum]
  misc_feature (3)..(297): NCBI GI NO: 37572451 NR Description: AG-motif binding protein-5 [Nicotiana tabacum]
  misc_feature (17)..(297): NCBI GI NO: 15223086 NR Description: GATA zinc finger protein [Arabidopsis thaliana]
  misc_feature (103)..(297): NCBI GI NO: 15451574 NR Description: Putative GATA-1 zinc finger protein [Oryza sativa]
  misc_feature (115)..(308): NCBI GI NO: 12711287 NR Description: GATA-1 zinc finger protein [Nicotiana tabacum]
  misc_feature (68)..(297): NCBI GI NO: 8778844 NR Description: T6D22.9 [Arabidopsis thaliana]
  misc_feature (115)..(297): NCBI GI NO: 15223085 NR Description: GATA zinc finger protein [Arabidopsis thaliana]
  misc_feature (19)..(298): NCBI GI NO: 15239503 NR Description: GATA zinc finger protein [Arabidopsis thaliana]
  misc_feature (231)..(307): NCBI GI NO: 37572445 NR Description: AG-motif binding protein-2 [Nicotiana tabacum]
MFGQSFPEDIDCGNFFDNMDDILDFPGCDMDVGFNIGDSDSFPNIWTNHQDTWPAASDPLFSSNTNSDSSPELYVPFEDIVKVERPASFVSESLVAKKEDSFSTNTDSSSSHSQFRSSSPVSVLESSSSSSQTTNATSLVLSGKHGRPRTKRPRPPVQEMDRVNVCGADSRLIVRIPKQFLSDHSKMITKKKKKKAKVTSSYSSSGIDLETNGSNNNNNVDSYDSEQHPVRKCMHCEVTKTPQWRLGPMGPKTLCNACGVRYKSGRLFPEYRPANSPTFTPALHSNSHKKVAEMRSKRCSGGSYTNEESDLQDLIPNNAYIGVD

SEQ ID NO: 20391 - protein, 306 aa, Zea mays subsp. mays
  peptide (1)..(306): Ceres Seq. ID no. 15179017
  misc_feature (1)..(306): NCBI GI NO: 15233101 NR Description: GATA zinc finger protein [Arabidopsis thaliana]
  misc_feature (1)..(279): NCBI GI NO: 37572443 NR Description: AG-motif binding protein-1 [Nicotiana tabacum]
  misc_feature (1)..(279): NCBI GI NO: 37572451 NR Description: AG-motif binding protein-5 [Nicotiana tabacum]
  misc_feature (1)..(279): NCBI GI NO: 15223086 NR Description: GATA zinc finger protein [Arabidopsis thaliana]
  misc_feature (85)..(279): NCBI GI NO: 15451574 NR Description: Putative GATA-1 zinc finger protein [Oryza sativa]
  misc_feature (97)..(290): NCBI GI NO: 12711287 NR Description: GATA-1 zinc finger protein [Nicotiana tabacum]
  misc_feature (50)..(279): NCBI GI NO: 8778844 NR Description: T6D22.9 [Arabidopsis thaliana]
  misc_feature (97)..(279): NCBI GI NO: 15223085 NR Description: GATA zinc finger protein [Arabidopsis thaliana]
  misc_feature (1)..(280): NCBI GI NO: 15239503 NR Description: GATA zinc finger protein [Arabidopsis thaliana]
  misc_feature (213)..(289): NCBI GI NO: 37572445 NR Description: AG-motif binding protein-2 [Nicotiana tabacum]
MDDILDFPGCDMDVGFNIGDSDSFPNIWTNHQDTWPAASDPLFSSNTNSDSSPELYVPFEDIVKVERPASFVSESLVAKKEDSFSTNTDSSSSHSQFRSSSPVSVLESSSSSSQTTNATSLVLSGKHGRPRTKRPRPPVQEMDRVNVCGADSRLIVRIPKQFLSDHSKMITKKKKKKAKVTSSYSSSGIDLETNGSNNNNNVDSYDSEQHPVRKCMHCEVTKTPQWRLGPMGPKTLCNACGVRYKSGRLFPEYRPANSPTFTPALHSNSHKKVAEMRSKRCSGGSYTNEESDLQDLIPNNAYIGVD

SEQ ID NO: 20392 - protein, 295 aa, Zea mays subsp. mays
  peptide (1)..(295): Ceres Seq. ID no. 15179018
  misc_feature (1)..(295): NCBI GI NO: 15233101 NR Description: GATA zinc finger protein [Arabidopsis thaliana]
  misc_feature (1)..(268): NCBI GI NO: 37572443 NR Description: AG-motif binding protein-1 [Nicotiana tabacum]
  misc_feature (1)..(268): NCBI GI NO: 37572451 NR Description: AG-motif binding protein-5 [Nicotiana tabacum]
  misc_feature (1)..(268): NCBI GI NO: 15223086 NR Description: GATA zinc finger protein [Arabidopsis thaliana]
  misc_feature (74)..(268): NCBI GI NO: 15451574 NR Description: Putative GATA-1 zinc finger protein [Oryza sativa]
  misc_feature (86)..(279): NCBI GI NO: 12711287 NR Description: GATA-1 zinc finger protein [Nicotiana tabacum]
  misc_feature (39)..(268): NCBI GI NO: 8778844 NR Description: T6D22.9 [Arabidopsis thaliana]
  misc_feature (86)..(268): NCBI GI NO: 15223085 NR Description: GATA zinc finger protein [Arabidopsis thaliana]
  misc_feature (1)..(269): NCBI GI NO: 15239503 NR Description: GATA zinc finger protein [Arabidopsis thaliana]
  misc_feature (202)..(278): NCBI GI NO: 37572445 NR Description: AG-motif binding protein-2 [Nicotiana tabacum]
MDVGFNIGDSDSFPNIWTNHQDTWPAASDPLFSSNTNSDSSPELYVPFEDIVKVERPASFVSESLVAKKEDSFSTNTDSSSSHSQFRSSSPVSVLESSSSSSQTTNATSLVLSGKHGRPRTKRPRPPVQEMDRVNVCGADSRLIVRIPKQFLSDHSKMITKKKKKKAKVTSSYSSSGIDLETNGSNNNNNVDSYDSEQHPVRKCMHCEVTKTPQWRLGPMGPKTLCNACGVRYKSGRLFPEYRPANSPTFTPALHSNSHKKVAEMRSKRCSGGSYTNEESDLQDLIPNNAYIGVD

SEQ ID NO: 20393 - DNA, 857 bp, Zea mays subsp. mays
  misc_feature (1)..(857): Ceres Seq. ID no. 14309053
atagctgttaaaggaacctaaaatggcgaaagttttagatctttctctggttctctgtgttctgtgtgtgtccactgcagcaatagccatggcaagaaaccttggagaggaatctagcgatgatactgagttcatcaaatcctcttgtgagacagcaacgtacccggaactatgttttcagtctctgtcttcttacgcaagcgagatcaagaagcggccactacagctcgccgagacagcgctcgccgttagcatggcccaggcaaagtctgccaaaacatatatctcggacatgactgactacaaaggaatcacaaagaggcagcacgaggctgtgttggactgtgttgaagaaatgggagatactgttgataggttgagcaagtcgctgaaggagttgaagaatctggaggaaggagagagcaaagaagacttctggttctgtttgagcaatgtccggacgtggacaagcgcggcgctgacagatgagaccacgtgtcttgatgggtttggagggaaaggcatggatggggagctgaaaagcttagtcagagcacacattgtgcgtgtggcgcaagatacgagtaatgccttggctttgatcaatgtctatgcttccaagcattgaatatattgcaacggtttggtcctgaggacttgagctttttatacttttggatttggtttgtattgtgtttccaagaaatgtgttttggtttggttccgagtcatatcagtttctcttgccacattgttatatcatctacggtctatatagtttgaagctgttcattttgatgtttgattggtgatatagttttgtaagccatgaagagtattttgcaatattctctttt

SEQ ID NO: 20394 - protein, 201 aa, Zea mays subsp. mays
  peptide (1)..(201): Ceres Seq. ID no. 14309054
  misc_feature (1)..(201): NCBI GI NO: 15234982 NR Description: pectinesterase - related [Arabidopsis thaliana]
  misc_feature (18)..(201): NCBI GI NO: 15241799 NR Description: pectinesterase family [Arabidopsis thaliana]
  misc_feature (2)..(201): NCBI GI NO: 7406663 NR Description: putative ripening-related protein [Vitis vinifera]
  misc_feature (4)..(201): NCBI GI NO: 21618088 NR Description: ripening-related protein-like
  misc_feature (36)..(201): NCBI GI NO: 112717 NR Description: 21 KD PROTEIN PRECURSOR (1.2 PROTEIN)
  misc_feature (31)..(201): NCBI GI NO: 7488727 NR Description: 21K protein precursor - alfalfa
  misc_feature (1)..(201): NCBI GI NO: 15234547 NR Description: pectinesterase - related [Arabidopsis thaliana]
  misc_feature (1)..(201): NCBI GI NO: 21555297 NR Description: unknown [Arabidopsis thaliana]
  misc_feature (1)..(201): NCBI GI NO: 15232790 NR Description: pectinesterase - related [Arabidopsis thaliana]
  misc_feature (5)..(200): NCBI GI NO: 18407657 NR Description: pectinesterase family [Arabidopsis thaliana]
MAKVLDLSLVLCVLCVSTAAIAMARNLGEESSDDTEFIKSSCETATYPELCFQSLSSYASEIKKRPLQLAETALAVSMAQAKSAKTYISDMTDYKGITKRQHEAVLDCVEEMGDTVDRLSKSLKELKNLEEGESKEDFWFCLSNVRTWTSAALTDETTCLDGFGGKGMDGELKSLVRAHIVRVAQDTSNALALINVYASKH

SEQ ID NO: 20395 - protein, 179 aa, Zea mays subsp. mays
  peptide (1)..(179): Ceres Seq. ID no. 14309055
  misc_feature (1)..(179): NCBI GI NO: 15234982 NR Description: pectinesterase - related [Arabidopsis thaliana]
  misc_feature (1)..(179): NCBI GI NO: 15241799 NR Description: pectinesterase family [Arabidopsis thaliana]
  misc_feature (1)..(179): NCBI GI NO: 7406663 NR Description: putative ripening-related protein [Vitis vinifera]
  misc_feature (1)..(179): NCBI GI NO: 21618088 NR Description: ripening-related protein-like
  misc_feature (14)..(179): NCBI GI NO: 112717 NR Description: 21 KD PROTEIN PRECURSOR (1.2 PROTEIN)
  misc_feature (9)..(179): NCBI GI NO: 7488727 NR Description: 21K protein precursor - alfalfa
  misc_feature (1)..(179): NCBI GI NO: 15234547 NR Description: pectinesterase - related [Arabidopsis thaliana]
  misc_feature (1)..(179): NCBI GI NO: 21555297 NR Description: unknown [Arabidopsis thaliana]
  misc_feature (1)..(179): NCBI GI NO: 15232790 NR Description: pectinesterase - related [Arabidopsis thaliana]
  misc_feature (1)..(178): NCBI GI NO: 18407657 NR Description: pectinesterase family [Arabidopsis thaliana]
MARNLGEESSDDTEFIKSSCETATYPELCFQSLSSYASEIKKRPLQLAETALAVSMAQAKSAKTYISDMTDYKGITKRQHEAVLDCVEEMGDTVDRLSKSLKELKNLEEGESKEDFWFCLSNVRTWTSAALTDETTCLDGFGGKGMDGELKSLVRAHIVRVAQDTSNALALINVYASKH

SEQ ID NO: 20396 - protein, 124 aa, Zea mays subsp. mays
  peptide (1)..(124): Ceres Seq. ID no. 14309056
  misc_feature (1)..(124): NCBI GI NO: 15234982 NR Description: pectinesterase - related [Arabidopsis thaliana]
  misc_feature (1)..(124): NCBI GI NO: 15241799 NR Description: pectinesterase family [Arabidopsis thaliana]
  misc_feature (1)..(124): NCBI GI NO: 7406663 NR Description: putative ripening-related protein [Vitis vinifera]
  misc_feature (1)..(124): NCBI GI NO: 21618088 NR Description: ripening-related protein-like
  misc_feature (1)..(124): NCBI GI NO: 112717 NR Description: 21 KD PROTEIN PRECURSOR (1.2 PROTEIN)
  misc_feature (1)..(124): NCBI GI NO: 7488727 NR Description: 21K protein precursor - alfalfa
  misc_feature (1)..(124): NCBI GI NO: 15234547 NR Description: pectinesterase - related [Arabidopsis thaliana]
  misc_feature (1)..(124): NCBI GI NO: 21555297 NR Description: unknown [Arabidopsis thaliana]
  misc_feature (1)..(124): NCBI GI NO: 15232790 NR Description: pectinesterase - related [Arabidopsis thaliana]
  misc_feature (1)..(123): NCBI GI NO: 18407657 NR Description: pectinesterase family [Arabidopsis thaliana]
MAQAKSAKTYISDMTDYKGITKRQHEAVLDCVEEMGDTVDRLSKSLKELKNLEEGESKEDFWFCLSNVRTWTSAALTDETTCLDGFGGKGMDGELKSLVRAHIVRVAQDTSNALALINVYASKH

SEQ ID NO: 20397 - DNA, 1022 bp, Zea mays subsp. mays
  misc_feature (1)..(1022): Ceres Seq. ID no. 15177682
aaaaaccacacattcaaaacttactctgaggaactgaacagagaagaagactagacagacagagaggagactctgtgtgtgtgtgaggaagcaacaaatgtccatatccatggcgttattctctccgccaatctcttctccacttcaaaactctaacctcatccccaagatcccactctctctcctctccaccaagcgcctctctctcgtcgccctcactcgagcctcgtccgacaacggtacgtcaacacccgcttccgcaaccaccgtggaggctccaactccaaagcctgcctctgtagaagaggttccggtaaaatctccggcggaaagcccctccgcgtctgaaaatggcgccgttggagcccaagagattgatgatatgacaaccaccacgatgacggagatcaagtttcaggacgcgaagtgggttaatggaacatgggacctgaaacagttcgagaaagaaggcaaaacggactgggactctgttatcgttgctgaggcaaagaggagaaagtggcttgaagataacccggagacaactagtaacgacgagcctgtcctcttcgacacctccatcattccatggtgggcatggatgaagagataccatctacccgaagctgaactcctcaatggtcgtgcggcgatggtagggttcttcatggcttactttgttgacagccttacaggagtaggacttgttgatcaaatggggaatttcttctgcaaaacactcttgtttgtggctgtagccggagttcttttcatccgcaagaacgaagatttggataaactaaagggtctgattgaagagacgacgttatatgacaagcaatggcaagcggcatggaaagagccggagtcatcatcatcatcaacggtttcttcaaagaagtgaagaaaatttatggcttaaaatgtttcctcttttgttatgtgatgatgataagtgacagtcccaagataatttctttattgtattactgatattgagattgtaatctttctggctttag

SEQ ID NO: 20398 - protein, 268 aa, Zea mays subsp. mays
  peptide (1)..(268): Ceres Seq. ID no. 15177683
  misc_feature (1)..(268): NCBI GI NO: 30695110 NR Description: Lil3 protein [Arabidopsis thaliana]
  misc_feature (5)..(268): NCBI GI NO: 8978078 NR Description: Lil3 protein [Arabidopsis thaliana]
  misc_feature (5)..(268): NCBI GI NO: 21555799 NR Description: Lil3 protein [Arabidopsis thaliana]
  misc_feature (5)..(268): NCBI GI NO: 7485188 NR Description: hypothetical protein - Arabidopsis thaliana
  misc_feature (5)..(268): NCBI GI NO: 18414927 NR Description: Lil3 protein [Arabidopsis thaliana]
MSISMALFSPPISSPLQNSNLIPKIPLSLLSTKRLSLVALTRASSDNGTSTPASATTVEAPTPKPASVEEVPVKSPAESPSASENGAVGAQEIDDMTTTTMTEIKFQDAKWVNGTWDLKQFEKEGKTDWDSVIVAEAKRRKWLEDNPETTSNDEPVLFDTSIIPWWAWMKRYHLPEAELLNGRAAMVGFFMAYFVDSLTGVGLVDQMGNFFCKTLLFVAVAGVLFIRKNEDLDKLKGLIEETTLYDKQWQAAWKEPESSSSSTVSSKK

SEQ ID NO: 20399 - protein, 264 aa, Zea mays subsp. mays
  peptide (1)..(264): Ceres Seq. ID no. 15177684
  misc_feature (1)..(264): NCBI GI NO: 30695110 NR Description: Lil3 protein [Arabidopsis thaliana]
  misc_feature (1)..(264): NCBI GI NO: 8978078 NR Description: Lil3 protein [Arabidopsis thaliana]
  misc_feature (1)..(264): NCBI GI NO: 21555799 NR Description: Lil3 protein [Arabidopsis thaliana]
  misc_feature (1)..(264): NCBI GI NO: 7485188 NR Description: hypothetical protein - Arabidopsis thaliana
  misc_feature (1)..(264): NCBI GI NO: 18414927 NR Description: Lil3 protein [Arabidopsis thaliana]
MALFSPPISSPLQNSNLIPKIPLSLLSTKRLSLVALTRASSDNGTSTPASATTVEAPTPKPASVEEVPVKSPAESPSASENGAVGAQEIDDMTTTTMTEIKFQDAKWVNGTWDLKQFEKEGKTDWDSVIVAEAKRRKWLEDNPETTSNDEPVLFDTSIIPWWAWMKRYHLPEAELLNGRAAMVGFFMAYFVDSLTGVGLVDQMGNFFCKTLLFVAVAGVLFIRKNEDLDKLKGLIEETTLYDKQWQAAWKEPESSSSSTVSSKK

SEQ ID NO: 20400 - protein, 173 aa, Zea mays subsp. mays
  peptide (1)..(173): Ceres Seq. ID no. 15177685
  misc_feature (1)..(173): NCBI GI NO: 30695110 NR Description: Lil3 protein [Arabidopsis thaliana]
  misc_feature (1)..(173): NCBI GI NO: 8978078 NR Description: Lil3 protein [Arabidopsis thaliana]
  misc_feature (1)..(173): NCBI GI NO: 21555799 NR Description: Lil3 protein [Arabidopsis thaliana]
  misc_feature (1)..(173): NCBI GI NO: 7485188 NR Description: hypothetical protein - Arabidopsis thaliana
  misc_feature (1)..(173): NCBI GI NO: 18414927 NR Description: Lil3 protein [Arabidopsis thaliana]
MTTTTMTEIKFQDAKWVNGTWDLKQFEKEGKTDWDSVIVAEAKRRKWLEDNPETTSNDEPVLFDTSIIPWWAWMKRYHLPEAELLNGRAAMVGFFMAYFVDSLTGVGLVDQMGNFFCKTLLFVAVAGVLFIRKNEDLDKLKGLIEETTLYDKQWQAAWKEPESSSSSTVSSKK

SEQ ID NO: 20401 - DNA, 1426 bp, Zea mays subsp. mays
  misc_feature (1)..(1426): Ceres Seq. ID no. 15178891
cataattttttattaaagtctcttttgctctctcctttactttggtcgttcacaatgaaaggaggcaccgtctcgtttctcttcgttcttctcatctccaccgtcacctccatcttctgcttccgggacgggatgttaccaaacggagattttgagctaggaccaaaaccatcggacatgaaaggaacacaagtgataaacaagaacgctattccaagctgggagcttacaggcttcgtcgaatacataaaatccggtcaaaaacaaggagacatgctcctagtagtccctgccggaaaattcgccgtccggctaggaaacgaagcatcgatcaaacagagacttaacgtgaccaaaggaatgtattactcgctcacgttcagtgccgcaaggacttgtgctcaagacgaacggctcaacatatcggtggcccctgactcgggcgtcattcctatacagactgtatacagtaacagtgggtgggatctatacgcttgggcgtttcaggctgaaagtaacgtggcagagatcgtgattcataatcctggcgaggaagaagatcctgcttgtggaccactcattgatggtgtggccatcaaggctctataccctccgagacctaccaataagaacatattgaaaaatggaggattcgaagaaggtccatatctactcccaaactccacaaccggcgttctgattcctcccttcatagaagatgaccactctcctctacccgcttggatggtcgaatccctcaaagccgtcaagtacgttgacgtcgaacacttctcagtcccacaaggccgtaaagcagtcgagctagttgcggggaaagaaagcgcgatcgctcaagtggctaggaccatcatagggaagacatacgtgctttctttcgcggttggagacgcgaacaacgcgtgcgaaggctcgatgatagtcgaggcgtttgcgggaagagacacgttaaaggttccttaccagtcgaaagggaagggaggtttcaaacgagctactttgcggttcgtggcggtttcgacccgcacgagggttatgttttacagcacgttttacgcgatgagaagcgatgatttctcgtcgttgtgtggccccgtgatcgacgatgttaagctcctcagcgttcataaggcttaaaatggtccttgttttattttaaaggttttttcgtataaggagtgaggggtttttctaaaaaagtaatttttatctctggtgcttttgaaatgagatgatttatataccgagtgagttgttatggtgtagggttatatataaaacagaaatgtcttgcttatatctattttcttgtatgagaaggctgaaaaaatgttgttcgttttcgttactatatattggatttcgaggagatcatatcatttacaaagtttaataatggtgtgctatt

SEQ ID NO: 20402 - protein, 384 aa, Zea mays subsp. mays
  peptide (1)..(384): Ceres Seq. ID no. 15178892
  misc_feature (60)..(380): Pfam Name: Pfam Description:  Protein of unknown function, DUF642
  misc_feature (19)..(383): NCBI GI NO: 15239049 NR Description: expressed protein [Arabidopsis thaliana]
  misc_feature (19)..(383): NCBI GI NO: 23397043 NR Description: unknown protein [Arabidopsis thaliana]
  misc_feature (19)..(383): NCBI GI NO: 21554402 NR Description: unknown [Arabidopsis thaliana]
  misc_feature (19)..(383): NCBI GI NO: 15239438 NR Description: expressed protein [Arabidopsis thaliana]
  misc_feature (19)..(383): NCBI GI NO: 21537379 NR Description: unknown [Arabidopsis thaliana]
  misc_feature (19)..(383): NCBI GI NO: 15809822 NR Description: AT5g25460/F18G18_200 [Arabidopsis thaliana]
  misc_feature (19)..(383): NCBI GI NO: 7488898 NR Description: hypothetical protein - castor bean
  misc_feature (27)..(383): NCBI GI NO: 18418018 NR Description: expressed protein [Arabidopsis thaliana]
  misc_feature (26)..(384): NCBI GI NO: 7488741 NR Description: hypothetical protein precursor - alfalfa
  misc_feature (60)..(383): NCBI GI NO: 7486632 NR Description: hypothetical protein F8B4
HNFLLKSLLLSPLLWSFTMKGGTVSFLFVLLISTVTSIFCFRDGMLPNGDFELGPKPSDMKGTQVINKNAIPSWELTGFVEYIKSGQKQGDMLLVVPAGKFAVRLGNEASIKQRLNVTKGMYYSLTFSAARTCAQDERLNISVAPDSGVIPIQTVYSNSGWDLYAWAFQAESNVAEIVIHNPGEEEDPACGPLIDGVAIKALYPPRPTNKNILKNGGFEEGPYLLPNSTTGVLIPPFIEDDHSPLPAWMVESLKAVKYVDVEHFSVPQGRKAVELVAGKESAIAQVARTIIGKTYVLSFAVGDANNACEGSMIVEAFAGRDTLKVPYQSKGKGGFKRATLRFVAVSTRTRVMFYSTFYAMRSDDFSSLCGPVIDDVKLLSVHKA

SEQ ID NO: 20403 - protein, 366 aa, Zea mays subsp. mays
  peptide (1)..(366): Ceres Seq. ID no. 15178893
  misc_feature (42)..(362): Pfam Name: Pfam Description:  Protein of unknown function, DUF642
  misc_feature (1)..(365): NCBI GI NO: 15239049 NR Description: expressed protein [Arabidopsis thaliana]
  misc_feature (1)..(365): NCBI GI NO: 23397043 NR Description: unknown protein [Arabidopsis thaliana]
  misc_feature (1)..(365): NCBI GI NO: 21554402 NR Description: unknown [Arabidopsis thaliana]
  misc_feature (1)..(365): NCBI GI NO: 15239438 NR Description: expressed protein [Arabidopsis thaliana]
  misc_feature (1)..(365): NCBI GI NO: 21537379 NR Description: unknown [Arabidopsis thaliana]
  misc_feature (1)..(365): NCBI GI NO: 15809822 NR Description: AT5g25460/F18G18_200 [Arabidopsis thaliana]
  misc_feature (1)..(365): NCBI GI NO: 7488898 NR Description: hypothetical protein - castor bean
  misc_feature (9)..(365): NCBI GI NO: 18418018 NR Description: expressed protein [Arabidopsis thaliana]
  misc_feature (8)..(366): NCBI GI NO: 7488741 NR Description: hypothetical protein precursor - alfalfa
  misc_feature (42)..(365): NCBI GI NO: 7486632 NR Description: hypothetical protein F8B4
MKGGTVSFLFVLLISTVTSIFCFRDGMLPNGDFELGPKPSDMKGTQVINKNAIPSWELTGFVEYIKSGQKQGDMLLVVPAGKFAVRLGNEASIKQRLNVTKGMYYSLTFSAARTCAQDERLNISVAPDSGVIPIQTVYSNSGWDLYAWAFQAESNVAEIVIHNPGEEEDPACGPLIDGVAIKALYPPRPTNKNILKNGGFEEGPYLLPNSTTGVLIPPFIEDDHSPLPAWMVESLKAVKYVDVEHFSVPQGRKAVELVAGKESAIAQVARTIIGKTYVLSFAVGDANNACEGSMIVEAFAGRDTLKVPYQSKGKGGFKRATLRFVAVSTRTRVMFYSTFYAMRSDDFSSLCGPVIDDVKLLSVHKA

SEQ ID NO: 20404 - protein, 340 aa, Zea mays subsp. mays
  peptide (1)..(340): Ceres Seq. ID no. 15178894
  misc_feature (16)..(336): Pfam Name: Pfam Description:  Protein of unknown function, DUF642
  misc_feature (1)..(339): NCBI GI NO: 15239049 NR Description: expressed protein [Arabidopsis thaliana]
  misc_feature (1)..(339): NCBI GI NO: 23397043 NR Description: unknown protein [Arabidopsis thaliana]
  misc_feature (1)..(339): NCBI GI NO: 21554402 NR Description: unknown [Arabidopsis thaliana]
  misc_feature (1)..(339): NCBI GI NO: 15239438 NR Description: expressed protein [Arabidopsis thaliana]
  misc_feature (1)..(339): NCBI GI NO: 21537379 NR Description: unknown [Arabidopsis thaliana]
  misc_feature (1)..(339): NCBI GI NO: 15809822 NR Description: AT5g25460/F18G18_200 [Arabidopsis thaliana]
  misc_feature (1)..(339): NCBI GI NO: 7488898 NR Description: hypothetical protein - castor bean
  misc_feature (1)..(339): NCBI GI NO: 18418018 NR Description: expressed protein [Arabidopsis thaliana]
  misc_feature (1)..(340): NCBI GI NO: 7488741 NR Description: hypothetical protein precursor - alfalfa
  misc_feature (16)..(339): NCBI GI NO: 7486632 NR Description: hypothetical protein F8B4
MLPNGDFELGPKPSDMKGTQVINKNAIPSWELTGFVEYIKSGQKQGDMLLVVPAGKFAVRLGNEASIKQRLNVTKGMYYSLTFSAARTCAQDERLNISVAPDSGVIPIQTVYSNSGWDLYAWAFQAESNVAEIVIHNPGEEEDPACGPLIDGVAIKALYPPRPTNKNILKNGGFEEGPYLLPNSTTGVLIPPFIEDDHSPLPAWMVESLKAVKYVDVEHFSVPQGRKAVELVAGKESAIAQVARTIIGKTYVLSFAVGDANNACEGSMIVEAFAGRDTLKVPYQSKGKGGFKRATLRFVAVSTRTRVMFYSTFYAMRSDDFSSLCGPVIDDVKLLSVHKA

SEQ ID NO: 20405 - DNA, 1122 bp, Zea mays subsp. mays
  misc_feature (1)..(1122): Ceres Seq. ID no. 15174315
gaaaggattcggattctctgtcaattagggaagagaagagaagttatcagcagtattgggataagatagatagatgagttcatctctacctatgaggctcctcgtgcctctcacacttcccttgattcctcctcctccttcttcttcggattctctagcgctcagatcgaaaaatcctaactttagtctccgatcctcttcttcttgtacctcttgctcttcttccctgtggcagctattcccccggagatccagatcctcttctccttgtgttcccatgtgcacgaaagatcaagacaggacagatattttgagaaatgaagatgatctagttacgtgtgggcttgaatctgatgaagattccggaggcctccggattcctactcaggctcaggccatcgttgaaggatccggttcagttgctgtctctgagctcaaaccttcccctgatgttgattacattcaagagctactggcgatacagcagcaagggcctagaaccattggcttttttgggactaggaacatgggtttcatgcaccaagaactcatcgagattcttagctacgccatggttattactaaaaaccatatatatacttcaggtgcatctggaactaatgcagctgttatcagaggtgcacttagagcagagaggccagagcttcttacagtaatcttacctcaaagtttgaaaaaacaacctcctgagagccaagaactcttgtcgaaggtgcaaaacgtggtagaaaagccacacaatgaccatttgccattactagaagccagcaggctgtgtaatatggacatcatatcacaagtacagcaagtgatctgcttcgcgtttcatgacagtaggctgctcatggagacatgccaagaagctaaaaatctccgcaagatcgtcactctcttctacctcgattgattcccactctcttctcctgggaacacaagaggatggatacaagtctcttatgtaaattgtgaatcttttcccatcccaaaacatattttactattcttttgtctagattttgcgcaaactccatcattatgatttgtaggattaaattctcagctattttgtaactttacatgggttataaaatatttcttctc

SEQ ID NO: 20406 - protein, 284 aa, Zea mays subsp. mays
  peptide (1)..(284): Ceres Seq. ID no. 15174316
  misc_feature (1)..(284): NCBI GI NO: 30689549 NR Description: predicted protein [Arabidopsis thaliana]
  misc_feature (1)..(284): NCBI GI NO: 21537298 NR Description: unknown [Arabidopsis thaliana]
  misc_feature (1)..(284): NCBI GI NO: 15232185 NR Description: expressed protein [Arabidopsis thaliana]
  misc_feature (1)..(260): NCBI GI NO: 7486491 NR Description: hypothetical protein At2g43940
  misc_feature (95)..(220): NCBI GI NO: 34894968 NR Description: B1088D01.6
  misc_feature (130)..(284): NCBI GI NO: 13812204 NR Description: hypothetical protein [Guillardia theta]
  misc_feature (117)..(284): NCBI GI NO: 16331173 NR Description: unknown protein [Synechocystis sp. PCC 6803]
  misc_feature (148)..(284): NCBI GI NO: 23043068 NR Description: hypothetical protein
MSSSLPMRLLVPLTLPLIPPPPSSSDSLALRSKNPNFSLRSSSSCTSCSSSLWQLFPRRSRSSSPCVPMCTKDQDRTDILRNEDDLVTCGLESDEDSGGLRIPTQAQAIVEGSGSVAVSELKPSPDVDYIQELLAIQQQGPRTIGFFGTRNMGFMHQELIEILSYAMVITKNHIYTSGASGTNAAVIRGALRAERPELLTVILPQSLKKQPPESQELLSKVQNVVEKPHNDHLPLLEASRLCNMDIISQVQQVICFAFHDSRLLMETCQEAKNLRKIVTLFYLD

SEQ ID NO: 20407 - protein, 278 aa, Zea mays subsp. mays
  peptide (1)..(278): Ceres Seq. ID no. 15174317
  misc_feature (1)..(278): NCBI GI NO: 30689549 NR Description: predicted protein [Arabidopsis thaliana]
  misc_feature (1)..(278): NCBI GI NO: 21537298 NR Description: unknown [Arabidopsis thaliana]
  misc_feature (1)..(278): NCBI GI NO: 15232185 NR Description: expressed protein [Arabidopsis thaliana]
  misc_feature (1)..(254): NCBI GI NO: 7486491 NR Description: hypothetical protein At2g43940
  misc_feature (89)..(214): NCBI GI NO: 34894968 NR Description: B1088D01.6
  misc_feature (124)..(278): NCBI GI NO: 13812204 NR Description: hypothetical protein [Guillardia theta]
  misc_feature (111)..(278): NCBI GI NO: 16331173 NR Description: unknown protein [Synechocystis sp. PCC 6803]
  misc_feature (142)..(278): NCBI GI NO: 23043068 NR Description: hypothetical protein
MRLLVPLTLPLIPPPPSSSDSLALRSKNPNFSLRSSSSCTSCSSSLWQLFPRRSRSSSPCVPMCTKDQDRTDILRNEDDLVTCGLESDEDSGGLRIPTQAQAIVEGSGSVAVSELKPSPDVDYIQELLAIQQQGPRTIGFFGTRNMGFMHQELIEILSYAMVITKNHIYTSGASGTNAAVIRGALRAERPELLTVILPQSLKKQPPESQELLSKVQNVVEKPHNDHLPLLEASRLCNMDIISQVQQVICFAFHDSRLLMETCQEAKNLRKIVTLFYLD

SEQ ID NO: 20408 - protein, 216 aa, Zea mays subsp. mays
  peptide (1)..(216): Ceres Seq. ID no. 15174318
  misc_feature (1)..(216): NCBI GI NO: 30689549 NR Description: predicted protein [Arabidopsis thaliana]
  misc_feature (1)..(216): NCBI GI NO: 21537298 NR Description: unknown [Arabidopsis thaliana]
  misc_feature (1)..(216): NCBI GI NO: 15232185 NR Description: expressed protein [Arabidopsis thaliana]
  misc_feature (1)..(192): NCBI GI NO: 7486491 NR Description: hypothetical protein At2g43940
  misc_feature (27)..(152): NCBI GI NO: 34894968 NR Description: B1088D01.6
  misc_feature (62)..(216): NCBI GI NO: 13812204 NR Description: hypothetical protein [Guillardia theta]
  misc_feature (49)..(216): NCBI GI NO: 16331173 NR Description: unknown protein [Synechocystis sp. PCC 6803]
  misc_feature (80)..(216): NCBI GI NO: 23043068 NR Description: hypothetical protein
MCTKDQDRTDILRNEDDLVTCGLESDEDSGGLRIPTQAQAIVEGSGSVAVSELKPSPDVDYIQELLAIQQQGPRTIGFFGTRNMGFMHQELIEILSYAMVITKNHIYTSGASGTNAAVIRGALRAERPELLTVILPQSLKKQPPESQELLSKVQNVVEKPHNDHLPLLEASRLCNMDIISQVQQVICFAFHDSRLLMETCQEAKNLRKIVTLFYLD

SEQ ID NO: 20409 - DNA, 963 bp, Zea mays subsp. mays
  misc_feature (1)..(963): Ceres Seq. ID no. 15179503
acaccagccaaaacaattgtcagtgtcttaaaagaaaagctttgcttctgaaacataaacacactttttaacaatctcaccaccgatcttcgattctttttgcgctttcctcagcacacaatggcgtcggcgaacaaagagatggctgtgtactgtttcgacactttggtctctcactacaacaacgaagactctcctccacctgcatttgacgacgccaatcacccattgtttgtcacctggaagaaaatagtgaacggtggggagcctcggctgcgtggatgtattggtacacttgaagcacgccgtttgatcagtggcttcaaggactacgccttgaccagtgccctgagggatcgtaggttcccaccaatccaacccaaagaactgccgtttctgcaatgcacggtgtccgtcctcactgattatgaagatgcagaggattatcttgattgggaggtgggaacgcatggtataatcattgagttcactgaacctgtgactaatataaagcgaaacgccacatatctccctgaggtgccagctcatgaaggctggacaaagatagaggcaatagattctctggtgcgtaaagccggatacaatggtgaaataactgaggcagtgcgtaggcgaatccagctaacaagataccagagcacattattcagcatgcattatagtgaatacctttcatacgtgaaggccacaagaggccttgtcccggctattaatgggaccagcaagcccttgtcctgatttgcaccaccaaactcctgcgaatgggtgcgagattggtcctgtttgggacctctcctaatttatcattgcatttgtgattcgaaactgtaatgctctctctgatttcaccttcaacgagacaagaatttagctgtttcaccattgtctgaaacgcaaccgtccgcacttaccatttctaatgaagttcatcgttttatcttc

SEQ ID NO: 20410 - protein, 212 aa, Zea mays subsp. mays
  peptide (1)..(212): Ceres Seq. ID no. 15179504
  misc_feature (4)..(187): Pfam Name: Pfam Description:  AMMECR1
  misc_feature (1)..(209): NCBI GI NO: 18404840 NR Description: expressed protein [Arabidopsis thaliana]
  misc_feature (1)..(206): NCBI GI NO: 37537060 NR Description: unknown protein
  misc_feature (7)..(192): NCBI GI NO: 23943793 NR Description: hypothetical protein MGC32132 [Mus musculus]
  misc_feature (7)..(192): NCBI GI NO: 34878672 NR Description: similar to hypothetical protein MGC32132
  misc_feature (7)..(193): NCBI GI NO: 7669554 NR Description: AMMECR1 protein [Homo sapiens]
  misc_feature (7)..(193): NCBI GI NO: 9506383 NR Description: AMMECR1 protein [Mus musculus]
  misc_feature (7)..(193): NCBI GI NO: 34784081 NR Description: Similar to AMMECR1 protein [Danio rerio]
  misc_feature (1)..(193): NCBI GI NO: 24649478 NR Description: CG5902-PA [Drosophila melanogaster]
  misc_feature (1)..(190): NCBI GI NO: 31203679 NR Description: ENSANGP00000015575 [Anopheles gambiae]
  misc_feature (1)..(193): NCBI GI NO: 39597428 NR Description: Hypothetical protein CBG03076
MASANKEMAVYCFDTLVSHYNNEDSPPPAFDDANHPLFVTWKKIVNGGEPRLRGCIGTLEARRLISGFKDYALTSALRDRRFPPIQPKELPFLQCTVSVLTDYEDAEDYLDWEVGTHGIIIEFTEPVTNIKRNATYLPEVPAHEGWTKIEAIDSLVRKAGYNGEITEAVRRRIQLTRYQSTLFSMHYSEYLSYVKATRGLVPAINGTSKPLS

SEQ ID NO: 20411 - protein, 205 aa, Zea mays subsp. mays
  peptide (1)..(205): Ceres Seq. ID no. 15179505
  misc_feature (1)..(180): Pfam Name: Pfam Description:  AMMECR1
  misc_feature (1)..(202): NCBI GI NO: 18404840 NR Description: expressed protein [Arabidopsis thaliana]
  misc_feature (1)..(199): NCBI GI NO: 37537060 NR Description: unknown protein
  misc_feature (1)..(185): NCBI GI NO: 23943793 NR Description: hypothetical protein MGC32132 [Mus musculus]
  misc_feature (1)..(185): NCBI GI NO: 34878672 NR Description: similar to hypothetical protein MGC32132
  misc_feature (1)..(186): NCBI GI NO: 7669554 NR Description: AMMECR1 protein [Homo sapiens]
  misc_feature (1)..(186): NCBI GI NO: 9506383 NR Description: AMMECR1 protein [Mus musculus]
  misc_feature (1)..(186): NCBI GI NO: 34784081 NR Description: Similar to AMMECR1 protein [Danio rerio]
  misc_feature (1)..(186): NCBI GI NO: 24649478 NR Description: CG5902-PA [Drosophila melanogaster]
  misc_feature (1)..(183): NCBI GI NO: 31203679 NR Description: ENSANGP00000015575 [Anopheles gambiae]
  misc_feature (1)..(186): NCBI GI NO: 39597428 NR Description: Hypothetical protein CBG03076
MAVYCFDTLVSHYNNEDSPPPAFDDANHPLFVTWKKIVNGGEPRLRGCIGTLEARRLISGFKDYALTSALRDRRFPPIQPKELPFLQCTVSVLTDYEDAEDYLDWEVGTHGIIIEFTEPVTNIKRNATYLPEVPAHEGWTKIEAIDSLVRKAGYNGEITEAVRRRIQLTRYQSTLFSMHYSEYLSYVKATRGLVPAINGTSKPLS

SEQ ID NO: 20412 - DNA, 784 bp, Zea mays subsp. mays
  misc_feature (1)..(784): Ceres Seq. ID no. 14309041
attaagattcactttttattccgatagatcagattcatttcctgaatctgttatataaaattctttctaaagaggaagaaatctcacggttccaacaggaaaaatgggttctgaacagaatgatagcacgagcttcacacaatcatcagagccgaaactttgtgcaaacggatgtggtttctttggttcgccatcaaacatggatctgtgttcgaaatgctaccgagacatatgcgcagaggaagctcaaacagctgttgcaaaagctgccgttgagaaatctttcaagccatcgccatcgcctcctcctcctaccctcttcatagcagagcctgatgtggcgaaaccagagaaagaaaaggcggttgctactgttcttgtggtggccgagccatcttctgcaacaggagaagctacagttcctgaacagaacaaaccaccatctaaacctgcacggccgaaccggtgcctttgttgcaacaagaaggttggtatacttgggtttaagtgcaaatgcgggagcactttctgcggcgaacatcggtaccctgagagacatgattgcagctttgatttcaaagaagctgggcgtggagagattgcaaaagccaatccggttattaaagctgataaacttcaaaggttctgagaaaggctacggtgttggtctctcttttcttttatctcaaattgtatttgaatggaattgggtttctactagtggattgtttccaaaggggggtaacatgatgaatttggttctttaataaactcagtcatctct

SEQ ID NO: 20413 - protein, 181 aa, Zea mays subsp. mays
  peptide (1)..(181): Ceres Seq. ID no. 14309042
  misc_feature (122)..(162): Pfam Name: Pfam Description:  AN1-like Zinc finger
  misc_feature (1)..(181): NCBI GI NO: 15235819 NR Description: zinc finger -related protein
  misc_feature (1)..(180): NCBI GI NO: 15234402 NR Description: expressed protein [Arabidopsis thaliana]
  misc_feature (1)..(180): NCBI GI NO: 8778645 NR Description: F5O11.17 [Arabidopsis thaliana]
  misc_feature (1)..(180): NCBI GI NO: 15221329 NR Description: expressed protein [Arabidopsis thaliana]
  misc_feature (18)..(180): NCBI GI NO: 15231686 NR Description: zinc finger - like protein [Arabidopsis thaliana]
  misc_feature (18)..(180): NCBI GI NO: 18404102 NR Description: expressed protein [Arabidopsis thaliana]
  misc_feature (16)..(180): NCBI GI NO: 15225894 NR Description: zinc finger protein -related
  misc_feature (18)..(180): NCBI GI NO: 14596167 NR Description: zinc finger-like protein [Arabidopsis thaliana]
  misc_feature (6)..(180): NCBI GI NO: 18403408 NR Description: expressed protein [Arabidopsis thaliana]
  misc_feature (6)..(180): NCBI GI NO: 25082726 NR Description: expressed protein [Arabidopsis thaliana]
MGSEQNDSTSFTQSSEPKLCANGCGFFGSPSNMDLCSKCYRDICAEEAQTAVAKAAVEKSFKPSPSPPPPTLFIAEPDVAKPEKEKAVATVLVVAEPSSATGEATVPEQNKPPSKPARPNRCLCCNKKVGILGFKCKCGSTFCGEHRYPERHDCSFDFKEAGRGEIAKANPVIKADKLQRF

SEQ ID NO: 20414 - protein, 149 aa, Zea mays subsp. mays
  peptide (1)..(149): Ceres Seq. ID no. 14309043
  misc_feature (90)..(130): Pfam Name: Pfam Description:  AN1-like Zinc finger
  misc_feature (1)..(149): NCBI GI NO: 15235819 NR Description: zinc finger -related protein
  misc_feature (1)..(148): NCBI GI NO: 15234402 NR Description: expressed protein [Arabidopsis thaliana]
  misc_feature (1)..(148): NCBI GI NO: 8778645 NR Description: F5O11.17 [Arabidopsis thaliana]
  misc_feature (1)..(148): NCBI GI NO: 15221329 NR Description: expressed protein [Arabidopsis thaliana]
  misc_feature (1)..(148): NCBI GI NO: 15231686 NR Description: zinc finger - like protein [Arabidopsis thaliana]
  misc_feature (1)..(148): NCBI GI NO: 18404102 NR Description: expressed protein [Arabidopsis thaliana]
  misc_feature (1)..(148): NCBI GI NO: 15225894 NR Description: zinc finger protein -related
  misc_feature (1)..(148): NCBI GI NO: 14596167 NR Description: zinc finger-like protein [Arabidopsis thaliana]
  misc_feature (1)..(148): NCBI GI NO: 18403408 NR Description: expressed protein [Arabidopsis thaliana]
  misc_feature (1)..(148): NCBI GI NO: 25082726 NR Description: expressed protein [Arabidopsis thaliana]
MDLCSKCYRDICAEEAQTAVAKAAVEKSFKPSPSPPPPTLFIAEPDVAKPEKEKAVATVLVVAEPSSATGEATVPEQNKPPSKPARPNRCLCCNKKVGILGFKCKCGSTFCGEHRYPERHDCSFDFKEAGRGEIAKANPVIKADKLQRF

SEQ ID NO: 20415 - protein, 143 aa, Zea mays subsp. mays; identical to SEQ ID NO: 11162
  peptide (1)..(143): Ceres Seq. ID no. 14309044

SEQ ID NO: 20416 - DNA, 950 bp, Zea mays subsp. mays
  misc_feature (1)..(950): Ceres Seq. ID no. 15178997
atcgtagtactgaacaagtgcgaagaaaaaaacatacatttttgtgtgtgtttgagtgaagaaggaaaaagtataaagagaagcgcagacgacgatctgcctactctgtctgtttgtctgtgtgcaagtaagtaatgtctgaagcagcagcacaaaaggcggctttcctcggtggacttgttgtctcattcaaggaacaaatgcacactgatgttctcgttcatcctggtgatcaatctccccccatcccgacccacaaggccatcctctcgtcaagatctaaggtcttcaggaacatgctagactccgatgaatgcaaggcctctgctgaggaatcgatcactctccccgacttgaaccacgacgagctccattctcttctcgagttcctctactccggcaacttaattgctccatacaatcagtaccgagccctctatctggctgctgacaaatacgacatcgcttatctccaagacgtttgccgcgaccatttcattgcatctctcacctctaggaacgtccttgacatcctggagctcgccagcatcccttctgacaccatcttgaaagccgctgccatcaaccttgtggtcaagcatatggaagatgtggttgttcccatgaaatacgagacttttgtgcagaggaaccccaatcttggcgttgagatcaccagagcttttctaagagagatcaaagctcaatccaaagacagcagatctgcttcttctaatcatcgccctcactctcgcttctactgattgatgaacaataaacagctacttgcctaatgtctcacttgccaaaggtgattgatgaatgatgatgccttcttcttcttcttattaaatttggaaagactttgttttagggatttatttcaaggtgttggttgatacatatacaatatctactagtattgtgaatttaactaaaatctgttatat

SEQ ID NO: 20417 - protein, 209 aa, Zea mays subsp. mays
  peptide (1)..(209): Ceres Seq. ID no. 15178998
  misc_feature (19)..(125): Pfam Name: Pfam Description:  BTB/POZ domain
  misc_feature (1)..(204): NCBI GI NO: 33589788 NR Description: At3g01790 [Arabidopsis thaliana]
  misc_feature (1)..(204): NCBI GI NO: 15223447 NR Description: expressed protein [Arabidopsis thaliana]
  misc_feature (3)..(194): NCBI GI NO: 15228868 NR Description: expressed protein [Arabidopsis thaliana]
  misc_feature (6)..(193): NCBI GI NO: 15226686 NR Description: hypothetical protein [Arabidopsis thaliana]
  misc_feature (8)..(202): NCBI GI NO: 15238994 NR Description: hypothetical protein [Arabidopsis thaliana]
  misc_feature (44)..(192): NCBI GI NO: 15224510 NR Description: hypothetical protein [Arabidopsis thaliana]
  misc_feature (15)..(183): NCBI GI NO: 15233388 NR Description: hypothetical protein [Arabidopsis thaliana]
  misc_feature (25)..(185): NCBI GI NO: 22328490 NR Description: POZ domain protein family [Arabidopsis thaliana]
  misc_feature (19)..(182): NCBI GI NO: 27661061 NR Description: similar to speckle-type POZ protein
  misc_feature (19)..(182): NCBI GI NO: 34858214 NR Description: similar to speckle-type POZ protein-like 1
MSEAAAQKAAFLGGLVVSFKEQMHTDVLVHPGDQSPPIPTHKAILSSRSKVFRNMLDSDECKASAEESITLPDLNHDELHSLLEFLYSGNLIAPYNQYRALYLAADKYDIAYLQDVCRDHFIASLTSRNVLDILELASIPSDTILKAAAINLVVKHMEDVVVPMKYETFVQRNPNLGVEITRAFLREIKAQSKDSRSASSNHRPHSRFY

SEQ ID NO: 20418 - protein, 187 aa, Zea mays subsp. mays
  peptide (1)..(187): Ceres Seq. ID no. 15178999
  misc_feature (1)..(103): Pfam Name: Pfam Description:  BTB/POZ domain
  misc_feature (1)..(182): NCBI GI NO: 33589788 NR Description: At3g01790 [Arabidopsis thaliana]
  misc_feature (1)..(182): NCBI GI NO: 15223447 NR Description: expressed protein [Arabidopsis thaliana]
  misc_feature (1)..(172): NCBI GI NO: 15228868 NR Description: expressed protein [Arabidopsis thaliana]
  misc_feature (1)..(171): NCBI GI NO: 15226686 NR Description: hypothetical protein [Arabidopsis thaliana]
  misc_feature (1)..(180): NCBI GI NO: 15238994 NR Description: hypothetical protein [Arabidopsis thaliana]
  misc_feature (22)..(170): NCBI GI NO: 15224510 NR Description: hypothetical protein [Arabidopsis thaliana]
  misc_feature (1)..(161): NCBI GI NO: 15233388 NR Description: hypothetical protein [Arabidopsis thaliana]
  misc_feature (3)..(163): NCBI GI NO: 22328490 NR Description: POZ domain protein family [Arabidopsis thaliana]
  misc_feature (1)..(160): NCBI GI NO: 27661061 NR Description: similar to speckle-type POZ protein
  misc_feature (1)..(160): NCBI GI NO: 34858214 NR Description: similar to speckle-type POZ protein-like 1
MHTDVLVHPGDQSPPIPTHKAILSSRSKVFRNMLDSDECKASAEESITLPDLNHDELHSLLEFLYSGNLIAPYNQYRALYLAADKYDIAYLQDVCRDHFIASLTSRNVLDILELASIPSDTILKAAAINLVVKHMEDVVVPMKYETFVQRNPNLGVEITRAFLREIKAQSKDSRSASSNHRPHSRFY

SEQ ID NO: 20419 - protein, 155 aa, Zea mays subsp. mays
  peptide (1)..(155): Ceres Seq. ID no. 15179000
  misc_feature (1)..(71): Pfam Name: Pfam Description:  BTB/POZ domain
  misc_feature (1)..(150): NCBI GI NO: 33589788 NR Description: At3g01790 [Arabidopsis thaliana]
  misc_feature (1)..(150): NCBI GI NO: 15223447 NR Description: expressed protein [Arabidopsis thaliana]
  misc_feature (1)..(140): NCBI GI NO: 15228868 NR Description: expressed protein [Arabidopsis thaliana]
  misc_feature (1)..(139): NCBI GI NO: 15226686 NR Description: hypothetical protein [Arabidopsis thaliana]
  misc_feature (1)..(148): NCBI GI NO: 15238994 NR Description: hypothetical protein [Arabidopsis thaliana]
  misc_feature (1)..(138): NCBI GI NO: 15224510 NR Description: hypothetical protein [Arabidopsis thaliana]
  misc_feature (1)..(129): NCBI GI NO: 15233388 NR Description: hypothetical protein [Arabidopsis thaliana]
  misc_feature (1)..(131): NCBI GI NO: 22328490 NR Description: POZ domain protein family [Arabidopsis thaliana]
  misc_feature (1)..(128): NCBI GI NO: 27661061 NR Description: similar to speckle-type POZ protein
  misc_feature (1)..(128): NCBI GI NO: 34858214 NR Description: similar to speckle-type POZ protein-like 1
MLDSDECKASAEESITLPDLNHDELHSLLEFLYSGNLIAPYNQYRALYLAADKYDIAYLQDVCRDHFIASLTSRNVLDILELASIPSDTILKAAAINLVVKHMEDVVVPMKYETFVQRNPNLGVEITRAFLREIKAQSKDSRSASSNHRPHSRFY

SEQ ID NO: 20420 - DNA, 892 bp, Zea mays subsp. mays
  misc_feature (1)..(892): Ceres Seq. ID no. 14309033
gttacaatctgcccccaaaaaatcgatctctggtctcaactatcgatttccaggcatctacaaatggctgtatgcaccaaactcggggttttacagaacagaaatgttccagtgacatcaatgctccgctacatgtccacaaaacttttcattggtggcctatcaccaggaactgacgaccagtccttaaaagatgctttctctaccttcaatggagtgacagaggcaagagtcatgacaaacaaagtgacgggaaggtcaaggggttatggatttgtcaatttcacaagtgaggattctgccaaatctgctatttcagctatggatggacaggagttgaatgggcgtaacatccgcgtggatgttgcaaaagaatggccgagcttgccgttttcttcggttgaaggtacagaagatgagaagaaaggcaataagatggtgagccgatctgtatggaaagatccgttcgttgacgccttcttgatgaagaagaaaaacgcagctctgaacaggaaaatatggtcaaggaggtcgacgattctgccagagtatgttgattcgtcggtgagaatctacaatggcaaaactcacgtgcgttgtaagatcacagaggggaaagttgggcataagtttggagagtttgcgtttacaaggaaagtgacaaagcatcctagagcaaagtaagttttaagttcttgagtatgaattggtcagcttgagaggatttgttggagaaaaaaccagaaacgaatcaataagaatttccaagtagggatataactcatttgagcttagaagtgtttttttgtatcagcctcgaagtcttgttttaatttttatgatgatacctatgtgacattagatcatttttgaagaccagtttcactttgat

SEQ ID NO: 20421 - protein, 227 aa, Zea mays subsp. mays
  peptide (1)..(227): Ceres Seq. ID no. 14309034
  misc_feature (149)..(223): Pfam Name: Pfam Description:  Ribosomal protein S19
  misc_feature (22)..(227): NCBI GI NO: 2129722 NR Description: ribosomal protein S19 precursor
  misc_feature (22)..(227): NCBI GI NO: 8809615 NR Description: 40S ribosomal protein S19 [Arabidopsis thaliana]
  misc_feature (22)..(227): NCBI GI NO: 18422781 NR Description: 40S ribosomal protein S19, mitochondrial precursor
  misc_feature (22)..(130): NCBI GI NO: 7439994 NR Description: glycine-rich RNA-binding protein - garden pea
  misc_feature (22)..(136): NCBI GI NO: 15229525 NR Description: RNA-binding protein, putative
  misc_feature (22)..(136): NCBI GI NO: 21553972 NR Description: glycine-rich RNA binding protein, putative
  misc_feature (22)..(130): NCBI GI NO: 2826811 NR Description: AtGRP2 [Arabidopsis thaliana]
  misc_feature (22)..(130): NCBI GI NO: 15236359 NR Description: glycine-rich RNA-binding protein (AtGRP2)
  misc_feature (22)..(130): NCBI GI NO: 30682622 NR Description: glycine-rich RNA-binding protein (AtGRP2)
  misc_feature (35)..(130): NCBI GI NO: 322514 NR Description: glycine-rich RNA-binding protein
VTICPQKIDLWSQLSISRHLQMAVCTKLGVLQNRNVPVTSMLRYMSTKLFIGGLSPGTDDQSLKDAFSTFNGVTEARVMTNKVTGRSRGYGFVNFTSEDSAKSAISAMDGQELNGRNIRVDVAKEWPSLPFSSVEGTEDEKKGNKMVSRSVWKDPFVDAFLMKKKNAALNRKIWSRRSTILPEYVDSSVRIYNGKTHVRCKITEGKVGHKFGEFAFTRKVTKHPRAK

SEQ ID NO: 20422 - protein, 206 aa, Zea mays subsp. mays
  peptide (1)..(206): Ceres Seq. ID no. 14309035
  misc_feature (128)..(202): Pfam Name: Pfam Description:  Ribosomal protein S19
  misc_feature (1)..(206): NCBI GI NO: 2129722 NR Description: ribosomal protein S19 precursor
  misc_feature (1)..(206): NCBI GI NO: 8809615 NR Description: 40S ribosomal protein S19 [Arabidopsis thaliana]
  misc_feature (1)..(206): NCBI GI NO: 18422781 NR Description: 40S ribosomal protein S19, mitochondrial precursor
  misc_feature (1)..(109): NCBI GI NO: 7439994 NR Description: glycine-rich RNA-binding protein - garden pea
  misc_feature (1)..(115): NCBI GI NO: 15229525 NR Description: RNA-binding protein, putative
  misc_feature (1)..(115): NCBI GI NO: 21553972 NR Description: glycine-rich RNA binding protein, putative
  misc_feature (1)..(109): NCBI GI NO: 2826811 NR Description: AtGRP2 [Arabidopsis thaliana]
  misc_feature (1)..(109): NCBI GI NO: 15236359 NR Description: glycine-rich RNA-binding protein (AtGRP2)
  misc_feature (1)..(109): NCBI GI NO: 30682622 NR Description: glycine-rich RNA-binding protein (AtGRP2)
  misc_feature (14)..(109): NCBI GI NO: 322514 NR Description: glycine-rich RNA-binding protein
MAVCTKLGVLQNRNVPVTSMLRYMSTKLFIGGLSPGTDDQSLKDAFSTFNGVTEARVMTNKVTGRSRGYGFVNFTSEDSAKSAISAMDGQELNGRNIRVDVAKEWPSLPFSSVEGTEDEKKGNKMVSRSVWKDPFVDAFLMKKKNAALNRKIWSRRSTILPEYVDSSVRIYNGKTHVRCKITEGKVGHKFGEFAFTRKVTKHPRAK

SEQ ID NO: 20423 - protein, 187 aa, Zea mays subsp. mays
  peptide (1)..(187): Ceres Seq. ID no. 14309036
  misc_feature (109)..(183): Pfam Name: Pfam Description:  Ribosomal protein S19
  misc_feature (1)..(187): NCBI GI NO: 2129722 NR Description: ribosomal protein S19 precursor
  misc_feature (1)..(187): NCBI GI NO: 8809615 NR Description: 40S ribosomal protein S19 [Arabidopsis thaliana]
  misc_feature (1)..(187): NCBI GI NO: 18422781 NR Description: 40S ribosomal protein S19, mitochondrial precursor
  misc_feature (1)..(90): NCBI GI NO: 7439994 NR Description: glycine-rich RNA-binding protein - garden pea
  misc_feature (1)..(96): NCBI GI NO: 15229525 NR Description: RNA-binding protein, putative
  misc_feature (1)..(96): NCBI GI NO: 21553972 NR Description: glycine-rich RNA binding protein, putative
  misc_feature (1)..(90): NCBI GI NO: 2826811 NR Description: AtGRP2 [Arabidopsis thaliana]
  misc_feature (1)..(90): NCBI GI NO: 15236359 NR Description: glycine-rich RNA-binding protein (AtGRP2)
  misc_feature (1)..(90): NCBI GI NO: 30682622 NR Description: glycine-rich RNA-binding protein (AtGRP2)
  misc_feature (1)..(90): NCBI GI NO: 322514 NR Description: glycine-rich RNA-binding protein
MLRYMSTKLFIGGLSPGTDDQSLKDAFSTFNGVTEARVMTNKVTGRSRGYGFVNFTSEDSAKSAISAMDGQELNGRNIRVDVAKEWPSLPFSSVEGTEDEKKGNKMVSRSVWKDPFVDAFLMKKKNAALNRKIWSRRSTILPEYVDSSVRIYNGKTHVRCKITEGKVGHKFGEFAFTRKVTKHPRAK

SEQ ID NO: 20424 - DNA, 1302 bp, Zea mays subsp. mays
  misc_feature (1)..(1302): Ceres Seq. ID no. 15177459
aagagaggaatcgataggactctgtaactcttcccttatatgagatctatagtttaacctaaacctaaaggtttatatatcaataatgatgctttcagtgatcgttgcaatccttgtctgccttgcaagctacatttaccgatcattgaagcctccaccgccgcgagtctgcggcgttcctcacggtcctccgattacttctccgagaatcaagctcagtgatggaagatatcttgcttatagagaatctggcgttgatagagccaatgctaatcacaagatcatcgttgttcatggatttaacaactccaaagacatggaacttcccatctctaaggatcttattgaggaactagggatatattttctgtttttcgatagagcagggtatggagaaagtgatccacaccctacacgtacggtcaaaagtgaagcatatgacattcaagaactcgctgataaactcaacatcggaccaaagttctatgttatagggttatcagtcggtgcttactcggtttatagctgcctcaaatatattccccacagattagctggagcagtcttagtggttccatttgtcagctattggtggactaaagtgcctcaggacatctcgagtaaagcgttcaagctattgcccgaagatgtccggtggacgtttagagtggctcattatgttccttggctcttgtattggtggttgactcatcaatggttttcgtcttcgagtataatctctggaaacagtgcgttactgagcgatacagatttggtcatcataaagaagatgttggagaatccgagtcctcacacggaaaaagtccggcaacagggagaccatgaatgtcttcaccgagacatgattgctggattcgcgacatgggagttcgacccaaccgaattggaaaacccgtttactgaaggtgtaggttcagtacacatgtggcagggtactgaagacagagtagttccacgagaaattaatgaatatatatcaaagaagctcccatggattaagtaccacgaagtccaaggttatggtcatcttctaagcgaggaggagcagaaatgtgaagacattattaaggcgcttcttgtggagtgatgatcatctatcaacggacactagtgctgaaggtggcatttaaacttttagtaaaaaataattcctttgataagtaagaggaatgttttagtcaaaaaaaagtaagaggaatgttattattgtaagtttgtgacaaaggagaaccacttaaacgtcctatattattatataaaactttattcttcaaagttgct

SEQ ID NO: 20425 - protein, 340 aa, Zea mays subsp. mays
  peptide (1)..(340): Ceres Seq. ID no. 15177460
  misc_feature (92)..(335): Pfam Name: Pfam Description:  alpha/beta hydrolase fold
  misc_feature (1)..(339): NCBI GI NO: 15242253 NR Description: esterase/lipase/thioesterase family
  misc_feature (1)..(338): NCBI GI NO: 18404095 NR Description: hydrolase, alpha/beta fold family
  misc_feature (1)..(338): NCBI GI NO: 28416665 NR Description: At2g36290 [Arabidopsis thaliana]
  misc_feature (4)..(338): NCBI GI NO: 21592662 NR Description: unknown [Arabidopsis thaliana]
  misc_feature (4)..(338): NCBI GI NO: 18410582 NR Description: esterase/lipase/thioesterase family
  misc_feature (1)..(338): NCBI GI NO: 21537089 NR Description: unknown [Arabidopsis thaliana]
  misc_feature (2)..(336): NCBI GI NO: 30678800 NR Description: esterase/lipase/thioesterase family
  misc_feature (4)..(338): NCBI GI NO: 18410575 NR Description: hydrolase, alpha/beta fold family
  misc_feature (5)..(336): NCBI GI NO: 15228496 NR Description: esterase/lipase/thioesterase family
  misc_feature (2)..(336): NCBI GI NO: 6714434 NR Description: hypothetical protein [Arabidopsis thaliana]
MMLSVIVAILVCLASYIYRSLKPPPPRVCGVPHGPPITSPRIKLSDGRYLAYRESGVDRANANHKIIVVHGFNNSKDMELPISKDLIEELGIYFLFFDRAGYGESDPHPTRTVKSEAYDIQELADKLNIGPKFYVIGLSVGAYSVYSCLKYIPHRLAGAVLVVPFVSYWWTKVPQDISSKAFKLLPEDVRWTFRVAHYVPWLLYWWLTHQWFSSSSIISGNSALLSDTDLVIIKKMLENPSPHTEKVRQQGDHECLHRDMIAGFATWEFDPTELENPFTEGVGSVHMWQGTEDRVVPREINEYISKKLPWIKYHEVQGYGHLLSEEEQKCEDIIKALLVE

SEQ ID NO: 20426 - protein, 339 aa, Zea mays subsp. mays
  peptide (1)..(339): Ceres Seq. ID no. 15177461
  misc_feature (91)..(334): Pfam Name: Pfam Description:  alpha/beta hydrolase fold
  misc_feature (1)..(338): NCBI GI NO: 15242253 NR Description: esterase/lipase/thioesterase family
  misc_feature (1)..(337): NCBI GI NO: 18404095 NR Description: hydrolase, alpha/beta fold family
  misc_feature (1)..(337): NCBI GI NO: 28416665 NR Description: At2g36290 [Arabidopsis thaliana]
  misc_feature (3)..(337): NCBI GI NO: 21592662 NR Description: unknown [Arabidopsis thaliana]
  misc_feature (3)..(337): NCBI GI NO: 18410582 NR Description: esterase/lipase/thioesterase family
  misc_feature (1)..(337): NCBI GI NO: 21537089 NR Description: unknown [Arabidopsis thaliana]
  misc_feature (1)..(335): NCBI GI NO: 30678800 NR Description: esterase/lipase/thioesterase family
  misc_feature (3)..(337): NCBI GI NO: 18410575 NR Description: hydrolase, alpha/beta fold family
  misc_feature (4)..(335): NCBI GI NO: 15228496 NR Description: esterase/lipase/thioesterase family
  misc_feature (1)..(335): NCBI GI NO: 6714434 NR Description: hypothetical protein [Arabidopsis thaliana]
MLSVIVAILVCLASYIYRSLKPPPPRVCGVPHGPPITSPRIKLSDGRYLAYRESGVDRANANHKIIVVHGFNNSKDMELPISKDLIEELGIYFLFFDRAGYGESDPHPTRTVKSEAYDIQELADKLNIGPKFYVIGLSVGAYSVYSCLKYIPHRLAGAVLVVPFVSYWWTKVPQDISSKAFKLLPEDVRWTFRVAHYVPWLLYWWLTHQWFSSSSIISGNSALLSDTDLVIIKKMLENPSPHTEKVRQQGDHECLHRDMIAGFATWEFDPTELENPFTEGVGSVHMWQGTEDRVVPREINEYISKKLPWIKYHEVQGYGHLLSEEEQKCEDIIKALLVE

SEQ ID NO: 20427 - protein, 263 aa, Zea mays subsp. mays
  peptide (1)..(263): Ceres Seq. ID no. 15177462
  misc_feature (15)..(258): Pfam Name: Pfam Description:  alpha/beta hydrolase fold
  misc_feature (1)..(262): NCBI GI NO: 15242253 NR Description: esterase/lipase/thioesterase family
  misc_feature (1)..(261): NCBI GI NO: 18404095 NR Description: hydrolase, alpha/beta fold family
  misc_feature (1)..(261): NCBI GI NO: 28416665 NR Description: At2g36290 [Arabidopsis thaliana]
  misc_feature (1)..(261): NCBI GI NO: 21592662 NR Description: unknown [Arabidopsis thaliana]
  misc_feature (1)..(261): NCBI GI NO: 18410582 NR Description: esterase/lipase/thioesterase family
  misc_feature (1)..(261): NCBI GI NO: 21537089 NR Description: unknown [Arabidopsis thaliana]
  misc_feature (1)..(259): NCBI GI NO: 30678800 NR Description: esterase/lipase/thioesterase family
  misc_feature (1)..(261): NCBI GI NO: 18410575 NR Description: hydrolase, alpha/beta fold family
  misc_feature (1)..(259): NCBI GI NO: 15228496 NR Description: esterase/lipase/thioesterase family
  misc_feature (1)..(259): NCBI GI NO: 6714434 NR Description: hypothetical protein [Arabidopsis thaliana]
MELPISKDLIEELGIYFLFFDRAGYGESDPHPTRTVKSEAYDIQELADKLNIGPKFYVIGLSVGAYSVYSCLKYIPHRLAGAVLVVPFVSYWWTKVPQDISSKAFKLLPEDVRWTFRVAHYVPWLLYWWLTHQWFSSSSIISGNSALLSDTDLVIIKKMLENPSPHTEKVRQQGDHECLHRDMIAGFATWEFDPTELENPFTEGVGSVHMWQGTEDRVVPREINEYISKKLPWIKYHEVQGYGHLLSEEEQKCEDIIKALLVE

SEQ ID NO: 20428 - DNA, 1420 bp, Zea mays subsp. mays
  misc_feature (1)..(1420): Ceres Seq. ID no. 15179532
aataaaaaaataaataaaacaaaaagctgtcttaaagctctgacgatctttcctgtcctagtcgcagactcgtcatcacagctctcaagcgaaattccccctgctttctccgcgcaatttctcctctataggattggaggtaggctttgtgtgtggcctggtttcagacatctctgcctgaggaaaagcttgttatacggagttatgtggttattctcaatgccactcaagacacttcgaggagctagaaaaacactcaagatcacacacttttgtagcatctccaacatgccttcttctctaaaaatcgaactggtgccgtgtagtaaggagaactatgcttatgttttgcacgatgaagacactggcactgttggagttgttgatccttctgaggctgcgcctgttatagaggcgttgagtaggaaaaattggaacttgacttacatattgaatactcatcatcatgatgatcacataggggggaatgctgagctgaaagcaaagtatggcgcaaaggtgattggctcagctgtggataaggatcggattcctggaattgacatacttctcaaggatagtgataagtggatgtttgctggccatgaggttcgggttattgacactcctggccacacacaaggccatgttagcttctactttcccgggtcagccacagttttcacaggagacctgatacatagcttatcttgtggtaccctttcggaaggtacccccgagcagatgctttcatcattccagaagattgtgtctttaccagatgatacaagtatatactgcggtcgtgaaaacacagcagggaatctcaagtttgcactatcaatagaaccaaagaatgaaactcttcggtcctatgcaacccgagtcgcccatcttcgcagccaaggactcccatcgattccaacgactgttaaggtggagaaagcgtgtaacccattcctcagaacatctagcaaagaaatccgcagatctttaaacattccagactcagcaaacgaagcagaagcactgcgtcgtatacacagagccagagaccgtttcttaagaagtttggggttatctcaccttattgtatagttggaagtcactcatcatcagctgcaaagattaatatatgataatgttttgagcttaaaaaaaaaaaaaaaaaagcgtgtttcatcagccgaagataactttgagagagcggttcaatctgtggcctgaagacgactcttccatggttcaagctgtgcagtatcggtttgctttaccacatagtctcccgtgtttggtaaacccaccagaataacccctttctgtctttgtctttttttgagatcagtatatgaaccagattttgtcattgggtgtgttacatttaccatttcattacttctaaatataaagctccaccgtt

SEQ ID NO: 20429 - protein, 365 aa, Zea mays subsp. mays
  peptide (1)..(365): Ceres Seq. ID no. 15179533
  misc_feature (111)..(269): Pfam Name: Pfam Description:  Metallo-beta-lactamase superfamily
  misc_feature (18)..(354): NCBI GI NO: 18406237 NR Description: glyoxalase II
  misc_feature (18)..(354): NCBI GI NO: 2570340 NR Description: glyoxalase II mitochondrial isozyme
  misc_feature (106)..(354): NCBI GI NO: 25310959 NR Description: probable glyoxalase II
  misc_feature (27)..(354): NCBI GI NO: 30679573 NR Description: glyoxalase II, putative
  misc_feature (43)..(354): NCBI GI NO: 25406895 NR Description: hypothetical protein
  misc_feature (50)..(354): NCBI GI NO: 18390616 NR Description: glyoxalase II, putative
  misc_feature (43)..(354): NCBI GI NO: 15224661 NR Description: glyoxalase II, putative
  misc_feature (48)..(354): NCBI GI NO: 30684920 NR Description: glyoxalase II, putative
  misc_feature (84)..(354): NCBI GI NO: 10334501 NR Description: putative mitochondrial glyoxalase II
  misc_feature (20)..(354): NCBI GI NO: 16209608 NR Description: glyoxalase II [Oryza sativa]
NKKINKTKSCLKALTIFPVLVADSSSQLSSEIPPAFSAQFLLYRIGGRLCVWPGFRHLCLRKSLLYGVMWLFSMPLKTLRGARKTLKITHFCSISNMPSSLKIELVPCSKENYAYVLHDEDTGTVGVVDPSEAAPVIEALSRKNWNLTYILNTHHHDDHIGGNAELKAKYGAKVIGSAVDKDRIPGIDILLKDSDKWMFAGHEVRVIDTPGHTQGHVSFYFPGSATVFTGDLIHSLSCGTLSEGTPEQMLSSFQKIVSLPDDTSIYCGRENTAGNLKFALSIEPKNETLRSYATRVAHLRSQGLPSIPTTVKVEKACNPFLRTSSKEIRRSLNIPDSANEAEALRRIHRARDRFLRSLGLSHLIV

SEQ ID NO: 20430 - protein, 297 aa, Zea mays subsp. mays
  peptide (1)..(297): Ceres Seq. ID no. 15179534
  misc_feature (43)..(201): Pfam Name: Pfam Description:  Metallo-beta-lactamase superfamily
  misc_feature (1)..(286): NCBI GI NO: 18406237 NR Description: glyoxalase II
  misc_feature (1)..(286): NCBI GI NO: 2570340 NR Description: glyoxalase II mitochondrial isozyme
  misc_feature (38)..(286): NCBI GI NO: 25310959 NR Description: probable glyoxalase II
  misc_feature (1)..(286): NCBI GI NO: 30679573 NR Description: glyoxalase II, putative
  misc_feature (1)..(286): NCBI GI NO: 25406895 NR Description: hypothetical protein
  misc_feature (1)..(286): NCBI GI NO: 18390616 NR Description: glyoxalase II, putative
  misc_feature (1)..(286): NCBI GI NO: 15224661 NR Description: glyoxalase II, putative
  misc_feature (1)..(286): NCBI GI NO: 30684920 NR Description: glyoxalase II, putative
  misc_feature (16)..(286): NCBI GI NO: 10334501 NR Description: putative mitochondrial glyoxalase II
  misc_feature (1)..(286): NCBI GI NO: 16209608 NR Description: glyoxalase II [Oryza sativa]
MWLFSMPLKTLRGARKTLKITHFCSISNMPSSLKIELVPCSKENYAYVLHDEDTGTVGVVDPSEAAPVIEALSRKNWNLTYILNTHHHDDHIGGNAELKAKYGAKVIGSAVDKDRIPGIDILLKDSDKWMFAGHEVRVIDTPGHTQGHVSFYFPGSATVFTGDLIHSLSCGTLSEGTPEQMLSSFQKIVSLPDDTSIYCGRENTAGNLKFALSIEPKNETLRSYATRVAHLRSQGLPSIPTTVKVEKACNPFLRTSSKEIRRSLNIPDSANEAEALRRIHRARDRFLRSLGLSHLIV

SEQ ID NO: 20431 - protein, 292 aa, Zea mays subsp. mays
  peptide (1)..(292): Ceres Seq. ID no. 15179535
  misc_feature (38)..(196): Pfam Name: Pfam Description:  Metallo-beta-lactamase superfamily
  misc_feature (1)..(281): NCBI GI NO: 18406237 NR Description: glyoxalase II
  misc_feature (1)..(281): NCBI GI NO: 2570340 NR Description: glyoxalase II mitochondrial isozyme
  misc_feature (33)..(281): NCBI GI NO: 25310959 NR Description: probable glyoxalase II
  misc_feature (1)..(281): NCBI GI NO: 30679573 NR Description: glyoxalase II, putative
  misc_feature (1)..(281): NCBI GI NO: 25406895 NR Description: hypothetical protein
  misc_feature (1)..(281): NCBI GI NO: 18390616 NR Description: glyoxalase II, putative
  misc_feature (1)..(281): NCBI GI NO: 15224661 NR Description: glyoxalase II, putative
  misc_feature (1)..(281): NCBI GI NO: 30684920 NR Description: glyoxalase II, putative
  misc_feature (11)..(281): NCBI GI NO: 10334501 NR Description: putative mitochondrial glyoxalase II
  misc_feature (1)..(281): NCBI GI NO: 16209608 NR Description: glyoxalase II [Oryza sativa]
MPLKTLRGARKTLKITHFCSISNMPSSLKIELVPCSKENYAYVLHDEDTGTVGVVDPSEAAPVIEALSRKNWNLTYILNTHHHDDHIGGNAELKAKYGAKVIGSAVDKDRIPGIDILLKDSDKWMFAGHEVRVIDTPGHTQGHVSFYFPGSATVFTGDLIHSLSCGTLSEGTPEQMLSSFQKIVSLPDDTSIYCGRENTAGNLKFALSIEPKNETLRSYATRVAHLRSQGLPSIPTTVKVEKACNPFLRTSSKEIRRSLNIPDSANEAEALRRIHRARDRFLRSLGLSHLIV

SEQ ID NO: 20432 - DNA, 947 bp, Zea mays subsp. mays
  misc_feature (1)..(947): Ceres Seq. ID no. 15174410
actttccttgatcagaaaacaaatccgattctctcctctcttcgaatcccttcgatatgcagcagcaagacccgaacgcccgacccgccaccgggtatccatacccgtatccgcctcaacaacccgccaacggttaccctcccaacgccgcaaccgcctacccataccaaaaccacaacccccactacgcgcctcagcctagcccacgcgccgtcctactccgccgcctcttcaccgccttcaccgtcttcctcctcatcctaggcctcatcctcttcatcttcttcatcgtcgtccgcccccagctcccgaccgtctacctcaactccctctccgtctccaacttcaccgtctccgacaaccgcctcgccggaaactgggacctcggtctccaattccaaaaccctaattcgaagatgtcgcttcactacgacggcgtcttgtgcacgctctattacgaccgcgcgtctctctccgagacgcgtttgcagccgttcgatctggggacgaaggatcagactccgatcaacgccacgctctccgtctccgggacgtacgtggacaatcggttggttgattcgattgggaaagagaggggcgagaagggaagcgtggagttcgatttgagggtggtttctttggttacgttccggtacggagtgtaccggaggaggaggtacgtcacggttttctgcgatgacgtggcggttggtgtcggggggaatagtagttcgtggaacatggttggttcggctaggagatgcaaaccttaatgatgttagaatgtgagtttcttacattaggagttttataattttaaccaattacttgcgatgttgatgattgaaatttattcatgttttataatatgaatttgaatgtaaatcgagtcgacaatggtattttttttcagtgtttatgatgaattatacatgttttggaagacc

SEQ ID NO: 20433 - protein, 238 aa, Zea mays subsp. mays
  peptide (1)..(238): Ceres Seq. ID no. 15174411
  misc_feature (4)..(237): NCBI GI NO: 18401372 NR Description: expressed protein [Arabidopsis thaliana]
  misc_feature (1)..(226): NCBI GI NO: 15231224 NR Description: proline-rich protein family [Arabidopsis thaliana]
  misc_feature (43)..(236): NCBI GI NO: 7489141 NR Description: hin1 protein - common tobacco
  misc_feature (36)..(214): NCBI GI NO: 27261042 NR Description: hypothetical protein
  misc_feature (21)..(216): NCBI GI NO: 15227542 NR Description: harpin-induced protein 1 family (HIN1)
  misc_feature (1)..(222): NCBI GI NO: 25518342 NR Description: hypothetical protein F22L4.1
MQQQDPNARPATGYPYPYPPQQPANGYPPNAATAYPYQNHNPHYAPQPSPRAVLLRRLFTAFTVFLLILGLILFIFFIVVRPQLPTVYLNSLSVSNFTVSDNRLAGNWDLGLQFQNPNSKMSLHYDGVLCTLYYDRASLSETRLQPFDLGTKDQTPINATLSVSGTYVDNRLVDSIGKERGEKGSVEFDLRVVSLVTFRYGVYRRRRYVTVFCDDVAVGVGGNSSSWNMVGSARRCKP

SEQ ID NO: 20434 - DNA, 879 bp, Zea mays subsp. mays
  misc_feature (1)..(879): Ceres Seq. ID no. 14309027
cacatcgagttcttcttctcggttctcaatttccacgataaaatggtgaccggcgacgtaaagctgattggctcatgggctagtgtcttcgtcatgagggccagaatcgctctcaacctcaaatctattaggtacgagtttctccaggagacatacggtactaagagcgagttgctccttaaatctaatcccgttcacaagaagatcccggttctgattcacgatgacaaacccgtgtgtgagtccaacatcatcgttcagtacatcgacgaggcttggagctcatatggaccgtctattctcccttcccagccctacgacagagccatcgctcggttctgggccgcctacgtcgacgataagtggtttattgctctgagaagtatcctaaccgctcgaggagaagaggagaagaaagcagccatagctgaagtcgaaggaaggactgaccatttagagaaagccttcatcgagtgcagcaatgggaaaccgttcttcaacggtgaccatatcggttacctagacattgccctagggagcttcttgggttggtggaaagtcgtggagttagacgccaatcatatacttcttgacgagaccaagactccctctctgttcaagtgggcagagcggttctgtaatgaccctgatgtgaagcctctcatgcccgagacagcaaagctagctgaatttgcgaggaaactctttcccaagccgcaggcttgatggcaaagtatattgactccttttaaatatattgttggagatagaaacaatataatatatcggttagtggaaatatgaaactggtttactagaacgtgtaagttatgttccatttcaatgtatccaagaccttctatcaagcaaatattttgt

SEQ ID NO: 20435 - protein, 241 aa, Zea mays subsp. mays
  peptide (1)..(241): Ceres Seq. ID no. 14309028
  misc_feature (101)..(216): Pfam Name: Pfam Description:  Glutathione S-transferase, C-terminal domain
  misc_feature (15)..(241): NCBI GI NO: 15218517 NR Description: glutathione transferase, putative
  misc_feature (15)..(241): NCBI GI NO: 11096016 NR Description: glutathione S-transferase [Arabidopsis thaliana]
  misc_feature (15)..(241): NCBI GI NO: 15375408 NR Description: glutathione S-transferase [Arabidopsis thaliana]
  misc_feature (19)..(235): NCBI GI NO: 6856103 NR Description: glutathione S-transferase [Gossypium hirsutum]
  misc_feature (19)..(239): NCBI GI NO: 6652874 NR Description: glutathione S-transferase 3 [Papaver somniferum]
  misc_feature (19)..(239): NCBI GI NO: 6652870 NR Description: glutathione S-transferase 1 [Papaver somniferum]
  misc_feature (15)..(183): NCBI GI NO: 15218518 NR Description: glutathione transferase, putative
  misc_feature (19)..(235): NCBI GI NO: 11385425 NR Description: glutathione S-transferase GST 5 [Glycine max]
  misc_feature (19)..(241): NCBI GI NO: 15218872 NR Description: glutathione transferase, putative
  misc_feature (19)..(241): NCBI GI NO: 13877559 NR Description: similar to glutathione S-transferase
HIEFFFSVLNFHDKMVTGDVKLIGSWASVFVMRARIALNLKSIRYEFLQETYGTKSELLLKSNPVHKKIPVLIHDDKPVCESNIIVQYIDEAWSSYGPSILPSQPYDRAIARFWAAYVDDKWFIALRSILTARGEEEKKAAIAEVEGRTDHLEKAFIECSNGKPFFNGDHIGYLDIALGSFLGWWKVVELDANHILLDETKTPSLFKWAERFCNDPDVKPLMPETAKLAEFARKLFPKPQA

SEQ ID NO: 20436 - protein, 227 aa, Zea mays subsp. mays
  peptide (1)..(227): Ceres Seq. ID no. 14309029
  misc_feature (87)..(202): Pfam Name: Pfam Description:  Glutathione S-transferase, C-terminal domain
  misc_feature (1)..(227): NCBI GI NO: 15218517 NR Description: glutathione transferase, putative
  misc_feature (1)..(227): NCBI GI NO: 11096016 NR Description: glutathione S-transferase [Arabidopsis thaliana]
  misc_feature (1)..(227): NCBI GI NO: 15375408 NR Description: glutathione S-transferase [Arabidopsis thaliana]
  misc_feature (5)..(221): NCBI GI NO: 6856103 NR Description: glutathione S-transferase [Gossypium hirsutum]
  misc_feature (5)..(225): NCBI GI NO: 6652874 NR Description: glutathione S-transferase 3 [Papaver somniferum]
  misc_feature (5)..(225): NCBI GI NO: 6652870 NR Description: glutathione S-transferase 1 [Papaver somniferum]
  misc_feature (1)..(169): NCBI GI NO: 15218518 NR Description: glutathione transferase, putative
  misc_feature (5)..(221): NCBI GI NO: 11385425 NR Description: glutathione S-transferase GST 5 [Glycine max]
  misc_feature (5)..(227): NCBI GI NO: 15218872 NR Description: glutathione transferase, putative
  misc_feature (5)..(227): NCBI GI NO: 13877559 NR Description: similar to glutathione S-transferase
MVTGDVKLIGSWASVFVMRARIALNLKSIRYEFLQETYGTKSELLLKSNPVHKKIPVLIHDDKPVCESNIIVQYIDEAWSSYGPSILPSQPYDRAIARFWAAYVDDKWFIALRSILTARGEEEKKAAIAEVEGRTDHLEKAFIECSNGKPFFNGDHIGYLDIALGSFLGWWKVVELDANHILLDETKTPSLFKWAERFCNDPDVKPLMPETAKLAEFARKLFPKPQA

SEQ ID NO: 20437 - protein, 210 aa, Zea mays subsp. mays
  peptide (1)..(210): Ceres Seq. ID no. 14309030
  misc_feature (70)..(185): Pfam Name: Pfam Description:  Glutathione S-transferase, C-terminal domain
  misc_feature (1)..(210): NCBI GI NO: 15218517 NR Description: glutathione transferase, putative
  misc_feature (1)..(210): NCBI GI NO: 11096016 NR Description: glutathione S-transferase [Arabidopsis thaliana]
  misc_feature (1)..(210): NCBI GI NO: 15375408 NR Description: glutathione S-transferase [Arabidopsis thaliana]
  misc_feature (1)..(204): NCBI GI NO: 6856103 NR Description: glutathione S-transferase [Gossypium hirsutum]
  misc_feature (1)..(208): NCBI GI NO: 6652874 NR Description: glutathione S-transferase 3 [Papaver somniferum]
  misc_feature (1)..(208): NCBI GI NO: 6652870 NR Description: glutathione S-transferase 1 [Papaver somniferum]
  misc_feature (1)..(152): NCBI GI NO: 15218518 NR Description: glutathione transferase, putative
  misc_feature (1)..(204): NCBI GI NO: 11385425 NR Description: glutathione S-transferase GST 5 [Glycine max]
  misc_feature (1)..(210): NCBI GI NO: 15218872 NR Description: glutathione transferase, putative
  misc_feature (1)..(210): NCBI GI NO: 13877559 NR Description: similar to glutathione S-transferase
MRARIALNLKSIRYEFLQETYGTKSELLLKSNPVHKKIPVLIHDDKPVCESNIIVQYIDEAWSSYGPSILPSQPYDRAIARFWAAYVDDKWFIALRSILTARGEEEKKAAIAEVEGRTDHLEKAFIECSNGKPFFNGDHIGYLDIALGSFLGWWKVVELDANHILLDETKTPSLFKWAERFCNDPDVKPLMPETAKLAEFARKLFPKPQA

SEQ ID NO: 20438 - DNA, 652 bp, Zea mays subsp. mays
  misc_feature (1)..(652): Ceres Seq. ID no. 15175181
atttttctctcgagtgttgttttttcctttctctcaaagatggctcaggaagatgttgcttcggttgttgagaagtctgttaccttcaccgcgtacaagccccagctgatcgtggagtctcagagggtcggtgacgctgttgccttctacaagaccgtgtttggtgcggaggagactggacactctctctaccctaagcgtaaggctgaccaagagcttcctcaccttgtctctgccgagctcaagctcgctggcactaccgtcgttgtttctgacgtctccgttaactctaatgcgaagatagggactatgcctgcgattctcgaaactgatgacgtggaagctgctgttatgaaagccgttggcgccggagctgtcaaagtggaggaggaggttgaaggtggagtcaagggtaaagtgacggatcccttcggtttcacatggatctttgtttctccggcgaagaagagtgagaacgacgagaccaaagaggtctaactgtcgtcgttgtctgatcggtttctgaacaaacttttattatcctagtctgtttatgcttttagtttgtctttttgtggaatctccggtatcaataaaccggatcggttagctaaatgactttatttcaagtttaattttcacccattttgac

SEQ ID NO: 20439 - protein, 165 aa, Zea mays subsp. mays
  peptide (1)..(165): Ceres Seq. ID no. 15175182
  misc_feature (14)..(165): NCBI GI NO: 18422918 NR Description: expressed protein [Arabidopsis thaliana]
  misc_feature (26)..(158): NCBI GI NO: 28565534 NR Description: early tobacco anther 1 [Nicotiana tabacum]
IFLSSVVFSFLSKMAQEDVASVVEKSVTFTAYKPQLIVESQRVGDAVAFYKTVFGAEETGHSLYPKRKADQELPHLVSAELKLAGTTVVVSDVSVNSNAKIGTMPAILETDDVEAAVMKAVGAGAVKVEEEVEGGVKGKVTDPFGFTWIFVSPAKKSENDETKEV

SEQ ID NO: 20440 - protein, 152 aa, Zea mays subsp. mays
  peptide (1)..(152): Ceres Seq. ID no. 15175183
  misc_feature (1)..(152): NCBI GI NO: 18422918 NR Description: expressed protein [Arabidopsis thaliana]
  misc_feature (13)..(145): NCBI GI NO: 28565534 NR Description: early tobacco anther 1 [Nicotiana tabacum]
MAQEDVASVVEKSVTFTAYKPQLIVESQRVGDAVAFYKTVFGAEETGHSLYPKRKADQELPHLVSAELKLAGTTVVVSDVSVNSNAKIGTMPAILETDDVEAAVMKAVGAGAVKVEEEVEGGVKGKVTDPFGFTWIFVSPAKKSENDETKEV

SEQ ID NO: 20441 - DNA, 908 bp, Zea mays subsp. mays
  misc_feature (1)..(908): Ceres Seq. ID no. 14309068
aatcttttttgatatactgttcacttcccagattatcaagctgatattcgagaagggttttttaagttcttgaaatcttctcgatcgaaggattccaaatgggttcggtttcgggtcaaacccgaattgctacgatgaacctctccctctcctcatcagagaagagctctaataatcgctcctcctcgcttctcaatcctaagaacgcagtttcagatagttacggggtctcttccaaatgcagcacattcctcaggggccagttccaaagaatacaactctcttatactcgccacactcgacctttgccaaaacgtgcaggccacgttgtgtctccgagctgcgtcatgccgttgacggaagagaatgtggagagagtgctcgacgaagtacgccccgcgttgatggcagacggaggaaacgtggcgctgcatgagatcgacggactcgtggtggttcttaagctacaaggagcttgtggttcgtgtcccagctcgtcgatgacgttaaagatgggaatcgagagtcgtctccgcgacaagattccggagatcatgtccgtcgagcagtttcttgaagcggagactggagggttggagctcaacgaggaaaacatcgaaaaggttctcgctgagctacggccttacctatcgggaacaggaggtggagggcttgagcttgttgagatcgatggttatatagttaagattcggctcactggaccagctgctggagtcatgacggttcgtgtcgcgttgactcagaaactgagggaaaacattccttcaataggtgcagtccagcttctagagtgaccactttttgtattgttcatctacgagagcctatatttcgattatatgtacatcattttcaaatctaacatccataccattcagttcctggtg

SEQ ID NO: 20442 - protein, 238 aa, Zea mays subsp. mays
  peptide (1)..(238): Ceres Seq. ID no. 14309069
  misc_feature (91)..(158): Pfam Name: Pfam Description:  NifU-like domain
  misc_feature (1)..(238): NCBI GI NO: 18416645 NR Description: nitrogen fixation protein, putative  (NifU)
  misc_feature (1)..(238): NCBI GI NO: 21554503 NR Description: nitrogen fixation like protein
  misc_feature (13)..(238): NCBI GI NO: 7485833 NR Description: hypothetical protein F20B18
  misc_feature (9)..(237): NCBI GI NO: 18423084 NR Description: expressed protein [Arabidopsis thaliana]
  misc_feature (66)..(237): NCBI GI NO: 30698492 NR Description: NifU1 [Oryza sativa (japonica cultivar-group)]
  misc_feature (9)..(224): NCBI GI NO: 8777425 NR Description: gene_id:K9P8
  misc_feature (84)..(159): NCBI GI NO: 33862527 NR Description: NifU-like protein
  misc_feature (83)..(159): NCBI GI NO: 37522446 NR Description: gsl2877 [Gloeobacter violaceus]
  misc_feature (86)..(226): NCBI GI NO: 18411785 NR Description: NifU-related metallocluster assembly factor
  misc_feature (89)..(156): NCBI GI NO: 39995588 NR Description: NifU-like domain protein
MGSVSGQTRIATMNLSLSSSEKSSNNRSSSLLNPKNAVSDSYGVSSKCSTFLRGQFQRIQLSYTRHTRPLPKRAGHVVSPSCVMPLTEENVERVLDEVRPALMADGGNVALHEIDGLVVVLKLQGACGSCPSSSMTLKMGIESRLRDKIPEIMSVEQFLEAETGGLELNEENIEKVLAELRPYLSGTGGGGLELVEIDGYIVKIRLTGPAAGVMTVRVALTQKLRENIPSIGAVQLLE

SEQ ID NO: 20443 - protein, 226 aa, Zea mays subsp. mays
  peptide (1)..(226): Ceres Seq. ID no. 14309070
  misc_feature (79)..(146): Pfam Name: Pfam Description:  NifU-like domain
  misc_feature (1)..(226): NCBI GI NO: 18416645 NR Description: nitrogen fixation protein, putative  (NifU)
  misc_feature (1)..(226): NCBI GI NO: 21554503 NR Description: nitrogen fixation like protein
  misc_feature (1)..(226): NCBI GI NO: 7485833 NR Description: hypothetical protein F20B18
  misc_feature (1)..(225): NCBI GI NO: 18423084 NR Description: expressed protein [Arabidopsis thaliana]
  misc_feature (54)..(225): NCBI GI NO: 30698492 NR Description: NifU1 [Oryza sativa (japonica cultivar-group)]
  misc_feature (1)..(212): NCBI GI NO: 8777425 NR Description: gene_id:K9P8
  misc_feature (72)..(147): NCBI GI NO: 33862527 NR Description: NifU-like protein
  misc_feature (71)..(147): NCBI GI NO: 37522446 NR Description: gsl2877 [Gloeobacter violaceus]
  misc_feature (74)..(214): NCBI GI NO: 18411785 NR Description: NifU-related metallocluster assembly factor
  misc_feature (77)..(144): NCBI GI NO: 39995588 NR Description: NifU-like domain protein
MNLSLSSSEKSSNNRSSSLLNPKNAVSDSYGVSSKCSTFLRGQFQRIQLSYTRHTRPLPKRAGHVVSPSCVMPLTEENVERVLDEVRPALMADGGNVALHEIDGLVVVLKLQGACGSCPSSSMTLKMGIESRLRDKIPEIMSVEQFLEAETGGLELNEENIEKVLAELRPYLSGTGGGGLELVEIDGYIVKIRLTGPAAGVMTVRVALTQKLRENIPSIGAVQLLE

SEQ ID NO: 20444 - protein, 155 aa, Zea mays subsp. mays; identical to SEQ ID NO: 6785
  peptide (1)..(155): Ceres Seq. ID no. 14309071
  misc_feature (8)..(75): Pfam Name: Pfam Description:  NifU-like domain
  misc_feature (1)..(155): NCBI GI NO: 18416645 NR Description: nitrogen fixation protein, putative  (NifU)
  misc_feature (1)..(155): NCBI GI NO: 21554503 NR Description: nitrogen fixation like protein
  misc_feature (1)..(155): NCBI GI NO: 7485833 NR Description: hypothetical protein F20B18
  misc_feature (1)..(154): NCBI GI NO: 18423084 NR Description: expressed protein [Arabidopsis thaliana]
  misc_feature (1)..(154): NCBI GI NO: 30698492 NR Description: NifU1 [Oryza sativa (japonica cultivar-group)]
  misc_feature (1)..(141): NCBI GI NO: 8777425 NR Description: gene_id:K9P8
  misc_feature (1)..(76): NCBI GI NO: 33862527 NR Description: NifU-like protein
  misc_feature (1)..(76): NCBI GI NO: 37522446 NR Description: gsl2877 [Gloeobacter violaceus]
  misc_feature (3)..(143): NCBI GI NO: 18411785 NR Description: NifU-related metallocluster assembly factor
  misc_feature (6)..(73): NCBI GI NO: 39995588 NR Description: NifU-like domain protein

SEQ ID NO: 20445 - DNA, 784 bp, Zea mays subsp. mays
  misc_feature (1)..(784): Ceres Seq. ID no. 14309018
aaatcgacaggcgactacacagaaaaatgcaagatccacggaatcacgttccatcttctcccaccatctcctccgtctcttcctccgatcttgatacagaggatccttcttccatgatagaagcatcacacttggaactcttatgggacttagtttcaccgcaaccatgcccatgatgccattccgagcttcttcccaccgccacgtgtcaccctccctcacagcctccgacgcaacaagactcaaccagaggaaacgtcctccgtcgaactcgtctgagcgacatcgacgccgcaagtggtggcgcttttgccgagacgacggcgatggccctggaaacgggttgcaacgcggggccggagactgtagtagacgttcgtctctcggtgagtatctggaggttgaacggaggtttggagatgaagccgtctacggctccgccgagtcggagctagagggtgcggtggcgcgttaccgggaacagcagccggcggtggcggaacgggcgttgttcgccgacgggagggtacttcctccggcttctgctgagattgttaccggagaaagtacaccggtggctacggcactttgtagattcccggtttccttaaccggtatatgcagcggaggagggtgatagatccatcgtcggtccatgtgcttatttgtttctttaaaaaaattatgtattcaataatctttagaatcgtaataatcattgttagtcgagaaaatgtgatgaagtttaataacagcaacacatatagtcaactaaagtattgag

SEQ ID NO: 20446 - protein, 164 aa, Zea mays subsp. mays
  peptide (1)..(164): Ceres Seq. ID no. 14309019
  misc_feature (1)..(164): NCBI GI NO: 15229554 NR Description: hypothetical protein [Arabidopsis thaliana]
MGLSFTATMPMMPFRASSHRHVSPSLTASDATRLNQRKRPPSNSSERHRRRKWWRFCRDDGDGPGNGLQRGAGDCSRRSSLGEYLEVERRFGDEAVYGSAESELEGAVARYREQQPAVAERALFADGRVLPPASAEIVTGESTPVATALCRFPVSLTGICSGGG

SEQ ID NO: 20447 - protein, 156 aa, Zea mays subsp. mays
  peptide (1)..(156): Ceres Seq. ID no. 14309020
  misc_feature (1)..(156): NCBI GI NO: 15229554 NR Description: hypothetical protein [Arabidopsis thaliana]
MPMMPFRASSHRHVSPSLTASDATRLNQRKRPPSNSSERHRRRKWWRFCRDDGDGPGNGLQRGAGDCSRRSSLGEYLEVERRFGDEAVYGSAESELEGAVARYREQQPAVAERALFADGRVLPPASAEIVTGESTPVATALCRFPVSLTGICSGGG

SEQ ID NO: 20448 - protein, 154 aa, Zea mays subsp. mays
  peptide (1)..(154): Ceres Seq. ID no. 14309021
  misc_feature (1)..(154): NCBI GI NO: 15229554 NR Description: hypothetical protein [Arabidopsis thaliana]
MMPFRASSHRHVSPSLTASDATRLNQRKRPPSNSSERHRRRKWWRFCRDDGDGPGNGLQRGAGDCSRRSSLGEYLEVERRFGDEAVYGSAESELEGAVARYREQQPAVAERALFADGRVLPPASAEIVTGESTPVATALCRFPVSLTGICSGGG

SEQ ID NO: 20449 - DNA, 607 bp, Zea mays subsp. mays
  misc_feature (1)..(607): Ceres Seq. ID no. 14309011
attttaccgtaagcggttatcatctgcatcccgacgctcttcaaacgaggatacttctttgttcattatcatggcaacaagaagcgctatcagatttgtgtctcgcaggttctctaatggcaaagttcttagcgaagaggaaaaggctgctgagaatgttttcatcaagaaaatggagaaggagaagcttgagaagatagctaggcagggtccgggagaacaagcagcaggttcagccaaggctagtggtggtggaggaacatcatcagctgaatccacgggacctaaagtgtcagaagacaaggacaggaactatgcggtagtggcgggtgtggtggctgtcgtcggtgccattggttggtacatgaaatcaggcggaaagaagcagcagccagaggttcaagagtgaagaaaggtagtagaatgctggactttggagtggctttactataataaagtagagagtagcttactcattcctcttgtatgagaaaccttggaattgcctactactctttcttttggttttgaccaaattttcagaagagattttaagtcttttaaagtttgctggcgtttagcttcggaatctttaagttcattagtc

SEQ ID NO: 20450 - protein, 135 aa, Zea mays subsp. mays
  peptide (1)..(135): Ceres Seq. ID no. 14309012
  misc_feature (24)..(135): NCBI GI NO: 18401511 NR Description: expressed protein [Arabidopsis thaliana]
  misc_feature (24)..(135): NCBI GI NO: 21592886 NR Description: F1F0-ATPase inhibitor protein
  misc_feature (26)..(130): NCBI GI NO: 5821432 NR Description: F1F0-ATPase inhibitor protein
FYRKRLSSASRRSSNEDTSLFIIMATRSAIRFVSRRFSNGKVLSEEEKAAENVFIKKMEKEKLEKIARQGPGEQAAGSAKASGGGGTSSAESTGPKVSEDKDRNYAVVAGVVAVVGAIGWYMKSGGKKQQPEVQE

SEQ ID NO: 20451 - protein, 112 aa, Zea mays subsp. mays
  peptide (1)..(112): Ceres Seq. ID no. 14309013
  misc_feature (1)..(112): NCBI GI NO: 18401511 NR Description: expressed protein [Arabidopsis thaliana]
  misc_feature (1)..(112): NCBI GI NO: 21592886 NR Description: F1F0-ATPase inhibitor protein
  misc_feature (3)..(107): NCBI GI NO: 5821432 NR Description: F1F0-ATPase inhibitor protein
MATRSAIRFVSRRFSNGKVLSEEEKAAENVFIKKMEKEKLEKIARQGPGEQAAGSAKASGGGGTSSAESTGPKVSEDKDRNYAVVAGVVAVVGAIGWYMKSGGKKQQPEVQE

SEQ ID NO: 20452 - protein, 78 aa, Zea mays subsp. mays
  peptide (1)..(78): Ceres Seq. ID no. 14309014
  misc_feature (1)..(78): NCBI GI NO: 18401511 NR Description: expressed protein [Arabidopsis thaliana]
  misc_feature (1)..(78): NCBI GI NO: 21592886 NR Description: F1F0-ATPase inhibitor protein
  misc_feature (1)..(73): NCBI GI NO: 5821432 NR Description: F1F0-ATPase inhibitor protein
MEKEKLEKIARQGPGEQAAGSAKASGGGGTSSAESTGPKVSEDKDRNYAVVAGVVAVVGAIGWYMKSGGKKQQPEVQE

SEQ ID NO: 20453 - DNA, 887 bp, Zea mays subsp. mays
  misc_feature (1)..(887): Ceres Seq. ID no. 14309007
atttaggggctctctcagactcgggtatcgtcatcgtcatcgtcatcgtcttcgcccccgcgaagctcagtcgaagatgttaacggcggatataccaccgaatcagtcaatctacatcaaaaacctcaatgaaagaatcaagaaagaagaattgaagagatctctttactgtttgttctcacagtttgggaggatacttgatgtggttgctttgaagactcctaagctccgtggccaagcttgggttgcctttagtgatgtcactgctgctactaatgctgttcgccagatgcagaacttccctttctacgataagccgatgcgcatacaattcgcaaaagaaaagtcagattgtattgctagagaggaaggaactttcgttcccaaagataagaagaggaagaaagaagagaaagctgaaagaaagcgtgaagaaacccaacgaccaaacacagctaatggcccaactccacagaacggtgcccctccgccatcatcgttcaagccgagcggacaagaagcgatgccaccaaacaacatactcttcattcagaatcttccgcacgatacaacaaccgctatgcttgaatttctcttccgtcagtatccgggattcaaagagataagaatggtcgccgctaaaccagggattgcatttgcggagttcgaagacgatgctaaatcttccatggctatgcaaggtcttcaggacttcaaaatcactccccagtacccaatgctcatctcttttgccaagaaatgaagagaaactgcctgtgttttgtttgtcttttaagatgatgacagtgagacttggtgtgtataaccgacggtttaatgtttcggttcgattgactccggtttggtttagtcacgcggtttcacat

SEQ ID NO: 20454 - protein, 253 aa, Zea mays subsp. mays
  peptide (1)..(253): Ceres Seq. ID no. 14309008
  misc_feature (37)..(109): Pfam Name: a.k.a. RRM, RBD, or RNP domain Pfam Description: RNA recognition motif.
  misc_feature (26)..(253): NCBI GI NO: 15227729 NR Description: small nuclear ribonucleoprotein U2B
  misc_feature (26)..(253): NCBI GI NO: 21593001 NR Description: putative small nuclear ribonucleoprotein U2B
  misc_feature (26)..(253): NCBI GI NO: 30679897 NR Description: small nuclear ribonucleoprotein U2B
  misc_feature (26)..(253): NCBI GI NO: 30679892 NR Description: small nuclear ribonucleoprotein U2B
  misc_feature (26)..(253): NCBI GI NO: 19347861 NR Description: putative spliceosomal protein (U2B)
  misc_feature (26)..(162): NCBI GI NO: 25294325 NR Description: hypothetical protein
  misc_feature (163)..(253): NCBI GI NO: 25294325 NR Description: hypothetical protein
  misc_feature (26)..(253): NCBI GI NO: 421960 NR Description: small nuclear ribonucleoprotein U2B'' - potato
  misc_feature (30)..(253): NCBI GI NO: 2119045 NR Description: small nuclear ribonucleoprotein U1A - potato
  misc_feature (32)..(253): NCBI GI NO: 34897622 NR Description: putative small nuclear ribonucleoprotein U1A
FRGSLRLGYRHRHRHRLRPREAQSKMLTADIPPNQSIYIKNLNERIKKEELKRSLYCLFSQFGRILDVVALKTPKLRGQAWVAFSDVTAATNAVRQMQNFPFYDKPMRIQFAKEKSDCIAREEGTFVPKDKKRKKEEKAERKREETQRPNTANGPTPQNGAPPPSSFKPSGQEAMPPNNILFIQNLPHDTTTAMLEFLFRQYPGFKEIRMVAAKPGIAFAEFEDDAKSSMAMQGLQDFKITPQYPMLISFAKK

SEQ ID NO: 20455 - protein, 228 aa, Zea mays subsp. mays
  peptide (1)..(228): Ceres Seq. ID no. 14309009
  misc_feature (12)..(84): Pfam Name: a.k.a. RRM, RBD, or RNP domain Pfam Description: RNA recognition motif.
  misc_feature (1)..(228): NCBI GI NO: 15227729 NR Description: small nuclear ribonucleoprotein U2B
  misc_feature (1)..(228): NCBI GI NO: 21593001 NR Description: putative small nuclear ribonucleoprotein U2B
  misc_feature (1)..(228): NCBI GI NO: 30679897 NR Description: small nuclear ribonucleoprotein U2B
  misc_feature (1)..(228): NCBI GI NO: 30679892 NR Description: small nuclear ribonucleoprotein U2B
  misc_feature (1)..(228): NCBI GI NO: 19347861 NR Description: putative spliceosomal protein (U2B)
  misc_feature (1)..(137): NCBI GI NO: 25294325 NR Description: hypothetical protein
  misc_feature (138)..(228): NCBI GI NO: 25294325 NR Description: hypothetical protein
  misc_feature (1)..(228): NCBI GI NO: 421960 NR Description: small nuclear ribonucleoprotein U2B'' - potato
  misc_feature (5)..(228): NCBI GI NO: 2119045 NR Description: small nuclear ribonucleoprotein U1A - potato
  misc_feature (7)..(228): NCBI GI NO: 34897622 NR Description: putative small nuclear ribonucleoprotein U1A
MLTADIPPNQSIYIKNLNERIKKEELKRSLYCLFSQFGRILDVVALKTPKLRGQAWVAFSDVTAATNAVRQMQNFPFYDKPMRIQFAKEKSDCIAREEGTFVPKDKKRKKEEKAERKREETQRPNTANGPTPQNGAPPPSSFKPSGQEAMPPNNILFIQNLPHDTTTAMLEFLFRQYPGFKEIRMVAAKPGIAFAEFEDDAKSSMAMQGLQDFKITPQYPMLISFAKK

SEQ ID NO: 20456 - protein, 157 aa, Zea mays subsp. mays
  peptide (1)..(157): Ceres Seq. ID no. 14309010
  misc_feature (1)..(157): NCBI GI NO: 15227729 NR Description: small nuclear ribonucleoprotein U2B
  misc_feature (1)..(157): NCBI GI NO: 21593001 NR Description: putative small nuclear ribonucleoprotein U2B
  misc_feature (1)..(157): NCBI GI NO: 30679897 NR Description: small nuclear ribonucleoprotein U2B
  misc_feature (1)..(157): NCBI GI NO: 30679892 NR Description: small nuclear ribonucleoprotein U2B
  misc_feature (1)..(157): NCBI GI NO: 19347861 NR Description: putative spliceosomal protein (U2B)
  misc_feature (1)..(66): NCBI GI NO: 25294325 NR Description: hypothetical protein
  misc_feature (67)..(157): NCBI GI NO: 25294325 NR Description: hypothetical protein
  misc_feature (1)..(157): NCBI GI NO: 421960 NR Description: small nuclear ribonucleoprotein U2B'' - potato
  misc_feature (1)..(157): NCBI GI NO: 2119045 NR Description: small nuclear ribonucleoprotein U1A - potato
  misc_feature (1)..(157): NCBI GI NO: 34897622 NR Description: putative small nuclear ribonucleoprotein U1A
MQNFPFYDKPMRIQFAKEKSDCIAREEGTFVPKDKKRKKEEKAERKREETQRPNTANGPTPQNGAPPPSSFKPSGQEAMPPNNILFIQNLPHDTTTAMLEFLFRQYPGFKEIRMVAAKPGIAFAEFEDDAKSSMAMQGLQDFKITPQYPMLISFAKK

SEQ ID NO: 20457 - DNA, 848 bp, Zea mays subsp. mays
  misc_feature (1)..(848): Ceres Seq. ID no. 14309003
attttgacatttttctcgagcagatcaatcttcttcggttagggttccctcgccgaatccctagatctgtaacggtttccaaaagagccaatggagaacgggaaacgagacagagaagacatggaagtgcaagccgcaccacggaagccacgcgtcctcctcgccgcgagcggaagcgtcgccgccatcaaattcggaaacctctgccattgtttcgccgaatgggccgaagtgagagccgtcgtctcgaaatcgtctctccacttcctcgacaggctctccctcccgcgggaagtcactctgtacaccgacgaagacgagtggtcaacctggaacaagatcggcgatccagtgcttcacatcgagctccgacgctgggctgacgtcatggtcatagctcctttgtctgctaacacattagccaagattgctggtgggctgtgtgataatcttctgacttgtatcgtacgagcttgggattatagcaaaccggttttcgttgcgcctgcgatgaatactttgatgtggaacaatcctttcacggagaggcatctttgttcccttgatgagcttgggatcacgctcattcctcccatcaagaagagattggcgtgtggtgactatggtaatggtgcaatggctgagccttctttgatttattccactgttagactcttctgggagtcgcaggttcgtcagcaaagctgaaaccatggtttccactttgcattggttggttctgttttaatgcttgtctttgtacatcttatgtctctagaggaccattttcactggcttcactcgtgttactgtaggaatatttaagtttattgtctcgctgtttggtg

SEQ ID NO: 20458 - protein, 205 aa, Zea mays subsp. mays
  peptide (1)..(205): Ceres Seq. ID no. 14309004
  misc_feature (20)..(140): Pfam Name: Pfam Description:  Flavoprotein
  misc_feature (1)..(205): NCBI GI NO: 15229569 NR Description: HAL3A protein [Arabidopsis thaliana]
  misc_feature (1)..(205): NCBI GI NO: 28948673 NR Description: Chain A, Ppc Decarboxylase Mutant C175s
  misc_feature (1)..(204): NCBI GI NO: 8778701 NR Description: T1N15.24 [Arabidopsis thaliana]
  misc_feature (10)..(204): NCBI GI NO: 13124308 NR Description: Halotolerance protein Hal3b
  misc_feature (21)..(194): NCBI GI NO: 9634784 NR Description: ORF FPV114 HAL3 domain [Fowlpox virus]
  misc_feature (21)..(194): NCBI GI NO: 40556079 NR Description: CNPV141 HAL3-like domain protein [Canarypox virus]
  misc_feature (2)..(199): NCBI GI NO: 37590890 NR Description: Unknown (protein for MGC:73297) [Danio rerio]
  misc_feature (83)..(202): NCBI GI NO: 12583571 NR Description: putative halotolerance protein HAL3 homolog
  misc_feature (13)..(203): NCBI GI NO: 34863489 NR Description: similar to RIKEN cDNA 8430432M10
  misc_feature (13)..(194): NCBI GI NO: 28849879 NR Description: RIKEN cDNA 8430432M10 [Mus musculus]
MENGKRDREDMEVQAAPRKPRVLLAASGSVAAIKFGNLCHCFAEWAEVRAVVSKSSLHFLDRLSLPREVTLYTDEDEWSTWNKIGDPVLHIELRRWADVMVIAPLSANTLAKIAGGLCDNLLTCIVRAWDYSKPVFVAPAMNTLMWNNPFTERHLCSLDELGITLIPPIKKRLACGDYGNGAMAEPSLIYSTVRLFWESQVRQQS

SEQ ID NO: 20459 - protein, 195 aa, Zea mays subsp. mays
  peptide (1)..(195): Ceres Seq. ID no. 14309005
  misc_feature (10)..(130): Pfam Name: Pfam Description:  Flavoprotein
  misc_feature (1)..(195): NCBI GI NO: 15229569 NR Description: HAL3A protein [Arabidopsis thaliana]
  misc_feature (1)..(195): NCBI GI NO: 28948673 NR Description: Chain A, Ppc Decarboxylase Mutant C175s
  misc_feature (1)..(194): NCBI GI NO: 8778701 NR Description: T1N15.24 [Arabidopsis thaliana]
  misc_feature (1)..(194): NCBI GI NO: 13124308 NR Description: Halotolerance protein Hal3b
  misc_feature (11)..(184): NCBI GI NO: 9634784 NR Description: ORF FPV114 HAL3 domain [Fowlpox virus]
  misc_feature (11)..(184): NCBI GI NO: 40556079 NR Description: CNPV141 HAL3-like domain protein [Canarypox virus]
  misc_feature (1)..(189): NCBI GI NO: 37590890 NR Description: Unknown (protein for MGC:73297) [Danio rerio]
  misc_feature (73)..(192): NCBI GI NO: 12583571 NR Description: putative halotolerance protein HAL3 homolog
  misc_feature (3)..(193): NCBI GI NO: 34863489 NR Description: similar to RIKEN cDNA 8430432M10
  misc_feature (3)..(184): NCBI GI NO: 28849879 NR Description: RIKEN cDNA 8430432M10 [Mus musculus]
MEVQAAPRKPRVLLAASGSVAAIKFGNLCHCFAEWAEVRAVVSKSSLHFLDRLSLPREVTLYTDEDEWSTWNKIGDPVLHIELRRWADVMVIAPLSANTLAKIAGGLCDNLLTCIVRAWDYSKPVFVAPAMNTLMWNNPFTERHLCSLDELGITLIPPIKKRLACGDYGNGAMAEPSLIYSTVRLFWESQVRQQS

SEQ ID NO: 20460 - protein, 126 aa, Zea mays subsp. mays
  peptide (1)..(126): Ceres Seq. ID no. 14309006
FDIFLEQINLLRLGFPRRIPRSVTVSKRANGERETRQRRHGSASRTTEATRPPRRERKRRRHQIRKPLPLFRRMGRSESRRLEIVSPLPRQALPPAGSHSVHRRRRVVNLEQDRRSSASHRAPTLG

SEQ ID NO: 20461 - DNA, 807 bp, Zea mays subsp. mays
  misc_feature (1)..(807): Ceres Seq. ID no. 15179942
atgagacgggcatttctaaaccctcgtcgtggctggctcggtgttacaacagatcaagcgaagaagcgaaagctctggtgagcaagcaagcagccatgtcgtggatgaaaggagatttactttccaaaaccaggaggcttgttggtggactcgctaccagagagcccgtttggcttaaagccatggaagcatcacctcctcctgtatttcctcgctctaatgggaacctcaagaagatttttctccctgaagatccctacgttcgtagattctcccgtaagcatcctgaagccaaactcgtcgaccccaacaaggcttcggcgtttattccagatccagcacgcgtatatggttgccgggtccttgaactgaccaagaatggcatcagcgaggatgacgccatgtctgtagctaatatggagtatcttgcggagagaaaggaaaagaagaaagcatacaaacgcctaaaggagcttgctgtactgcaagacaagtctcctcctcctaaaccgtatcttagtaccaaaaaagagatgcaaatccaagagaagaaagcacctgcggatcctcctagcgtccgcaggctagtcaaccagttgaaacagcagaaagatgtgttactgcaggataaacctggaggtagtgctaatcaggatcattggatcgacgaatagtttctccatcatcctttttcttttatgcaagttccaagtcttttcatacaagtgttgttattcccatttgattgttttcagaacattttcaacaaacaagtgttacaggaaagcacaatggttatgtctctcc

SEQ ID NO: 20462 - protein, 223 aa, Zea mays subsp. mays
  peptide (1)..(223): Ceres Seq. ID no. 15179943
  misc_feature (32)..(223): NCBI GI NO: 18396035 NR Description: expressed protein [Arabidopsis thaliana]
  misc_feature (32)..(223): NCBI GI NO: 21555186 NR Description: unknown [Arabidopsis thaliana]
  misc_feature (134)..(223): NCBI GI NO: 9295724 NR Description: T24P13.13 [Arabidopsis thaliana]
ETGISKPSSWLARCYNRSSEEAKALVSKQAAMSWMKGDLLSKTRRLVGGLATREPVWLKAMEASPPPVFPRSNGNLKKIFLPEDPYVRRFSRKHPEAKLVDPNKASAFIPDPARVYGCRVLELTKNGISEDDAMSVANMEYLAERKEKKKAYKRLKELAVLQDKSPPPKPYLSTKKEMQIQEKKAPADPPSVRRLVNQLKQQKDVLLQDKPGGSANQDHWIDE

SEQ ID NO: 20463 - protein, 192 aa, Zea mays subsp. mays
  peptide (1)..(192): Ceres Seq. ID no. 15179944
  misc_feature (1)..(192): NCBI GI NO: 18396035 NR Description: expressed protein [Arabidopsis thaliana]
  misc_feature (1)..(192): NCBI GI NO: 21555186 NR Description: unknown [Arabidopsis thaliana]
  misc_feature (103)..(192): NCBI GI NO: 9295724 NR Description: T24P13.13 [Arabidopsis thaliana]
MSWMKGDLLSKTRRLVGGLATREPVWLKAMEASPPPVFPRSNGNLKKIFLPEDPYVRRFSRKHPEAKLVDPNKASAFIPDPARVYGCRVLELTKNGISEDDAMSVANMEYLAERKEKKKAYKRLKELAVLQDKSPPPKPYLSTKKEMQIQEKKAPADPPSVRRLVNQLKQQKDVLLQDKPGGSANQDHWIDE

SEQ ID NO: 20464 - protein, 189 aa, Zea mays subsp. mays
  peptide (1)..(189): Ceres Seq. ID no. 15179945
  misc_feature (1)..(189): NCBI GI NO: 18396035 NR Description: expressed protein [Arabidopsis thaliana]
  misc_feature (1)..(189): NCBI GI NO: 21555186 NR Description: unknown [Arabidopsis thaliana]
  misc_feature (100)..(189): NCBI GI NO: 9295724 NR Description: T24P13.13 [Arabidopsis thaliana]
MKGDLLSKTRRLVGGLATREPVWLKAMEASPPPVFPRSNGNLKKIFLPEDPYVRRFSRKHPEAKLVDPNKASAFIPDPARVYGCRVLELTKNGISEDDAMSVANMEYLAERKEKKKAYKRLKELAVLQDKSPPPKPYLSTKKEMQIQEKKAPADPPSVRRLVNQLKQQKDVLLQDKPGGSANQDHWIDE

SEQ ID NO: 20465 - DNA, 803 bp, Zea mays subsp. mays
  misc_feature (1)..(803): Ceres Seq. ID no. 14308995
aagaaaaagcaagcccatcgtcctaccgtattagcaatggaggcagcagcaggagaggggccgacgacgacgatgaagacggtgtgcgtgaccggcgcggggggtttcgtggcctcgtggctcgtcgagcgcctcctcgccggcggacgatacaagatccacggcaccgtccgcgatcccggcgacgccaagaacgcgcacctgctggggctggacggcgccgcggagcggctgcggctgttcaaggccgacctgctcgacttcggcagcctggcggcggccattgcaggctgtgacggcgtcttccacgtggcctgccccgtccccgactataccctcaccgaccccgagaccgagctgctggctcctgccgtgacgggcaccatgaacatcctcagggcgtgctccgacgcccatgtcaggagggtcgtcgtggtctcctctctctcggctgtcatgataaaccctgactggggcgagtgcaaggtcatggacgaaggttgctggtctgatgtcgacctctgcagaactactaagcgaaatctcatcttttcctacatgactctaagggcatgtacaatgctgaaggcaactaccatctccaagtgttttgaggaatgcagaggcaagactgtgagaaaggatgttatgtactatatttaattcatacacaatctttatcactatgcatcgatcaagaatatattggatatttgtagccattttcttgcatgtttatggtggatactaaaataaggcatgtgaatttcatgtagaatcataaatataatttatatttatat

SEQ ID NO: 20466 - protein, 220 aa, Zea mays subsp. mays
  peptide (1)..(220): Ceres Seq. ID no. 14308996
  misc_feature (26)..(177): Pfam Name: Pfam Description:  3-beta hydroxysteroid dehydrogenase/ isomerase family
  misc_feature (28)..(179): NCBI GI NO: 15226135 NR Description: cinnamoyl-CoA reductase family
  misc_feature (28)..(179): NCBI GI NO: 15226134 NR Description: cinnamoyl-CoA reductase family
  misc_feature (28)..(185): NCBI GI NO: 25140436 NR Description: cinnamoyl CoA reductase 2 [Solanum tuberosum]
  misc_feature (11)..(179): NCBI GI NO: 10304406 NR Description: cinnamoyl-CoA reductase [Eucalyptus saligna]
  misc_feature (11)..(179): NCBI GI NO: 7431407 NR Description: cinnamoyl-CoA reductase (EC 1
  misc_feature (11)..(179): NCBI GI NO: 7431408 NR Description: cinnamoyl-CoA reductase (EC 1
  misc_feature (26)..(179): NCBI GI NO: 31414896 NR Description: cinnamoyl CoA reductase [Fragaria x ananassa]
  misc_feature (11)..(179): NCBI GI NO: 25989515 NR Description: cinnamoyl CoA reductase [Eucalyptus globulus]
  misc_feature (26)..(179): NCBI GI NO: 9998901 NR Description: cinnamoyl-CoA reductase
  misc_feature (26)..(179): NCBI GI NO: 40233135 NR Description: cinnamoyl CoA reductase [Populus tomentosa]
KKKQAHRPTVLAMEAAAGEGPTTTMKTVCVTGAGGFVASWLVERLLAGGRYKIHGTVRDPGDAKNAHLLGLDGAAERLRLFKADLLDFGSLAAAIAGCDGVFHVACPVPDYTLTDPETELLAPAVTGTMNILRACSDAHVRRVVVVSSLSAVMINPDWGECKVMDEGCWSDVDLCRTTKRNLIFSYMTLRACTMLKATTISKCFEECRGKTVRKDVMYYI

SEQ ID NO: 20467 - protein, 208 aa, Zea mays subsp. mays
  peptide (1)..(208): Ceres Seq. ID no. 14308997
  misc_feature (14)..(165): Pfam Name: Pfam Description:  3-beta hydroxysteroid dehydrogenase/ isomerase family
  misc_feature (16)..(167): NCBI GI NO: 15226135 NR Description: cinnamoyl-CoA reductase family
  misc_feature (16)..(167): NCBI GI NO: 15226134 NR Description: cinnamoyl-CoA reductase family
  misc_feature (16)..(173): NCBI GI NO: 25140436 NR Description: cinnamoyl CoA reductase 2 [Solanum tuberosum]
  misc_feature (1)..(167): NCBI GI NO: 10304406 NR Description: cinnamoyl-CoA reductase [Eucalyptus saligna]
  misc_feature (1)..(167): NCBI GI NO: 7431407 NR Description: cinnamoyl-CoA reductase (EC 1
  misc_feature (1)..(167): NCBI GI NO: 7431408 NR Description: cinnamoyl-CoA reductase (EC 1
  misc_feature (14)..(167): NCBI GI NO: 31414896 NR Description: cinnamoyl CoA reductase [Fragaria x ananassa]
  misc_feature (1)..(167): NCBI GI NO: 25989515 NR Description: cinnamoyl CoA reductase [Eucalyptus globulus]
  misc_feature (14)..(167): NCBI GI NO: 9998901 NR Description: cinnamoyl-CoA reductase
  misc_feature (14)..(167): NCBI GI NO: 40233135 NR Description: cinnamoyl CoA reductase [Populus tomentosa]
MEAAAGEGPTTTMKTVCVTGAGGFVASWLVERLLAGGRYKIHGTVRDPGDAKNAHLLGLDGAAERLRLFKADLLDFGSLAAAIAGCDGVFHVACPVPDYTLTDPETELLAPAVTGTMNILRACSDAHVRRVVVVSSLSAVMINPDWGECKVMDEGCWSDVDLCRTTKRNLIFSYMTLRACTMLKATTISKCFEECRGKTVRKDVMYYI

SEQ ID NO: 20468 - protein, 196 aa, Zea mays subsp. mays
  peptide (1)..(196): Ceres Seq. ID no. 14308998
  misc_feature (2)..(153): Pfam Name: Pfam Description:  3-beta hydroxysteroid dehydrogenase/ isomerase family
  misc_feature (4)..(155): NCBI GI NO: 15226135 NR Description: cinnamoyl-CoA reductase family
  misc_feature (4)..(155): NCBI GI NO: 15226134 NR Description: cinnamoyl-CoA reductase family
  misc_feature (4)..(161): NCBI GI NO: 25140436 NR Description: cinnamoyl CoA reductase 2 [Solanum tuberosum]
  misc_feature (1)..(155): NCBI GI NO: 10304406 NR Description: cinnamoyl-CoA reductase [Eucalyptus saligna]
  misc_feature (1)..(155): NCBI GI NO: 7431407 NR Description: cinnamoyl-CoA reductase (EC 1
  misc_feature (1)..(155): NCBI GI NO: 7431408 NR Description: cinnamoyl-CoA reductase (EC 1
  misc_feature (2)..(155): NCBI GI NO: 31414896 NR Description: cinnamoyl CoA reductase [Fragaria x ananassa]
  misc_feature (1)..(155): NCBI GI NO: 25989515 NR Description: cinnamoyl CoA reductase [Eucalyptus globulus]
  misc_feature (2)..(155): NCBI GI NO: 9998901 NR Description: cinnamoyl-CoA reductase
  misc_feature (2)..(155): NCBI GI NO: 40233135 NR Description: cinnamoyl CoA reductase [Populus tomentosa]
MKTVCVTGAGGFVASWLVERLLAGGRYKIHGTVRDPGDAKNAHLLGLDGAAERLRLFKADLLDFGSLAAAIAGCDGVFHVACPVPDYTLTDPETELLAPAVTGTMNILRACSDAHVRRVVVVSSLSAVMINPDWGECKVMDEGCWSDVDLCRTTKRNLIFSYMTLRACTMLKATTISKCFEECRGKTVRKDVMYYI

SEQ ID NO: 20469 - DNA, 605 bp, Zea mays subsp. mays
  misc_feature (1)..(605): Ceres Seq. ID no. 14308991
agaagagaagaaatggctgcttcagtgatgctatcatcggtgacgttgaaaccggcgggtttcacggtggagaagatgtcagcgagaggattgccgtcgctcacaagaacttcattcaaaatcgtcgcgagcggtgtcaagaagatcaagaccgacaagccctttggagttaacggcagcatggacttgagggacggcgtcgacgcctccggcagaaagggaaagggatacggtgtttacaagttcgttgacaagtatggagctaacgtcgatggatacagtcctatctacaacgaggaggagtggtcaccaggtggtgatgtgtacaagggaggagtcactggattggctatttgggcggtaacactcgccggaattctcgccggaggagctcttcttgtgtacaacacaagtgctttggctcagtaaaaaatcttcaaaacatcatcatgtttctctacatgttttgtgtttattgtttctcttctctgtaatgctactttgaattttataaagaactctagtagcgtttgtgtaatacccatctttcagagatctcggtgtacaaaaacaagaagttgaatacagttttatagactgaactc

SEQ ID NO: 20470 - protein, 142 aa, Zea mays subsp. mays
  peptide (1)..(142): Ceres Seq. ID no. 14308992
  misc_feature (44)..(142): Pfam Name: Pfam Description:  Photosystem II 10 kDa polypeptide PsbR
  misc_feature (5)..(142): NCBI GI NO: 1346871 NR Description: Photosystem II 10 kDa polypeptide
  misc_feature (5)..(142): NCBI GI NO: 15219268 NR Description: photosystem II polypeptide -related
  misc_feature (8)..(142): NCBI GI NO: 28207611 NR Description: photosystem II 10kDa polypeptide
  misc_feature (7)..(142): NCBI GI NO: 3914471 NR Description: Photosystem II 10 kDa polypeptide
  misc_feature (7)..(142): NCBI GI NO: 131399 NR Description: Photosystem II 10 kDa polypeptide
  misc_feature (7)..(142): NCBI GI NO: 21491 NR Description: unnamed protein product [Solanum tuberosum]
  misc_feature (14)..(142): NCBI GI NO: 1418984 NR Description: photosystem II 10 kD polypeptide
  misc_feature (5)..(142): NCBI GI NO: 3914472 NR Description: Photosystem II 10 kDa polypeptide
  misc_feature (5)..(142): NCBI GI NO: 33694227 NR Description: 10 kDa photosystem II polypeptide
  misc_feature (5)..(141): NCBI GI NO: 38636958 NR Description: putative photosystem II 10K protein
RREEMAASVMLSSVTLKPAGFTVEKMSARGLPSLTRTSFKIVASGVKKIKTDKPFGVNGSMDLRDGVDASGRKGKGYGVYKFVDKYGANVDGYSPIYNEEEWSPGGDVYKGGVTGLAIWAVTLAGILAGGALLVYNTSALAQ

SEQ ID NO: 20471 - protein, 138 aa, Zea mays subsp. mays
  peptide (1)..(138): Ceres Seq. ID no. 14308993
  misc_feature (40)..(138): Pfam Name: Pfam Description:  Photosystem II 10 kDa polypeptide PsbR
  misc_feature (1)..(138): NCBI GI NO: 1346871 NR Description: Photosystem II 10 kDa polypeptide
  misc_feature (1)..(138): NCBI GI NO: 15219268 NR Description: photosystem II polypeptide -related
  misc_feature (4)..(138): NCBI GI NO: 28207611 NR Description: photosystem II 10kDa polypeptide
  misc_feature (3)..(138): NCBI GI NO: 3914471 NR Description: Photosystem II 10 kDa polypeptide
  misc_feature (3)..(138): NCBI GI NO: 131399 NR Description: Photosystem II 10 kDa polypeptide
  misc_feature (3)..(138): NCBI GI NO: 21491 NR Description: unnamed protein product [Solanum tuberosum]
  misc_feature (10)..(138): NCBI GI NO: 1418984 NR Description: photosystem II 10 kD polypeptide
  misc_feature (1)..(138): NCBI GI NO: 3914472 NR Description: Photosystem II 10 kDa polypeptide
  misc_feature (1)..(138): NCBI GI NO: 33694227 NR Description: 10 kDa photosystem II polypeptide
  misc_feature (1)..(137): NCBI GI NO: 38636958 NR Description: putative photosystem II 10K protein
MAASVMLSSVTLKPAGFTVEKMSARGLPSLTRTSFKIVASGVKKIKTDKPFGVNGSMDLRDGVDASGRKGKGYGVYKFVDKYGANVDGYSPIYNEEEWSPGGDVYKGGVTGLAIWAVTLAGILAGGALLVYNTSALAQ

SEQ ID NO: 20472 - protein, 133 aa, Zea mays subsp. mays
  peptide (1)..(133): Ceres Seq. ID no. 14308994
  misc_feature (35)..(133): Pfam Name: Pfam Description:  Photosystem II 10 kDa polypeptide PsbR
  misc_feature (1)..(133): NCBI GI NO: 1346871 NR Description: Photosystem II 10 kDa polypeptide
  misc_feature (1)..(133): NCBI GI NO: 15219268 NR Description: photosystem II polypeptide -related
  misc_feature (1)..(133): NCBI GI NO: 28207611 NR Description: photosystem II 10kDa polypeptide
  misc_feature (1)..(133): NCBI GI NO: 3914471 NR Description: Photosystem II 10 kDa polypeptide
  misc_feature (1)..(133): NCBI GI NO: 131399 NR Description: Photosystem II 10 kDa polypeptide
  misc_feature (1)..(133): NCBI GI NO: 21491 NR Description: unnamed protein product [Solanum tuberosum]
  misc_feature (5)..(133): NCBI GI NO: 1418984 NR Description: photosystem II 10 kD polypeptide
  misc_feature (1)..(133): NCBI GI NO: 3914472 NR Description: Photosystem II 10 kDa polypeptide
  misc_feature (1)..(133): NCBI GI NO: 33694227 NR Description: 10 kDa photosystem II polypeptide
  misc_feature (1)..(132): NCBI GI NO: 38636958 NR Description: putative photosystem II 10K protein
MLSSVTLKPAGFTVEKMSARGLPSLTRTSFKIVASGVKKIKTDKPFGVNGSMDLRDGVDASGRKGKGYGVYKFVDKYGANVDGYSPIYNEEEWSPGGDVYKGGVTGLAIWAVTLAGILAGGALLVYNTSALAQ

SEQ ID NO: 20473 - DNA, 993 bp, Zea mays subsp. mays
  misc_feature (1)..(993): Ceres Seq. ID no. 14308999
cttacccttcgcggagatcggagaaaatggctgccaatttctgggaatcgtctcaatacaaacagcttttggaccaagaagaagtggatgtagttcaacctctcgacaaagaacgtggaatttcagtcgaggatttcaagctcatcaagttccatatgtctaatcatataatgaagttggctcagcacattaaagtgaggcaaagggttgtggctaccgctataacgtacatgagacgggtttataccaagaagagcatggtagagtttgagccccgtcttgttgctattgcatgcttgtacctggctttctaagctgaagagagcatagtccaggccaggaatcttgttttctacagcaaaagattgtatccggatgagtacaagtatgaactaaaagatatattaggaatggagatgagggtcttagaagcactggactattatctggttgtgtttcacccttaccggtcattatctgattttttgcaagatgctgcattgaacgatgtcaatatgaaccagtttacatggggaattgtcaacgatacttataagatggacctgattcttgtacaccctccttatcgcatagcgctagcgtgcatatacatagcaagtgtccagagagagaaagacatcaccgcatggcttcaagatcttaacgaggacatgaacttggtgaaggacattgccatggagattctggacttctacgagaactacagaaccatcacggatgaaaaagtgagttctgcgttcagcaaactggctttgaagccgtgacagctggggaatagcctccatctcttcaatttatctgatgctctctttatacaagaaaaacaaaagattaaagacttcctcagttgcccatgttagttttgtggcggacatgtaacattgttgaatcctaccaaacataattctttaagtgacaacttcatctactgacactttttggtcaaaagttgaaatttttatacgtgggaag

SEQ ID NO: 20474 - protein, 124 aa, Zea mays subsp. mays
  peptide (1)..(124): Ceres Seq. ID no. 14309000
  misc_feature (16)..(124): Pfam Name: Pfam Description:  Cyclin, C-terminal domain
  misc_feature (1)..(123): NCBI GI NO: 15239665 NR Description: cyclin family [Arabidopsis thaliana]
  misc_feature (1)..(124): NCBI GI NO: 15239664 NR Description: cyclin family [Arabidopsis thaliana]
  misc_feature (1)..(123): NCBI GI NO: 3334144 NR Description: G1/S-SPECIFIC CYCLIN C-TYPE
  misc_feature (1)..(103): NCBI GI NO: 28828497 NR Description: similar to Mus musculus (Mouse)
  misc_feature (1)..(124): NCBI GI NO: 38382739 NR Description: Unknown (protein for IMAGE:6391891) [Mus musculus]
  misc_feature (1)..(124): NCBI GI NO: 34867083 NR Description: cyclin C [Rattus norvegicus]
  misc_feature (1)..(124): NCBI GI NO: 1705767 NR Description: Cyclin C
  misc_feature (1)..(124): NCBI GI NO: 4885119 NR Description: cyclin C [Homo sapiens]
  misc_feature (1)..(124): NCBI GI NO: 11042056 NR Description: dJ199J3.4 (cyclin C) [Homo sapiens]
  misc_feature (1)..(124): NCBI GI NO: 34783612 NR Description: Unknown (protein for IMAGE:6165083) [Homo sapiens]
MEMRVLEALDYYLVVFHPYRSLSDFLQDAALNDVNMNQFTWGIVNDTYKMDLILVHPPYRIALACIYIASVQREKDITAWLQDLNEDMNLVKDIAMEILDFYENYRTITDEKVSSAFSKLALKP

SEQ ID NO: 20475 - protein, 122 aa, Zea mays subsp. mays
  peptide (1)..(122): Ceres Seq. ID no. 14309001
  misc_feature (14)..(122): Pfam Name: Pfam Description:  Cyclin, C-terminal domain
  misc_feature (1)..(121): NCBI GI NO: 15239665 NR Description: cyclin family [Arabidopsis thaliana]
  misc_feature (1)..(122): NCBI GI NO: 15239664 NR Description: cyclin family [Arabidopsis thaliana]
  misc_feature (1)..(121): NCBI GI NO: 3334144 NR Description: G1/S-SPECIFIC CYCLIN C-TYPE
  misc_feature (1)..(101): NCBI GI NO: 28828497 NR Description: similar to Mus musculus (Mouse)
  misc_feature (1)..(122): NCBI GI NO: 38382739 NR Description: Unknown (protein for IMAGE:6391891) [Mus musculus]
  misc_feature (1)..(122): NCBI GI NO: 34867083 NR Description: cyclin C [Rattus norvegicus]
  misc_feature (1)..(122): NCBI GI NO: 1705767 NR Description: Cyclin C
  misc_feature (1)..(122): NCBI GI NO: 4885119 NR Description: cyclin C [Homo sapiens]
  misc_feature (1)..(122): NCBI GI NO: 11042056 NR Description: dJ199J3.4 (cyclin C) [Homo sapiens]
  misc_feature (1)..(122): NCBI GI NO: 34783612 NR Description: Unknown (protein for IMAGE:6165083) [Homo sapiens]
MRVLEALDYYLVVFHPYRSLSDFLQDAALNDVNMNQFTWGIVNDTYKMDLILVHPPYRIALACIYIASVQREKDITAWLQDLNEDMNLVKDIAMEILDFYENYRTITDEKVSSAFSKLALKP

SEQ ID NO: 20476 - protein, 103 aa, Zea mays subsp. mays
  peptide (1)..(103): Ceres Seq. ID no. 14309002
  misc_feature (17)..(103): Pfam Name: Pfam Description:  Cyclin, N-terminal domain
  misc_feature (9)..(103): NCBI GI NO: 15239665 NR Description: cyclin family [Arabidopsis thaliana]
  misc_feature (9)..(103): NCBI GI NO: 15239664 NR Description: cyclin family [Arabidopsis thaliana]
  misc_feature (9)..(103): NCBI GI NO: 3334144 NR Description: G1/S-SPECIFIC CYCLIN C-TYPE
  misc_feature (9)..(103): NCBI GI NO: 28828497 NR Description: similar to Mus musculus (Mouse)
  misc_feature (1)..(103): NCBI GI NO: 38382739 NR Description: Unknown (protein for IMAGE:6391891) [Mus musculus]
  misc_feature (9)..(103): NCBI GI NO: 34867083 NR Description: cyclin C [Rattus norvegicus]
  misc_feature (9)..(103): NCBI GI NO: 1705767 NR Description: Cyclin C
  misc_feature (9)..(103): NCBI GI NO: 4885119 NR Description: cyclin C [Homo sapiens]
  misc_feature (9)..(103): NCBI GI NO: 11042056 NR Description: dJ199J3.4 (cyclin C) [Homo sapiens]
  misc_feature (9)..(103): NCBI GI NO: 34783612 NR Description: Unknown (protein for IMAGE:6165083) [Homo sapiens]
YPSRRSEKMAANFWESSQYKQLLDQEEVDVVQPLDKERGISVEDFKLIKFHMSNHIMKLAQHIKVRQRVVATAITYMRRVYTKKSMVEFEPRLVAIACLYLAF

SEQ ID NO: 20477 - DNA, 1062 bp, Zea mays subsp. mays
  misc_feature (1)..(1062): Ceres Seq. ID no. 14308987
atttcaaatttcatacacataaactaaagtctcatcctcagaatgacaggcagagaaattctccataagatgaagctgaaggctggattctgcggatctgaaacgggcagaggtaaaagcaggacgtggaagaacatctcccacggttttcactttgtcaagggcaaatcaaaccatccaatggaggactacgttgtgtctgagttcaaaaaagtggacaatcacgatttgggtttgtttgccatctttgacggtcacttgggacatgacgtggccaagtacttgcagaccaatctttttgacaacatactcaaagagaaggattttcggactgatatggacaaggctataaggaatgcatacatatcaacagatgcttttatattagagcagtcacttaaacttggcaaaggcggatcaactgctgtaactggaattctgattgatgggcaaaagctagtggttgctaacgttggagactcacgggcggtgatgtcaaagaatggtgttgcgtctcagctctcggttgatcacgaaccaagcaaggagcaaaaggaaatagagagccgtggcggctttgtgtccaatattccaggggacgttccaagagttgatggacaactagcggttgcgagggcgttcggagataagagcttaaagatacatctgagctcagaaccagacataacacaccagacaatcgatgatgagaccgagttcattgttttcgcgagtgatgggatttggaaggtgatgtcaaaccaagaagctgtggacgcgatcagaagcataaaagatccacatgaggcagccaaggagttgatagaagaagcaatctctaggaaaagcaaagatgacatctcctgtatcgttgtaagattctagtataaatttttcaccaatcaagtgtctaagagagataaaaagacatgtaaaagctcaagctatatgtgctatatatgtgaccaatataaagtctggtctcttgtaaaaccattgatgataaaatttcgccaaaatgtaaaagaaatttcgtgcaaatggttgttggtccattagtct

SEQ ID NO: 20478 - protein, 280 aa, Zea mays subsp. mays
  peptide (1)..(280): Ceres Seq. ID no. 14308988
  misc_feature (32)..(273): Pfam Name: Pfam Description:  Protein phosphatase 2C
  misc_feature (1)..(280): NCBI GI NO: 18417190 NR Description: protein phosphatase 2C (PP2C), putative
  misc_feature (1)..(280): NCBI GI NO: 18399423 NR Description: protein phosphatase 2C (PP2C), putative
  misc_feature (1)..(280): NCBI GI NO: 25411985 NR Description: probable protein phosphatase 2C
  misc_feature (29)..(280): NCBI GI NO: 7488280 NR Description: protein phosphatase 2C homolog F20O9
  misc_feature (1)..(279): NCBI GI NO: 4336436 NR Description: protein phosphatase type 2C [Lotus japonicus]
  misc_feature (1)..(280): NCBI GI NO: 15232538 NR Description: protein phosphatase 2C (PP2C), putative
  misc_feature (1)..(280): NCBI GI NO: 21539551 NR Description: putative protein phosphatase type 2C
  misc_feature (1)..(280): NCBI GI NO: 23307574 NR Description: putative protein phosphatase 2C homolog
  misc_feature (19)..(280): NCBI GI NO: 32488822 NR Description: OSJNBa0085I10.2
  misc_feature (15)..(280): NCBI GI NO: 18395099 NR Description: protein phosphatase 2C (PP2C), putative
MTGREILHKMKLKAGFCGSETGRGKSRTWKNISHGFHFVKGKSNHPMEDYVVSEFKKVDNHDLGLFAIFDGHLGHDVAKYLQTNLFDNILKEKDFRTDMDKAIRNAYISTDAFILEQSLKLGKGGSTAVTGILIDGQKLVVANVGDSRAVMSKNGVASQLSVDHEPSKEQKEIESRGGFVSNIPGDVPRVDGQLAVARAFGDKSLKIHLSSEPDITHQTIDDETEFIVFASDGIWKVMSNQEAVDAIRSIKDPHEAAKELIEEAISRKSKDDISCIVVRF

SEQ ID NO: 20479 - protein, 271 aa, Zea mays subsp. mays
  peptide (1)..(271): Ceres Seq. ID no. 14308989
  misc_feature (23)..(264): Pfam Name: Pfam Description:  Protein phosphatase 2C
  misc_feature (1)..(271): NCBI GI NO: 18417190 NR Description: protein phosphatase 2C (PP2C), putative
  misc_feature (1)..(271): NCBI GI NO: 18399423 NR Description: protein phosphatase 2C (PP2C), putative
  misc_feature (1)..(271): NCBI GI NO: 25411985 NR Description: probable protein phosphatase 2C
  misc_feature (20)..(271): NCBI GI NO: 7488280 NR Description: protein phosphatase 2C homolog F20O9
  misc_feature (1)..(270): NCBI GI NO: 4336436 NR Description: protein phosphatase type 2C [Lotus japonicus]
  misc_feature (1)..(271): NCBI GI NO: 15232538 NR Description: protein phosphatase 2C (PP2C), putative
  misc_feature (1)..(271): NCBI GI NO: 21539551 NR Description: putative protein phosphatase type 2C
  misc_feature (1)..(271): NCBI GI NO: 23307574 NR Description: putative protein phosphatase 2C homolog
  misc_feature (10)..(271): NCBI GI NO: 32488822 NR Description: OSJNBa0085I10.2
  misc_feature (6)..(271): NCBI GI NO: 18395099 NR Description: protein phosphatase 2C (PP2C), putative
MKLKAGFCGSETGRGKSRTWKNISHGFHFVKGKSNHPMEDYVVSEFKKVDNHDLGLFAIFDGHLGHDVAKYLQTNLFDNILKEKDFRTDMDKAIRNAYISTDAFILEQSLKLGKGGSTAVTGILIDGQKLVVANVGDSRAVMSKNGVASQLSVDHEPSKEQKEIESRGGFVSNIPGDVPRVDGQLAVARAFGDKSLKIHLSSEPDITHQTIDDETEFIVFASDGIWKVMSNQEAVDAIRSIKDPHEAAKELIEEAISRKSKDDISCIVVRF

SEQ ID NO: 20480 - protein, 234 aa, Zea mays subsp. mays
  peptide (1)..(234): Ceres Seq. ID no. 14308990
  misc_feature (1)..(227): Pfam Name: Pfam Description:  Protein phosphatase 2C
  misc_feature (1)..(234): NCBI GI NO: 18417190 NR Description: protein phosphatase 2C (PP2C), putative
  misc_feature (1)..(234): NCBI GI NO: 18399423 NR Description: protein phosphatase 2C (PP2C), putative
  misc_feature (1)..(234): NCBI GI NO: 25411985 NR Description: probable protein phosphatase 2C
  misc_feature (1)..(234): NCBI GI NO: 7488280 NR Description: protein phosphatase 2C homolog F20O9
  misc_feature (1)..(233): NCBI GI NO: 4336436 NR Description: protein phosphatase type 2C [Lotus japonicus]
  misc_feature (1)..(234): NCBI GI NO: 15232538 NR Description: protein phosphatase 2C (PP2C), putative
  misc_feature (1)..(234): NCBI GI NO: 21539551 NR Description: putative protein phosphatase type 2C
  misc_feature (1)..(234): NCBI GI NO: 23307574 NR Description: putative protein phosphatase 2C homolog
  misc_feature (1)..(234): NCBI GI NO: 32488822 NR Description: OSJNBa0085I10.2
  misc_feature (1)..(234): NCBI GI NO: 18395099 NR Description: protein phosphatase 2C (PP2C), putative
MEDYVVSEFKKVDNHDLGLFAIFDGHLGHDVAKYLQTNLFDNILKEKDFRTDMDKAIRNAYISTDAFILEQSLKLGKGGSTAVTGILIDGQKLVVANVGDSRAVMSKNGVASQLSVDHEPSKEQKEIESRGGFVSNIPGDVPRVDGQLAVARAFGDKSLKIHLSSEPDITHQTIDDETEFIVFASDGIWKVMSNQEAVDAIRSIKDPHEAAKELIEEAISRKSKDDISCIVVRF

SEQ ID NO: 20481 - DNA, 1093 bp, Zea mays subsp. mays
  misc_feature (1)..(1093): Ceres Seq. ID no. 14308980
  misc_feature (1074)..(1074): n is a, c, t, g, unknown, or other
  misc_feature (1054)..(1054): n is a, c, t, g, unknown, or other
atctgtcctctcgaggttagggttctttagagagagagtttatatcttaacgaacgatccttcggatcttgttgtggaagcttgaatactaacatgttttaaaaactcttcgtttttctttcttttctaaacaattggaaaattatcaacttatagagctttcgatcgtattatttggtagatcgtcgccattaaaacgaatataatctgttttccccttgttgatattgttcaatatcttcataaactactctcttttcttgaaactatattcttattaaagaatttttttcaaaatatttgaaataatggaaacaatatcagtgcaacgttcgtcatcgggtaagcaggtttctggtatgaggccattcaagaaccctagaagaaggagttctcgtggttctctttcgagatccggaggaagcttggcactccctaataatccggcgtcttcttggggatcttcgccggcgtatcctacgccgcctgctaactactcgcagcctcctcttctgcctcttccacgtgtcaacagctcaactcttcctctgcaacgcgtcaagagttctcacccacgtgtgaacagctctactctttattgcggtcagacaagagcaacgtctgaaacacagcagaagaaagtagactacgttcaatctgtacctaggttgactcgaaccggttcggttcctgtctggtctaacaatccgtgtgattaccctaaaggatttgatggttatcctggtccagcaatcttgctactctctcctccgcctagtagtttgcccatgcctaagttttcgatcaaaccgaagcttcgttgcaacgcagaagctgcaggcaaaactgagttagccaccgataacatccggcgagttttacagctccggtgaaaggtggtgctactgctacgtaacgatattgattttactaaataaaataagcccatgggcttttatgggcttgtgtctatcttatttttcaagtgatagagctctctccttttgtgtgatttgctaagccgtaactttttaaaaggctttgttgggcacanaagtgtagccttaccggaantatattttcttttatactg

SEQ ID NO: 20482 - protein, 194 aa, Zea mays subsp. mays
  peptide (1)..(194): Ceres Seq. ID no. 14308981
  misc_feature (1)..(194): NCBI GI NO: 15223762 NR Description: expressed protein [Arabidopsis thaliana]
METISVQRSSSGKQVSGMRPFKNPRRRSSRGSLSRSGGSLALPNNPASSWGSSPAYPTPPANYSQPPLLPLPRVNSSTLPLQRVKSSHPRVNSSTLYCGQTRATSETQQKKVDYVQSVPRLTRTGSVPVWSNNPCDYPKGFDGYPGPAILLLSPPPSSLPMPKFSIKPKLRCNAEAAGKTELATDNIRRVLQLR

SEQ ID NO: 20483 - protein, 177 aa, Zea mays subsp. mays
  peptide (1)..(177): Ceres Seq. ID no. 14308982
  misc_feature (1)..(177): NCBI GI NO: 15223762 NR Description: expressed protein [Arabidopsis thaliana]
MRPFKNPRRRSSRGSLSRSGGSLALPNNPASSWGSSPAYPTPPANYSQPPLLPLPRVNSSTLPLQRVKSSHPRVNSSTLYCGQTRATSETQQKKVDYVQSVPRLTRTGSVPVWSNNPCDYPKGFDGYPGPAILLLSPPPSSLPMPKFSIKPKLRCNAEAAGKTELATDNIRRVLQLR

SEQ ID NO: 20484 - DNA, 1028 bp, Zea mays subsp. mays
  misc_feature (1)..(1028): Ceres Seq. ID no. 14308976
aaggatacatttagaaacagacaaccgctgataaacatgaggacggaggagaaagaagaaggagaagaagaagaagaagaacaacaacaatggccatcatcaagatcagctcacgaggttttactaattgttcttccatatctccactcactcttcgagcttctctccatgaccggcgtttcacgctccttaagagacgcgatcagagacgaaacagctttatggacaaagatcgttgttgaaccacccctgcgttctcgtctaaccgatgatattctacgggagatcacttccaaatccgccggaaaattaaacactctgattctccgacagtgtcttaggatcaccgacaagggacttcgacgtgtggtggacgcaaatcctctgataagaaagataattgtgcccggatgcactgaactgactccagaaggaatcattggatgcgttgaaagcttagcaaccgtggagacacttcacatcaacggcgtacatcgcttcactaaagaccatctctcagcactctccacttaccttcctcacgagggcgccatagatgtcgaggtctgtcccaaatgtgacctagtcaagatgattccctcatgctcaagagcgtcatgtaaccgtgggagaaggcaagaacgaaagtgcaggggatgctggttctgcgtccctagatgcacggagtgtgcagtgtgcctcggatcagacactgagattcaagaagcagcctgcggtggcgacagtctgtgtctcgaatgttggctcgtgcttccgaagtgcaggttctgcaataaaccttattgctcaagtcacagcagtctccgacatgatattgcaaccaatgatccttcgtctccgcccatgtttgaatgccaagcttgtcactacagggcaggtacaaacccatatgacgctttcgactatcaaatctaaaaaaaacttgtttttaaagccatacttgttactacgtacaatctttgttcatgttttgtatgaaaacattggagtatgaaatattatgagac

SEQ ID NO: 20485 - protein, 311 aa, Zea mays subsp. mays
  peptide (1)..(311): Ceres Seq. ID no. 14308977
  misc_feature (22)..(311): NCBI GI NO: 21536590 NR Description: unknown [Arabidopsis thaliana]
  misc_feature (22)..(311): NCBI GI NO: 18379265 NR Description: expressed protein [Arabidopsis thaliana]
  misc_feature (86)..(295): NCBI GI NO: 38175497 NR Description: F-box protein family-like protein
  misc_feature (38)..(177): NCBI GI NO: 38175497 NR Description: F-box protein family-like protein
  misc_feature (22)..(273): NCBI GI NO: 18405307 NR Description: expressed protein [Arabidopsis thaliana]
  misc_feature (53)..(266): NCBI GI NO: 18404757 NR Description: F-box protein family [Arabidopsis thaliana]
  misc_feature (53)..(266): NCBI GI NO: 22655121 NR Description: expressed protein [Arabidopsis thaliana]
  misc_feature (38)..(155): NCBI GI NO: 38345348 NR Description: OSJNBa0081L15.21
  misc_feature (87)..(260): NCBI GI NO: 18404757 NR Description: F-box protein family [Arabidopsis thaliana]
  misc_feature (87)..(260): NCBI GI NO: 22655121 NR Description: expressed protein [Arabidopsis thaliana]
KDTFRNRQPLINMRTEEKEEGEEEEEEQQQWPSSRSAHEVLLIVLPYLHSLFELLSMTGVSRSLRDAIRDETALWTKIVVEPPLRSRLTDDILREITSKSAGKLNTLILRQCLRITDKGLRRVVDANPLIRKIIVPGCTELTPEGIIGCVESLATVETLHINGVHRFTKDHLSALSTYLPHEGAIDVEVCPKCDLVKMIPSCSRASCNRGRRQERKCRGCWFCVPRCTECAVCLGSDTEIQEAACGGDSLCLECWLVLPKCRFCNKPYCSSHSSLRHDIATNDPSSPPMFECQACHYRAGTNPYDAFDYQI

SEQ ID NO: 20486 - protein, 299 aa, Zea mays subsp. mays
  peptide (1)..(299): Ceres Seq. ID no. 14308978
  misc_feature (10)..(299): NCBI GI NO: 21536590 NR Description: unknown [Arabidopsis thaliana]
  misc_feature (10)..(299): NCBI GI NO: 18379265 NR Description: expressed protein [Arabidopsis thaliana]
  misc_feature (74)..(283): NCBI GI NO: 38175497 NR Description: F-box protein family-like protein
  misc_feature (26)..(165): NCBI GI NO: 38175497 NR Description: F-box protein family-like protein
  misc_feature (10)..(261): NCBI GI NO: 18405307 NR Description: expressed protein [Arabidopsis thaliana]
  misc_feature (41)..(254): NCBI GI NO: 18404757 NR Description: F-box protein family [Arabidopsis thaliana]
  misc_feature (41)..(254): NCBI GI NO: 22655121 NR Description: expressed protein [Arabidopsis thaliana]
  misc_feature (26)..(143): NCBI GI NO: 38345348 NR Description: OSJNBa0081L15.21
  misc_feature (75)..(248): NCBI GI NO: 18404757 NR Description: F-box protein family [Arabidopsis thaliana]
  misc_feature (75)..(248): NCBI GI NO: 22655121 NR Description: expressed protein [Arabidopsis thaliana]
MRTEEKEEGEEEEEEQQQWPSSRSAHEVLLIVLPYLHSLFELLSMTGVSRSLRDAIRDETALWTKIVVEPPLRSRLTDDILREITSKSAGKLNTLILRQCLRITDKGLRRVVDANPLIRKIIVPGCTELTPEGIIGCVESLATVETLHINGVHRFTKDHLSALSTYLPHEGAIDVEVCPKCDLVKMIPSCSRASCNRGRRQERKCRGCWFCVPRCTECAVCLGSDTEIQEAACGGDSLCLECWLVLPKCRFCNKPYCSSHSSLRHDIATNDPSSPPMFECQACHYRAGTNPYDAFDYQI

SEQ ID NO: 20487 - protein, 255 aa, Zea mays subsp. mays
  peptide (1)..(255): Ceres Seq. ID no. 14308979
  misc_feature (1)..(255): NCBI GI NO: 21536590 NR Description: unknown [Arabidopsis thaliana]
  misc_feature (1)..(255): NCBI GI NO: 18379265 NR Description: expressed protein [Arabidopsis thaliana]
  misc_feature (30)..(239): NCBI GI NO: 38175497 NR Description: F-box protein family-like protein
  misc_feature (1)..(121): NCBI GI NO: 38175497 NR Description: F-box protein family-like protein
  misc_feature (1)..(217): NCBI GI NO: 18405307 NR Description: expressed protein [Arabidopsis thaliana]
  misc_feature (1)..(210): NCBI GI NO: 18404757 NR Description: F-box protein family [Arabidopsis thaliana]
  misc_feature (1)..(210): NCBI GI NO: 22655121 NR Description: expressed protein [Arabidopsis thaliana]
  misc_feature (1)..(99): NCBI GI NO: 38345348 NR Description: OSJNBa0081L15.21
  misc_feature (31)..(204): NCBI GI NO: 18404757 NR Description: F-box protein family [Arabidopsis thaliana]
  misc_feature (31)..(204): NCBI GI NO: 22655121 NR Description: expressed protein [Arabidopsis thaliana]
MTGVSRSLRDAIRDETALWTKIVVEPPLRSRLTDDILREITSKSAGKLNTLILRQCLRITDKGLRRVVDANPLIRKIIVPGCTELTPEGIIGCVESLATVETLHINGVHRFTKDHLSALSTYLPHEGAIDVEVCPKCDLVKMIPSCSRASCNRGRRQERKCRGCWFCVPRCTECAVCLGSDTEIQEAACGGDSLCLECWLVLPKCRFCNKPYCSSHSSLRHDIATNDPSSPPMFECQACHYRAGTNPYDAFDYQI

SEQ ID NO: 20488 - DNA, 821 bp, Zea mays subsp. mays
  misc_feature (1)..(821): Ceres Seq. ID no. 15179163
atctctgctcgggaactgaataagcttcgccaatggcttcttcgtctttgtcactctcgtggagctcctcgctttgttcgtctcacaccttcaatgtcgtcggaaatgaaaccctaaaagtatcccagcgaaggtctactttggaggttgttgcccagaagaaagccaagaaactccgcaaggtaatcttgaaagaggatgtgttggacttgggcaagcaagggcaattactggacgttaaagccggtttcttcagaaacttcctcttgcccactggaaaggctcagctcatgactccgcttctgctcaaggaaatgaagatggcaaacgaaaggatagaggcagaaaagcaaagggtgaaagaagaggcgctacaattggctacggtattcgaaaccgttggggctttcaaggttaaacgcaagggcggtaaaggcaaacaaatatttggatctgtcacagcacaagaccttgttgacatcatcaaggcgcagctccaaagggatatagacaagcgccttgtctctcttccggagatccgtgaaaccggagaatacatagccgaactcaaacttcaccctgatgtcactgctcgcgttaggctcaacgttttcgccaactaacaacctttccaatagtcaaagactgctactgctgcatccccaaggttgcaggaacatagagaaaggggggaagagattggccaggatcaaagtttgtgaagtttttcttgttaaatcttttgctgcatttgtcttttttgctatttaaaaaaaaatattttggaatcttgaaaatgttataaatattttcttgaagct

SEQ ID NO: 20489 - protein, 196 aa, Zea mays subsp. mays
  peptide (1)..(196): Ceres Seq. ID no. 15179164
  misc_feature (110)..(196): Pfam Name: Pfam Description:  Ribosomal protein L9, C-terminal domain
  misc_feature (1)..(196): NCBI GI NO: 15230544 NR Description: 50S ribosomal protein L9, chloroplast precursor
  misc_feature (1)..(196): NCBI GI NO: 1173069 NR Description: 50S RIBOSOMAL PROTEIN L9, CHLOROPLAST PRECURSOR
  misc_feature (1)..(196): NCBI GI NO: 71256 NR Description: ribosomal protein L9 precursor
  misc_feature (31)..(194): NCBI GI NO: 22204126 NR Description: putative plastid ribosomal protein CL9
  misc_feature (45)..(193): NCBI GI NO: 33862229 NR Description: 50S ribosomal protein L9
  misc_feature (45)..(196): NCBI GI NO: 33241283 NR Description: Ribosomal protein L9
  misc_feature (44)..(193): NCBI GI NO: 32307494 NR Description: ribosomal protein rpL9 [Bigelowiella natans]
  misc_feature (50)..(196): NCBI GI NO: 23014152 NR Description: hypothetical protein
  misc_feature (50)..(196): NCBI GI NO: 16125913 NR Description: ribosomal protein L9 [Caulobacter crescentus CB15]
  misc_feature (50)..(193): NCBI GI NO: 6226012 NR Description: 50S ribosomal protein L9
MASSSLSLSWSSSLCSSHTFNVVGNETLKVSQRRSTLEVVAQKKAKKLRKVILKEDVLDLGKQGQLLDVKAGFFRNFLLPTGKAQLMTPLLLKEMKMANERIEAEKQRVKEEALQLATVFETVGAFKVKRKGGKGKQIFGSVTAQDLVDIIKAQLQRDIDKRLVSLPEIRETGEYIAELKLHPDVTARVRLNVFAN

SEQ ID NO: 20490 - protein, 110 aa, Zea mays subsp. mays
  peptide (1)..(110): Ceres Seq. ID no. 15179165
  misc_feature (24)..(110): Pfam Name: Pfam Description:  Ribosomal protein L9, C-terminal domain
  misc_feature (1)..(110): NCBI GI NO: 15230544 NR Description: 50S ribosomal protein L9, chloroplast precursor
  misc_feature (1)..(110): NCBI GI NO: 1173069 NR Description: 50S RIBOSOMAL PROTEIN L9, CHLOROPLAST PRECURSOR
  misc_feature (1)..(110): NCBI GI NO: 71256 NR Description: ribosomal protein L9 precursor
  misc_feature (1)..(108): NCBI GI NO: 22204126 NR Description: putative plastid ribosomal protein CL9
  misc_feature (1)..(107): NCBI GI NO: 33862229 NR Description: 50S ribosomal protein L9
  misc_feature (1)..(110): NCBI GI NO: 33241283 NR Description: Ribosomal protein L9
  misc_feature (1)..(107): NCBI GI NO: 32307494 NR Description: ribosomal protein rpL9 [Bigelowiella natans]
  misc_feature (1)..(110): NCBI GI NO: 23014152 NR Description: hypothetical protein
  misc_feature (1)..(110): NCBI GI NO: 16125913 NR Description: ribosomal protein L9 [Caulobacter crescentus CB15]
  misc_feature (1)..(107): NCBI GI NO: 6226012 NR Description: 50S ribosomal protein L9
MTPLLLKEMKMANERIEAEKQRVKEEALQLATVFETVGAFKVKRKGGKGKQIFGSVTAQDLVDIIKAQLQRDIDKRLVSLPEIRETGEYIAELKLHPDVTARVRLNVFAN

SEQ ID NO: 20491 - protein, 102 aa, Zea mays subsp. mays
  peptide (1)..(102): Ceres Seq. ID no. 15179166
  misc_feature (16)..(102): Pfam Name: Pfam Description:  Ribosomal protein L9, C-terminal domain
  misc_feature (1)..(102): NCBI GI NO: 15230544 NR Description: 50S ribosomal protein L9, chloroplast precursor
  misc_feature (1)..(102): NCBI GI NO: 1173069 NR Description: 50S RIBOSOMAL PROTEIN L9, CHLOROPLAST PRECURSOR
  misc_feature (1)..(102): NCBI GI NO: 71256 NR Description: ribosomal protein L9 precursor
  misc_feature (1)..(100): NCBI GI NO: 22204126 NR Description: putative plastid ribosomal protein CL9
  misc_feature (1)..(99): NCBI GI NO: 33862229 NR Description: 50S ribosomal protein L9
  misc_feature (1)..(102): NCBI GI NO: 33241283 NR Description: Ribosomal protein L9
  misc_feature (1)..(99): NCBI GI NO: 32307494 NR Description: ribosomal protein rpL9 [Bigelowiella natans]
  misc_feature (1)..(102): NCBI GI NO: 23014152 NR Description: hypothetical protein
  misc_feature (1)..(102): NCBI GI NO: 16125913 NR Description: ribosomal protein L9 [Caulobacter crescentus CB15]
  misc_feature (1)..(99): NCBI GI NO: 6226012 NR Description: 50S ribosomal protein L9
MKMANERIEAEKQRVKEEALQLATVFETVGAFKVKRKGGKGKQIFGSVTAQDLVDIIKAQLQRDIDKRLVSLPEIRETGEYIAELKLHPDVTARVRLNVFAN

SEQ ID NO: 20492 - DNA, 675 bp, Zea mays subsp. mays
  misc_feature (1)..(675): Ceres Seq. ID no. 15179051
atcaatacaagtgtgtactttaagtgttctctctctacgtacattttgtgaccaaacaagtaatcagtcaaaagatggaaggcaaaactgtgattttaggtgtgatcataatgagtcttgtcatggcgcagaatcaagtcgaagcaaagatttgttgccccagaaccattgacagaaacatatataatgcatgccgtcttactggagcctctatgacaaattgtgcaaacctcagtggatgcaaaatcgtttctgggacgacatgtcctccgggatatacacatgacattctccaaaactgtggtgatgctgtcaatgaatactgcaagttggggtgtgcatcctctgtgtgcggtgccttaaccactctcaagaactccgatgcaagtgaaattgtgaaaggagcggtttcacaatgcaccaacgcatgttctaatttctgcaccaagggctcagctaaagcagttgaaactgcctaacaagcatatccgctatctatgtattaattgtatgtgttgttgttttacatgttttcaataattgtcgtgtatgtgacaaattgctagactcttttgctatttccaagttatctatgtgacgtagaaggtcatcgatccctagattgtttatcccttgtacttgctataactaaataaagaagaaggtttcctgctc

SEQ ID NO: 20493 - protein, 134 aa, Zea mays subsp. mays
  peptide (1)..(134): Ceres Seq. ID no. 15179052
  misc_feature (25)..(70): Pfam Name: Pfam Description:  Plant thionin
  misc_feature (1)..(134): NCBI GI NO: 6650328 NR Description: thionin [Brassica rapa subsp. pekinensis]
  misc_feature (1)..(134): NCBI GI NO: 1076466 NR Description: thionin variant Thi2Ca2 - Abyssinian crambe
  misc_feature (1)..(134): NCBI GI NO: 1076465 NR Description: thionin variant Thi2Ca12 - Abyssinian crambe
  misc_feature (1)..(134): NCBI GI NO: 1076463 NR Description: thionin variant Thi2Ca10 - Abyssinian crambe
  misc_feature (1)..(134): NCBI GI NO: 1076464 NR Description: thionin variant Thi2Ca11 - Abyssinian crambe
  misc_feature (6)..(134): NCBI GI NO: 802169 NR Description: crambin precursor=thionin variant Thi2Ca11
  misc_feature (1)..(134): NCBI GI NO: 1076472 NR Description: thionin variant Thi2Ca9 - Abyssinian crambe
  misc_feature (1)..(134): NCBI GI NO: 1076467 NR Description: thionin variant Thi2Ca3 - Abyssinian crambe
  misc_feature (1)..(134): NCBI GI NO: 1076462 NR Description: thionin variant Thi2Ca1 - Abyssinian crambe
  misc_feature (1)..(134): NCBI GI NO: 1181533 NR Description: thionin
MEGKTVILGVIIMSLVMAQNQVEAKICCPRTIDRNIYNACRLTGASMTNCANLSGCKIVSGTTCPPGYTHDILQNCGDAVNEYCKLGCASSVCGALTTLKNSDASEIVKGAVSQCTNACSNFCTKGSAKAVETA

SEQ ID NO: 20494 - protein, 122 aa, Zea mays subsp. mays
  peptide (1)..(122): Ceres Seq. ID no. 15179053
  misc_feature (13)..(58): Pfam Name: Pfam Description:  Plant thionin
  misc_feature (1)..(122): NCBI GI NO: 6650328 NR Description: thionin [Brassica rapa subsp. pekinensis]
  misc_feature (1)..(122): NCBI GI NO: 1076466 NR Description: thionin variant Thi2Ca2 - Abyssinian crambe
  misc_feature (1)..(122): NCBI GI NO: 1076465 NR Description: thionin variant Thi2Ca12 - Abyssinian crambe
  misc_feature (1)..(122): NCBI GI NO: 1076463 NR Description: thionin variant Thi2Ca10 - Abyssinian crambe
  misc_feature (1)..(122): NCBI GI NO: 1076464 NR Description: thionin variant Thi2Ca11 - Abyssinian crambe
  misc_feature (1)..(122): NCBI GI NO: 802169 NR Description: crambin precursor=thionin variant Thi2Ca11
  misc_feature (1)..(122): NCBI GI NO: 1076472 NR Description: thionin variant Thi2Ca9 - Abyssinian crambe
  misc_feature (1)..(122): NCBI GI NO: 1076467 NR Description: thionin variant Thi2Ca3 - Abyssinian crambe
  misc_feature (1)..(122): NCBI GI NO: 1076462 NR Description: thionin variant Thi2Ca1 - Abyssinian crambe
  misc_feature (1)..(122): NCBI GI NO: 1181533 NR Description: thionin
MSLVMAQNQVEAKICCPRTIDRNIYNACRLTGASMTNCANLSGCKIVSGTTCPPGYTHDILQNCGDAVNEYCKLGCASSVCGALTTLKNSDASEIVKGAVSQCTNACSNFCTKGSAKAVETA

SEQ ID NO: 20495 - protein, 118 aa, Zea mays subsp. mays
  peptide (1)..(118): Ceres Seq. ID no. 15179054
  misc_feature (9)..(54): Pfam Name: Pfam Description:  Plant thionin
  misc_feature (1)..(118): NCBI GI NO: 6650328 NR Description: thionin [Brassica rapa subsp. pekinensis]
  misc_feature (1)..(118): NCBI GI NO: 1076466 NR Description: thionin variant Thi2Ca2 - Abyssinian crambe
  misc_feature (1)..(118): NCBI GI NO: 1076465 NR Description: thionin variant Thi2Ca12 - Abyssinian crambe
  misc_feature (1)..(118): NCBI GI NO: 1076463 NR Description: thionin variant Thi2Ca10 - Abyssinian crambe
  misc_feature (1)..(118): NCBI GI NO: 1076464 NR Description: thionin variant Thi2Ca11 - Abyssinian crambe
  misc_feature (1)..(118): NCBI GI NO: 802169 NR Description: crambin precursor=thionin variant Thi2Ca11
  misc_feature (1)..(118): NCBI GI NO: 1076472 NR Description: thionin variant Thi2Ca9 - Abyssinian crambe
  misc_feature (1)..(118): NCBI GI NO: 1076467 NR Description: thionin variant Thi2Ca3 - Abyssinian crambe
  misc_feature (1)..(118): NCBI GI NO: 1076462 NR Description: thionin variant Thi2Ca1 - Abyssinian crambe
  misc_feature (1)..(118): NCBI GI NO: 1181533 NR Description: thionin
MAQNQVEAKICCPRTIDRNIYNACRLTGASMTNCANLSGCKIVSGTTCPPGYTHDILQNCGDAVNEYCKLGCASSVCGALTTLKNSDASEIVKGAVSQCTNACSNFCTKGSAKAVETA

SEQ ID NO: 20496 - DNA, 949 bp, Zea mays subsp. mays
  misc_feature (1)..(949): Ceres Seq. ID no. 15179001
acttttttggccttatccaaaatctcttttgtgggtagaatcatctctgtcttaagccaatctctctctcattgtctctgtgtcgagagagagagaaatggcagcttcaacactaacacttccctgcttcaaactctacgatcaaccaagcctccttcttccccgcaacaaatcatctaaccaaacactccttaaattcaacttgtcgcctccaaaacctctcttgatctcctcacgtgccaacagttctccgcgattcagagccctcccggagaccatctccgtcaaacaggacgacacaactgctgatgacgacagtcctcctgcgaccatcaacactaagctctactttgggaaccttccttacaatgtcgacagtgcaactctcgctcagatcatccaagacttcgccaaccctgagctcgtcgaggttctctacaacagagacacaggacagagccgcgggttcgcctttgtgacgatgagcaacgtcgaagactgcaacgtcatcatcgagaacctcgatggaactgagtatcttggtaggacgttgaaggtgaactttgcagacaaaccgaagcctaacaaagaacctctgtatccagaaacagagtataagctgtttgttggtaacttgtcgtggaccgtcacttcggagtcgttagctggcgcgtttagagagtgtggagaagtggttggtgctagagttgtgtttgacggagacactgggaagtcaagaggttatggctttgtgtgttactcttccaaagctgaaatggaaaccgctcttgagtcgctggatgggcttgagctagagggtcgggcgattcgagtaaacttggctcaggggaagaagtactgatgtcatacaataacattttgagatttcatcgttagagattatgtttcaattaaactaaaataactctaaagatcgttgcatcttgcc

SEQ ID NO: 20497 - protein, 254 aa, Zea mays subsp. mays
  peptide (1)..(254): Ceres Seq. ID no. 15179002
  misc_feature (83)..(154): Pfam Name: a.k.a. RRM, RBD, or RNP domain Pfam Description: RNA recognition motif.
  misc_feature (1)..(254): NCBI GI NO: 15218972 NR Description: 29 kDa ribonucleoprotein, chloroplast
  misc_feature (66)..(253): NCBI GI NO: 1076509 NR Description: RNA-binding protein RNP1 precursor - kidney bean
  misc_feature (66)..(253): NCBI GI NO: 7446361 NR Description: RNA-binding protein - fava bean (fragment)
  misc_feature (2)..(165): NCBI GI NO: 15228102 NR Description: 29 kDa ribonucleoprotein, chloroplast
  misc_feature (2)..(165): NCBI GI NO: 21617920 NR Description: putative RNA-binding protein
  misc_feature (174)..(252): NCBI GI NO: 15228102 NR Description: 29 kDa ribonucleoprotein, chloroplast
  misc_feature (174)..(252): NCBI GI NO: 21617920 NR Description: putative RNA-binding protein
  misc_feature (42)..(165): NCBI GI NO: 681904 NR Description: cp29 [Arabidopsis thaliana]
  misc_feature (42)..(165): NCBI GI NO: 30693824 NR Description: 29 kDa ribonucleoprotein, chloroplast
  misc_feature (174)..(252): NCBI GI NO: 681904 NR Description: cp29 [Arabidopsis thaliana]
MAASTLTLPCFKLYDQPSLLLPRNKSSNQTLLKFNLSPPKPLLISSRANSSPRFRALPETISVKQDDTTADDDSPPATINTKLYFGNLPYNVDSATLAQIIQDFANPELVEVLYNRDTGQSRGFAFVTMSNVEDCNVIIENLDGTEYLGRTLKVNFADKPKPNKEPLYPETEYKLFVGNLSWTVTSESLAGAFRECGEVVGARVVFDGDTGKSRGYGFVCYSSKAEMETALESLDGLELEGRAIRVNLAQGKKY

SEQ ID NO: 20498 - DNA, 823 bp, Zea mays subsp. mays
  misc_feature (1)..(823): Ceres Seq. ID no. 15174034
attttcgtctctgtaaacatctcttgctccatctcttctctgtgtctctctctgcgatgggttttccgacgggtataaaggagcttgagattccggattacatatttaagatactttacgtcatcggtttcttcagagacctggtcaacgctctctgtccttacatcggtttaccccattttttagacgatggcatttctcgacccggcccgatcgtacccgacaacacggccgcgactctcgcttacgaggtttccccggttgttcgtttctcggatcttcagaccgatctcgaagactgctgtacggtttgtctcttggactttgcatacgatgataaagttagacagcttccgaactgccgacacgtgttccacaatcgttgcatggaccgttggatcgtcgactgccgcaagatcacatgtccgatttgtcgggaccggttcttaccggccgaatattacgcgcggataaattccggttttggttcggtttggtacattgaagaatcggaaagtaatattctactataagaccctttgcatctgttctttagatattggtatcggatcagtattctgtgtttttcttttcggtaattctgtgttaagttttagttttgtagcaaaaagtgaaaagacatcattattaaagcccaatgcaacaaatccacaatcccatatgttttagggtttcattacaagtagctagcttgagtataaatagagtcttatgagaacttgtcttgtaacgaagagagttgcctctcaaacagctctttcacctttacattttatgatataaatcaaagtctatttgttct

SEQ ID NO: 20499 - protein, 176 aa, Zea mays subsp. mays
  peptide (1)..(176): Ceres Seq. ID no. 15174035
  misc_feature (101)..(144): Pfam Name: RING finger Pfam Description: Zinc finger, C3HC4 type
  misc_feature (19)..(172): NCBI GI NO: 11358777 NR Description: RING-H2 finger protein RHA1b
  misc_feature (19)..(172): NCBI GI NO: 15233350 NR Description: RING-H2 finger protein RHA1b
  misc_feature (19)..(172): NCBI GI NO: 11358776 NR Description: RING-H2 finger protein RHA1a
  misc_feature (19)..(172): NCBI GI NO: 15233352 NR Description: RING-H2 finger protein, putative
  misc_feature (19)..(176): NCBI GI NO: 15222553 NR Description: RING-H2 finger protein, putative
  misc_feature (19)..(158): NCBI GI NO: 15233117 NR Description: BRH1 RING finger protein [Arabidopsis thaliana]
  misc_feature (3)..(173): NCBI GI NO: 15238072 NR Description: RING-H2 zinc finger protein, putative
  misc_feature (3)..(173): NCBI GI NO: 21554155 NR Description: RING zinc finger protein-like
  misc_feature (78)..(152): NCBI GI NO: 32488512 NR Description: OSJNBa0011J08.19
  misc_feature (83)..(157): NCBI GI NO: 18411282 NR Description: zinc finger
FRLCKHLLLHLFSVSLSAMGFPTGIKELEIPDYIFKILYVIGFFRDLVNALCPYIGLPHFLDDGISRPGPIVPDNTAATLAYEVSPVVRFSDLQTDLEDCCTVCLLDFAYDDKVRQLPNCRHVFHNRCMDRWIVDCRKITCPICRDRFLPAEYYARINSGFGSVWYIEESESNILL

SEQ ID NO: 20500 - protein, 158 aa, Zea mays subsp. mays
  peptide (1)..(158): Ceres Seq. ID no. 15174036
  misc_feature (83)..(126): Pfam Name: RING finger Pfam Description: Zinc finger, C3HC4 type
  misc_feature (1)..(154): NCBI GI NO: 11358777 NR Description: RING-H2 finger protein RHA1b
  misc_feature (1)..(154): NCBI GI NO: 15233350 NR Description: RING-H2 finger protein RHA1b
  misc_feature (1)..(154): NCBI GI NO: 11358776 NR Description: RING-H2 finger protein RHA1a
  misc_feature (1)..(154): NCBI GI NO: 15233352 NR Description: RING-H2 finger protein, putative
  misc_feature (1)..(158): NCBI GI NO: 15222553 NR Description: RING-H2 finger protein, putative
  misc_feature (1)..(140): NCBI GI NO: 15233117 NR Description: BRH1 RING finger protein [Arabidopsis thaliana]
  misc_feature (1)..(155): NCBI GI NO: 15238072 NR Description: RING-H2 zinc finger protein, putative
  misc_feature (1)..(155): NCBI GI NO: 21554155 NR Description: RING zinc finger protein-like
  misc_feature (60)..(134): NCBI GI NO: 32488512 NR Description: OSJNBa0011J08.19
  misc_feature (65)..(139): NCBI GI NO: 18411282 NR Description: zinc finger
MGFPTGIKELEIPDYIFKILYVIGFFRDLVNALCPYIGLPHFLDDGISRPGPIVPDNTAATLAYEVSPVVRFSDLQTDLEDCCTVCLLDFAYDDKVRQLPNCRHVFHNRCMDRWIVDCRKITCPICRDRFLPAEYYARINSGFGSVWYIEESESNILL

SEQ ID NO: 20501 - protein, 94 aa, Zea mays subsp. mays
  peptide (1)..(94): Ceres Seq. ID no. 15174037
MAFLDPARSYPTTRPRLSLTRFPRLFVSRIFRPISKTAVRFVSWTLHTMIKLDSFRTADTCSTIVAWTVGSSTAARSHVRFVGTGSYRPNITRG

SEQ ID NO: 20502 - DNA, 680 bp, Zea mays subsp. mays
  misc_feature (1)..(680): Ceres Seq. ID no. 15179982
aacaagtctctttctctctctctaacctttacttttctccgtctgttagaaaaaaaaatgtctgaagttgagtaccggtgtttcgtcggcggcctagcatgggccaccggggatgctgagctagagaggacgttctcacagttcggcgaagttatcgattcaaagatcattaacgatcgtgagactgggagatcgaggggattcggattcgtgaccttcaaggatgagaagtccatgaaggatgccatcgatgagatgaacgggaaggagctcgacggtcgtaccatcaccgtcaacgaggctcagtccagaggaggcggcggtggaggaggccgtggtggaggtggatacggtggccgtggaggtggtggatacggtggaggcggcggtggatacggtgacagacgtggaggcggcggttacggatctggaggtggaggatacggtggtggtggtggcagacgtgatggaggtggttacggaggtggtgacggtggctacggaggaggaagtggaggcggtggatggtaatcgaagatgaagtgctgctctgttttcggtttagacttgcttccgtatgaatgtttctccggtttggtttggttctggatttcttgtttacttttttgttgtaacggatcgttaaagtcttgcttgcctgaaacgaaatgttaaatcgc

SEQ ID NO: 20503 - protein, 176 aa, Zea mays subsp. mays
  peptide (1)..(176): Ceres Seq. ID no. 15179983
  misc_feature (27)..(98): Pfam Name: a.k.a. RRM, RBD, or RNP domain Pfam Description: RNA recognition motif.
  misc_feature (20)..(176): NCBI GI NO: 544416 NR Description: Glycine-rich RNA-binding protein 10
  misc_feature (20)..(176): NCBI GI NO: 15235002 NR Description: glycine-rich RNA-binding protein 8 (GRP8) (CCR1)
  misc_feature (22)..(176): NCBI GI NO: 1346181 NR Description: Glycine-rich RNA-binding protein GRP2A
  misc_feature (21)..(176): NCBI GI NO: 544423 NR Description: Glycine-rich RNA-binding protein 2
  misc_feature (22)..(176): NCBI GI NO: 1346180 NR Description: Glycine-rich RNA-binding protein GRP1A
  misc_feature (20)..(176): NCBI GI NO: 544426 NR Description: Glycine-rich RNA-binding protein
  misc_feature (22)..(176): NCBI GI NO: 21553354 NR Description: glycine-rich RNA binding protein 7
  misc_feature (21)..(176): NCBI GI NO: 10799202 NR Description: glycine-rich RNA-binding protein [Sorghum bicolor]
  misc_feature (22)..(175): NCBI GI NO: 15226605 NR Description: glycine-rich RNA-binding protein (AtGRP7)
  misc_feature (20)..(176): NCBI GI NO: 7439981 NR Description: glycine-rich RNA-binding protein GRP1 - wheat
NKSLSLSLTFTFLRLLEKKMSEVEYRCFVGGLAWATGDAELERTFSQFGEVIDSKIINDRETGRSRGFGFVTFKDEKSMKDAIDEMNGKELDGRTITVNEAQSRGGGGGGGRGGGGYGGRGGGGYGGGGGGYGDRRGGGGYGSGGGGYGGGGGRRDGGGYGGGDGGYGGGSGGGGW

SEQ ID NO: 20504 - protein, 157 aa, Zea mays subsp. mays
  peptide (1)..(157): Ceres Seq. ID no. 15179984
  misc_feature (8)..(79): Pfam Name: a.k.a. RRM, RBD, or RNP domain Pfam Description: RNA recognition motif.
  misc_feature (1)..(157): NCBI GI NO: 544416 NR Description: Glycine-rich RNA-binding protein 10
  misc_feature (1)..(157): NCBI GI NO: 15235002 NR Description: glycine-rich RNA-binding protein 8 (GRP8) (CCR1)
  misc_feature (3)..(157): NCBI GI NO: 1346181 NR Description: Glycine-rich RNA-binding protein GRP2A
  misc_feature (2)..(157): NCBI GI NO: 544423 NR Description: Glycine-rich RNA-binding protein 2
  misc_feature (3)..(157): NCBI GI NO: 1346180 NR Description: Glycine-rich RNA-binding protein GRP1A
  misc_feature (1)..(157): NCBI GI NO: 544426 NR Description: Glycine-rich RNA-binding protein
  misc_feature (3)..(157): NCBI GI NO: 21553354 NR Description: glycine-rich RNA binding protein 7
  misc_feature (2)..(157): NCBI GI NO: 10799202 NR Description: glycine-rich RNA-binding protein [Sorghum bicolor]
  misc_feature (3)..(156): NCBI GI NO: 15226605 NR Description: glycine-rich RNA-binding protein (AtGRP7)
  misc_feature (1)..(157): NCBI GI NO: 7439981 NR Description: glycine-rich RNA-binding protein GRP1 - wheat
MSEVEYRCFVGGLAWATGDAELERTFSQFGEVIDSKIINDRETGRSRGFGFVTFKDEKSMKDAIDEMNGKELDGRTITVNEAQSRGGGGGGGRGGGGYGGRGGGGYGGGGGGYGDRRGGGGYGSGGGGYGGGGGRRDGGGYGGGDGGYGGGSGGGGW

SEQ ID NO: 20505 - protein, 98 aa, Zea mays subsp. mays
  peptide (1)..(98): Ceres Seq. ID no. 15179985
  misc_feature (23)..(97): Pfam Name: LMP1 Pfam Description: Herpesvirus latent membrane protein 1
  misc_feature (1)..(98): NCBI GI NO: 544416 NR Description: Glycine-rich RNA-binding protein 10
  misc_feature (1)..(98): NCBI GI NO: 15235002 NR Description: glycine-rich RNA-binding protein 8 (GRP8) (CCR1)
  misc_feature (1)..(98): NCBI GI NO: 1346181 NR Description: Glycine-rich RNA-binding protein GRP2A
  misc_feature (1)..(98): NCBI GI NO: 544423 NR Description: Glycine-rich RNA-binding protein 2
  misc_feature (1)..(98): NCBI GI NO: 1346180 NR Description: Glycine-rich RNA-binding protein GRP1A
  misc_feature (1)..(98): NCBI GI NO: 544426 NR Description: Glycine-rich RNA-binding protein
  misc_feature (1)..(98): NCBI GI NO: 21553354 NR Description: glycine-rich RNA binding protein 7
  misc_feature (1)..(98): NCBI GI NO: 10799202 NR Description: glycine-rich RNA-binding protein [Sorghum bicolor]
  misc_feature (1)..(97): NCBI GI NO: 15226605 NR Description: glycine-rich RNA-binding protein (AtGRP7)
  misc_feature (1)..(98): NCBI GI NO: 7439981 NR Description: glycine-rich RNA-binding protein GRP1 - wheat
MKDAIDEMNGKELDGRTITVNEAQSRGGGGGGGRGGGGYGGRGGGGYGGGGGGYGDRRGGGGYGSGGGGYGGGGGRRDGGGYGGGDGGYGGGSGGGGW

SEQ ID NO: 20506 - DNA, 940 bp, Zea mays subsp. mays
  misc_feature (1)..(940): Ceres Seq. ID no. 15179365
aaaactcttctgtggaagagaagaatcgaatctgtattgatcatctagcccttttcaaagtcgctgactttatcgataaatttactcttgaaaatgagaaccccaagaaccctggaggtatggaagctaggcactgtcaactatttgaagtcccttaaacttcaagacaagttggtttctgagagaaaagctaatcgaatccccgatacactcctctcccttcagcatccaccaacttacacgttgggtaaacgtagaaccgatcacaacctactcatccctgaagctgaactcaagagcattggcgctgagcttcattatactcaaagaggaggagatatcactttccatggccctcaccaacccatcttataccctatcctttccttacgcagcataggttttggtgctaggagctatgtagaggcattggagcggtcgatgatcgaattttcttcgctttacggcgtgaaagctcgtgcgggaaacaaatgtgagactggggtttgggtcggggatagaaagattggtgctattggggttcgtatatcctctggaatcacttgccatggtctggccttcaacatagatcctgatatgaagtactttgagcacattgttccgtgtgggattgctgataaagaagttacatctctgagaagggagacagatgctcagcttccttccgaagaagtgattcatgagcagttggttacatgtttggccaaagtgttttcgtatgatgacgttgtggtgaaggaagatccttcagccattttaaacaccctggaggatgacgactaatagcgcattcatcaagttatctttcaatgtatttgatttgagatttgtaacactttatgtcatttgatcatctataagcattcatcaactaacagtatcttagtccgaagcagcgaggcttaccaaatgggacacc

SEQ ID NO: 20507 - protein, 236 aa, Zea mays subsp. mays
  peptide (1)..(236): Ceres Seq. ID no. 15179366
  misc_feature (1)..(235): NCBI GI NO: 3122357 NR Description: Probable lipoate-protein ligase
  misc_feature (1)..(235): NCBI GI NO: 15219770 NR Description: lipoyltransferase [Arabidopsis thaliana]
  misc_feature (3)..(217): NCBI GI NO: 22971103 NR Description: hypothetical protein [Chloroflexus aurantiacus]
  misc_feature (8)..(209): NCBI GI NO: 29346499 NR Description: lipoate-protein ligase B
  misc_feature (9)..(214): NCBI GI NO: 21355483 NR Description: CG9804-PA [Drosophila melanogaster]
  misc_feature (7)..(214): NCBI GI NO: 31203215 NR Description: ENSANGP00000017330 [Anopheles gambiae]
  misc_feature (6)..(219): NCBI GI NO: 6685619 NR Description: Lipoate-protein ligase B
  misc_feature (1)..(192): NCBI GI NO: 32565879 NR Description: LiPoate Ligase (27.4 kD) (lpl-1)
  misc_feature (12)..(200): NCBI GI NO: 39586445 NR Description: Hypothetical protein CBG21764
  misc_feature (4)..(189): NCBI GI NO: 25405224 NR Description: F16N3.14 [imported] - Arabidopsis thaliana
MRTPRTLEVWKLGTVNYLKSLKLQDKLVSERKANRIPDTLLSLQHPPTYTLGKRRTDHNLLIPEAELKSIGAELHYTQRGGDITFHGPHQPILYPILSLRSIGFGARSYVEALERSMIEFSSLYGVKARAGNKCETGVWVGDRKIGAIGVRISSGITCHGLAFNIDPDMKYFEHIVPCGIADKEVTSLRRETDAQLPSEEVIHEQLVTCLAKVFSYDDVVVKEDPSAILNTLEDDD

SEQ ID NO: 20508 - protein, 120 aa, Zea mays subsp. mays
  peptide (1)..(120): Ceres Seq. ID no. 15179367
  misc_feature (1)..(119): NCBI GI NO: 3122357 NR Description: Probable lipoate-protein ligase
  misc_feature (1)..(119): NCBI GI NO: 15219770 NR Description: lipoyltransferase [Arabidopsis thaliana]
  misc_feature (1)..(101): NCBI GI NO: 22971103 NR Description: hypothetical protein [Chloroflexus aurantiacus]
  misc_feature (1)..(93): NCBI GI NO: 29346499 NR Description: lipoate-protein ligase B
  misc_feature (1)..(98): NCBI GI NO: 21355483 NR Description: CG9804-PA [Drosophila melanogaster]
  misc_feature (1)..(98): NCBI GI NO: 31203215 NR Description: ENSANGP00000017330 [Anopheles gambiae]
  misc_feature (1)..(103): NCBI GI NO: 6685619 NR Description: Lipoate-protein ligase B
  misc_feature (1)..(76): NCBI GI NO: 32565879 NR Description: LiPoate Ligase (27.4 kD) (lpl-1)
  misc_feature (1)..(84): NCBI GI NO: 39586445 NR Description: Hypothetical protein CBG21764
  misc_feature (1)..(73): NCBI GI NO: 25405224 NR Description: F16N3.14 [imported] - Arabidopsis thaliana
MIEFSSLYGVKARAGNKCETGVWVGDRKIGAIGVRISSGITCHGLAFNIDPDMKYFEHIVPCGIADKEVTSLRRETDAQLPSEEVIHEQLVTCLAKVFSYDDVVVKEDPSAILNTLEDDD

SEQ ID NO: 20509 - DNA, 1080 bp, Zea mays subsp. mays
  misc_feature (1)..(1080): Ceres Seq. ID no. 15179361
attttcttctccgtttctcactgaataatcagaaaacaaagttttagggtttttgcctgcggaggttttgaaggctacaatggcggaagagcacaagcacgaggaatcgatcatggagaagatcgcggagaagatccatggccacgataactcttcttcttcagattcagatgacgagaagaaagcgtcgtctatcaagacgaagatctaccgcctcttcggaagagaaaagcctgtccacaaggtcttcggtggcggaaaacctgccgacatattcctatggaggaacaagaaggtatcaggaggagtgttgggtgctgcaactctctcctggatcttattcgagttactccaatacaacctcctcactctcttcggtcacgtctcgatccttgctctcgctgtgttgttcttgtggtctagtgctactaccttcattcacaagacgcctcctcatattcctgaagtgcacatccccgaggatgttgttctccagcttgcctctgggctcaggattgaaatcaatcgtggttttactcttcttaggaacatcgcattaggaagagatctcaagaagttccttatggttgttgctgggttgtgggttttgtccaaagttggtagctcatgcaacttcttgaccttgatctatatcgcaactgttcttctcttcactgtccccgtgctttacgaaaagtatgaggataaagtagatgactttggtgaaaaggcaatgaaggagatcaagaagcaatacgcggtgctcgatgagaaggttttgagcaaggtgatgagcaaaatccccagaggagccttcaacaagaagaaggattagaagagtgtgtaagtttctctcacagcatcatatcatcatctgagtcttccagattgatagattaatctcgaagcattgtttctttacttgttattggaagccgtcttggtttaataaaccctttagtctctctctgtggattttattcggggttttaaccaaaatttacacaacatatgaatttgaatgaaccctattattgttgattctgttatggaataccatcgtcttctttatgatagtct

SEQ ID NO: 20510 - protein, 251 aa, Zea mays subsp. mays
  peptide (1)..(251): Ceres Seq. ID no. 15179362
  misc_feature (1)..(251): NCBI GI NO: 15222616 NR Description: expressed protein [Arabidopsis thaliana]
  misc_feature (1)..(251): NCBI GI NO: 15238125 NR Description: expressed protein [Arabidopsis thaliana]
  misc_feature (1)..(251): NCBI GI NO: 15236556 NR Description: expressed protein [Arabidopsis thaliana]
  misc_feature (2)..(251): NCBI GI NO: 15237093 NR Description: expressed protein [Arabidopsis thaliana]
  misc_feature (36)..(250): NCBI GI NO: 34904202 NR Description: P0492F05.25
  misc_feature (1)..(237): NCBI GI NO: 15233147 NR Description: hypothetical protein [Arabidopsis thaliana]
  misc_feature (67)..(207): NCBI GI NO: 38344513 NR Description: OSJNBa0016N04.6
  misc_feature (64)..(251): NCBI GI NO: 38303997 NR Description: Reticulon 3 [Rattus norvegicus]
  misc_feature (1)..(248): NCBI GI NO: 1143723 NR Description: chS-Rex-b
  misc_feature (64)..(248): NCBI GI NO: 281046 NR Description: tropomyosin-related protein, neuronal - rat
MAEEHKHEESIMEKIAEKIHGHDNSSSSDSDDEKKASSIKTKIYRLFGREKPVHKVFGGGKPADIFLWRNKKVSGGVLGAATLSWILFELLQYNLLTLFGHVSILALAVLFLWSSATTFIHKTPPHIPEVHIPEDVVLQLASGLRIEINRGFTLLRNIALGRDLKKFLMVVAGLWVLSKVGSSCNFLTLIYIATVLLFTVPVLYEKYEDKVDDFGEKAMKEIKKQYAVLDEKVLSKVMSKIPRGAFNKKKD

SEQ ID NO: 20511 - protein, 240 aa, Zea mays subsp. mays
  peptide (1)..(240): Ceres Seq. ID no. 15179363
  misc_feature (1)..(240): NCBI GI NO: 15222616 NR Description: expressed protein [Arabidopsis thaliana]
  misc_feature (1)..(240): NCBI GI NO: 15238125 NR Description: expressed protein [Arabidopsis thaliana]
  misc_feature (1)..(240): NCBI GI NO: 15236556 NR Description: expressed protein [Arabidopsis thaliana]
  misc_feature (1)..(240): NCBI GI NO: 15237093 NR Description: expressed protein [Arabidopsis thaliana]
  misc_feature (25)..(239): NCBI GI NO: 34904202 NR Description: P0492F05.25
  misc_feature (1)..(226): NCBI GI NO: 15233147 NR Description: hypothetical protein [Arabidopsis thaliana]
  misc_feature (56)..(196): NCBI GI NO: 38344513 NR Description: OSJNBa0016N04.6
  misc_feature (53)..(240): NCBI GI NO: 38303997 NR Description: Reticulon 3 [Rattus norvegicus]
  misc_feature (1)..(237): NCBI GI NO: 1143723 NR Description: chS-Rex-b
  misc_feature (53)..(237): NCBI GI NO: 281046 NR Description: tropomyosin-related protein, neuronal - rat
MEKIAEKIHGHDNSSSSDSDDEKKASSIKTKIYRLFGREKPVHKVFGGGKPADIFLWRNKKVSGGVLGAATLSWILFELLQYNLLTLFGHVSILALAVLFLWSSATTFIHKTPPHIPEVHIPEDVVLQLASGLRIEINRGFTLLRNIALGRDLKKFLMVVAGLWVLSKVGSSCNFLTLIYIATVLLFTVPVLYEKYEDKVDDFGEKAMKEIKKQYAVLDEKVLSKVMSKIPRGAFNKKKD

SEQ ID NO: 20512 - protein, 140 aa, Zea mays subsp. mays
  peptide (1)..(140): Ceres Seq. ID no. 15179364
MATITLLLQIQMTRRKRRLSRRRSTASSEEKSLSTRSSVAENLPTYSYGGTRRYQEECWVLQLSPGSYSSYSNTTSSLSSVTSRSLLSLCCSCGLVLLPSFTRRLLIFLKCTSPRMLFSSLPLGSGLKSIVVLLFLGTSH

SEQ ID NO: 20513 - DNA, 1192 bp, Zea mays subsp. mays
  misc_feature (1)..(1192): Ceres Seq. ID no. 15179992
actcttttcttcttctcctccgaaaccataaattccttaatcgtcttcttcttttccctatctttcttcttctggatctcccaaacaccaatcctgagagacccatcttctccgccatccccttcctccgtcgctccccctcgcggggatgcggaatcctcctccaatcctccgcctgatgctatgatttcttccagagatcccgacgctcttttcagcggcggcggaatcagctttttagcggggaatcgggctgtgaagttcagttatgggtattcaagtctcaagggtaaacgagcgaccatggaggatttcttcgagactagaatatctgatgttgatggacaaatggttgccttcttcgccgtcttcgatggtcacggtggtgcaagaactgcagaatatcttaaaaacaatattttcaacaacttagttaatcatgatgagtttatctcagacaccaagaaagccattgggcaagtgtttaagcagacggatgaggagtatctcactgaagagagaggacagcctaagaacgctggctcaaccgcatcaactgctttgcttgttggagataagttaattgttgctaatgttggtgattctagagttgtagcgtctagaaatggctcagctgttccactttctaatgatcacaaacctgatagatcagatgagcgacagaggattgaagatgctggtggcttcatcatctgggctggaacatggcgagttggtggaattcttgcggtgtcccgggcgtttggagacaagcaacttaagccatatgtaattgcggagccagagattcaggaggaggatataagcacgttggagtttattgttatcgccagcgatggattgtggaatgtgttgtcaaacaaggatgccgtggcaatagcacgagacatttcagatgcggaagtagcttcacgaaagcttgttcaagaagcatacgcacggggtagctgcgacaatatcacttgcattgttgttcgatttgaggtttcttgagatagaaccaaacgcatacattgttctgctttgaatgcatcgtcttcagctatggccttctctttccatgtattcgttatataaacgaagaaaaaaacaaaacaccatgttttagtagaagactcatgtgataacctactcttctgtttctagtacaattcctcttcttggaaagctc

SEQ ID NO: 20514 - protein, 337 aa, Zea mays subsp. mays
  peptide (1)..(337): Ceres Seq. ID no. 15179993
  misc_feature (88)..(327): Pfam Name: Pfam Description:  Protein phosphatase 2C
  misc_feature (3)..(337): NCBI GI NO: 30693757 NR Description: protein phosphatase 2C (PP2C), putative
  misc_feature (160)..(337): NCBI GI NO: 8778653 NR Description: F9C16.6 [Arabidopsis thaliana]
  misc_feature (3)..(159): NCBI GI NO: 8778653 NR Description: F9C16.6 [Arabidopsis thaliana]
  misc_feature (3)..(159): NCBI GI NO: 7523669 NR Description: Unknown protein [Arabidopsis thaliana]
  misc_feature (160)..(240): NCBI GI NO: 7523669 NR Description: Unknown protein [Arabidopsis thaliana]
  misc_feature (73)..(334): NCBI GI NO: 20146110 NR Description: protein phosphatase 2C
  misc_feature (69)..(334): NCBI GI NO: 30689144 NR Description: protein phosphatase 2C (PP2C), putative
  misc_feature (69)..(337): NCBI GI NO: 18416366 NR Description: protein phosphatase 2C (PP2C) -related
  misc_feature (69)..(334): NCBI GI NO: 15238651 NR Description: protein phosphatase 2C (PP2C), putative
  misc_feature (87)..(271): NCBI GI NO: 7486331 NR Description: hypothetical protein F28M20
TLFFFSSETINSLIVFFFSLSFFFWISQTPILRDPSSPPSPSSVAPPRGDAESSSNPPPDAMISSRDPDALFSGGGISFLAGNRAVKFSYGYSSLKGKRATMEDFFETRISDVDGQMVAFFAVFDGHGGARTAEYLKNNIFNNLVNHDEFISDTKKAIGQVFKQTDEEYLTEERGQPKNAGSTASTALLVGDKLIVANVGDSRVVASRNGSAVPLSNDHKPDRSDERQRIEDAGGFIIWAGTWRVGGILAVSRAFGDKQLKPYVIAEPEIQEEDISTLEFIVIASDGLWNVLSNKDAVAIARDISDAEVASRKLVQEAYARGSCDNITCIVVRFEVS

SEQ ID NO: 20515 - protein, 276 aa, Zea mays subsp. mays
  peptide (1)..(276): Ceres Seq. ID no. 15179994
  misc_feature (27)..(266): Pfam Name: Pfam Description:  Protein phosphatase 2C
  misc_feature (1)..(276): NCBI GI NO: 30693757 NR Description: protein phosphatase 2C (PP2C), putative
  misc_feature (99)..(276): NCBI GI NO: 8778653 NR Description: F9C16.6 [Arabidopsis thaliana]
  misc_feature (1)..(98): NCBI GI NO: 8778653 NR Description: F9C16.6 [Arabidopsis thaliana]
  misc_feature (1)..(98): NCBI GI NO: 7523669 NR Description: Unknown protein [Arabidopsis thaliana]
  misc_feature (99)..(179): NCBI GI NO: 7523669 NR Description: Unknown protein [Arabidopsis thaliana]
  misc_feature (12)..(273): NCBI GI NO: 20146110 NR Description: protein phosphatase 2C
  misc_feature (8)..(273): NCBI GI NO: 30689144 NR Description: protein phosphatase 2C (PP2C), putative
  misc_feature (8)..(276): NCBI GI NO: 18416366 NR Description: protein phosphatase 2C (PP2C) -related
  misc_feature (8)..(273): NCBI GI NO: 15238651 NR Description: protein phosphatase 2C (PP2C), putative
  misc_feature (26)..(210): NCBI GI NO: 7486331 NR Description: hypothetical protein F28M20
MISSRDPDALFSGGGISFLAGNRAVKFSYGYSSLKGKRATMEDFFETRISDVDGQMVAFFAVFDGHGGARTAEYLKNNIFNNLVNHDEFISDTKKAIGQVFKQTDEEYLTEERGQPKNAGSTASTALLVGDKLIVANVGDSRVVASRNGSAVPLSNDHKPDRSDERQRIEDAGGFIIWAGTWRVGGILAVSRAFGDKQLKPYVIAEPEIQEEDISTLEFIVIASDGLWNVLSNKDAVAIARDISDAEVASRKLVQEAYARGSCDNITCIVVRFEVS

SEQ ID NO: 20516 - protein, 236 aa, Zea mays subsp. mays
  peptide (1)..(236): Ceres Seq. ID no. 15179995
  misc_feature (1)..(226): Pfam Name: Pfam Description:  Protein phosphatase 2C
  misc_feature (1)..(236): NCBI GI NO: 30693757 NR Description: protein phosphatase 2C (PP2C), putative
  misc_feature (59)..(236): NCBI GI NO: 8778653 NR Description: F9C16.6 [Arabidopsis thaliana]
  misc_feature (1)..(58): NCBI GI NO: 8778653 NR Description: F9C16.6 [Arabidopsis thaliana]
  misc_feature (1)..(58): NCBI GI NO: 7523669 NR Description: Unknown protein [Arabidopsis thaliana]
  misc_feature (59)..(139): NCBI GI NO: 7523669 NR Description: Unknown protein [Arabidopsis thaliana]
  misc_feature (1)..(233): NCBI GI NO: 20146110 NR Description: protein phosphatase 2C
  misc_feature (1)..(233): NCBI GI NO: 30689144 NR Description: protein phosphatase 2C (PP2C), putative
  misc_feature (1)..(236): NCBI GI NO: 18416366 NR Description: protein phosphatase 2C (PP2C) -related
  misc_feature (1)..(233): NCBI GI NO: 15238651 NR Description: protein phosphatase 2C (PP2C), putative
  misc_feature (1)..(170): NCBI GI NO: 7486331 NR Description: hypothetical protein F28M20
MEDFFETRISDVDGQMVAFFAVFDGHGGARTAEYLKNNIFNNLVNHDEFISDTKKAIGQVFKQTDEEYLTEERGQPKNAGSTASTALLVGDKLIVANVGDSRVVASRNGSAVPLSNDHKPDRSDERQRIEDAGGFIIWAGTWRVGGILAVSRAFGDKQLKPYVIAEPEIQEEDISTLEFIVIASDGLWNVLSNKDAVAIARDISDAEVASRKLVQEAYARGSCDNITCIVVRFEVS

SEQ ID NO: 20517 - DNA, 880 bp, Zea mays subsp. mays
  misc_feature (1)..(880): Ceres Seq. ID no. 15179036
gacacgttctcatttttcagacagcgatggcgatgtctattctgaagctaagaaactcaccggctttgagatccgccgcaagtatcgcccggatcggagtttcatcaagggctttctcaaagctatcagagggcacggacataacctcggcggctccaggcgtttccctccagaaagctcgcagctgggacgaaggcgtttcctccaaattctccaccacaccattgtcagatatcttcaaggggaagaaagtcgtcatctttggacttcctggagcttacacaggagtctgctcacagcagcatgtgccaagctacaagagccacatggataagttcaaagccaaaggcattgactccgtcatctgtgtttctgtcaatgatccgtatactttaaacggttgggcagagaagattggtgccaaagatgctattgagttttatggagattttgatgggaaattccataaaagcttggggctagacaaggatctctctgctgcattgctcggccctcggtctgagagatggtcggcttatgtagaagacggtaaggtgaaggctgtgaacgtggaagaagcaccatctgacttcaaggtgacgggagccgaagtcattttaggacagatctaacaagtgtctcgacaagttgttatggcatttgttgtttcctctgtataagttgcgagagtgaaaataagtctgatccgaacatcaccaaaggatcacaccaagttatgaactctacttttccttggttcttgttttcttttcaataaaaatgtttgttacttgccaattctcagcaaatgtacatcataacatgatagagtactccatttgttttcaaagacaaattttatagatttcttacatatagt

SEQ ID NO: 20518 - protein, 209 aa, Zea mays subsp. mays
  peptide (1)..(209): Ceres Seq. ID no. 15179037
  misc_feature (47)..(205): Pfam Name: Pfam Description:  AhpC/TSA family
  misc_feature (9)..(209): NCBI GI NO: 18397457 NR Description: expressed protein [Arabidopsis thaliana]
  misc_feature (9)..(209): NCBI GI NO: 21553531 NR Description: unknown [Arabidopsis thaliana]
  misc_feature (11)..(209): NCBI GI NO: 7658343 NR Description: unknown protein; 13384-11892
  misc_feature (9)..(209): NCBI GI NO: 34903114 NR Description: unnamed protein product
  misc_feature (77)..(209): NCBI GI NO: 17987739 NR Description: THIOL PEROXIDASE [Brucella melitensis]
  misc_feature (77)..(209): NCBI GI NO: 23501379 NR Description: ahpC/TSA family protein [Brucella suis 1330]
  misc_feature (53)..(209): NCBI GI NO: 15888122 NR Description: AGR_C_1423p [Agrobacterium tumefaciens]
  misc_feature (76)..(209): NCBI GI NO: 13476239 NR Description: peroxiredoxin-like protein [Mesorhizobium loti]
  misc_feature (74)..(209): NCBI GI NO: 16127624 NR Description: AhpC/TSA family protein
  misc_feature (75)..(209): NCBI GI NO: 22957464 NR Description: hypothetical protein [Rhodobacter sphaeroides]
HVLIFQTAMAMSILKLRNSPALRSAASIARIGVSSRAFSKLSEGTDITSAAPGVSLQKARSWDEGVSSKFSTTPLSDIFKGKKVVIFGLPGAYTGVCSQQHVPSYKSHMDKFKAKGIDSVICVSVNDPYTLNGWAEKIGAKDAIEFYGDFDGKFHKSLGLDKDLSAALLGPRSERWSAYVEDGKVKAVNVEEAPSDFKVTGAEVILGQI

SEQ ID NO: 20519 - protein, 201 aa, Zea mays subsp. mays
  peptide (1)..(201): Ceres Seq. ID no. 15179038
  misc_feature (39)..(197): Pfam Name: Pfam Description:  AhpC/TSA family
  misc_feature (1)..(201): NCBI GI NO: 18397457 NR Description: expressed protein [Arabidopsis thaliana]
  misc_feature (1)..(201): NCBI GI NO: 21553531 NR Description: unknown [Arabidopsis thaliana]
  misc_feature (3)..(201): NCBI GI NO: 7658343 NR Description: unknown protein; 13384-11892
  misc_feature (1)..(201): NCBI GI NO: 34903114 NR Description: unnamed protein product
  misc_feature (69)..(201): NCBI GI NO: 17987739 NR Description: THIOL PEROXIDASE [Brucella melitensis]
  misc_feature (69)..(201): NCBI GI NO: 23501379 NR Description: ahpC/TSA family protein [Brucella suis 1330]
  misc_feature (45)..(201): NCBI GI NO: 15888122 NR Description: AGR_C_1423p [Agrobacterium tumefaciens]
  misc_feature (68)..(201): NCBI GI NO: 13476239 NR Description: peroxiredoxin-like protein [Mesorhizobium loti]
  misc_feature (66)..(201): NCBI GI NO: 16127624 NR Description: AhpC/TSA family protein
  misc_feature (67)..(201): NCBI GI NO: 22957464 NR Description: hypothetical protein [Rhodobacter sphaeroides]
MAMSILKLRNSPALRSAASIARIGVSSRAFSKLSEGTDITSAAPGVSLQKARSWDEGVSSKFSTTPLSDIFKGKKVVIFGLPGAYTGVCSQQHVPSYKSHMDKFKAKGIDSVICVSVNDPYTLNGWAEKIGAKDAIEFYGDFDGKFHKSLGLDKDLSAALLGPRSERWSAYVEDGKVKAVNVEEAPSDFKVTGAEVILGQI

SEQ ID NO: 20520 - protein, 199 aa, Zea mays subsp. mays
  peptide (1)..(199): Ceres Seq. ID no. 15179039
  misc_feature (37)..(195): Pfam Name: Pfam Description:  AhpC/TSA family
  misc_feature (1)..(199): NCBI GI NO: 18397457 NR Description: expressed protein [Arabidopsis thaliana]
  misc_feature (1)..(199): NCBI GI NO: 21553531 NR Description: unknown [Arabidopsis thaliana]
  misc_feature (1)..(199): NCBI GI NO: 7658343 NR Description: unknown protein; 13384-11892
  misc_feature (1)..(199): NCBI GI NO: 34903114 NR Description: unnamed protein product
  misc_feature (67)..(199): NCBI GI NO: 17987739 NR Description: THIOL PEROXIDASE [Brucella melitensis]
  misc_feature (67)..(199): NCBI GI NO: 23501379 NR Description: ahpC/TSA family protein [Brucella suis 1330]
  misc_feature (43)..(199): NCBI GI NO: 15888122 NR Description: AGR_C_1423p [Agrobacterium tumefaciens]
  misc_feature (66)..(199): NCBI GI NO: 13476239 NR Description: peroxiredoxin-like protein [Mesorhizobium loti]
  misc_feature (64)..(199): NCBI GI NO: 16127624 NR Description: AhpC/TSA family protein
  misc_feature (65)..(199): NCBI GI NO: 22957464 NR Description: hypothetical protein [Rhodobacter sphaeroides]
MSILKLRNSPALRSAASIARIGVSSRAFSKLSEGTDITSAAPGVSLQKARSWDEGVSSKFSTTPLSDIFKGKKVVIFGLPGAYTGVCSQQHVPSYKSHMDKFKAKGIDSVICVSVNDPYTLNGWAEKIGAKDAIEFYGDFDGKFHKSLGLDKDLSAALLGPRSERWSAYVEDGKVKAVNVEEAPSDFKVTGAEVILGQI

SEQ ID NO: 20521 - DNA, 648 bp, Zea mays subsp. mays
  misc_feature (1)..(648): Ceres Seq. ID no. 15179323
ctcaacttttattaatttgtttcttgctattcataagaatctttttttttttgtaaactattcataagaatcttcacgcaaaagaacactagagtggtgaagaagtagctactttgcctcttcttttttaatttaaggttttcatttcttttgtggaaggaaacaatgttgcaaaggttggtcttccttctcatcgttctcctgattcagtcctctttcctttttgagatttcctctgctctccaggaaggaaaaacatgtatactaaacgacaactgtgacgctggattacactgtgaaacatgtctagccaacaataatttgagacccagatgctctcgaacccagcccatcaaccccatctcaaaggtaaagggattgcctttcaacaagtatgcatggttaacaacacacaactcgtttgcaagattggggcaagtgtcaaaaaccggttctgtaattttggctcctactaatcaacaagattcggtcacaagccaactcgcgaagccggataaccggactgaaataaacgatataataaaagcgatatgttaaggaaataaacgattgtaaagagcgaatacaagaacgataagaaatcgtattcgctaatgaacatggagtcgagatataatctctttcctt

SEQ ID NO: 20522 - protein, 130 aa, Zea mays subsp. mays
  peptide (1)..(130): Ceres Seq. ID no. 15179324
  misc_feature (1)..(113): NCBI GI NO: 18402763 NR Description: expressed protein [Arabidopsis thaliana]
  misc_feature (1)..(113): NCBI GI NO: 15230348 NR Description: expressed protein [Arabidopsis thaliana]
  misc_feature (23)..(113): NCBI GI NO: 27754722 NR Description: unknown protein [Arabidopsis thaliana]
  misc_feature (1)..(113): NCBI GI NO: 34897530 NR Description: OSJNBa0042L16.2
  misc_feature (1)..(113): NCBI GI NO: 38345461 NR Description: OSJNBa0042L16.16
  misc_feature (22)..(113): NCBI GI NO: 25407778 NR Description: MAP3K-like protein kinase
  misc_feature (1)..(113): NCBI GI NO: 38637049 NR Description: MAP3K-like protein kinase
  misc_feature (29)..(113): NCBI GI NO: 5777622 NR Description: CAA303710.1 protein [Oryza sativa]
  misc_feature (29)..(113): NCBI GI NO: 38345515 NR Description: OSJNBa0039K24.18
  misc_feature (2)..(113): NCBI GI NO: 18425155 NR Description: expressed protein [Arabidopsis thaliana]
MLQRLVFLLIVLLIQSSFLFEISSALQEGKTCILNDNCDAGLHCETCLANNNLRPRCSRTQPINPISKVKGLPFNKYAWLTTHNSFARLGQVSKTGSVILAPTNQQDSVTSQLAKPDNRTEINDIIKAIC

SEQ ID NO: 20523 - DNA, 759 bp, Zea mays subsp. mays
  misc_feature (1)..(759): Ceres Seq. ID no. 15178140
ccctcgtcgctgcgtctctctcccgcaaccttatagattcgtttttattcccatcgatcggagagagagagaataattcaataagcgaccatgttggtgtacactgatcttctcaccggtgatgagcttctctctgactctttcccttacaaggagattgagaatggtattctttgggaagttgaaggaaagtggactacccagggatgtgtagaggttaacattggtgccaacccctctgctgaagaaggtggtgaggacgagggtgttgacgactctgttcaaaaggttgttgacattgtcgacaccttcaggctccaggagcaaccgacctacgacaagaaggggttcatcgcctatatcaaaaagtacatcaagcttttgacccccaagctcaacgccgaagatcaagaagctttcaagaagggtattgagggagctaccaagtacttgctccctaagctcaaggacttccaattctttgttggggagagcatgcacgatgacagcactgtggtctttgcttactacaaggagggtgctactaacccaacatttttgtacttcggacatggtttgaaggaggtcaagtgctgattgagagaagctctcgtgtggtcggtcgcagcgactctattaagtctatgtctctttatattgttatgtgtttcttccccaccattttacttttctttctacttctcatctctgttgcaagattctcaagttattaatccgaaaacaatggtttgttagtcg

SEQ ID NO: 20524 - protein, 168 aa, Zea mays subsp. mays; identical to SEQ ID NO: 7445
  peptide (1)..(168): Ceres Seq. ID no. 15178141
  misc_feature (1)..(165): Pfam Name: Pfam Description:  Translationally controlled tumour protein
  misc_feature (1)..(168): NCBI GI NO: 20140684 NR Description: Translationally controlled tumor protein homolog
  misc_feature (1)..(168): NCBI GI NO: 15228276 NR Description: translationally controlled tumor protein -related
  misc_feature (1)..(168): NCBI GI NO: 21595816 NR Description: translationally controlled tumor protein-likeprotein
  misc_feature (1)..(168): NCBI GI NO: 549063 NR Description: Translationally controlled tumor protein homolog
  misc_feature (1)..(168): NCBI GI NO: 2507443 NR Description: Translationally controlled tumor protein homolog
  misc_feature (1)..(168): NCBI GI NO: 2507442 NR Description: TRANSLATIONALLY CONTROLLED TUMOR PROTEIN HOMOLOG
  misc_feature (1)..(168): NCBI GI NO: 20140865 NR Description: Translationally controlled tumor protein homolog
  misc_feature (1)..(168): NCBI GI NO: 9979196 NR Description: Translationally controlled tumor protein homolog
  misc_feature (1)..(168): NCBI GI NO: 1174626 NR Description: TRANSLATIONALLY CONTROLLED TUMOR PROTEIN HOMOLOG
  misc_feature (1)..(168): NCBI GI NO: 20140683 NR Description: Translationally controlled tumor protein homolog

SEQ ID NO: 20525 - DNA, 1055 bp, Zea mays subsp. mays
  misc_feature (1)..(1055): Ceres Seq. ID no. 15177907
aaaagaaacagagcaaacctccgtcttccttttttttgacgagcggtgatgttttctctcaacttccatggctgacatctcaccttcctaattctccccaacctgccacacaaagtctatttctttcgcctaaaacttcaccatcaaacaccccctagggtttttttcaatccatttttttttgtatttttgaaattttttctaatggatgcgatcttctcccccgccgtggaacctgaaggagccaccgactcaaccatcgacacagtttctcgcttggtctccggcgctttctccagagctcttactggttttttcgctatggctggagctttcacaggagcagtaactggtgcggtggcaggaagagcggcacagtacggagtcctccgtggggctgcactcggcgctgtagctggagctattctctctgttgaagtcttggaggcttctcgtgcctactggtatttagagctatcaggatccaggggaccttcatctatggcagattttgtagagcaactgtttcgtgggagactagtagaagaacaacttatgtcaacaatgatacagtcacaccactggcagttaaggatatcagatgtaagctatgaagagagggatgatgtgtatagtgaattggaacccagaggcttgtctggtgactcgttaaggaaactcccatgctatatcatgtcaagtgagatgaccaagaagcagatcattcactgcactatttgtcttcaggacgtcgcagttggcgaaatcacacggagcttaccgagatgtgaccatacgtttcacctggtttgtgttgataaatggctcatcagacatggatcatgccccatttgcagacaggccgttaaagattaaaaagcaccattggtatccgaggagtgtacgtagcaaaaacccattgtcattatatgttgttgtaagtctctgaatccttgtttcaatctctctttgttacttttacttatagcatcatccataggtttctgcttttgaatgtatactattactgtagacatgaataaaaacacatacac

SEQ ID NO: 20526 - protein, 223 aa, Zea mays subsp. mays
  peptide (1)..(223): Ceres Seq. ID no. 15177908
  misc_feature (176)..(217): Pfam Name: RING finger Pfam Description: Zinc finger, C3HC4 type
  misc_feature (1)..(223): NCBI GI NO: 18410608 NR Description: zinc finger
  misc_feature (1)..(223): NCBI GI NO: 21592935 NR Description: putative RING zinc finger protein
  misc_feature (118)..(223): NCBI GI NO: 25406345 NR Description: probable RING zinc finger protein F1M20.9
  misc_feature (1)..(219): NCBI GI NO: 15239242 NR Description: zinc finger
  misc_feature (22)..(221): NCBI GI NO: 26452210 NR Description: unknown protein [Arabidopsis thaliana]
  misc_feature (22)..(221): NCBI GI NO: 30680091 NR Description: expressed protein [Arabidopsis thaliana]
  misc_feature (7)..(219): NCBI GI NO: 26451101 NR Description: unknown protein [Arabidopsis thaliana]
  misc_feature (22)..(216): NCBI GI NO: 25411815 NR Description: hypothetical protein At2g17730
  misc_feature (35)..(221): NCBI GI NO: 37536572 NR Description: hypothetical protein
  misc_feature (42)..(221): NCBI GI NO: 34901682 NR Description: P0434A03.5
MDAIFSPAVEPEGATDSTIDTVSRLVSGAFSRALTGFFAMAGAFTGAVTGAVAGRAAQYGVLRGAALGAVAGAILSVEVLEASRAYWYLELSGSRGPSSMADFVEQLFRGRLVEEQLMSTMIQSHHWQLRISDVSYEERDDVYSELEPRGLSGDSLRKLPCYIMSSEMTKKQIIHCTICLQDVAVGEITRSLPRCDHTFHLVCVDKWLIRHGSCPICRQAVKD

SEQ ID NO: 20527 - protein, 184 aa, Zea mays subsp. mays
  peptide (1)..(184): Ceres Seq. ID no. 15177909
  misc_feature (137)..(178): Pfam Name: RING finger Pfam Description: Zinc finger, C3HC4 type
  misc_feature (1)..(184): NCBI GI NO: 18410608 NR Description: zinc finger
  misc_feature (1)..(184): NCBI GI NO: 21592935 NR Description: putative RING zinc finger protein
  misc_feature (79)..(184): NCBI GI NO: 25406345 NR Description: probable RING zinc finger protein F1M20.9
  misc_feature (1)..(180): NCBI GI NO: 15239242 NR Description: zinc finger
  misc_feature (1)..(182): NCBI GI NO: 26452210 NR Description: unknown protein [Arabidopsis thaliana]
  misc_feature (1)..(182): NCBI GI NO: 30680091 NR Description: expressed protein [Arabidopsis thaliana]
  misc_feature (1)..(180): NCBI GI NO: 26451101 NR Description: unknown protein [Arabidopsis thaliana]
  misc_feature (1)..(177): NCBI GI NO: 25411815 NR Description: hypothetical protein At2g17730
  misc_feature (1)..(182): NCBI GI NO: 37536572 NR Description: hypothetical protein
  misc_feature (3)..(182): NCBI GI NO: 34901682 NR Description: P0434A03.5
MAGAFTGAVTGAVAGRAAQYGVLRGAALGAVAGAILSVEVLEASRAYWYLELSGSRGPSSMADFVEQLFRGRLVEEQLMSTMIQSHHWQLRISDVSYEERDDVYSELEPRGLSGDSLRKLPCYIMSSEMTKKQIIHCTICLQDVAVGEITRSLPRCDHTFHLVCVDKWLIRHGSCPICRQAVKD

SEQ ID NO: 20528 - protein, 124 aa, Zea mays subsp. mays
  peptide (1)..(124): Ceres Seq. ID no. 15177910
  misc_feature (77)..(118): Pfam Name: RING finger Pfam Description: Zinc finger, C3HC4 type
  misc_feature (1)..(124): NCBI GI NO: 18410608 NR Description: zinc finger
  misc_feature (1)..(124): NCBI GI NO: 21592935 NR Description: putative RING zinc finger protein
  misc_feature (19)..(124): NCBI GI NO: 25406345 NR Description: probable RING zinc finger protein F1M20.9
  misc_feature (1)..(120): NCBI GI NO: 15239242 NR Description: zinc finger
  misc_feature (1)..(122): NCBI GI NO: 26452210 NR Description: unknown protein [Arabidopsis thaliana]
  misc_feature (1)..(122): NCBI GI NO: 30680091 NR Description: expressed protein [Arabidopsis thaliana]
  misc_feature (1)..(120): NCBI GI NO: 26451101 NR Description: unknown protein [Arabidopsis thaliana]
  misc_feature (1)..(117): NCBI GI NO: 25411815 NR Description: hypothetical protein At2g17730
  misc_feature (1)..(122): NCBI GI NO: 37536572 NR Description: hypothetical protein
  misc_feature (1)..(122): NCBI GI NO: 34901682 NR Description: P0434A03.5
MADFVEQLFRGRLVEEQLMSTMIQSHHWQLRISDVSYEERDDVYSELEPRGLSGDSLRKLPCYIMSSEMTKKQIIHCTICLQDVAVGEITRSLPRCDHTFHLVCVDKWLIRHGSCPICRQAVKD

SEQ ID NO: 20529 - DNA, 603 bp, Zea mays subsp. mays
  misc_feature (1)..(603): Ceres Seq. ID no. 15179080
aaactcgaaagggaccaaatcggaaagaggaaaatgggagaggggaaggagagtgtgccacaggagcacgatgtgaatgcgaagtgggacgcatgtatcgatctcacgacccgccgtttcgtctactcctcactcggcggcgccttcgccggtcttctcttcttcaggagtcctgtaacaagatgggcatcgattgcttttggtgctggacttggtattggttctgcatacactgactgctctcgtgcttttgatgctccgccttcattcacagagacttcttctgtatctcagactgtatctcagtctgcagacgaatagacaaacgatgaaagtaagtgaatccatgcggaaacagagccatcacaccaatgatttgttgaattgtttcctaaaacctgtaaggacaagtcttttgagattaacgctgaatgtaaaatcttgtttttcttctgttaaatccttttgaacagctgacttcagtcacgcattctagttccaaaaataaacaacctcagaagaaggtatacttgaagattgttcctctttctttagtcaaaataccaaacgatgtcatgcttatgacggatgtgcttgcctctg

SEQ ID NO: 20530 - protein, 106 aa, Zea mays subsp. mays
  peptide (1)..(106): Ceres Seq. ID no. 15179081
  misc_feature (12)..(85): Pfam Name: DUF543 Pfam Description: Domain of unknown function
  misc_feature (12)..(106): NCBI GI NO: 18410008 NR Description: expressed protein [Arabidopsis thaliana]
  misc_feature (12)..(106): NCBI GI NO: 21553491 NR Description: unknown [Arabidopsis thaliana]
  misc_feature (14)..(106): NCBI GI NO: 18395129 NR Description: expressed protein [Arabidopsis thaliana]
  misc_feature (12)..(98): NCBI GI NO: 25406151 NR Description: unknown protein T9N14.2
KLERDQIGKRKMGEGKESVPQEHDVNAKWDACIDLTTRRFVYSSLGGAFAGLLFFRSPVTRWASIAFGAGLGIGSAYTDCSRAFDAPPSFTETSSVSQTVSQSADE

SEQ ID NO: 20531 - protein, 95 aa, Zea mays subsp. mays
  peptide (1)..(95): Ceres Seq. ID no. 15179082
  misc_feature (1)..(74): Pfam Name: DUF543 Pfam Description: Domain of unknown function
  misc_feature (1)..(95): NCBI GI NO: 18410008 NR Description: expressed protein [Arabidopsis thaliana]
  misc_feature (1)..(95): NCBI GI NO: 21553491 NR Description: unknown [Arabidopsis thaliana]
  misc_feature (3)..(95): NCBI GI NO: 18395129 NR Description: expressed protein [Arabidopsis thaliana]
  misc_feature (1)..(87): NCBI GI NO: 25406151 NR Description: unknown protein T9N14.2
MGEGKESVPQEHDVNAKWDACIDLTTRRFVYSSLGGAFAGLLFFRSPVTRWASIAFGAGLGIGSAYTDCSRAFDAPPSFTETSSVSQTVSQSADE

SEQ ID NO: 20532 - protein, 77 aa, Zea mays subsp. mays
  peptide (1)..(77): Ceres Seq. ID no. 15179083
TRKGPNRKEENGRGEGECATGARCECEVGRMYRSHDPPFRLLLTRRRLRRSSLLQESCNKMGIDCFWCWTWYWFCIH

SEQ ID NO: 20533 - DNA, 688 bp, Zea mays subsp. mays
  misc_feature (1)..(688): Ceres Seq. ID no. 15179062
acaaattggattgttatccagaacgaaattgttctagtttttaagttcactcgacacttttgcaatggcgatttctctccccaccgctcatgtctctccccctaagtcgtgtttctccttttcatcctcgtcgaagctatcttctcattcatccctgcgcttcggaatccgccacgaaagagttaactcgcggtcgtcgtctcgctgcgcctgcgccccactcactgttagagcaaagaagcaaaccttcaactcttttgatgatttattgctcaactctgacaaacctttactagtagacttctatgccacatggtgtggtccatgccagcttatggtacctatacttaatgaagtaagtgaaactctgagagataagattgcagtggtgaaaattgatactgaaaagtacccaagtcttgctaacaaataccaggttgaggctttacctacattcatcttattcaaagacgggaaactctgggaccgttttgagggagccttgcaagctaaccaactcgttgaacggatcgagacttctttacaagcgaagcaatagatgaacaaacagtccgttgtgacaacacgttcattattgattgacaaatttcttttcaatatatggcatcagccatttttcttttctgagtgacaaatttctcatgatatttggctacttttccgtcgc

SEQ ID NO: 20534 - protein, 164 aa, Zea mays subsp. mays
  peptide (1)..(164): Ceres Seq. ID no. 15179063
  misc_feature (57)..(161): Pfam Name: Pfam Description:  Thioredoxin
  misc_feature (1)..(164): NCBI GI NO: 30693659 NR Description: thioredoxin family [Arabidopsis thaliana]
  misc_feature (57)..(164): NCBI GI NO: 25405118 NR Description: hypothetical protein T10P12.4
  misc_feature (4)..(163): NCBI GI NO: 38454080 NR Description: At1g76760 [Arabidopsis thaliana]
  misc_feature (18)..(163): NCBI GI NO: 15223728 NR Description: thioredoxin family [Arabidopsis thaliana]
  misc_feature (57)..(156): NCBI GI NO: 23039598 NR Description: hypothetical protein
  misc_feature (57)..(160): NCBI GI NO: 23123943 NR Description: hypothetical protein [Nostoc punctiforme]
  misc_feature (25)..(156): NCBI GI NO: 27763679 NR Description: thioredoxin y [Chlamydomonas reinhardtii]
  misc_feature (58)..(158): NCBI GI NO: 17229385 NR Description: thioredoxin [Nostoc sp. PCC 7120]
  misc_feature (57)..(157): NCBI GI NO: 16331440 NR Description: thioredoxin M [Synechocystis sp. PCC 6803]
  misc_feature (53)..(156): NCBI GI NO: 22299829 NR Description: thioredoxin M [Thermosynechococcus elongatus BP-1]
MAISLPTAHVSPPKSCFSFSSSSKLSSHSSLRFGIRHERVNSRSSSRCACAPLTVRAKKQTFNSFDDLLLNSDKPLLVDFYATWCGPCQLMVPILNEVSETLRDKIAVVKIDTEKYPSLANKYQVEALPTFILFKDGKLWDRFEGALQANQLVERIETSLQAKQ

SEQ ID NO: 20535 - DNA, 1267 bp, Zea mays subsp. mays
  misc_feature (1)..(1267): Ceres Seq. ID no. 15176717
atctatttatgacttctctcaaccagcaataacgaaaacgtctctcctctctatctctctttaaaaaaatggacggcgtagcattcttcttcaccggagctctcgtagccggcggaatctactggttcctgtgcgtcctgggaccagcggagcgaaaaggaaaacgagcgttggatctatcgggggggtccatctcggccgagaaagttcaagacaagtacaaacagtactggtcgttcttccgccgtccgaaagagatcgaaaccgccgagaaagtcccggacttcgtcgacacgttctacaacctcgtcaccgacatctacgagtggggatggggacagtccttccacttctctccttccatccgaggcaaatcccaccgcgacgccacgcgcctccacgaagagatggccgtagatctgatccaagtgaaaccgggtcaaaagatcctcgatgtcggatgcggcgtcggaggtccgatgcgcgcgattgcatcccactcgcgagccaacgtggtggggatcacgatcaacgagtaccaggtgaagagagcgcgtgaccacaacagaaaagcaggactcgacgcgctctgcgaggtcgtgtgtggtaacttcctccagatacccttcgatgataacaccttcgacggcgcgtactctatcgaagcgacgtgtcacgcgccgaagctggaagaagtctacgccgagatctacagggtgttgaaacccggatctttgtacgtatcgtacgagtgggtcaccactgataagttcaacgccgaggatgaggaacacgtggaggtcatccaaggcatcgagaggggtgacgcgcttcctgggcttagggcttactcggatatagccgaggccgccaagaaagttggcttccaagttgtcaaggagaaggatctagcggctccaccggctgagccgtggtggactaggcttaagatgggtcggctcgcttattggaggaaccacattgtggttcagattctgtctgctgttggagttgcgcctaagggaaccgtcgatgttcacgagatgttgtttaagactgctgatttcttgtccagaggaggcgaaactgaaattttctctccgatgcatatgattctctgccggaaacctatgtcttaaacgataatcatttcccgatctcagtttgtttttaattttttttcttatggatttttgattttgcctggtcagtcaatgtactcctttagattttaattttaatttggtattactgttttttcttgcct

SEQ ID NO: 20536 - protein, 356 aa, Zea mays subsp. mays
  peptide (1)..(356): Ceres Seq. ID no. 15176718
  misc_feature (82)..(281): Pfam Name: Pfam Description:  ubiE/COQ5 methyltransferase family
  misc_feature (1)..(356): NCBI GI NO: 15217917 NR Description: sterol-C-methyltransferase [Arabidopsis thaliana]
  misc_feature (1)..(356): NCBI GI NO: 22136020 NR Description: 24-sterol C-methyltransferase
  misc_feature (1)..(356): NCBI GI NO: 1061040 NR Description: sterol-C-methyltransferase [Arabidopsis thaliana]
  misc_feature (1)..(356): NCBI GI NO: 23397216 NR Description: putative sterol-C-methyltransferase
  misc_feature (1)..(356): NCBI GI NO: 21555010 NR Description: sterol-C-methyltransferase [Arabidopsis thaliana]
  misc_feature (1)..(354): NCBI GI NO: 15222955 NR Description: S-adenosyl-methionine -sterol-C-methyltransferase -related
  misc_feature (1)..(354): NCBI GI NO: 2246456 NR Description: S-adenosyl-methionine-sterol-C-methyltransferase
  misc_feature (1)..(354): NCBI GI NO: 7443718 NR Description: probable sterol 24-C-methyltransferase (EC2
  misc_feature (9)..(354): NCBI GI NO: 7443717 NR Description: probable sterol 24-C-methyltransferase (EC2
  misc_feature (1)..(355): NCBI GI NO: 3560533 NR Description: 24-methylene lophenol C24(1)methyltransferase
MDGVAFFFTGALVAGGIYWFLCVLGPAERKGKRALDLSGGSISAEKVQDKYKQYWSFFRRPKEIETAEKVPDFVDTFYNLVTDIYEWGWGQSFHFSPSIRGKSHRDATRLHEEMAVDLIQVKPGQKILDVGCGVGGPMRAIASHSRANVVGITINEYQVKRARDHNRKAGLDALCEVVCGNFLQIPFDDNTFDGAYSIEATCHAPKLEEVYAEIYRVLKPGSLYVSYEWVTTDKFNAEDEEHVEVIQGIERGDALPGLRAYSDIAEAAKKVGFQVVKEKDLAAPPAEPWWTRLKMGRLAYWRNHIVVQILSAVGVAPKGTVDVHEMLFKTADFLSRGGETEIFSPMHMILCRKPMS

SEQ ID NO: 20537 - protein, 243 aa, Zea mays subsp. mays
  peptide (1)..(243): Ceres Seq. ID no. 15176719
  misc_feature (1)..(168): Pfam Name: Pfam Description:  ubiE/COQ5 methyltransferase family
  misc_feature (1)..(243): NCBI GI NO: 15217917 NR Description: sterol-C-methyltransferase [Arabidopsis thaliana]
  misc_feature (1)..(243): NCBI GI NO: 22136020 NR Description: 24-sterol C-methyltransferase
  misc_feature (1)..(243): NCBI GI NO: 1061040 NR Description: sterol-C-methyltransferase [Arabidopsis thaliana]
  misc_feature (1)..(243): NCBI GI NO: 23397216 NR Description: putative sterol-C-methyltransferase
  misc_feature (1)..(243): NCBI GI NO: 21555010 NR Description: sterol-C-methyltransferase [Arabidopsis thaliana]
  misc_feature (1)..(241): NCBI GI NO: 15222955 NR Description: S-adenosyl-methionine -sterol-C-methyltransferase -related
  misc_feature (1)..(241): NCBI GI NO: 2246456 NR Description: S-adenosyl-methionine-sterol-C-methyltransferase
  misc_feature (1)..(241): NCBI GI NO: 7443718 NR Description: probable sterol 24-C-methyltransferase (EC2
  misc_feature (1)..(241): NCBI GI NO: 7443717 NR Description: probable sterol 24-C-methyltransferase (EC2
  misc_feature (1)..(242): NCBI GI NO: 3560533 NR Description: 24-methylene lophenol C24(1)methyltransferase
MAVDLIQVKPGQKILDVGCGVGGPMRAIASHSRANVVGITINEYQVKRARDHNRKAGLDALCEVVCGNFLQIPFDDNTFDGAYSIEATCHAPKLEEVYAEIYRVLKPGSLYVSYEWVTTDKFNAEDEEHVEVIQGIERGDALPGLRAYSDIAEAAKKVGFQVVKEKDLAAPPAEPWWTRLKMGRLAYWRNHIVVQILSAVGVAPKGTVDVHEMLFKTADFLSRGGETEIFSPMHMILCRKPMS

SEQ ID NO: 20538 - protein, 219 aa, Zea mays subsp. mays
  peptide (1)..(219): Ceres Seq. ID no. 15176720
  misc_feature (1)..(144): Pfam Name: Pfam Description:  ubiE/COQ5 methyltransferase family
  misc_feature (1)..(219): NCBI GI NO: 15217917 NR Description: sterol-C-methyltransferase [Arabidopsis thaliana]
  misc_feature (1)..(219): NCBI GI NO: 22136020 NR Description: 24-sterol C-methyltransferase
  misc_feature (1)..(219): NCBI GI NO: 1061040 NR Description: sterol-C-methyltransferase [Arabidopsis thaliana]
  misc_feature (1)..(219): NCBI GI NO: 23397216 NR Description: putative sterol-C-methyltransferase
  misc_feature (1)..(219): NCBI GI NO: 21555010 NR Description: sterol-C-methyltransferase [Arabidopsis thaliana]
  misc_feature (1)..(217): NCBI GI NO: 15222955 NR Description: S-adenosyl-methionine -sterol-C-methyltransferase -related
  misc_feature (1)..(217): NCBI GI NO: 2246456 NR Description: S-adenosyl-methionine-sterol-C-methyltransferase
  misc_feature (1)..(217): NCBI GI NO: 7443718 NR Description: probable sterol 24-C-methyltransferase (EC2
  misc_feature (1)..(217): NCBI GI NO: 7443717 NR Description: probable sterol 24-C-methyltransferase (EC2
  misc_feature (1)..(218): NCBI GI NO: 3560533 NR Description: 24-methylene lophenol C24(1)methyltransferase
MRAIASHSRANVVGITINEYQVKRARDHNRKAGLDALCEVVCGNFLQIPFDDNTFDGAYSIEATCHAPKLEEVYAEIYRVLKPGSLYVSYEWVTTDKFNAEDEEHVEVIQGIERGDALPGLRAYSDIAEAAKKVGFQVVKEKDLAAPPAEPWWTRLKMGRLAYWRNHIVVQILSAVGVAPKGTVDVHEMLFKTADFLSRGGETEIFSPMHMILCRKPMS

SEQ ID NO: 20539 - DNA, 726 bp, Zea mays subsp. mays
  misc_feature (1)..(726): Ceres Seq. ID no. 15179506
acttttctctcccattcttttacaactcacgttgcacagcctttttctctatatattacttgacataaactactattcacaacacaaacacacacataaccatggcctcttcttcacaagctttccttttgctcacattgtctatggttttagttcatttctctttagctcaatctcccatgatggctccttctggctccatgtccatgccgccaatgcctagcggcggctctccaatgccaatgatgactccaccacctatgccaatgatgactccaccacctatggctatggctccaccacctatgcctatgactccaccaccaatgcccatggctccgatgccaatgactccatcttcaagtccaatgagcccaccaactactatggccccaagtccagaaacagtccctgatatggcttcgccaccgatgatgccaggaatggattcttctccttctccgggacccatgccaccggcaatggcctctccagattccggagcattcaatgtaagaaacgacgtcgtagcaatttcgttccttgttgcagctcatttgctcctagtttgagattattattaaattggccagcgtcgtgtttgtgtaatttactttcatttttttctcgagccattaattttcatgttttatcatatatttgggtttgtgtttgatatggtacgattcagacatttgtttgcttaataagtttatcgttgactct

SEQ ID NO: 20540 - protein, 156 aa, Zea mays subsp. mays
  peptide (1)..(156): Ceres Seq. ID no. 15179507
  misc_feature (20)..(126): Pfam Name: Pfam Description:  Formin Homology 2 Domain
  misc_feature (1)..(156): NCBI GI NO: 30683885 NR Description: arabinogalactan-protein family
  misc_feature (1)..(156): NCBI GI NO: 21592593 NR Description: unknown [Arabidopsis thaliana]
  misc_feature (1)..(137): NCBI GI NO: 7488174 NR Description: probable resistance protein - Arabidopsis thaliana
  misc_feature (26)..(156): NCBI GI NO: 15866589 NR Description: hypothetical protein [Capsella rubella]
  misc_feature (1)..(131): NCBI GI NO: 15866589 NR Description: hypothetical protein [Capsella rubella]
  misc_feature (5)..(133): NCBI GI NO: 15226024 NR Description: arabinogalactan-protein (AGP9)
  misc_feature (5)..(133): NCBI GI NO: 13265426 NR Description: At2g14890 [Arabidopsis thaliana]
  misc_feature (25)..(148): NCBI GI NO: 23577891 NR Description: unknown
  misc_feature (1)..(131): NCBI GI NO: 7441828 NR Description: extensin-like cell wall protein
  misc_feature (26)..(131): NCBI GI NO: 6523547 NR Description: hydroxyproline-rich glycoprotein DZ-HRGP
MASSSQAFLLLTLSMVLVHFSLAQSPMMAPSGSMSMPPMPSGGSPMPMMTPPPMPMMTPPPMAMAPPPMPMTPPPMPMAPMPMTPSSSPMSPPTTMAPSPETVPDMASPPMMPGMDSSPSPGPMPPAMASPDSGAFNVRNDVVAISFLVAAHLLLV

SEQ ID NO: 20541 - protein, 142 aa, Zea mays subsp. mays
  peptide (1)..(142): Ceres Seq. ID no. 15179508
  misc_feature (6)..(112): Pfam Name: Pfam Description:  Formin Homology 2 Domain
  misc_feature (1)..(142): NCBI GI NO: 30683885 NR Description: arabinogalactan-protein family
  misc_feature (1)..(142): NCBI GI NO: 21592593 NR Description: unknown [Arabidopsis thaliana]
  misc_feature (1)..(123): NCBI GI NO: 7488174 NR Description: probable resistance protein - Arabidopsis thaliana
  misc_feature (12)..(142): NCBI GI NO: 15866589 NR Description: hypothetical protein [Capsella rubella]
  misc_feature (1)..(117): NCBI GI NO: 15866589 NR Description: hypothetical protein [Capsella rubella]
  misc_feature (1)..(119): NCBI GI NO: 15226024 NR Description: arabinogalactan-protein (AGP9)
  misc_feature (1)..(119): NCBI GI NO: 13265426 NR Description: At2g14890 [Arabidopsis thaliana]
  misc_feature (11)..(134): NCBI GI NO: 23577891 NR Description: unknown
  misc_feature (1)..(117): NCBI GI NO: 7441828 NR Description: extensin-like cell wall protein
  misc_feature (12)..(117): NCBI GI NO: 6523547 NR Description: hydroxyproline-rich glycoprotein DZ-HRGP
MVLVHFSLAQSPMMAPSGSMSMPPMPSGGSPMPMMTPPPMPMMTPPPMAMAPPPMPMTPPPMPMAPMPMTPSSSPMSPPTTMAPSPETVPDMASPPMMPGMDSSPSPGPMPPAMASPDSGAFNVRNDVVAISFLVAAHLLLV

SEQ ID NO: 20542 - protein, 130 aa, Zea mays subsp. mays
  peptide (1)..(130): Ceres Seq. ID no. 15179509
  misc_feature (1)..(100): Pfam Name: Pfam Description:  Formin Homology 2 Domain
  misc_feature (1)..(130): NCBI GI NO: 30683885 NR Description: arabinogalactan-protein family
  misc_feature (1)..(130): NCBI GI NO: 21592593 NR Description: unknown [Arabidopsis thaliana]
  misc_feature (1)..(111): NCBI GI NO: 7488174 NR Description: probable resistance protein - Arabidopsis thaliana
  misc_feature (1)..(130): NCBI GI NO: 15866589 NR Description: hypothetical protein [Capsella rubella]
  misc_feature (1)..(105): NCBI GI NO: 15866589 NR Description: hypothetical protein [Capsella rubella]
  misc_feature (1)..(107): NCBI GI NO: 15226024 NR Description: arabinogalactan-protein (AGP9)
  misc_feature (1)..(107): NCBI GI NO: 13265426 NR Description: At2g14890 [Arabidopsis thaliana]
  misc_feature (1)..(122): NCBI GI NO: 23577891 NR Description: unknown
  misc_feature (1)..(105): NCBI GI NO: 7441828 NR Description: extensin-like cell wall protein
  misc_feature (1)..(105): NCBI GI NO: 6523547 NR Description: hydroxyproline-rich glycoprotein DZ-HRGP
MMAPSGSMSMPPMPSGGSPMPMMTPPPMPMMTPPPMAMAPPPMPMTPPPMPMAPMPMTPSSSPMSPPTTMAPSPETVPDMASPPMMPGMDSSPSPGPMPPAMASPDSGAFNVRNDVVAISFLVAAHLLLV

SEQ ID NO: 20543 - DNA, 1023 bp, Zea mays subsp. mays
  misc_feature (1)..(1023): Ceres Seq. ID no. 15178104
ctctcggaaccctttggctcgatttgattacctctcttcactaaggtttaaaggatgaagcttgatactagtgggttcgagacatccatgcctacgattggattcgggtcgagcaacgatatgcttgatgggttttctactgtgccctcctttgaccttccccgcactactgatttcgatgggtttcagaaagaagcagtacagatggtgaagccagcgaaaggaacaacaacacttgctttcatcttcaaagaaggtgtcatggtcgctgctgattctcgtgctagcatgggtggatatatctcgtcacaatctgtgaagaagattattgaaatcaatccttatatgcttggtacaatggctggaggagcggctgattgtcaattctggcacagaaaccttggaatcaagtgccgtctacatgagctggcaaacaagaggagaatatctgtttccggagcttcaaaacttctagcaaacatgctctactcataccgtggaatgggactttccgtcggcacaatgattgctggatgggacgaaactggtcctggactatactatgtggacaacgaaggaggaaggctcaagggagacaggttttcagtcggttctggttcaccatacgcttatggtgtacttgacagcgggtacaaattcgatatgtcagttgaagaagcatctgagttagcaaggagatcaatctaccatgcgacattccgtgatggagctagtggtggagttgctagcgtgtaccacgtgggtcctaatggatggaagaaactgtcgggagatgatgttggggagctacactatcactactaccctgtgccaccatccactgccgaacaagtcatggaggaagcggctgccgagtaataacattcactctctagcttaaactttgtttctcactataagattctccttttattctgcaactgcacactctttattttgttcaagcagctctgtttcaaccatgaaattaggaccgatcaaatagaaccgatctatttcaaa

SEQ ID NO: 20544 - protein, 274 aa, Zea mays subsp. mays
  peptide (1)..(274): Ceres Seq. ID no. 15178105
  misc_feature (54)..(236): Pfam Name: Pfam Description:  Proteasome A-type and B-type
  misc_feature (1)..(272): NCBI GI NO: 15231544 NR Description: 20S proteasome beta subunit E, putative
  misc_feature (1)..(274): NCBI GI NO: 15222152 NR Description: 20S proteasome beta subunit E1 (PBE1)
  misc_feature (1)..(274): NCBI GI NO: 15292875 NR Description: putative proteasome epsilon chain precursor
  misc_feature (1)..(270): NCBI GI NO: 3914430 NR Description: Proteasome subunit beta type 5 precursor
  misc_feature (1)..(273): NCBI GI NO: 8671510 NR Description: beta 5 subunit of 20S proteasome
  misc_feature (106)..(271): NCBI GI NO: 3980264 NR Description: 20S proteasome beta subunit [Cicer arietinum]
  misc_feature (1)..(74): NCBI GI NO: 3980264 NR Description: 20S proteasome beta subunit [Cicer arietinum]
  misc_feature (74)..(273): NCBI GI NO: 16588840 NR Description: putative 20S proteasome beta subunit 5
  misc_feature (77)..(250): NCBI GI NO: 14594931 NR Description: putative beta5 proteasome subunit
  misc_feature (21)..(256): NCBI GI NO: 20302762 NR Description: unknown [Branchiostoma floridae]
MKLDTSGFETSMPTIGFGSSNDMLDGFSTVPSFDLPRTTDFDGFQKEAVQMVKPAKGTTTLAFIFKEGVMVAADSRASMGGYISSQSVKKIIEINPYMLGTMAGGAADCQFWHRNLGIKCRLHELANKRRISVSGASKLLANMLYSYRGMGLSVGTMIAGWDETGPGLYYVDNEGGRLKGDRFSVGSGSPYAYGVLDSGYKFDMSVEEASELARRSIYHATFRDGASGGVASVYHVGPNGWKKLSGDDVGELHYHYYPVPPSTAEQVMEEAAAE

SEQ ID NO: 20545 - protein, 263 aa, Zea mays subsp. mays
  peptide (1)..(263): Ceres Seq. ID no. 15178106
  misc_feature (43)..(225): Pfam Name: Pfam Description:  Proteasome A-type and B-type
  misc_feature (1)..(261): NCBI GI NO: 15231544 NR Description: 20S proteasome beta subunit E, putative
  misc_feature (1)..(263): NCBI GI NO: 15222152 NR Description: 20S proteasome beta subunit E1 (PBE1)
  misc_feature (1)..(263): NCBI GI NO: 15292875 NR Description: putative proteasome epsilon chain precursor
  misc_feature (1)..(259): NCBI GI NO: 3914430 NR Description: Proteasome subunit beta type 5 precursor
  misc_feature (1)..(262): NCBI GI NO: 8671510 NR Description: beta 5 subunit of 20S proteasome
  misc_feature (95)..(260): NCBI GI NO: 3980264 NR Description: 20S proteasome beta subunit [Cicer arietinum]
  misc_feature (1)..(63): NCBI GI NO: 3980264 NR Description: 20S proteasome beta subunit [Cicer arietinum]
  misc_feature (63)..(262): NCBI GI NO: 16588840 NR Description: putative 20S proteasome beta subunit 5
  misc_feature (66)..(239): NCBI GI NO: 14594931 NR Description: putative beta5 proteasome subunit
  misc_feature (10)..(245): NCBI GI NO: 20302762 NR Description: unknown [Branchiostoma floridae]
MPTIGFGSSNDMLDGFSTVPSFDLPRTTDFDGFQKEAVQMVKPAKGTTTLAFIFKEGVMVAADSRASMGGYISSQSVKKIIEINPYMLGTMAGGAADCQFWHRNLGIKCRLHELANKRRISVSGASKLLANMLYSYRGMGLSVGTMIAGWDETGPGLYYVDNEGGRLKGDRFSVGSGSPYAYGVLDSGYKFDMSVEEASELARRSIYHATFRDGASGGVASVYHVGPNGWKKLSGDDVGELHYHYYPVPPSTAEQVMEEAAAE

SEQ ID NO: 20546 - protein, 252 aa, Zea mays subsp. mays
  peptide (1)..(252): Ceres Seq. ID no. 15178107
  misc_feature (32)..(214): Pfam Name: Pfam Description:  Proteasome A-type and B-type
  misc_feature (1)..(250): NCBI GI NO: 15231544 NR Description: 20S proteasome beta subunit E, putative
  misc_feature (1)..(252): NCBI GI NO: 15222152 NR Description: 20S proteasome beta subunit E1 (PBE1)
  misc_feature (1)..(252): NCBI GI NO: 15292875 NR Description: putative proteasome epsilon chain precursor
  misc_feature (1)..(248): NCBI GI NO: 3914430 NR Description: Proteasome subunit beta type 5 precursor
  misc_feature (1)..(251): NCBI GI NO: 8671510 NR Description: beta 5 subunit of 20S proteasome
  misc_feature (84)..(249): NCBI GI NO: 3980264 NR Description: 20S proteasome beta subunit [Cicer arietinum]
  misc_feature (1)..(52): NCBI GI NO: 3980264 NR Description: 20S proteasome beta subunit [Cicer arietinum]
  misc_feature (52)..(251): NCBI GI NO: 16588840 NR Description: putative 20S proteasome beta subunit 5
  misc_feature (55)..(228): NCBI GI NO: 14594931 NR Description: putative beta5 proteasome subunit
  misc_feature (1)..(234): NCBI GI NO: 20302762 NR Description: unknown [Branchiostoma floridae]
MLDGFSTVPSFDLPRTTDFDGFQKEAVQMVKPAKGTTTLAFIFKEGVMVAADSRASMGGYISSQSVKKIIEINPYMLGTMAGGAADCQFWHRNLGIKCRLHELANKRRISVSGASKLLANMLYSYRGMGLSVGTMIAGWDETGPGLYYVDNEGGRLKGDRFSVGSGSPYAYGVLDSGYKFDMSVEEASELARRSIYHATFRDGASGGVASVYHVGPNGWKKLSGDDVGELHYHYYPVPPSTAEQVMEEAAAE

SEQ ID NO: 20547 - DNA, 727 bp, Zea mays subsp. mays
  misc_feature (1)..(727): Ceres Seq. ID no. 15178857
accattctataataatataaaaattagtaagagagttgtttccagagatttctctccattttgcgtgacacgatggcgcttcgtgctactcaatcgactggccgtatcgcggcggcggcgctacggcgtgtcgctagacctttctcaacggacgcggtggtggaatcggattacaagcgtggggagatcggtaaggtctcgggaatcccagaggagcatctttcccgcaaggtgataatatactcaccagctagaactgcgactcagcaaggatctggcaaacttggcaaatggaagatcaacttcctctccaccttaaagtgggagaatccattgatgggatggacttctacaggtgacccttatgccaacgttggtgactctgctctttcttttgattctgaggatgctgccaagtcctttgctgagcgtcatggctgggattatactgtcaagaagcccaaaacgccattattgaagcctaagtcttactcggacaacttcaagtggaaaggcaatcctcagcctgagaagtgatcttccatcctgatcttcttcttccttcatttctggagagaaacctcatttgatgaataaataaaaagctctcgtggtttacttcttattttagcatctgtgagctttttctctgaactttattatccatggttggattctttttgtatgtttttcttaccataacaataaatatgatgatggtgataac

SEQ ID NO: 20548 - protein, 154 aa, Zea mays subsp. mays
  peptide (1)..(154): Ceres Seq. ID no. 15178858
  misc_feature (52)..(153): Pfam Name: Pfam Description:  ETC complex I subunit conserved region
  misc_feature (1)..(153): NCBI GI NO: 21555571 NR Description: unknown [Arabidopsis thaliana]
  misc_feature (1)..(153): NCBI GI NO: 15240784 NR Description: expressed protein [Arabidopsis thaliana]
  misc_feature (4)..(136): NCBI GI NO: 34901114 NR Description: NADH-ubiquinone oxidoreductase 18 kDa subunit
  misc_feature (1)..(146): NCBI GI NO: 4505369 NR Description: NADH dehydrogenase
  misc_feature (1)..(146): NCBI GI NO: 13528960 NR Description: NADH dehydrogenase
  misc_feature (1)..(146): NCBI GI NO: 6754814 NR Description: NADH dehydrogenase
  misc_feature (1)..(146): NCBI GI NO: 14919381 NR Description: NADH dehydrogenase (ubiquinone) Fe-S protein 4
  misc_feature (2)..(146): NCBI GI NO: 28461229 NR Description: NADH dehydrogenase
  misc_feature (38)..(146): NCBI GI NO: 31199457 NR Description: ENSANGP00000021474 [Anopheles gambiae]
  misc_feature (26)..(146): NCBI GI NO: 17511145 NR Description: NADH dehydrogenase
MALRATQSTGRIAAAALRRVARPFSTDAVVESDYKRGEIGKVSGIPEEHLSRKVIIYSPARTATQQGSGKLGKWKINFLSTLKWENPLMGWTSTGDPYANVGDSALSFDSEDAAKSFAERHGWDYTVKKPKTPLLKPKSYSDNFKWKGNPQPEK

SEQ ID NO: 20549 - protein, 77 aa, Zea mays subsp. mays
  peptide (1)..(77): Ceres Seq. ID no. 15178859
PFYNNIKISKRVVSRDFSPFCVTRWRFVLLNRLAVSRRRRYGVSLDLSQRTRWWNRITSVGRSVRSRESQRSIFPAR

SEQ ID NO: 20550 - DNA, 1246 bp, Zea mays subsp. mays
  misc_feature (1)..(1246): Ceres Seq. ID no. 15180040
atatctcttatcccctccttctctcccaatagtctcacagtcccctctagaaatatgtcttcagcttattgttcctccgccgtggcggtttccaccgcagccaccgtttcctccgccactacctttaacccactattctccttccattcgaatttcaaactcttctatcgcatcacaccaaaacccttcaaactcgtcgccaaatgccctactcctcctctcttcctccatctaaatacccatcgccaccgcctcttctgcgccgccgaagacgaaatcccgccgtcatccgaagaagacgaggaagaaaacgaagaagacgaagacgcagatgagacacagacgacgcaagctagcgttgaggaagggaggctgtacgttgggaacttgccttacacaatcactgcctctgagctctcccagcttttcggagaagctggaaacgtcatcgatgttcagattgtgtacgataaagtcactgacagaagcagagggtttggattcgtaaccatgggaaccatcgaagaagctaaagaagcgattcagatgttcaacagctctcaaatcggtggaaggacggtgaaagtgaacttcccggaggtgcctagaggcggagagagggaagtgatgaggactaagattcgtgatagtaacaagagttatgttgacagtcctcataagatctatgcggggaaccttggttggaatctaacgtcgcaaggtcttaaagatgcgtttgggaatcagcctggggtgcttggtgctaaagttatctacgaaagaaacagtgggaggtctagggggtttggtttcgtctcttttgagtcggaaggagagcttcagtctgctctgagtgctatgaatggtgtggtaagggtcttggtttggtgatttgggttgggtttgagactgactagttgttggtttcggtttatttcttaggaagtggaaggacgagcgctgcgtctaaacttggcttcggagagagctactaccgagtctcgttcttctgtagcaggaggagagactgaagagggcagtctagagagcagtgaggtggtttcgaacattagtacatgaagcagcagaagcacagtagattctactgagggctagcaaaatgaacactgttatgagttatgactatgttgttgtactctactacggctaaagaaaaaatatataaatatatgagataaacgacaggagatttagctgtaatcttattaaaaaatgcttgttccat

SEQ ID NO: 20551 - protein, 296 aa, Zea mays subsp. mays
  peptide (1)..(296): Ceres Seq. ID no. 15180041
  misc_feature (125)..(196): Pfam Name: a.k.a. RRM, RBD, or RNP domain Pfam Description: RNA recognition motif.
  misc_feature (19)..(290): NCBI GI NO: 15231200 NR Description: 33 kDa ribonucleoprotein, chloroplast
  misc_feature (19)..(290): NCBI GI NO: 17064758 NR Description: ubiquitin / ribosomal protein CEP52
  misc_feature (27)..(290): NCBI GI NO: 681912 NR Description: cp33 [Arabidopsis thaliana]
  misc_feature (90)..(296): NCBI GI NO: 100376 NR Description: ribonucleoprotein precursor - common tobacco
  misc_feature (19)..(290): NCBI GI NO: 133249 NR Description: 33 kDa ribonucleoprotein, chloroplast precursor
  misc_feature (25)..(290): NCBI GI NO: 7446342 NR Description: RNA-binding protein precursor, 33K - wood tobacco
  misc_feature (89)..(290): NCBI GI NO: 7446339 NR Description: probable RNA-binding protein cp33 precursor -barley
  misc_feature (90)..(290): NCBI GI NO: 34394882 NR Description: putative RNA-binding protein
  misc_feature (89)..(289): NCBI GI NO: 7446356 NR Description: Ps16 protein - wheat
  misc_feature (107)..(221): NCBI GI NO: 12230585 NR Description: 29 kDa ribonucleoprotein B, chloroplast precursor
ISLIPSFSPNSLTVPSRNMSSAYCSSAVAVSTAATVSSATTFNPLFSFHSNFKLFYRITPKPFKLVAKCPTPPLFLHLNTHRHRLFCAAEDEIPPSSEEDEEENEEDEDADETQTTQASVEEGRLYVGNLPYTITASELSQLFGEAGNVIDVQIVYDKVTDRSRGFGFVTMGTIEEAKEAIQMFNSSQIGGRTVKVNFPEVPRGGEREVMRTKIRDSNKSYVDSPHKIYAGNLGWNLTSQGLKDAFGNQPGVLGAKVIYERNSGRSRGFGFVSFESEGELQSALSAMNGVVRVLVW

SEQ ID NO: 20552 - protein, 278 aa, Zea mays subsp. mays
  peptide (1)..(278): Ceres Seq. ID no. 15180042
  misc_feature (107)..(178): Pfam Name: a.k.a. RRM, RBD, or RNP domain Pfam Description: RNA recognition motif.
  misc_feature (1)..(272): NCBI GI NO: 15231200 NR Description: 33 kDa ribonucleoprotein, chloroplast
  misc_feature (1)..(272): NCBI GI NO: 17064758 NR Description: ubiquitin / ribosomal protein CEP52
  misc_feature (9)..(272): NCBI GI NO: 681912 NR Description: cp33 [Arabidopsis thaliana]
  misc_feature (72)..(278): NCBI GI NO: 100376 NR Description: ribonucleoprotein precursor - common tobacco
  misc_feature (1)..(272): NCBI GI NO: 133249 NR Description: 33 kDa ribonucleoprotein, chloroplast precursor
  misc_feature (7)..(272): NCBI GI NO: 7446342 NR Description: RNA-binding protein precursor, 33K - wood tobacco
  misc_feature (71)..(272): NCBI GI NO: 7446339 NR Description: probable RNA-binding protein cp33 precursor -barley
  misc_feature (72)..(272): NCBI GI NO: 34394882 NR Description: putative RNA-binding protein
  misc_feature (71)..(271): NCBI GI NO: 7446356 NR Description: Ps16 protein - wheat
  misc_feature (89)..(203): NCBI GI NO: 12230585 NR Description: 29 kDa ribonucleoprotein B, chloroplast precursor
MSSAYCSSAVAVSTAATVSSATTFNPLFSFHSNFKLFYRITPKPFKLVAKCPTPPLFLHLNTHRHRLFCAAEDEIPPSSEEDEEENEEDEDADETQTTQASVEEGRLYVGNLPYTITASELSQLFGEAGNVIDVQIVYDKVTDRSRGFGFVTMGTIEEAKEAIQMFNSSQIGGRTVKVNFPEVPRGGEREVMRTKIRDSNKSYVDSPHKIYAGNLGWNLTSQGLKDAFGNQPGVLGAKVIYERNSGRSRGFGFVSFESEGELQSALSAMNGVVRVLVW

SEQ ID NO: 20553 - DNA, 1308 bp, Zea mays subsp. mays
  misc_feature (1)..(1308): Ceres Seq. ID no. 15180036
ataaggtctttttaccactccttcccttcaccttctctgatttggattttgtcaatctcatcgattcgattcttctcccaatcaaatctctctccaattctctcatcaggaaagttcaaatttttctccatcattctctctctttggtgctttcccctcgttaaaaaaaaaacgaaaatttgagataaagagaaaccttccatggcagcagctatgagcgagaaggaagctatggttgatcctttcctggtcgaagctcttcagaaccctcgtcatcgtctcacaattctgcgtatggagctggacatacaaaagttctttcaaagcccagagcagcagcaatacgagttccctccttacccaacctcctacctccgcctcgctgctcaccgcgtggcccaccactacggcctcttcaccactgccttagacggtgctgctctagacggctccgggaacaggatcctcgtcaccaagaccggtgagagcagctacccttacgtctgtttgtctgagattcccgtgaagcagcctgaggctaacgggaggaggcctcagggcttcaagctcgccatcaaggcgaggcctaacggagggtctggtggggcgggtggtgggtcgggtgtggagaggaatctgttgaggagcgttgaggagaggaaagaggagtatgagaaggccagggcgcggatctttaacagtcctaatagttcagactctgaagactcttcaactcgagctcctcctcctcctgttcagcagacaaaacataacaacagtagactcccagctagacacgaggccgagagtgttgttgatgaggagaggaacggtgttggaaggacttcacgggtcgccattattagagatagagagaaagatcgttatgatcctgattatgaccggaacaggtacgtgagggttactccaccggtacaaaacttcagcccgatgccgccgattcatcttcctttccatgacggagttttcccacagatgccaagaactcaacccagtataagctatggacatcccttgaaccctgctatgacttctactaacgctcctgcttatacagagtggcctagtgtcacagtgagttatgcacagacattgcatgcttcagacccaaatcatttcaggcaccagaatccctgacctttggtcctgatcaaaccatgtctgtatgcttttatattaggatgtagtcttagtattttttcttctgctcttgttgaaaacattggccgcacaagacatttttactctgttgttacaaattatattaacaatatcaagcttttgcat

SEQ ID NO: 20554 - protein, 318 aa, Zea mays subsp. mays
  peptide (1)..(318): Ceres Seq. ID no. 15180037
  misc_feature (3)..(318): NCBI GI NO: 18414788 NR Description: expressed protein [Arabidopsis thaliana]
  misc_feature (3)..(314): NCBI GI NO: 10178049 NR Description: gb|AAF19572
  misc_feature (3)..(315): NCBI GI NO: 30681485 NR Description: expressed protein [Arabidopsis thaliana]
  misc_feature (3)..(315): NCBI GI NO: 18398995 NR Description: expressed protein [Arabidopsis thaliana]
  misc_feature (3)..(315): NCBI GI NO: 21592735 NR Description: unknown [Arabidopsis thaliana]
  misc_feature (1)..(315): NCBI GI NO: 21592404 NR Description: unknown [Arabidopsis thaliana]
  misc_feature (12)..(302): NCBI GI NO: 15228989 NR Description: expressed protein [Arabidopsis thaliana]
  misc_feature (1)..(315): NCBI GI NO: 18405560 NR Description: expressed protein [Arabidopsis thaliana]
  misc_feature (1)..(238): NCBI GI NO: 7487238 NR Description: hypothetical protein At2g40960
  misc_feature (1)..(301): NCBI GI NO: 29367411 NR Description: unknown [Oryza sativa (japonica cultivar-group)]
MAAAMSEKEAMVDPFLVEALQNPRHRLTILRMELDIQKFFQSPEQQQYEFPPYPTSYLRLAAHRVAHHYGLFTTALDGAALDGSGNRILVTKTGESSYPYVCLSEIPVKQPEANGRRPQGFKLAIKARPNGGSGGAGGGSGVERNLLRSVEERKEEYEKARARIFNSPNSSDSEDSSTRAPPPPVQQTKHNNSRLPARHEAESVVDEERNGVGRTSRVAIIRDREKDRYDPDYDRNRYVRVTPPVQNFSPMPPIHLPFHDGVFPQMPRTQPSISYGHPLNPAMTSTNAPAYTEWPSVTVSYAQTLHASDPNHFRHQNP

SEQ ID NO: 20555 - protein, 314 aa, Zea mays subsp. mays
  peptide (1)..(314): Ceres Seq. ID no. 15180038
  misc_feature (1)..(314): NCBI GI NO: 18414788 NR Description: expressed protein [Arabidopsis thaliana]
  misc_feature (1)..(310): NCBI GI NO: 10178049 NR Description: gb|AAF19572
  misc_feature (1)..(311): NCBI GI NO: 30681485 NR Description: expressed protein [Arabidopsis thaliana]
  misc_feature (1)..(311): NCBI GI NO: 18398995 NR Description: expressed protein [Arabidopsis thaliana]
  misc_feature (1)..(311): NCBI GI NO: 21592735 NR Description: unknown [Arabidopsis thaliana]
  misc_feature (1)..(311): NCBI GI NO: 21592404 NR Description: unknown [Arabidopsis thaliana]
  misc_feature (8)..(298): NCBI GI NO: 15228989 NR Description: expressed protein [Arabidopsis thaliana]
  misc_feature (1)..(311): NCBI GI NO: 18405560 NR Description: expressed protein [Arabidopsis thaliana]
  misc_feature (1)..(234): NCBI GI NO: 7487238 NR Description: hypothetical protein At2g40960
  misc_feature (1)..(297): NCBI GI NO: 29367411 NR Description: unknown [Oryza sativa (japonica cultivar-group)]
MSEKEAMVDPFLVEALQNPRHRLTILRMELDIQKFFQSPEQQQYEFPPYPTSYLRLAAHRVAHHYGLFTTALDGAALDGSGNRILVTKTGESSYPYVCLSEIPVKQPEANGRRPQGFKLAIKARPNGGSGGAGGGSGVERNLLRSVEERKEEYEKARARIFNSPNSSDSEDSSTRAPPPPVQQTKHNNSRLPARHEAESVVDEERNGVGRTSRVAIIRDREKDRYDPDYDRNRYVRVTPPVQNFSPMPPIHLPFHDGVFPQMPRTQPSISYGHPLNPAMTSTNAPAYTEWPSVTVSYAQTLHASDPNHFRHQNP

SEQ ID NO: 20556 - protein, 308 aa, Zea mays subsp. mays
  peptide (1)..(308): Ceres Seq. ID no. 15180039
  misc_feature (1)..(308): NCBI GI NO: 18414788 NR Description: expressed protein [Arabidopsis thaliana]
  misc_feature (1)..(304): NCBI GI NO: 10178049 NR Description: gb|AAF19572
  misc_feature (1)..(305): NCBI GI NO: 30681485 NR Description: expressed protein [Arabidopsis thaliana]
  misc_feature (1)..(305): NCBI GI NO: 18398995 NR Description: expressed protein [Arabidopsis thaliana]
  misc_feature (1)..(305): NCBI GI NO: 21592735 NR Description: unknown [Arabidopsis thaliana]
  misc_feature (1)..(305): NCBI GI NO: 21592404 NR Description: unknown [Arabidopsis thaliana]
  misc_feature (2)..(292): NCBI GI NO: 15228989 NR Description: expressed protein [Arabidopsis thaliana]
  misc_feature (1)..(305): NCBI GI NO: 18405560 NR Description: expressed protein [Arabidopsis thaliana]
  misc_feature (1)..(228): NCBI GI NO: 7487238 NR Description: hypothetical protein At2g40960
  misc_feature (1)..(291): NCBI GI NO: 29367411 NR Description: unknown [Oryza sativa (japonica cultivar-group)]
MVDPFLVEALQNPRHRLTILRMELDIQKFFQSPEQQQYEFPPYPTSYLRLAAHRVAHHYGLFTTALDGAALDGSGNRILVTKTGESSYPYVCLSEIPVKQPEANGRRPQGFKLAIKARPNGGSGGAGGGSGVERNLLRSVEERKEEYEKARARIFNSPNSSDSEDSSTRAPPPPVQQTKHNNSRLPARHEAESVVDEERNGVGRTSRVAIIRDREKDRYDPDYDRNRYVRVTPPVQNFSPMPPIHLPFHDGVFPQMPRTQPSISYGHPLNPAMTSTNAPAYTEWPSVTVSYAQTLHASDPNHFRHQNP

SEQ ID NO: 20557 - DNA, 750 bp, Zea mays subsp. mays
  misc_feature (1)..(750): Ceres Seq. ID no. 15176721
caatacacaagacaacaaacaaggaataatggcgctcgcgctgttagcatctcctccacctccgctcgggggggtccgtcgcagttttggaacaaagtgttcgctcttcgccgcacagcgagccaagcggaacctgatggatctcatctccgaccaggaccgaggtctgagaacccagaaagacgctgtgaagcgagacgcgatcgtgaatgccatcgaggccatggcggtgatcgggggaagctccgtcaccacaggagattcgctgtctgccacgtggagactactgtggacgacggagaaagaacagctgttcatcatagagaaggcggggttgttcggcacgcgcgctggagaggtactgcaggtgatcgatgtgaggaaagggacgctcaacaacgtcatcactttcccgcccgacggcgttttctttgtacgctccgatatcgacatctcttccccgcagagagtcaatttcaaattcactagtgcggtgttgagaggaagcaattgggagatcccactcccaccatttggccagggctggtttgaaaatgtgtatatggatggtgacatcagagtggccaaggacatcagaggggactacttagttgttgatcgtgctccttttaactggaaagaatgatctgttactcaacaatgcatctcctcctttttaatgatctttgttttgtacatcaacactacactactctattctacgactttacatcatctacttttaatgcc

SEQ ID NO: 20558 - protein, 214 aa, Zea mays subsp. mays
  peptide (1)..(214): Ceres Seq. ID no. 15176722
  misc_feature (39)..(206): Pfam Name: Pfam Description:  PAP_fibrillin
  misc_feature (10)..(214): NCBI GI NO: 15236688 NR Description: plastid-lipid associated protein PAP/fibrillinfamily
  misc_feature (15)..(212): NCBI GI NO: 38345467 NR Description: OSJNBa0010H02.5
NTQDNKQGIMALALLASPPPPLGGVRRSFGTKCSLFAAQRAKRNLMDLISDQDRGLRTQKDAVKRDAIVNAIEAMAVIGGSSVTTGDSLSATWRLLWTTEKEQLFIIEKAGLFGTRAGEVLQVIDVRKGTLNNVITFPPDGVFFVRSDIDISSPQRVNFKFTSAVLRGSNWEIPLPPFGQGWFENVYMDGDIRVAKDIRGDYLVVDRAPFNWKE

SEQ ID NO: 20559 - protein, 205 aa, Zea mays subsp. mays
  peptide (1)..(205): Ceres Seq. ID no. 15176723
  misc_feature (30)..(197): Pfam Name: Pfam Description:  PAP_fibrillin
  misc_feature (1)..(205): NCBI GI NO: 15236688 NR Description: plastid-lipid associated protein PAP/fibrillinfamily
  misc_feature (6)..(203): NCBI GI NO: 38345467 NR Description: OSJNBa0010H02.5
MALALLASPPPPLGGVRRSFGTKCSLFAAQRAKRNLMDLISDQDRGLRTQKDAVKRDAIVNAIEAMAVIGGSSVTTGDSLSATWRLLWTTEKEQLFIIEKAGLFGTRAGEVLQVIDVRKGTLNNVITFPPDGVFFVRSDIDISSPQRVNFKFTSAVLRGSNWEIPLPPFGQGWFENVYMDGDIRVAKDIRGDYLVVDRAPFNWKE

SEQ ID NO: 20560 - protein, 169 aa, Zea mays subsp. mays
  peptide (1)..(169): Ceres Seq. ID no. 15176724
  misc_feature (1)..(161): Pfam Name: Pfam Description:  PAP_fibrillin
  misc_feature (1)..(169): NCBI GI NO: 15236688 NR Description: plastid-lipid associated protein PAP/fibrillinfamily
  misc_feature (1)..(167): NCBI GI NO: 38345467 NR Description: OSJNBa0010H02.5
MDLISDQDRGLRTQKDAVKRDAIVNAIEAMAVIGGSSVTTGDSLSATWRLLWTTEKEQLFIIEKAGLFGTRAGEVLQVIDVRKGTLNNVITFPPDGVFFVRSDIDISSPQRVNFKFTSAVLRGSNWEIPLPPFGQGWFENVYMDGDIRVAKDIRGDYLVVDRAPFNWKE

SEQ ID NO: 20561 - DNA, 1053 bp, Zea mays subsp. mays
  misc_feature (1)..(1053): Ceres Seq. ID no. 15179517
acagaaaaaagcttagagctctgctagcagtaatggcgggtttggcaatttcacctcctctgagtcttaccttctcttctcgaactagaaacgctaaacccacttcgtatctatctcgcaatcaaagaaatcttacaaggcgtatagtttctgctcttccaagcccgtatggtgattcactgaaagctggactttcgagtaatgtctctggcaacaaggatcctcgtaacattgctccaagatctggagttatagtggcgaagaaaggaaacccgcctgtaatgccatcagtgatgacccctggaggacctttggacctctcttcagtgttattccgtaaccgcataatcttcatcggacaaccaatcaacgcacaggttgctcagcgtgtcatatctcagcttgtaaccctcgcttctattgatgataaatccgacatcttgatttacttgaattgtcctggaggcagtacttactcggtcttagcaatctatgactgtatgtcttggataaagcctaaagttggaacagtagcgtttggagtagcagcgagtcaaggagcacttcttcttgctggaggtgagaaaggaatgcgctacgcaatgccgaacactcgtgtcatgatccatcaacctcaaactggatgtggaggacatgtggaggacgtgaggagacaggtgaatgaagccatcgaagccagacaaaaaattgacaggatgtatgcagctttcactggacaaactcttgagacagtgcagcaatacactgaaagagatcgtttcctatccgcttctgaggcgcttgaatttgggcttatcgatggtctattggaaacagaatactgaaagcaacatgcaagacattgcatagatgcagcttatagcgatgttcagactttcccatttcatttgaatatgaaaagttgtaaccaatctgaaaacttatgttctatttcggttcagctttttactattcagttatgtaatcaaattctatgcaatgaactctgtagcattactggttgtcagaacaaaatgtgaacaaatttgcaat

SEQ ID NO: 20562 - protein, 280 aa, Zea mays subsp. mays
  peptide (1)..(280): Ceres Seq. ID no. 15179518
  misc_feature (100)..(279): Pfam Name: Pfam Description:  Clp protease
  misc_feature (11)..(280): NCBI GI NO: 18391311 NR Description: ATP-dependent Clp protease proteolytic subunit
  misc_feature (11)..(280): NCBI GI NO: 2827888 NR Description: ATP-dependent Clp protease proteolytic subunit
  misc_feature (11)..(280): NCBI GI NO: 2921510 NR Description: clp-like energy-dependent protease
  misc_feature (9)..(280): NCBI GI NO: 7435703 NR Description: endopeptidase Clp (EC 3
  misc_feature (17)..(257): NCBI GI NO: 9968665 NR Description: putative ATP-dependent clp serine proteaseproteolytic subunit
  misc_feature (11)..(280): NCBI GI NO: 28209486 NR Description: putative clp-like energy-dependent protease
  misc_feature (93)..(276): NCBI GI NO: 16332068 NR Description: ATP-dependent Clp protease proteolytic subunit
  misc_feature (105)..(279): NCBI GI NO: 16080507 NR Description: ATP-dependent Clp protease proteolytic subunit
  misc_feature (91)..(278): NCBI GI NO: 33241265 NR Description: Protease subunit of ATP-dependent Clp protease
  misc_feature (105)..(277): NCBI GI NO: 1705929 NR Description: ATP-dependent Clp protease proteolytic subunit 1
RKKLRALLAVMAGLAISPPLSLTFSSRTRNAKPTSYLSRNQRNLTRRIVSALPSPYGDSLKAGLSSNVSGNKDPRNIAPRSGVIVAKKGNPPVMPSVMTPGGPLDLSSVLFRNRIIFIGQPINAQVAQRVISQLVTLASIDDKSDILIYLNCPGGSTYSVLAIYDCMSWIKPKVGTVAFGVAASQGALLLAGGEKGMRYAMPNTRVMIHQPQTGCGGHVEDVRRQVNEAIEARQKIDRMYAAFTGQTLETVQQYTERDRFLSASEALEFGLIDGLLETEY

SEQ ID NO: 20563 - protein, 270 aa, Zea mays subsp. mays
  peptide (1)..(270): Ceres Seq. ID no. 15179519
  misc_feature (90)..(269): Pfam Name: Pfam Description:  Clp protease
  misc_feature (1)..(270): NCBI GI NO: 18391311 NR Description: ATP-dependent Clp protease proteolytic subunit
  misc_feature (1)..(270): NCBI GI NO: 2827888 NR Description: ATP-dependent Clp protease proteolytic subunit
  misc_feature (1)..(270): NCBI GI NO: 2921510 NR Description: clp-like energy-dependent protease
  misc_feature (1)..(270): NCBI GI NO: 7435703 NR Description: endopeptidase Clp (EC 3
  misc_feature (7)..(247): NCBI GI NO: 9968665 NR Description: putative ATP-dependent clp serine proteaseproteolytic subunit
  misc_feature (1)..(270): NCBI GI NO: 28209486 NR Description: putative clp-like energy-dependent protease
  misc_feature (83)..(266): NCBI GI NO: 16332068 NR Description: ATP-dependent Clp protease proteolytic subunit
  misc_feature (95)..(269): NCBI GI NO: 16080507 NR Description: ATP-dependent Clp protease proteolytic subunit
  misc_feature (81)..(268): NCBI GI NO: 33241265 NR Description: Protease subunit of ATP-dependent Clp protease
  misc_feature (95)..(267): NCBI GI NO: 1705929 NR Description: ATP-dependent Clp protease proteolytic subunit 1
MAGLAISPPLSLTFSSRTRNAKPTSYLSRNQRNLTRRIVSALPSPYGDSLKAGLSSNVSGNKDPRNIAPRSGVIVAKKGNPPVMPSVMTPGGPLDLSSVLFRNRIIFIGQPINAQVAQRVISQLVTLASIDDKSDILIYLNCPGGSTYSVLAIYDCMSWIKPKVGTVAFGVAASQGALLLAGGEKGMRYAMPNTRVMIHQPQTGCGGHVEDVRRQVNEAIEARQKIDRMYAAFTGQTLETVQQYTERDRFLSASEALEFGLIDGLLETEY

SEQ ID NO: 20564 - protein, 187 aa, Zea mays subsp. mays
  peptide (1)..(187): Ceres Seq. ID no. 15179520
  misc_feature (7)..(186): Pfam Name: Pfam Description:  Clp protease
  misc_feature (1)..(187): NCBI GI NO: 18391311 NR Description: ATP-dependent Clp protease proteolytic subunit
  misc_feature (1)..(187): NCBI GI NO: 2827888 NR Description: ATP-dependent Clp protease proteolytic subunit
  misc_feature (1)..(187): NCBI GI NO: 2921510 NR Description: clp-like energy-dependent protease
  misc_feature (1)..(187): NCBI GI NO: 7435703 NR Description: endopeptidase Clp (EC 3
  misc_feature (1)..(164): NCBI GI NO: 9968665 NR Description: putative ATP-dependent clp serine proteaseproteolytic subunit
  misc_feature (1)..(187): NCBI GI NO: 28209486 NR Description: putative clp-like energy-dependent protease
  misc_feature (1)..(183): NCBI GI NO: 16332068 NR Description: ATP-dependent Clp protease proteolytic subunit
  misc_feature (12)..(186): NCBI GI NO: 16080507 NR Description: ATP-dependent Clp protease proteolytic subunit
  misc_feature (1)..(185): NCBI GI NO: 33241265 NR Description: Protease subunit of ATP-dependent Clp protease
  misc_feature (12)..(184): NCBI GI NO: 1705929 NR Description: ATP-dependent Clp protease proteolytic subunit 1
MPSVMTPGGPLDLSSVLFRNRIIFIGQPINAQVAQRVISQLVTLASIDDKSDILIYLNCPGGSTYSVLAIYDCMSWIKPKVGTVAFGVAASQGALLLAGGEKGMRYAMPNTRVMIHQPQTGCGGHVEDVRRQVNEAIEARQKIDRMYAAFTGQTLETVQQYTERDRFLSASEALEFGLIDGLLETEY

SEQ ID NO: 20565 - DNA, 800 bp, Zea mays subsp. mays
  misc_feature (1)..(800): Ceres Seq. ID no. 15174423
aacaacaaagaacacatctttgatcttcccttgagctccctcccctgaatcgctaatctcgtcattcgtctctcgaatccttaaaaagaacggtagtaaggagccatggatccagctgagatgaggtacttggaagaagaggacggccccatgatgaagaccatcaaaggcagcgtgactggcttcgccgcagggaccatctacggaaccattttggccacgtggaaagacgttccgagagtggagagaaacgtggctcttccggggctgatcaggacgctgaagatgatgggaacacacgggctcactttcgccgccattggaggagtttacatcggtgttgagcaggtggttcagagctatagaggaaagagagattttttcaatggtgctattggtgggtttgttgctggagcttctgtccttggctacagagcaaggagcatcccaacagcgatagctgcaggtgcaacactagcggttacatctgctttgattgactctggaggacagaccacaagagtagacaacggcagagagtattatccttactcccctgttgagaaaacagctcaagctgctgatgcctgatctctcttttggcgtctgaacttaataaagctctgcatctgcttatcatgggctcttgagatcatctctcttccctgtcctctcttttttttttttgcctacttgtatctggagatataaaattgctcttgtttcctcctgtgtttatggagagtgacttgcatcttttgtctgaacttttccttcaataaaatatcaactctatcttc

SEQ ID NO: 20566 - protein, 161 aa, Zea mays subsp. mays
  peptide (1)..(161): Ceres Seq. ID no. 15174424
  misc_feature (9)..(138): Pfam Name: Pfam Description:  Tim17/Tim22/Tim23 family
  misc_feature (1)..(158): NCBI GI NO: 18405910 NR Description: expressed protein [Arabidopsis thaliana]
MDPAEMRYLEEEDGPMMKTIKGSVTGFAAGTIYGTILATWKDVPRVERNVALPGLIRTLKMMGTHGLTFAAIGGVYIGVEQVVQSYRGKRDFFNGAIGGFVAGASVLGYRARSIPTAIAAGATLAVTSALIDSGGQTTRVDNGREYYPYSPVEKTAQAADA

SEQ ID NO: 20567 - protein, 156 aa, Zea mays subsp. mays
  peptide (1)..(156): Ceres Seq. ID no. 15174425
  misc_feature (4)..(133): Pfam Name: Pfam Description:  Tim17/Tim22/Tim23 family
  misc_feature (1)..(153): NCBI GI NO: 18405910 NR Description: expressed protein [Arabidopsis thaliana]
MRYLEEEDGPMMKTIKGSVTGFAAGTIYGTILATWKDVPRVERNVALPGLIRTLKMMGTHGLTFAAIGGVYIGVEQVVQSYRGKRDFFNGAIGGFVAGASVLGYRARSIPTAIAAGATLAVTSALIDSGGQTTRVDNGREYYPYSPVEKTAQAADA

SEQ ID NO: 20568 - protein, 146 aa, Zea mays subsp. mays
  peptide (1)..(146): Ceres Seq. ID no. 15174426
  misc_feature (1)..(123): Pfam Name: Pfam Description:  Tim17/Tim22/Tim23 family
  misc_feature (1)..(143): NCBI GI NO: 18405910 NR Description: expressed protein [Arabidopsis thaliana]
MMKTIKGSVTGFAAGTIYGTILATWKDVPRVERNVALPGLIRTLKMMGTHGLTFAAIGGVYIGVEQVVQSYRGKRDFFNGAIGGFVAGASVLGYRARSIPTAIAAGATLAVTSALIDSGGQTTRVDNGREYYPYSPVEKTAQAADA

SEQ ID NO: 20569 - DNA, 720 bp, Zea mays subsp. mays
  misc_feature (1)..(720): Ceres Seq. ID no. 15174384
acagaacagaagagagaaaaacgaaacagttgtttattttctcctacagatcgattcccactttcccaaatctttcttccaacacacagattctcctctcggcactcagatatgagtagcctcatcgcttcatccgccaccgttctccctccgtgcggccccacggcgctcaaatcttgcatctccccacctctcgcctcccaatcccgaaccaaacgcgcgagctcgagaagagcttcaaccatgacggttcgatgcgacgtagctgtgaagtcagctgattcggtgaacgcagaggaggccgagctttcggcagaagagatcgaagcgaaggcgaaggtgggatcttcgatcagagtgactgcgccgctgaaggtttaccatgtgaaccgagtcccggaggttgatttggaagggatggaaggtaagctgaaagactacgtggccgtgtggaaagggaaacggatatcagctaatcttccttacaaggttgagttctttaaagaggttgaaggtcgtggtcctgttaagtttgttgctcatctcaaggacgacgagttcgagttcatcgatgcttgatgatgtgacaacaaaggcagattctttttctcttcttgtgtttggtgaagcctgggaatggagagaatgatttgtatgtactgagaatactgatgtatgtgtgtgtatacctttagcaatcatatacataagcatctctcc

SEQ ID NO: 20570 - protein, 192 aa, Zea mays subsp. mays
  peptide (1)..(192): Ceres Seq. ID no. 15174385
  misc_feature (22)..(191): NCBI GI NO: 15237763 NR Description: expressed protein [Arabidopsis thaliana]
  misc_feature (18)..(191): NCBI GI NO: 10178283 NR Description: lipoic acid synthase-like protein
  misc_feature (18)..(191): NCBI GI NO: 18415805 NR Description: lipoic acid synthase -related
  misc_feature (43)..(191): NCBI GI NO: 38346617 NR Description: OSJNBa0074L08.8
  misc_feature (102)..(191): NCBI GI NO: 2498397 NR Description: FERREDOXIN-THIOREDOXIN REDUCTASE, VARIABLE CHAIN
  misc_feature (79)..(191): NCBI GI NO: 14275856 NR Description: subunit A of ferredoxin-thioredoxin-reductase
  misc_feature (102)..(191): NCBI GI NO: 1362192 NR Description: ferredoxin-thioredoxin reductase (EC 1
  misc_feature (76)..(190): NCBI GI NO: 729538 NR Description: Ferredoxin-thioredoxin reductase
  misc_feature (76)..(190): NCBI GI NO: 505186 NR Description: ferredoxin-thioredoxin reductase SU A
TEQKREKRNSCLFSPTDRFPLSQIFLPTHRFSSRHSDMSSLIASSATVLPPCGPTALKSCISPPLASQSRTKRASSRRASTMTVRCDVAVKSADSVNAEEAELSAEEIEAKAKVGSSIRVTAPLKVYHVNRVPEVDLEGMEGKLKDYVAVWKGKRISANLPYKVEFFKEVEGRGPVKFVAHLKDDEFEFIDA

SEQ ID NO: 20571 - protein, 155 aa, Zea mays subsp. mays
  peptide (1)..(155): Ceres Seq. ID no. 15174386
  misc_feature (1)..(154): NCBI GI NO: 15237763 NR Description: expressed protein [Arabidopsis thaliana]
  misc_feature (1)..(154): NCBI GI NO: 10178283 NR Description: lipoic acid synthase-like protein
  misc_feature (1)..(154): NCBI GI NO: 18415805 NR Description: lipoic acid synthase -related
  misc_feature (6)..(154): NCBI GI NO: 38346617 NR Description: OSJNBa0074L08.8
  misc_feature (65)..(154): NCBI GI NO: 2498397 NR Description: FERREDOXIN-THIOREDOXIN REDUCTASE, VARIABLE CHAIN
  misc_feature (42)..(154): NCBI GI NO: 14275856 NR Description: subunit A of ferredoxin-thioredoxin-reductase
  misc_feature (65)..(154): NCBI GI NO: 1362192 NR Description: ferredoxin-thioredoxin reductase (EC 1
  misc_feature (39)..(153): NCBI GI NO: 729538 NR Description: Ferredoxin-thioredoxin reductase
  misc_feature (39)..(153): NCBI GI NO: 505186 NR Description: ferredoxin-thioredoxin reductase SU A
MSSLIASSATVLPPCGPTALKSCISPPLASQSRTKRASSRRASTMTVRCDVAVKSADSVNAEEAELSAEEIEAKAKVGSSIRVTAPLKVYHVNRVPEVDLEGMEGKLKDYVAVWKGKRISANLPYKVEFFKEVEGRGPVKFVAHLKDDEFEFIDA

SEQ ID NO: 20572 - protein, 111 aa, Zea mays subsp. mays
  peptide (1)..(111): Ceres Seq. ID no. 15174387
  misc_feature (1)..(110): NCBI GI NO: 15237763 NR Description: expressed protein [Arabidopsis thaliana]
  misc_feature (1)..(110): NCBI GI NO: 10178283 NR Description: lipoic acid synthase-like protein
  misc_feature (1)..(110): NCBI GI NO: 18415805 NR Description: lipoic acid synthase -related
  misc_feature (1)..(110): NCBI GI NO: 38346617 NR Description: OSJNBa0074L08.8
  misc_feature (21)..(110): NCBI GI NO: 2498397 NR Description: FERREDOXIN-THIOREDOXIN REDUCTASE, VARIABLE CHAIN
  misc_feature (1)..(110): NCBI GI NO: 14275856 NR Description: subunit A of ferredoxin-thioredoxin-reductase
  misc_feature (21)..(110): NCBI GI NO: 1362192 NR Description: ferredoxin-thioredoxin reductase (EC 1
  misc_feature (1)..(109): NCBI GI NO: 729538 NR Description: Ferredoxin-thioredoxin reductase
  misc_feature (1)..(109): NCBI GI NO: 505186 NR Description: ferredoxin-thioredoxin reductase SU A
MTVRCDVAVKSADSVNAEEAELSAEEIEAKAKVGSSIRVTAPLKVYHVNRVPEVDLEGMEGKLKDYVAVWKGKRISANLPYKVEFFKEVEGRGPVKFVAHLKDDEFEFIDA

SEQ ID NO: 20573 - DNA, 844 bp, Zea mays subsp. mays
  misc_feature (1)..(844): Ceres Seq. ID no. 15178852
aaagtggagagtcacaccagcgtcttcgtcttccatcaaactcctctctctaatcgaattgcgccaaagtagggttttgcaatctcaattgaaatagtttttgatcggaaaaaaagaatggtatctgggttaataaacgagaacccaactgtgtacgagagaaaagagcgtcgtgttcgtaccgattccaccaactccgatgagttctccgtagaacctatcgatcagctcgagatttttgatcatataagagatataagagatccagagcatccttattctcttgaacaactcaaagttctaactgaagactctgttgaagttgatgatctcaagagttatgtcagggttacattcactccaacggtggaacattgtagcatggcaaccattattggtctttctatccgggttaaacttatgcgcaaccttcctcctcgttacaagattgatataagggtagcacccggttctcatgcaacagaggctgcactcaataagcaactaaacgacaaggagcgtgtggcggctgcactagagaatccaaacctcgtggagatggttgatgaatgtctatctccatcatttgaatgatgcttgatgctctcaacgtacactatatcataatatgtctctgctcttgtccgcgaagattttgattcactaggactttgtgttcagtttcgatcctgttaaagactgaggatttattcacagaacaatatattgattttgtctcgttgtttccatcttaaatcacattcctttcactactgaacttgtcacacacttgttctcttacacatgtgctccttttgttgccattaaactaacagtttgtagc

SEQ ID NO: 20574 - protein, 158 aa, Zea mays subsp. mays
  peptide (1)..(158): Ceres Seq. ID no. 15178853
  misc_feature (36)..(115): Pfam Name: Pfam Description:  Domain of unknown function DUF59
  misc_feature (1)..(158): NCBI GI NO: 28973748 NR Description: unknown protein [Arabidopsis thaliana]
  misc_feature (1)..(158): NCBI GI NO: 15221347 NR Description: expressed protein [Arabidopsis thaliana]
  misc_feature (1)..(157): NCBI GI NO: 38347077 NR Description: OSJNBa0006A01.18
  misc_feature (1)..(153): NCBI GI NO: 34896898 NR Description: hypothetical protein
  misc_feature (40)..(157): NCBI GI NO: 38567963 NR Description: OSJNBa0093F12.4
  misc_feature (1)..(154): NCBI GI NO: 24662341 NR Description: CG7949-PA [Drosophila melanogaster]
  misc_feature (1)..(153): NCBI GI NO: 31212973 NR Description: ENSANGP00000014212 [Anopheles gambiae]
  misc_feature (1)..(153): NCBI GI NO: 15232658 NR Description: hypothetical protein [Arabidopsis thaliana]
  misc_feature (37)..(153): NCBI GI NO: 20130185 NR Description: CG30152-PA [Drosophila melanogaster]
  misc_feature (40)..(153): NCBI GI NO: 31199041 NR Description: ENSANGP00000018494 [Anopheles gambiae]
MVSGLINENPTVYERKERRVRTDSTNSDEFSVEPIDQLEIFDHIRDIRDPEHPYSLEQLKVLTEDSVEVDDLKSYVRVTFTPTVEHCSMATIIGLSIRVKLMRNLPPRYKIDIRVAPGSHATEAALNKQLNDKERVAAALENPNLVEMVDECLSPSFE

SEQ ID NO: 20575 - DNA, 968 bp, Zea mays subsp. mays
  misc_feature (1)..(968): Ceres Seq. ID no. 15174024
attggagacacaacacaacacaacaatgagtttctcggtggtcttgttccagaaaccctaccctgcaacaccaaccttacccatcactaccaccttcacaatctcatcatcctcatcatctttcagaccaagaagaagactaccttcttcaaccaatcgcatcttccctgtaaaccaaccaaaacccataaccaaaaatcgccaaaccgaaaccctagccgccagagacacaatcatagacttcggcaagcacaagggcaaaatgctcggctctctgccctcctcttacctcaaatgggtctccaagaatctacgcgcaggagacaccgagtactgggcgaagctcgcagaccaagtgctcgaggacgatgtttataaagacagaattgagtgggagtttgcagagaaaatcctccacggaagtgacgagagtttaaagaagagcagagaagaagaggtaagctctgtttcgatgttgttggagattagcgagaggtttggttgggacaatgaggataagattggttggagcagagtcaacttcgagcttctggggacgagcaagggtggtcggattcctaggttgggagaggatagaggagatatggtgagaaggagagaggtcaagaagaagaagggagaggaggaagatggtagtgggtggaggaggagagagaggcgtgagaggatgaggcagagtcttgggagagggaaggagaatgatgatggcaaaacggtgaataggagtgatcagaagggtgttttgggaaggttaggagaagtagagaagcagattgagccgaagatttatagtccttttccaggacgtgagagtttgttgaagaaagttatgaacaagagaaggtctcaatgacacataaagagtatgttgtgttagtattagtaaaggcagttcctttgtgtatctgaaagatcaaaactttacttattcatctcaagttcaagct

SEQ ID NO: 20576 - protein, 290 aa, Zea mays subsp. mays
  peptide (1)..(290): Ceres Seq. ID no. 15174025
  misc_feature (9)..(290): NCBI GI NO: 15223713 NR Description: hypothetical protein [Arabidopsis thaliana]
LETQHNTTMSFSVVLFQKPYPATPTLPITTTFTISSSSSSFRPRRRLPSSTNRIFPVNQPKPITKNRQTETLAARDTIIDFGKHKGKMLGSLPSSYLKWVSKNLRAGDTEYWAKLADQVLEDDVYKDRIEWEFAEKILHGSDESLKKSREEEVSSVSMLLEISERFGWDNEDKIGWSRVNFELLGTSKGGRIPRLGEDRGDMVRRREVKKKKGEEEDGSGWRRRERRERMRQSLGRGKENDDGKTVNRSDQKGVLGRLGEVEKQIEPKIYSPFPGRESLLKKVMNKRRSQ

SEQ ID NO: 20577 - protein, 282 aa, Zea mays subsp. mays
  peptide (1)..(282): Ceres Seq. ID no. 15174026
  misc_feature (1)..(282): NCBI GI NO: 15223713 NR Description: hypothetical protein [Arabidopsis thaliana]
MSFSVVLFQKPYPATPTLPITTTFTISSSSSSFRPRRRLPSSTNRIFPVNQPKPITKNRQTETLAARDTIIDFGKHKGKMLGSLPSSYLKWVSKNLRAGDTEYWAKLADQVLEDDVYKDRIEWEFAEKILHGSDESLKKSREEEVSSVSMLLEISERFGWDNEDKIGWSRVNFELLGTSKGGRIPRLGEDRGDMVRRREVKKKKGEEEDGSGWRRRERRERMRQSLGRGKENDDGKTVNRSDQKGVLGRLGEVEKQIEPKIYSPFPGRESLLKKVMNKRRSQ

SEQ ID NO: 20578 - protein, 203 aa, Zea mays subsp. mays
  peptide (1)..(203): Ceres Seq. ID no. 15174027
  misc_feature (1)..(203): NCBI GI NO: 15223713 NR Description: hypothetical protein [Arabidopsis thaliana]
MLGSLPSSYLKWVSKNLRAGDTEYWAKLADQVLEDDVYKDRIEWEFAEKILHGSDESLKKSREEEVSSVSMLLEISERFGWDNEDKIGWSRVNFELLGTSKGGRIPRLGEDRGDMVRRREVKKKKGEEEDGSGWRRRERRERMRQSLGRGKENDDGKTVNRSDQKGVLGRLGEVEKQIEPKIYSPFPGRESLLKKVMNKRRSQ

SEQ ID NO: 20579 - DNA, 752 bp, Zea mays subsp. mays
  misc_feature (1)..(752): Ceres Seq. ID no. 15177467
acacaactttcaaagtaagacaacaaaataaccgtctgtttgaaatatttaagctctttgcttatttgaaaatggaggtcgtcagattcgccgtcgccgtcgtttttgtattgttctctgtttcttcgtctaacgctgagcctacaccggcaatgggtggaggcggaggaggaggaggaggagatgctcactcaatgccgtgtatacagaaactgatgccatgtcagccttatcttcactcggtgactcctccacctcccgcgtcgtgttgcctgccgatgaaggagatcgtcgagaaagacgccacgtgtctttgctccgtcttcaacaatgtcgacatgctcaaatcgcttaacctcactaaagaaaacgctcttgttctccctaaagcttgtggcgccaaggctgacatctcgctatgcaaatccagcaatggcaccactacaccttcgacgggaactaccacaactcctccggcatcttccactgggagcggtttcaccggagcttcatcttcttcaacggccaaaccaacaaactcggctcctggcatcaccttcgccggagctagcttcgcatcagctttcatggcattggcaacaatcttcttctgatctactactatattgcattttttctttattcattattacgtaggttttttatatgttgaaaatttgtttggttattaattattattattattatcattatgtactttgaaatttctaataatagtaataatttccagc

SEQ ID NO: 20580 - protein, 203 aa, Zea mays subsp. mays
  peptide (1)..(203): Ceres Seq. ID no. 15177468
  misc_feature (67)..(140): Pfam Name: Pfam Description:  Protease inhibitor/seed storage/LTP family
  misc_feature (24)..(203): NCBI GI NO: 15221052 NR Description: lipid transfer protein family
  misc_feature (24)..(162): NCBI GI NO: 18410388 NR Description: lipid transfer protein family
  misc_feature (24)..(162): NCBI GI NO: 21593596 NR Description: lipid transfer protein, putative
  misc_feature (24)..(140): NCBI GI NO: 25406276 NR Description: probable lipid transfer protein F6D5.5
  misc_feature (60)..(163): NCBI GI NO: 15219496 NR Description: protease inhibitor/seed storage/lipid transfer
  misc_feature (60)..(144): NCBI GI NO: 25406275 NR Description: hypothetical protein F6D5.6
  misc_feature (24)..(201): NCBI GI NO: 25553588 NR Description: OJ1656_E11.14
  misc_feature (61)..(201): NCBI GI NO: 7484433 NR Description: lipid transfer protein - Norway spruce
  misc_feature (67)..(162): NCBI GI NO: 15221585 NR Description: protease inhibitor/seed storage/lipid transfer
  misc_feature (67)..(171): NCBI GI NO: 30696757 NR Description: protease inhibitor/seed storage/lipid transfer
TTFKVRQQNNRLFEIFKLFAYLKMEVVRFAVAVVFVLFSVSSSNAEPTPAMGGGGGGGGGDAHSMPCIQKLMPCQPYLHSVTPPPPASCCLPMKEIVEKDATCLCSVFNNVDMLKSLNLTKENALVLPKACGAKADISLCKSSNGTTTPSTGTTTTPPASSTGSGFTGASSSSTAKPTNSAPGITFAGASFASAFMALATIFF

SEQ ID NO: 20581 - protein, 180 aa, Zea mays subsp. mays
  peptide (1)..(180): Ceres Seq. ID no. 15177469
  misc_feature (44)..(117): Pfam Name: Pfam Description:  Protease inhibitor/seed storage/LTP family
  misc_feature (1)..(180): NCBI GI NO: 15221052 NR Description: lipid transfer protein family
  misc_feature (1)..(139): NCBI GI NO: 18410388 NR Description: lipid transfer protein family
  misc_feature (1)..(139): NCBI GI NO: 21593596 NR Description: lipid transfer protein, putative
  misc_feature (1)..(117): NCBI GI NO: 25406276 NR Description: probable lipid transfer protein F6D5.5
  misc_feature (37)..(140): NCBI GI NO: 15219496 NR Description: protease inhibitor/seed storage/lipid transfer
  misc_feature (37)..(121): NCBI GI NO: 25406275 NR Description: hypothetical protein F6D5.6
  misc_feature (1)..(178): NCBI GI NO: 25553588 NR Description: OJ1656_E11.14
  misc_feature (38)..(178): NCBI GI NO: 7484433 NR Description: lipid transfer protein - Norway spruce
  misc_feature (44)..(139): NCBI GI NO: 15221585 NR Description: protease inhibitor/seed storage/lipid transfer
  misc_feature (44)..(148): NCBI GI NO: 30696757 NR Description: protease inhibitor/seed storage/lipid transfer
MEVVRFAVAVVFVLFSVSSSNAEPTPAMGGGGGGGGGDAHSMPCIQKLMPCQPYLHSVTPPPPASCCLPMKEIVEKDATCLCSVFNNVDMLKSLNLTKENALVLPKACGAKADISLCKSSNGTTTPSTGTTTTPPASSTGSGFTGASSSSTAKPTNSAPGITFAGASFASAFMALATIFF

SEQ ID NO: 20582 - protein, 153 aa, Zea mays subsp. mays
  peptide (1)..(153): Ceres Seq. ID no. 15177470
  misc_feature (17)..(90): Pfam Name: Pfam Description:  Protease inhibitor/seed storage/LTP family
  misc_feature (1)..(153): NCBI GI NO: 15221052 NR Description: lipid transfer protein family
  misc_feature (1)..(112): NCBI GI NO: 18410388 NR Description: lipid transfer protein family
  misc_feature (1)..(112): NCBI GI NO: 21593596 NR Description: lipid transfer protein, putative
  misc_feature (1)..(90): NCBI GI NO: 25406276 NR Description: probable lipid transfer protein F6D5.5
  misc_feature (10)..(113): NCBI GI NO: 15219496 NR Description: protease inhibitor/seed storage/lipid transfer
  misc_feature (10)..(94): NCBI GI NO: 25406275 NR Description: hypothetical protein F6D5.6
  misc_feature (1)..(151): NCBI GI NO: 25553588 NR Description: OJ1656_E11.14
  misc_feature (11)..(151): NCBI GI NO: 7484433 NR Description: lipid transfer protein - Norway spruce
  misc_feature (17)..(112): NCBI GI NO: 15221585 NR Description: protease inhibitor/seed storage/lipid transfer
  misc_feature (17)..(121): NCBI GI NO: 30696757 NR Description: protease inhibitor/seed storage/lipid transfer
MGGGGGGGGGDAHSMPCIQKLMPCQPYLHSVTPPPPASCCLPMKEIVEKDATCLCSVFNNVDMLKSLNLTKENALVLPKACGAKADISLCKSSNGTTTPSTGTTTTPPASSTGSGFTGASSSSTAKPTNSAPGITFAGASFASAFMALATIFF

SEQ ID NO: 20583 - DNA, 679 bp, Zea mays subsp. mays
  misc_feature (1)..(679): Ceres Seq. ID no. 15177923
aactacgtttcctcatttccttggccaaatctctctctctctctctctctctcatcaacaatggcgaaatcagcggcgacggcggcttcctccctcgtgcaaaccctcaggcgctacatcaagaagccatgggagatcaccggaccttgcgcccacccggagtacctcgaatccgttcccaaggcgacggagtatcgtatccgatgccccgcaacgatcgatcaggaggcgatcgtgcctacggcggatccggagaacgtgtacaacatcttgtaccacgcgagggatcagaggcgaaaccgcccgccgattaggcgatacttgttgaagaaggaggacgtggtggagatgatgaatgagaagaagacgttcgaggagtcggacttccctagggtttacttgacgaccactgttgaggaggatgagaacgctcgtggcggaggctacgagtaacaaacaggtttttgctagtctcgtgtcttttctcctgtaatctgctgtggtgggagacggactgcgtgtgataatatctcactaccgagaaaaatccttactagttttcattttatctaataaaggctgtttatgtactacaaaacacttgatgttccttcacaggaactggattgttgttcagttgtattccctttgttcactcacataaatatttttatgtcct

SEQ ID NO: 20584 - protein, 150 aa, Zea mays subsp. mays
  peptide (1)..(150): Ceres Seq. ID no. 15177924
  misc_feature (21)..(150): NCBI GI NO: 15241510 NR Description: expressed protein [Arabidopsis thaliana]
  misc_feature (21)..(150): NCBI GI NO: 21592443 NR Description: unknown [Arabidopsis thaliana]
  misc_feature (2)..(150): NCBI GI NO: 34909786 NR Description: P0512C01.35
NYVSSFPWPNLSLSLSLSSTMAKSAATAASSLVQTLRRYIKKPWEITGPCAHPEYLESVPKATEYRIRCPATIDQEAIVPTADPENVYNILYHARDQRRNRPPIRRYLLKKEDVVEMMNEKKTFEESDFPRVYLTTTVEEDENARGGGYE

SEQ ID NO: 20585 - protein, 130 aa, Zea mays subsp. mays
  peptide (1)..(130): Ceres Seq. ID no. 15177925
  misc_feature (1)..(130): NCBI GI NO: 15241510 NR Description: expressed protein [Arabidopsis thaliana]
  misc_feature (1)..(130): NCBI GI NO: 21592443 NR Description: unknown [Arabidopsis thaliana]
  misc_feature (1)..(130): NCBI GI NO: 34909786 NR Description: P0512C01.35
MAKSAATAASSLVQTLRRYIKKPWEITGPCAHPEYLESVPKATEYRIRCPATIDQEAIVPTADPENVYNILYHARDQRRNRPPIRRYLLKKEDVVEMMNEKKTFEESDFPRVYLTTTVEEDENARGGGYE

SEQ ID NO: 20586 - protein, 108 aa, Zea mays subsp. mays
  peptide (1)..(108): Ceres Seq. ID no. 15177926
TTFPHFLGQISLSLSLSHQQWRNQRRRRLPPSCKPSGATSRSHGRSPDLAPTRSTSNPFPRRRSIVSDAPQRSIRRRSCLRRIRRTCTTSCTTRGIRGETARRLGDTC

SEQ ID NO: 20587 - DNA, 892 bp, Zea mays subsp. mays
  misc_feature (1)..(892): Ceres Seq. ID no. 15178133
aactcgaaaatggagagaggcctccttgtaggagtaagataactaaaaacacctttcgtcactctacgccgcttctctctcttaaattatacttgtccattgattccaagcatgtttctcttctgtatgcgaaccaaaatctcagaaaccaccaactccttgttctaatatggcttcacacatcttaccaacatcactatcaattttagaaactgacaaaggtcgatcctttacaatcaatctgttccacacaagaaatgcgtcgttgatcatcactcccatgaaaagtttccagattcgaagaagacgaaaccagataatagcgtttgcgttagacacaggatcttcttcttctgttcctggaggaggaggagaacgacaagagattaatgaagacagaacaggtctaggtagcactagattaggcagaatagcgattgccttaggcagacagcttcttttgaagataaactctgctagaaaaaacttccccatgaagatattcttactgcttcttggtttctacactgctaatgcattagccaccattcttggccaaaccggtgactgggacgtgcttgtggcaggcatcgtcgtggctgctatcgaagggatcggtatgcttatgtacaagaagaagaagaagccatcttcatcttcttcttctgggaagaagttgcagtcttttgttgtgtttatgaatttctggaaagctggtgtttgtttgggtctctttgttgatgctttcaagcttggtagttgaatataaaacaagcttttcctttcttctagcatatgagttaatgtttgtgtatagagagagcctttgattgtatcagttaaaagagtttcagttttgttggaatatatatatatataactaagataaaag

SEQ ID NO: 20588 - protein, 197 aa, Zea mays subsp. mays
  peptide (1)..(197): Ceres Seq. ID no. 15178134
  misc_feature (130)..(197): Pfam Name: DUF565 Pfam Description: Protein of unknown function
  misc_feature (1)..(197): NCBI GI NO: 18408276 NR Description: antigen receptor -related [Arabidopsis thaliana]
  misc_feature (1)..(197): NCBI GI NO: 21593789 NR Description: antigen receptor, putative [Arabidopsis thaliana]
  misc_feature (73)..(197): NCBI GI NO: 6136502 NR Description: Ycf20-like protein
  misc_feature (89)..(184): NCBI GI NO: 28436400 NR Description: putative antigen receptor [Arabidopsis thaliana]
  misc_feature (89)..(184): NCBI GI NO: 28394796 NR Description: putative antigen receptor [Arabidopsis lyrata]
  misc_feature (37)..(194): NCBI GI NO: 15230144 NR Description: expressed protein [Arabidopsis thaliana]
  misc_feature (80)..(197): NCBI GI NO: 11466439 NR Description: hypothetical chloroplast RF20 [Mesostigma viride]
  misc_feature (114)..(197): NCBI GI NO: 11465680 NR Description: ORF20 [Porphyra purpurea]
  misc_feature (112)..(197): NCBI GI NO: 7484292 NR Description: hypothetical protein ORF96 - red alga
  misc_feature (112)..(197): NCBI GI NO: 11465590 NR Description: unknown [Cyanidium caldarium]
MASHILPTSLSILETDKGRSFTINLFHTRNASLIITPMKSFQIRRRRNQIIAFALDTGSSSSVPGGGGERQEINEDRTGLGSTRLGRIAIALGRQLLLKINSARKNFPMKIFLLLLGFYTANALATILGQTGDWDVLVAGIVVAAIEGIGMLMYKKKKKPSSSSSSGKKLQSFVVFMNFWKAGVCLGLFVDAFKLGS

SEQ ID NO: 20589 - protein, 160 aa, Zea mays subsp. mays
  peptide (1)..(160): Ceres Seq. ID no. 15178135
  misc_feature (93)..(160): Pfam Name: DUF565 Pfam Description: Protein of unknown function
  misc_feature (1)..(160): NCBI GI NO: 18408276 NR Description: antigen receptor -related [Arabidopsis thaliana]
  misc_feature (1)..(160): NCBI GI NO: 21593789 NR Description: antigen receptor, putative [Arabidopsis thaliana]
  misc_feature (36)..(160): NCBI GI NO: 6136502 NR Description: Ycf20-like protein
  misc_feature (52)..(147): NCBI GI NO: 28436400 NR Description: putative antigen receptor [Arabidopsis thaliana]
  misc_feature (52)..(147): NCBI GI NO: 28394796 NR Description: putative antigen receptor [Arabidopsis lyrata]
  misc_feature (1)..(157): NCBI GI NO: 15230144 NR Description: expressed protein [Arabidopsis thaliana]
  misc_feature (43)..(160): NCBI GI NO: 11466439 NR Description: hypothetical chloroplast RF20 [Mesostigma viride]
  misc_feature (77)..(160): NCBI GI NO: 11465680 NR Description: ORF20 [Porphyra purpurea]
  misc_feature (75)..(160): NCBI GI NO: 7484292 NR Description: hypothetical protein ORF96 - red alga
  misc_feature (75)..(160): NCBI GI NO: 11465590 NR Description: unknown [Cyanidium caldarium]
MKSFQIRRRRNQIIAFALDTGSSSSVPGGGGERQEINEDRTGLGSTRLGRIAIALGRQLLLKINSARKNFPMKIFLLLLGFYTANALATILGQTGDWDVLVAGIVVAAIEGIGMLMYKKKKKPSSSSSSGKKLQSFVVFMNFWKAGVCLGLFVDAFKLGS

SEQ ID NO: 20590 - DNA, 697 bp, Zea mays subsp. mays
  misc_feature (1)..(697): Ceres Seq. ID no. 15178291
agttttgggttagtaacgactttgacacggtgtttcggttctgctccgctcctcccaaatcgccgagtccacctgcgagagtcgatctccgttaattagacatggctatgaccatcgaagtacttgctggacttgccttcatgttttcatctagtatcctcctacagatcctggcgtgtgcactatatagtaactggtggccaatgctttcagcactcatgtatgtggttgtgcctatgccttgcatgttctttggaggaggctcaacacaattcctaattagtcgagatggtggaggatggatagatgcagcaaagttcttgacaggagcatcaacggtaggaagcctggcgattccaatcatattaaggcatgcaggaatgatcgagacgggtgcaatgctcatagagttcacatcgttcttcatattcatctgcactgtcatgtgttttcaccgagctagtctcgatgattatgattggtaacagatacgttgttggtggtgatttactaattggtcatgatcaaaagagaggagagagtttaagtgtgaagaagatgagttaaccatgaacccgagatcaggtgttgaagaaagttatcttctttctcttcttttctccctctttgtacaactttgtattaatcagtgtctgtaaaaatgttttattcattataatgaaacatgatgcttgtg

SEQ ID NO: 20591 - protein, 127 aa, Zea mays subsp. mays
  peptide (1)..(127): Ceres Seq. ID no. 15178292
  misc_feature (1)..(127): NCBI GI NO: 16648828 NR Description: AT3g11530/F24K9_21 [Arabidopsis thaliana]
  misc_feature (1)..(127): NCBI GI NO: 12322900 NR Description: unknown protein; 72859-71336
  misc_feature (14)..(127): NCBI GI NO: 18399269 NR Description: expressed protein [Arabidopsis thaliana]
  misc_feature (46)..(127): NCBI GI NO: 34905898 NR Description: P0458E05.25
  misc_feature (8)..(127): NCBI GI NO: 21554354 NR Description: unknown [Arabidopsis thaliana]
  misc_feature (8)..(125): NCBI GI NO: 18398420 NR Description: expressed protein [Arabidopsis thaliana]
  misc_feature (8)..(115): NCBI GI NO: 25518386 NR Description: hypothetical protein F5D14
  misc_feature (5)..(117): NCBI GI NO: 38103616 NR Description: hypothetical protein MG04054.4
  misc_feature (1)..(127): NCBI GI NO: 32413038 NR Description: hypothetical protein [Neurospora crassa]
  misc_feature (1)..(117): NCBI GI NO: 40738696 NR Description: hypothetical protein AN6546.2
MAMTIEVLAGLAFMFSSSILLQILACALYSNWWPMLSALMYVVVPMPCMFFGGGSTQFLISRDGGGWIDAAKFLTGASTVGSLAIPIILRHAGMIETGAMLIEFTSFFIFICTVMCFHRASLDDYDW

SEQ ID NO: 20592 - protein, 125 aa, Zea mays subsp. mays
  peptide (1)..(125): Ceres Seq. ID no. 15178293
  misc_feature (1)..(125): NCBI GI NO: 16648828 NR Description: AT3g11530/F24K9_21 [Arabidopsis thaliana]
  misc_feature (1)..(125): NCBI GI NO: 12322900 NR Description: unknown protein; 72859-71336
  misc_feature (12)..(125): NCBI GI NO: 18399269 NR Description: expressed protein [Arabidopsis thaliana]
  misc_feature (44)..(125): NCBI GI NO: 34905898 NR Description: P0458E05.25
  misc_feature (6)..(125): NCBI GI NO: 21554354 NR Description: unknown [Arabidopsis thaliana]
  misc_feature (6)..(123): NCBI GI NO: 18398420 NR Description: expressed protein [Arabidopsis thaliana]
  misc_feature (6)..(113): NCBI GI NO: 25518386 NR Description: hypothetical protein F5D14
  misc_feature (3)..(115): NCBI GI NO: 38103616 NR Description: hypothetical protein MG04054.4
  misc_feature (1)..(125): NCBI GI NO: 32413038 NR Description: hypothetical protein [Neurospora crassa]
  misc_feature (1)..(115): NCBI GI NO: 40738696 NR Description: hypothetical protein AN6546.2
MTIEVLAGLAFMFSSSILLQILACALYSNWWPMLSALMYVVVPMPCMFFGGGSTQFLISRDGGGWIDAAKFLTGASTVGSLAIPIILRHAGMIETGAMLIEFTSFFIFICTVMCFHRASLDDYDW

SEQ ID NO: 20593 - protein, 114 aa, Zea mays subsp. mays
  peptide (1)..(114): Ceres Seq. ID no. 15178294
  misc_feature (1)..(114): NCBI GI NO: 16648828 NR Description: AT3g11530/F24K9_21 [Arabidopsis thaliana]
  misc_feature (1)..(114): NCBI GI NO: 12322900 NR Description: unknown protein; 72859-71336
  misc_feature (1)..(114): NCBI GI NO: 18399269 NR Description: expressed protein [Arabidopsis thaliana]
  misc_feature (33)..(114): NCBI GI NO: 34905898 NR Description: P0458E05.25
  misc_feature (1)..(114): NCBI GI NO: 21554354 NR Description: unknown [Arabidopsis thaliana]
  misc_feature (1)..(112): NCBI GI NO: 18398420 NR Description: expressed protein [Arabidopsis thaliana]
  misc_feature (1)..(102): NCBI GI NO: 25518386 NR Description: hypothetical protein F5D14
  misc_feature (1)..(104): NCBI GI NO: 38103616 NR Description: hypothetical protein MG04054.4
  misc_feature (1)..(114): NCBI GI NO: 32413038 NR Description: hypothetical protein [Neurospora crassa]
  misc_feature (1)..(104): NCBI GI NO: 40738696 NR Description: hypothetical protein AN6546.2
MFSSSILLQILACALYSNWWPMLSALMYVVVPMPCMFFGGGSTQFLISRDGGGWIDAAKFLTGASTVGSLAIPIILRHAGMIETGAMLIEFTSFFIFICTVMCFHRASLDDYDW

SEQ ID NO: 20594 - DNA, 1250 bp, Zea mays subsp. mays
  misc_feature (1)..(1250): Ceres Seq. ID no. 15179467
ttggcaccgttactaatctaacatctctctctctctctctctggaactctcatcaccttatcatctcccgtaacaaaaccaaaatgttcctcttaaagacatggagatcaaccgctttcgggatttatggctatatgaatttcaccaagactggtttcctagaccattcaaagaagttcaaacctgaagatatgcagatacaaatccaaggaaagaactgtgtggtcactggagctaactctggtattggttacgccgttgctgaaggtcttgcttcacgtggagcaactgtttacatggtgtgtcggaacaaggaaagaggagaggaggctctttctaagattcaaaactctacaggaaaccagaatgtctaccttgaagtttgtgatttgtcttctgttaatgatataaagtcatttgcttcgagttttgcttcaaaggatgttccggttcatgtgctggttaataacgccggtttgcttgagaacaaacgaacgactacacctgaaggattcgagttgaactacgcggtgaatgtacttgggacatacacaatgacagagctgatgcttccgctgttggagaaagcgtcgcctgactccaaagtcatcaccgtctcctctggtggaatgtacacgtcgccacttacaacagatcttcagtttagtggtgaaaagttcgatggagtgttacaatacgcacggaataaaagaatccaggtggctctgacagaaaaatgggctgataagtacaagaacaaaggcataggtttctactcaatgcaccctggctgggctgagacacctggtgtcgccaggagtttgcccagtttcaaagaatcgttctctggtaagcttagaacgagcgaagaaggagcagacacagttgtttggctagcacttcagcctaaagagaagctggtctctggtgcattctatttcgatagagcagaagcaccaaaacatctgacgcttgcaggtacaagcaagtctcatgaccttatagactctgtcattgacacactgcattccatggcagctcttgatccttaaaaactatatcttctacatgggttttttctcgagaataaatgtgatcgatctctggtaaatatcacaatggaataagattcaaatattaaactttcctattctttccttggaaagtattattgtgctggatgattacatagtatcagaacataagaaatacacatggtttttaacattggcatagtagccatgttatgg

SEQ ID NO: 20595 - protein, 349 aa, Zea mays subsp. mays
  peptide (1)..(349): Ceres Seq. ID no. 15179468
  misc_feature (28)..(349): NCBI GI NO: 15234031 NR Description: short-chain dehydrogenase/reductase family protein
  misc_feature (31)..(330): NCBI GI NO: 34106252 NR Description: short chain dehydrogenase/reductase [Danio rerio]
  misc_feature (110)..(311): NCBI GI NO: 13375997 NR Description: hypothetical protein FLJ13639 [Homo sapiens]
  misc_feature (70)..(319): NCBI GI NO: 24586330 NR Description: CG30495-PA [Drosophila melanogaster]
  misc_feature (66)..(314): NCBI GI NO: 20070272 NR Description: and rogen-regulated short-chaindehydrogenase/reductase 1
  misc_feature (66)..(314): NCBI GI NO: 20070798 NR Description: and rogen-regulated short-chaindehydrogenase/reductase 1
  misc_feature (66)..(314): NCBI GI NO: 34395789 NR Description: Retinol dehydrogenase 11
  misc_feature (66)..(314): NCBI GI NO: 6630624 NR Description: M42C60 [Mus musculus]
  misc_feature (66)..(314): NCBI GI NO: 34866146 NR Description: similar to M42C60 [Rattus norvegicus]
  misc_feature (94)..(314): NCBI GI NO: 37361908 NR Description: LRRGT00111 [Rattus norvegicus]
GTVTNLTSLSLSLWNSHHLIISRNKTKMFLLKTWRSTAFGIYGYMNFTKTGFLDHSKKFKPEDMQIQIQGKNCVVTGANSGIGYAVAEGLASRGATVYMVCRNKERGEEALSKIQNSTGNQNVYLEVCDLSSVNDIKSFASSFASKDVPVHVLVNNAGLLENKRTTTPEGFELNYAVNVLGTYTMTELMLPLLEKASPDSKVITVSSGGMYTSPLTTDLQFSGEKFDGVLQYARNKRIQVALTEKWADKYKNKGIGFYSMHPGWAETPGVARSLPSFKESFSGKLRTSEEGADTVVWLALQPKEKLVSGAFYFDRAEAPKHLTLAGTSKSHDLIDSVIDTLHSMAALDP

SEQ ID NO: 20596 - protein, 322 aa, Zea mays subsp. mays
  peptide (1)..(322): Ceres Seq. ID no. 15179469
  misc_feature (1)..(322): NCBI GI NO: 15234031 NR Description: short-chain dehydrogenase/reductase family protein
  misc_feature (4)..(303): NCBI GI NO: 34106252 NR Description: short chain dehydrogenase/reductase [Danio rerio]
  misc_feature (83)..(284): NCBI GI NO: 13375997 NR Description: hypothetical protein FLJ13639 [Homo sapiens]
  misc_feature (43)..(292): NCBI GI NO: 24586330 NR Description: CG30495-PA [Drosophila melanogaster]
  misc_feature (39)..(287): NCBI GI NO: 20070272 NR Description: and rogen-regulated short-chaindehydrogenase/reductase 1
  misc_feature (39)..(287): NCBI GI NO: 20070798 NR Description: and rogen-regulated short-chaindehydrogenase/reductase 1
  misc_feature (39)..(287): NCBI GI NO: 34395789 NR Description: Retinol dehydrogenase 11
  misc_feature (39)..(287): NCBI GI NO: 6630624 NR Description: M42C60 [Mus musculus]
  misc_feature (39)..(287): NCBI GI NO: 34866146 NR Description: similar to M42C60 [Rattus norvegicus]
  misc_feature (67)..(287): NCBI GI NO: 37361908 NR Description: LRRGT00111 [Rattus norvegicus]
MFLLKTWRSTAFGIYGYMNFTKTGFLDHSKKFKPEDMQIQIQGKNCVVTGANSGIGYAVAEGLASRGATVYMVCRNKERGEEALSKIQNSTGNQNVYLEVCDLSSVNDIKSFASSFASKDVPVHVLVNNAGLLENKRTTTPEGFELNYAVNVLGTYTMTELMLPLLEKASPDSKVITVSSGGMYTSPLTTDLQFSGEKFDGVLQYARNKRIQVALTEKWADKYKNKGIGFYSMHPGWAETPGVARSLPSFKESFSGKLRTSEEGADTVVWLALQPKEKLVSGAFYFDRAEAPKHLTLAGTSKSHDLIDSVIDTLHSMAALDP

SEQ ID NO: 20597 - protein, 305 aa, Zea mays subsp. mays
  peptide (1)..(305): Ceres Seq. ID no. 15179470
  misc_feature (1)..(305): NCBI GI NO: 15234031 NR Description: short-chain dehydrogenase/reductase family protein
  misc_feature (1)..(286): NCBI GI NO: 34106252 NR Description: short chain dehydrogenase/reductase [Danio rerio]
  misc_feature (66)..(267): NCBI GI NO: 13375997 NR Description: hypothetical protein FLJ13639 [Homo sapiens]
  misc_feature (26)..(275): NCBI GI NO: 24586330 NR Description: CG30495-PA [Drosophila melanogaster]
  misc_feature (22)..(270): NCBI GI NO: 20070272 NR Description: and rogen-regulated short-chaindehydrogenase/reductase 1
  misc_feature (22)..(270): NCBI GI NO: 34395789 NR Description: Retinol dehydrogenase 11
  misc_feature (22)..(270): NCBI GI NO: 20070798 NR Description: and rogen-regulated short-chaindehydrogenase/reductase 1
  misc_feature (22)..(270): NCBI GI NO: 6630624 NR Description: M42C60 [Mus musculus]
  misc_feature (22)..(270): NCBI GI NO: 34866146 NR Description: similar to M42C60 [Rattus norvegicus]
  misc_feature (50)..(270): NCBI GI NO: 37361908 NR Description: LRRGT00111 [Rattus norvegicus]
MNFTKTGFLDHSKKFKPEDMQIQIQGKNCVVTGANSGIGYAVAEGLASRGATVYMVCRNKERGEEALSKIQNSTGNQNVYLEVCDLSSVNDIKSFASSFASKDVPVHVLVNNAGLLENKRTTTPEGFELNYAVNVLGTYTMTELMLPLLEKASPDSKVITVSSGGMYTSPLTTDLQFSGEKFDGVLQYARNKRIQVALTEKWADKYKNKGIGFYSMHPGWAETPGVARSLPSFKESFSGKLRTSEEGADTVVWLALQPKEKLVSGAFYFDRAEAPKHLTLAGTSKSHDLIDSVIDTLHSMAALDP

SEQ ID NO: 20598 - DNA, 651 bp, Zea mays subsp. mays
  misc_feature (1)..(651): Ceres Seq. ID no. 15177688
aacaacacacagagaaattttcttggtggtctctccaatggcattctcagcaactctgtctcagctttcttctctttcgacaatctcctcctcactcccactttcttctagaatcttccctcttcgatctcagactcatttcagagtcaaagcagaggcagagaaacagagcacgcaggctaaatccgaaggggaagcttcaccagctgcaaccaaaacccctaaaactcttcccaagaaaccggtttactcgatgaagaagggtcaaatcgttcgtgtagacaaggagaagtacctcaacagcatcaattacttatcagttggtcatcctcctttctacaaaggacttgattacatctacgaagatcgcggcgaggtactagacattcgtgtctttgagacaggagagtatgcacttgttggatgggttggtatcccaaccgcaccggcttggctaccaacagatatgctcatcaagtctgagaaacttgtttacgagagactatagagtcttcaagaagatcatgtcttcaagagtttaacaagtatcataatgttaccatagtcaaaaaaaaaaaaactgttgtgtaatgtaaaaaatgtaatgagacttgagttttacaataatgcatctaccgtagttgcatccct

SEQ ID NO: 20599 - protein, 168 aa, Zea mays subsp. mays
  peptide (1)..(168): Ceres Seq. ID no. 15177689
  misc_feature (13)..(168): NCBI GI NO: 18410719 NR Description: expressed protein [Arabidopsis thaliana]
  misc_feature (52)..(157): NCBI GI NO: 34905786 NR Description: P0401G10.19
TTHREIFLVVSPMAFSATLSQLSSLSTISSSLPLSSRIFPLRSQTHFRVKAEAEKQSTQAKSEGEASPAATKTPKTLPKKPVYSMKKGQIVRVDKEKYLNSINYLSVGHPPFYKGLDYIYEDRGEVLDIRVFETGEYALVGWVGIPTAPAWLPTDMLIKSEKLVYERL

SEQ ID NO: 20600 - protein, 156 aa, Zea mays subsp. mays
  peptide (1)..(156): Ceres Seq. ID no. 15177690
  misc_feature (1)..(156): NCBI GI NO: 18410719 NR Description: expressed protein [Arabidopsis thaliana]
  misc_feature (40)..(145): NCBI GI NO: 34905786 NR Description: P0401G10.19
MAFSATLSQLSSLSTISSSLPLSSRIFPLRSQTHFRVKAEAEKQSTQAKSEGEASPAATKTPKTLPKKPVYSMKKGQIVRVDKEKYLNSINYLSVGHPPFYKGLDYIYEDRGEVLDIRVFETGEYALVGWVGIPTAPAWLPTDMLIKSEKLVYERL

SEQ ID NO: 20601 - protein, 84 aa, Zea mays subsp. mays
  peptide (1)..(84): Ceres Seq. ID no. 15177691
QHTEKFSWWSLQWHSQQLCLSFLLFRQSPPHSHFLLESSLFDLRLISESKQRQRNRARRLNPKGKLHQLQPKPLKLFPRNRFTR

SEQ ID NO: 20602 - DNA, 721 bp, Zea mays subsp. mays
  misc_feature (1)..(721): Ceres Seq. ID no. 15179445
aaggctgcaaatcgggatttggagaaaccctagaaaccggcgagagaggtgaaatctttggggtcgagacgatgaagagcgactggtttaacttgcatcagattgcgagaaactcattcatagctacatcaaccgtgtacgcttccaccgaattcaactttgatcgaagaagcttctgcttttttgcaccagacagatctggctttgtcgtgttgaaatcggagaaggagttcaacaatgcactcagcaaagctcaagatggatctttgccatcggttttctacttcactgctgcgtggtgtggaccttgcaggcttatcgctcctgtaatgttggagctcggtaagaaatatccacatgttactacatacaaggtcgacattgatgagggcggtctttcaaatgctcttgggaagttaaacgtctctgctgtgccaacaatgcaattcttcaaagggggcgtcaagaaagcagagcttgtaggtgcagatgtcattaagctcaggagtatcatggaacatctctacaagtgagagagactctgtcacttgttttactttttttttttgctgcgctgcgtcaaagtaatgcaccaagtgattacgaacaaggaaacaaaaaaaaaactttgttaagatcgtattgaagactcactgtctcacggcatttatttatcaatgtacataatttttgtgattttatcaaaataagtttcattgct

SEQ ID NO: 20603 - protein, 176 aa, Zea mays subsp. mays
  peptide (1)..(176): Ceres Seq. ID no. 15179446
  misc_feature (68)..(176): Pfam Name: Pfam Description:  Thioredoxin
  misc_feature (24)..(176): NCBI GI NO: 18397764 NR Description: thioredoxin family [Arabidopsis thaliana]
  misc_feature (24)..(176): NCBI GI NO: 9755396 NR Description: F17F8.6 [Arabidopsis thaliana]
  misc_feature (34)..(176): NCBI GI NO: 15226875 NR Description: thioredoxin family [Arabidopsis thaliana]
  misc_feature (81)..(176): NCBI GI NO: 26453152 NR Description: putative thioredoxin [Arabidopsis thaliana]
  misc_feature (62)..(172): NCBI GI NO: 27763683 NR Description: thioredoxin o [Chlamydomonas reinhardtii]
  misc_feature (67)..(174): NCBI GI NO: 3915131 NR Description: Thioredoxin H-type
  misc_feature (75)..(174): NCBI GI NO: 40287476 NR Description: thioredoxin [Capsicum annuum]
  misc_feature (69)..(167): NCBI GI NO: 23978434 NR Description: thioredoxin h [Cucurbita maxima]
  misc_feature (75)..(162): NCBI GI NO: 11135312 NR Description: Thioredoxin H-type (TRX-H)
  misc_feature (75)..(173): NCBI GI NO: 267124 NR Description: Thioredoxin H-type 1 (TRX-H1)
GCKSGFGETLETGERGEIFGVETMKSDWFNLHQIARNSFIATSTVYASTEFNFDRRSFCFFAPDRSGFVVLKSEKEFNNALSKAQDGSLPSVFYFTAAWCGPCRLIAPVMLELGKKYPHVTTYKVDIDEGGLSNALGKLNVSAVPTMQFFKGGVKKAELVGADVIKLRSIMEHLYK

SEQ ID NO: 20604 - protein, 153 aa, Zea mays subsp. mays
  peptide (1)..(153): Ceres Seq. ID no. 15179447
  misc_feature (45)..(153): Pfam Name: Pfam Description:  Thioredoxin
  misc_feature (1)..(153): NCBI GI NO: 18397764 NR Description: thioredoxin family [Arabidopsis thaliana]
  misc_feature (1)..(153): NCBI GI NO: 9755396 NR Description: F17F8.6 [Arabidopsis thaliana]
  misc_feature (11)..(153): NCBI GI NO: 15226875 NR Description: thioredoxin family [Arabidopsis thaliana]
  misc_feature (58)..(153): NCBI GI NO: 26453152 NR Description: putative thioredoxin [Arabidopsis thaliana]
  misc_feature (39)..(149): NCBI GI NO: 27763683 NR Description: thioredoxin o [Chlamydomonas reinhardtii]
  misc_feature (44)..(151): NCBI GI NO: 3915131 NR Description: Thioredoxin H-type
  misc_feature (52)..(151): NCBI GI NO: 40287476 NR Description: thioredoxin [Capsicum annuum]
  misc_feature (46)..(144): NCBI GI NO: 23978434 NR Description: thioredoxin h [Cucurbita maxima]
  misc_feature (52)..(139): NCBI GI NO: 11135312 NR Description: Thioredoxin H-type (TRX-H)
  misc_feature (52)..(150): NCBI GI NO: 267124 NR Description: Thioredoxin H-type 1 (TRX-H1)
MKSDWFNLHQIARNSFIATSTVYASTEFNFDRRSFCFFAPDRSGFVVLKSEKEFNNALSKAQDGSLPSVFYFTAAWCGPCRLIAPVMLELGKKYPHVTTYKVDIDEGGLSNALGKLNVSAVPTMQFFKGGVKKAELVGADVIKLRSIMEHLYK

SEQ ID NO: 20605 - DNA, 1391 bp, Zea mays subsp. mays
  misc_feature (1)..(1391): Ceres Seq. ID no. 15179967
acaatctcagattctttgacttttgtctcctctctagattattgcattcgtgtatgagcttaaaccggttccggttaagaatggccgaggaaatctcaaagacaaagctcggatcttcctccgcctctgcttcggtctccggttcatctgctgcctcagctgcaaccaacgccgcgaaatccagatggaacatcttatggcccagttccctccgctggatccccacctccaccgacaacatcatcgccgccgagaaccgccttctctccatcctcaagacgccttatgtacaagagcaagtcaatattggctctggaccaccaggttcgaaagtcaggtggtttaggtcttcaagcgatgagtctaggttcatcaacactgttacctttgacgccaaggaaggttctcctacgcttgtgatggttcatggttatggtgcttctcaaggcttcttctttcgtaacttcgatgctctcgctagtcggtttagggtcattgctattgatcaacttgggtggggtggatcgagtaggcctgattttacttgtaaaagcactgaagaaacagaggcgtggtttattgactcatttgaggaatggcgtaagtccaagaatcttagtaacttcattctgttaggacattcttttggaggttatgttgctgctaagtacgcgcttaagcatcctgagcatgttcagcacttggttctggtgggatctgctggtttctcagctgaatcagatgccaagtccgagtggctgactaagtttagagcaacgtggaaaggtgctcttctaaatcatctatgggagtccaatttcactcctcagaagctgattagagggttaggtccttggggtccgggtcttgtgaaccggtatacaagtgcaagatttggagcacattctgtgggaactgtgctaacagatgaggaatccagattgctcaccgattatgtgtatcatacgttggctgcaaaggctagtggagagttgtgcttgaaatacatcttctcctttggagcatttgctcggaagccactcttacaaagtgcatcagagtggaaagtgccaacaacttttatctatggaatgaatgattggatgaactatcaaggtgcagtggaagcacggaaacacatgaaggtcccttgcgaaatcattcgtgttccacagggtggccattttgtgttcatagacaacccagctggttttcattcagcagtgatgtatgcttgccgcaagtatatatctcaagactcttctcatcaagaactcattccagatggttttcaattggtttaatcgtgctattgttcattttaccttatcaactttactttattaaaaatgtacaaaaaccatatataaaagagaaacaattattttctt

SEQ ID NO: 20606 - protein, 433 aa, Zea mays subsp. mays
  peptide (1)..(433): Ceres Seq. ID no. 15179968
  misc_feature (162)..(411): Pfam Name: Pfam Description:  alpha/beta hydrolase fold
  misc_feature (18)..(433): NCBI GI NO: 30686425 NR Description: hydrolase, alpha/beta fold family
  misc_feature (27)..(433): NCBI GI NO: 7446839 NR Description: hypothetical protein T19F6
  misc_feature (58)..(412): NCBI GI NO: 34875013 NR Description: similar to RIKEN cDNA 1110035H23
  misc_feature (66)..(412): NCBI GI NO: 19527302 NR Description: RIKEN cDNA 1110035H23 [Mus musculus]
  misc_feature (66)..(412): NCBI GI NO: 19353227 NR Description: hypothetical protein FLJ12816 [Homo sapiens]
  misc_feature (126)..(412): NCBI GI NO: 26326239 NR Description: unnamed protein product [Mus musculus]
  misc_feature (66)..(412): NCBI GI NO: 11545767 NR Description: abhydrolase domain containing 4 [Homo sapiens]
  misc_feature (72)..(413): NCBI GI NO: 31204749 NR Description: ENSANGP00000017492 [Anopheles gambiae]
  misc_feature (42)..(415): NCBI GI NO: 24586385 NR Description: CG1882-PA [Drosophila melanogaster]
  misc_feature (77)..(250): NCBI GI NO: 40740327 NR Description: hypothetical protein AN4046.2
NLRFFDFCLLSRLLHSCMSLNRFRLRMAEEISKTKLGSSSASASVSGSSAASAATNAAKSRWNILWPSSLRWIPTSTDNIIAAENRLLSILKTPYVQEQVNIGSGPPGSKVRWFRSSSDESRFINTVTFDAKEGSPTLVMVHGYGASQGFFFRNFDALASRFRVIAIDQLGWGGSSRPDFTCKSTEETEAWFIDSFEEWRKSKNLSNFILLGHSFGGYVAAKYALKHPEHVQHLVLVGSAGFSAESDAKSEWLTKFRATWKGALLNHLWESNFTPQKLIRGLGPWGPGLVNRYTSARFGAHSVGTVLTDEESRLLTDYVYHTLAAKASGELCLKYIFSFGAFARKPLLQSASEWKVPTTFIYGMNDWMNYQGAVEARKHMKVPCEIIRVPQGGHFVFIDNPAGFHSAVMYACRKYISQDSSHQELIPDGFQLV

SEQ ID NO: 20607 - protein, 416 aa, Zea mays subsp. mays
  peptide (1)..(416): Ceres Seq. ID no. 15179969
  misc_feature (145)..(394): Pfam Name: Pfam Description:  alpha/beta hydrolase fold
  misc_feature (1)..(416): NCBI GI NO: 30686425 NR Description: hydrolase, alpha/beta fold family
  misc_feature (10)..(416): NCBI GI NO: 7446839 NR Description: hypothetical protein T19F6
  misc_feature (41)..(395): NCBI GI NO: 34875013 NR Description: similar to RIKEN cDNA 1110035H23
  misc_feature (49)..(395): NCBI GI NO: 19527302 NR Description: RIKEN cDNA 1110035H23 [Mus musculus]
  misc_feature (49)..(395): NCBI GI NO: 19353227 NR Description: hypothetical protein FLJ12816 [Homo sapiens]
  misc_feature (109)..(395): NCBI GI NO: 26326239 NR Description: unnamed protein product [Mus musculus]
  misc_feature (49)..(395): NCBI GI NO: 11545767 NR Description: abhydrolase domain containing 4 [Homo sapiens]
  misc_feature (55)..(396): NCBI GI NO: 31204749 NR Description: ENSANGP00000017492 [Anopheles gambiae]
  misc_feature (25)..(398): NCBI GI NO: 24586385 NR Description: CG1882-PA [Drosophila melanogaster]
  misc_feature (60)..(233): NCBI GI NO: 40740327 NR Description: hypothetical protein AN4046.2
MSLNRFRLRMAEEISKTKLGSSSASASVSGSSAASAATNAAKSRWNILWPSSLRWIPTSTDNIIAAENRLLSILKTPYVQEQVNIGSGPPGSKVRWFRSSSDESRFINTVTFDAKEGSPTLVMVHGYGASQGFFFRNFDALASRFRVIAIDQLGWGGSSRPDFTCKSTEETEAWFIDSFEEWRKSKNLSNFILLGHSFGGYVAAKYALKHPEHVQHLVLVGSAGFSAESDAKSEWLTKFRATWKGALLNHLWESNFTPQKLIRGLGPWGPGLVNRYTSARFGAHSVGTVLTDEESRLLTDYVYHTLAAKASGELCLKYIFSFGAFARKPLLQSASEWKVPTTFIYGMNDWMNYQGAVEARKHMKVPCEIIRVPQGGHFVFIDNPAGFHSAVMYACRKYISQDSSHQELIPDGFQLV

SEQ ID NO: 20608 - protein, 407 aa, Zea mays subsp. mays
  peptide (1)..(407): Ceres Seq. ID no. 15179970
  misc_feature (136)..(385): Pfam Name: Pfam Description:  alpha/beta hydrolase fold
  misc_feature (1)..(407): NCBI GI NO: 30686425 NR Description: hydrolase, alpha/beta fold family
  misc_feature (1)..(407): NCBI GI NO: 7446839 NR Description: hypothetical protein T19F6
  misc_feature (32)..(386): NCBI GI NO: 34875013 NR Description: similar to RIKEN cDNA 1110035H23
  misc_feature (40)..(386): NCBI GI NO: 19527302 NR Description: RIKEN cDNA 1110035H23 [Mus musculus]
  misc_feature (40)..(386): NCBI GI NO: 19353227 NR Description: hypothetical protein FLJ12816 [Homo sapiens]
  misc_feature (100)..(386): NCBI GI NO: 26326239 NR Description: unnamed protein product [Mus musculus]
  misc_feature (40)..(386): NCBI GI NO: 11545767 NR Description: abhydrolase domain containing 4 [Homo sapiens]
  misc_feature (46)..(387): NCBI GI NO: 31204749 NR Description: ENSANGP00000017492 [Anopheles gambiae]
  misc_feature (16)..(389): NCBI GI NO: 24586385 NR Description: CG1882-PA [Drosophila melanogaster]
  misc_feature (51)..(224): NCBI GI NO: 40740327 NR Description: hypothetical protein AN4046.2
MAEEISKTKLGSSSASASVSGSSAASAATNAAKSRWNILWPSSLRWIPTSTDNIIAAENRLLSILKTPYVQEQVNIGSGPPGSKVRWFRSSSDESRFINTVTFDAKEGSPTLVMVHGYGASQGFFFRNFDALASRFRVIAIDQLGWGGSSRPDFTCKSTEETEAWFIDSFEEWRKSKNLSNFILLGHSFGGYVAAKYALKHPEHVQHLVLVGSAGFSAESDAKSEWLTKFRATWKGALLNHLWESNFTPQKLIRGLGPWGPGLVNRYTSARFGAHSVGTVLTDEESRLLTDYVYHTLAAKASGELCLKYIFSFGAFARKPLLQSASEWKVPTTFIYGMNDWMNYQGAVEARKHMKVPCEIIRVPQGGHFVFIDNPAGFHSAVMYACRKYISQDSSHQELIPDGFQLV

SEQ ID NO: 20609 - DNA, 627 bp, Zea mays subsp. mays
  misc_feature (1)..(627): Ceres Seq. ID no. 15179946
ctagattcttcacccattagggttagtgaattttactgagcgatggcgactacaggaactgcgacggcgaagagaaaacctgtgtttgtgaaagtagaacagctgaagcctgggacgaccggtcacacgttgactgttaaggtcgttgattccaatcctgtggctccgacaacccggaaggctcgtccggggagctctatgagtcgtccgtctcagcctagtcgaatcgctgagtgtctcatcggagatgagactgggtgtattctcttcactgctcgtaacgaacaagttgatattatgaagccgggagaaacggtgatactgcgcaattcgaggatagacatgttcaagggtacgatgaggctaggggttgataaatggggacgcatcgaagccactgagcctgcatctttcactgtcaaggaggataacaatctgtctcttgttgagtacgaactgattaacgttaatgatcagtgatcttcttttagtgtttgtttgggaagttagagggttatgattcttcttctactgtgaaggtctttgattaagatgatgcatgacttgtccacagatgcttgcttgtaggaatgttttccttttttttaccctaaacttcaagatctc

SEQ ID NO: 20610 - protein, 145 aa, Zea mays subsp. mays
  peptide (1)..(145): Ceres Seq. ID no. 15179947
  misc_feature (38)..(116): Pfam Name: Pfam Description:  OB-fold nucleic acid binding domain
  misc_feature (1)..(145): NCBI GI NO: 15235304 NR Description: expressed protein [Arabidopsis thaliana]
  misc_feature (5)..(144): NCBI GI NO: 34904470 NR Description: OSJNBa0086P08.14
  misc_feature (6)..(145): NCBI GI NO: 18403397 NR Description: expressed protein [Arabidopsis thaliana]
  misc_feature (7)..(142): NCBI GI NO: 34909622 NR Description: P0435B05.31
  misc_feature (3)..(140): NCBI GI NO: 15219562 NR Description: hypothetical protein [Arabidopsis thaliana]
  misc_feature (6)..(142): NCBI GI NO: 18395285 NR Description: expressed protein [Arabidopsis thaliana]
  misc_feature (8)..(142): NCBI GI NO: 18391179 NR Description: expressed protein [Arabidopsis thaliana]
  misc_feature (11)..(145): NCBI GI NO: 24413970 NR Description: contains EST AU181579
  misc_feature (6)..(87): NCBI GI NO: 25329540 NR Description: probable tyrosyl-tRNA synthetase
MATTGTATAKRKPVFVKVEQLKPGTTGHTLTVKVVDSNPVAPTTRKARPGSSMSRPSQPSRIAECLIGDETGCILFTARNEQVDIMKPGETVILRNSRIDMFKGTMRLGVDKWGRIEATEPASFTVKEDNNLSLVEYELINVNDQ

SEQ ID NO: 20611 - protein, 93 aa, Zea mays subsp. mays
  peptide (1)..(93): Ceres Seq. ID no. 15179948
  misc_feature (1)..(64): Pfam Name: Pfam Description:  OB-fold nucleic acid binding domain
  misc_feature (1)..(93): NCBI GI NO: 15235304 NR Description: expressed protein [Arabidopsis thaliana]
  misc_feature (1)..(92): NCBI GI NO: 34904470 NR Description: OSJNBa0086P08.14
  misc_feature (1)..(93): NCBI GI NO: 18403397 NR Description: expressed protein [Arabidopsis thaliana]
  misc_feature (1)..(90): NCBI GI NO: 34909622 NR Description: P0435B05.31
  misc_feature (1)..(88): NCBI GI NO: 15219562 NR Description: hypothetical protein [Arabidopsis thaliana]
  misc_feature (1)..(90): NCBI GI NO: 18395285 NR Description: expressed protein [Arabidopsis thaliana]
  misc_feature (1)..(90): NCBI GI NO: 18391179 NR Description: expressed protein [Arabidopsis thaliana]
  misc_feature (1)..(93): NCBI GI NO: 24413970 NR Description: contains EST AU181579
  misc_feature (1)..(35): NCBI GI NO: 25329540 NR Description: probable tyrosyl-tRNA synthetase
MSRPSQPSRIAECLIGDETGCILFTARNEQVDIMKPGETVILRNSRIDMFKGTMRLGVDKWGRIEATEPASFTVKEDNNLSLVEYELINVNDQ

SEQ ID NO: 20612 - DNA, 722 bp, Zea mays subsp. mays
  misc_feature (1)..(722): Ceres Seq. ID no. 15179245
gtagtctccgctcatccaccctcccttttctgttcttgacttgtgcagcgcagttgcataaagaaatggcgacttttcaaatctcttccactagcatgaccaccaaggcggttcttagaagccagccgaccaacaagctcatcacttacaagagcccacaagtttccattggatccgtcaagaaagtctcgagatcctttggcttgaaatgctcagccaattctggtgccactatgtcagctgtatacaaggtcaagctcataggacccgaaggcgaagaacacgagttcgaggttcaggacgaccagttcatattggacgcagctgaagaggcaggagttgacttgccttactcttgcagagccggagcgtgttccacctgcgccggtcagatcgtgaaaggccaagttgaccagtctgaaggttcgtttcttgaggatgatcacttggagaaaggttttgtcttgacatgtgtggcttacccgcagtcggactgtgtgatccatacccacaaggaaactgaactcttctaagtcacggtggtagtgatgcccaattgtcatttgagttattgttattattgttatcagtttccttctacgaatttgggtgtgtttaattgtatgcttttgtatggaaacgtctcaggatatgccttttagtgttcatcagtcttcaccgggttgcaactggttaataaaatggttaaatgttattcagtc

SEQ ID NO: 20613 - protein, 176 aa, Zea mays subsp. mays
  peptide (1)..(176): Ceres Seq. ID no. 15179246
  misc_feature (87)..(163): Pfam Name: Pfam Description:  2Fe-2S iron-sulfur cluster binding domain
  misc_feature (22)..(176): NCBI GI NO: 15225888 NR Description: ferredoxin, putative [Arabidopsis thaliana]
  misc_feature (79)..(176): NCBI GI NO: 119952 NR Description: Ferredoxin, root R-B2
  misc_feature (22)..(175): NCBI GI NO: 2129915 NR Description: ferredoxin
  misc_feature (22)..(176): NCBI GI NO: 13182955 NR Description: ferredoxin [Impatiens balsamina]
  misc_feature (79)..(176): NCBI GI NO: 119934 NR Description: Ferredoxin, root R-B1
  misc_feature (29)..(176): NCBI GI NO: 119958 NR Description: Ferredoxin III, chloroplast precursor (Fd III)
  misc_feature (22)..(176): NCBI GI NO: 40714664 NR Description: putative ferredoxin
  misc_feature (50)..(176): NCBI GI NO: 7430754 NR Description: ferredoxin [2Fe-2S], root - rice
  misc_feature (22)..(176): NCBI GI NO: 6970498 NR Description: non-photosynthetic ferredoxin [Ipomoea nil]
  misc_feature (57)..(176): NCBI GI NO: 3023750 NR Description: Ferredoxin VI, chloroplast precursor (Fd VI)
SLRSSTLPFLFLTCAAQLHKEMATFQISSTSMTTKAVLRSQPTNKLITYKSPQVSIGSVKKVSRSFGLKCSANSGATMSAVYKVKLIGPEGEEHEFEVQDDQFILDAAEEAGVDLPYSCRAGACSTCAGQIVKGQVDQSEGSFLEDDHLEKGFVLTCVAYPQSDCVIHTHKETELF

SEQ ID NO: 20614 - protein, 155 aa, Zea mays subsp. mays
  peptide (1)..(155): Ceres Seq. ID no. 15179247
  misc_feature (66)..(142): Pfam Name: Pfam Description:  2Fe-2S iron-sulfur cluster binding domain
  misc_feature (1)..(155): NCBI GI NO: 15225888 NR Description: ferredoxin, putative [Arabidopsis thaliana]
  misc_feature (58)..(155): NCBI GI NO: 119952 NR Description: Ferredoxin, root R-B2
  misc_feature (1)..(154): NCBI GI NO: 2129915 NR Description: ferredoxin
  misc_feature (1)..(155): NCBI GI NO: 13182955 NR Description: ferredoxin [Impatiens balsamina]
  misc_feature (58)..(155): NCBI GI NO: 119934 NR Description: Ferredoxin, root R-B1
  misc_feature (8)..(155): NCBI GI NO: 119958 NR Description: Ferredoxin III, chloroplast precursor (Fd III)
  misc_feature (1)..(155): NCBI GI NO: 40714664 NR Description: putative ferredoxin
  misc_feature (29)..(155): NCBI GI NO: 7430754 NR Description: ferredoxin [2Fe-2S], root - rice
  misc_feature (1)..(155): NCBI GI NO: 6970498 NR Description: non-photosynthetic ferredoxin [Ipomoea nil]
  misc_feature (36)..(155): NCBI GI NO: 3023750 NR Description: Ferredoxin VI, chloroplast precursor (Fd VI)
MATFQISSTSMTTKAVLRSQPTNKLITYKSPQVSIGSVKKVSRSFGLKCSANSGATMSAVYKVKLIGPEGEEHEFEVQDDQFILDAAEEAGVDLPYSCRAGACSTCAGQIVKGQVDQSEGSFLEDDHLEKGFVLTCVAYPQSDCVIHTHKETELF

SEQ ID NO: 20615 - protein, 145 aa, Zea mays subsp. mays
  peptide (1)..(145): Ceres Seq. ID no. 15179248
  misc_feature (56)..(132): Pfam Name: Pfam Description:  2Fe-2S iron-sulfur cluster binding domain
  misc_feature (1)..(145): NCBI GI NO: 15225888 NR Description: ferredoxin, putative [Arabidopsis thaliana]
  misc_feature (48)..(145): NCBI GI NO: 119952 NR Description: Ferredoxin, root R-B2
  misc_feature (1)..(144): NCBI GI NO: 2129915 NR Description: ferredoxin
  misc_feature (1)..(145): NCBI GI NO: 13182955 NR Description: ferredoxin [Impatiens balsamina]
  misc_feature (48)..(145): NCBI GI NO: 119934 NR Description: Ferredoxin, root R-B1
  misc_feature (1)..(145): NCBI GI NO: 119958 NR Description: Ferredoxin III, chloroplast precursor (Fd III)
  misc_feature (1)..(145): NCBI GI NO: 40714664 NR Description: putative ferredoxin
  misc_feature (19)..(145): NCBI GI NO: 7430754 NR Description: ferredoxin [2Fe-2S], root - rice
  misc_feature (1)..(145): NCBI GI NO: 6970498 NR Description: non-photosynthetic ferredoxin [Ipomoea nil]
  misc_feature (26)..(145): NCBI GI NO: 3023750 NR Description: Ferredoxin VI, chloroplast precursor (Fd VI)
MTTKAVLRSQPTNKLITYKSPQVSIGSVKKVSRSFGLKCSANSGATMSAVYKVKLIGPEGEEHEFEVQDDQFILDAAEEAGVDLPYSCRAGACSTCAGQIVKGQVDQSEGSFLEDDHLEKGFVLTCVAYPQSDCVIHTHKETELF

SEQ ID NO: 20616 - DNA, 1000 bp, Zea mays subsp. mays
  misc_feature (1)..(1000): Ceres Seq. ID no. 15179176
caaaaagaatcataaaatcctcatcaagtctcctatataaacatctccactcctcaacgatccatctattaactaaaaacgttccaaagggacaaagatcacaaacaaatgtcttttggatcggtccctatcgtggccgcggtggccatacaactcctccttatacccagcgttgttctgtctcttaacattaccaatttgtatctccaccatgcatgcaacaacacccaagggaaatacaagccggggagtttgttcgagaaaaatctcaacactgtcatcaaaaacatatccacctttgatctgcacaacggcttcgcgctcgactctaatatgaagagtccctattttgatatacctcccaatactgttttcgtcacgctccaatgccgtggtgactcctacgggcccaagtgtcactcttgccttgccgaagccctctctgggcttcggaagaaatgtcctggacacaaaggagcaacaatatggtatgaccaatgtcttttggatatttctacagaaaattccattagaacggccctaccgaacagagtccactacgataattatttgtgtataagcaatccaaaatccgtgagcggcgataagaagatcttcgaaaagaagaagaaggatttcaccgataagctattgtctgtagtcaacaagacgactgacagcaacctcagggggccactgtacgcaaagggggagatgatgattgggaaaaagaaattttatggaatgttgcaatgtacgaacgagttatttgcgagtgcttgctatgtgtgtctagagtggcttgtcttggggcatccattctgcttctatgaaggacaaggagctagactaatgtgtagaagctgtgttgcaaggtttgagttttacccttttcttagaacttaagactgttttatgggagctcttaatttgctttatgtttgaataagtgctatatcaaggaataaaaacagtcaacctctttgtggttattttatgt

SEQ ID NO: 20617 - protein, 265 aa, Zea mays subsp. mays
  peptide (1)..(265): Ceres Seq. ID no. 15179177
  misc_feature (88)..(140): Pfam Name: Pfam Description:  Domain of unknown function DUF26
  misc_feature (3)..(264): NCBI GI NO: 15233228 NR Description: receptor-like protein kinase-related
  misc_feature (3)..(248): NCBI GI NO: 9279753 NR Description: emb|CAB45833
  misc_feature (8)..(264): NCBI GI NO: 11994708 NR Description: contains similarity to serine/threoninekinase~gene_id:MRI12
  misc_feature (12)..(264): NCBI GI NO: 15228583 NR Description: receptor kinase, putative [Arabidopsis thaliana]
  misc_feature (3)..(264): NCBI GI NO: 15233235 NR Description: receptor-like kinase-related
  misc_feature (3)..(264): NCBI GI NO: 15233366 NR Description: pollen coat receptor kinase, putative
  misc_feature (7)..(263): NCBI GI NO: 9279746 NR Description: contains similarity to receptor proteinkinase~gene_id:MZN24
  misc_feature (9)..(264): NCBI GI NO: 9279762 NR Description: emb|CAB45834
  misc_feature (6)..(263): NCBI GI NO: 15233201 NR Description: receptor-like protein kinase-related
  misc_feature (12)..(265): NCBI GI NO: 15233241 NR Description: receptor-like protein kinase-related
MSFGSVPIVAAVAIQLLLIPSVVLSLNITNLYLHHACNNTQGKYKPGSLFEKNLNTVIKNISTFDLHNGFALDSNMKSPYFDIPPNTVFVTLQCRGDSYGPKCHSCLAEALSGLRKKCPGHKGATIWYDQCLLDISTENSIRTALPNRVHYDNYLCISNPKSVSGDKKIFEKKKKDFTDKLLSVVNKTTDSNLRGPLYAKGEMMIGKKKFYGMLQCTNELFASACYVCLEWLVLGHPFCFYEGQGARLMCRSCVARFEFYPFLRT

SEQ ID NO: 20618 - protein, 190 aa, Zea mays subsp. mays
  peptide (1)..(190): Ceres Seq. ID no. 15179178
  misc_feature (13)..(65): Pfam Name: Pfam Description:  Domain of unknown function DUF26
  misc_feature (1)..(189): NCBI GI NO: 15233228 NR Description: receptor-like protein kinase-related
  misc_feature (1)..(173): NCBI GI NO: 9279753 NR Description: emb|CAB45833
  misc_feature (1)..(189): NCBI GI NO: 11994708 NR Description: contains similarity to serine/threoninekinase~gene_id:MRI12
  misc_feature (1)..(189): NCBI GI NO: 15228583 NR Description: receptor kinase, putative [Arabidopsis thaliana]
  misc_feature (1)..(189): NCBI GI NO: 15233235 NR Description: receptor-like kinase-related
  misc_feature (1)..(189): NCBI GI NO: 15233366 NR Description: pollen coat receptor kinase, putative
  misc_feature (1)..(188): NCBI GI NO: 9279746 NR Description: contains similarity to receptor proteinkinase~gene_id:MZN24
  misc_feature (1)..(189): NCBI GI NO: 9279762 NR Description: emb|CAB45834
  misc_feature (1)..(188): NCBI GI NO: 15233201 NR Description: receptor-like protein kinase-related
  misc_feature (1)..(190): NCBI GI NO: 15233241 NR Description: receptor-like protein kinase-related
MKSPYFDIPPNTVFVTLQCRGDSYGPKCHSCLAEALSGLRKKCPGHKGATIWYDQCLLDISTENSIRTALPNRVHYDNYLCISNPKSVSGDKKIFEKKKKDFTDKLLSVVNKTTDSNLRGPLYAKGEMMIGKKKFYGMLQCTNELFASACYVCLEWLVLGHPFCFYEGQGARLMCRSCVARFEFYPFLRT

SEQ ID NO: 20619 - DNA, 1083 bp, Zea mays subsp. mays
  misc_feature (1)..(1083): Ceres Seq. ID no. 15179333
aaaccacaagttctgatggaccgtgttccttgagctcttaacacttcccttcagaccattactgaacaatcatcgtctcttggtgacagaagagaagagttaaggtaaagagcgaaaaatggcagcacaggcacttgtctcttcttcacttacctcctctgttcagacagctagacagatattcggcacaaaaccagctgtctccgtgaggaagacctcctttgttattaaggctgcctcaactccacctgtcaagcaaggagcaaacagaccattgtggtttgcatcttcacaatctctgtcttacttggatggcagcttacctggcgactatggattcgacccgcttggtctttcagacccagaaggtactggaggtttcatcgagccaagatggttagcctacggagagatcatcaacggaaggttcgctatgttaggtgcagctggagctattgcccctgagattcttggcaaagcaggtttgattccagcagacactgcccttccttggttccaaaccggtgtgattccacctgcagggacatacagctactgggcagacccttacacactctttgttctcgagatggctttgatgggatttgctgagcaccggaggttgcaggattggtacaacccaggatcaatgggcaaacagtacttcttgggcttagagaaaggttttgccggttcgggtgacccgtcttaccccggtggacctttctttaaccctcttgggtttgggaaagacgagaagtcaatgaaggagttgaaactcaaggaggtcaagaacggtagactggctatgctcgcaatcctaggctattttgtgcagggactagtgaccggtgtggggccataccagaaccttcttgatcatttggcggatccagtcaacaacaatgtcttgaccagcctcaagttccactgagatgatcttcatatcatcccatgtgttttatgttggactctcattctcttgtatcctacagtcttcgtattgtaacaccctttgtaaacatattatatctttgtaagatatgaaaatgccaatggccaaaaagaacaacttcgaggatt

SEQ ID NO: 20620 - protein, 271 aa, Zea mays subsp. mays
  peptide (1)..(271): Ceres Seq. ID no. 15179334
  misc_feature (59)..(242): Pfam Name: Pfam Description:  Chlorophyll A-B binding protein
  misc_feature (1)..(271): NCBI GI NO: 15219941 NR Description: light-harvesting chlorophyll a/b binding protein
  misc_feature (1)..(271): NCBI GI NO: 430947 NR Description: PSI type III chlorophyll a/b-binding protein
  misc_feature (1)..(271): NCBI GI NO: 21554335 NR Description: PSI type III chlorophyll a/b-binding protein
  misc_feature (1)..(271): NCBI GI NO: 82080 NR Description: chlorophyll a/b-binding protein type III precursor
  misc_feature (1)..(271): NCBI GI NO: 115813 NR Description: Chlorophyll A-B binding protein 8
  misc_feature (1)..(271): NCBI GI NO: 7443229 NR Description: probable chlorophyll a/b-binding protein type IIIprecursor
  misc_feature (1)..(271): NCBI GI NO: 99487 NR Description: chlorophyll a/b-binding protein
  misc_feature (70)..(262): NCBI GI NO: 7271947 NR Description: chlorophyll a/b-binding protein type III
  misc_feature (11)..(267): NCBI GI NO: 40714511 NR Description: light-harvesting chlorophyll-a/b protein ofphotosystem I
  misc_feature (107)..(271): NCBI GI NO: 37780998 NR Description: chlorophyll a/b binding protein [Vitis vinifera]
MAAQALVSSSLTSSVQTARQIFGTKPAVSVRKTSFVIKAASTPPVKQGANRPLWFASSQSLSYLDGSLPGDYGFDPLGLSDPEGTGGFIEPRWLAYGEIINGRFAMLGAAGAIAPEILGKAGLIPADTALPWFQTGVIPPAGTYSYWADPYTLFVLEMALMGFAEHRRLQDWYNPGSMGKQYFLGLEKGFAGSGDPSYPGGPFFNPLGFGKDEKSMKELKLKEVKNGRLAMLAILGYFVQGLVTGVGPYQNLLDHLADPVNNNVLTSLKFH

SEQ ID NO: 20621 - protein, 166 aa, Zea mays subsp. mays
  peptide (1)..(166): Ceres Seq. ID no. 15179335
  misc_feature (1)..(137): Pfam Name: Pfam Description:  Chlorophyll A-B binding protein
  misc_feature (1)..(166): NCBI GI NO: 15219941 NR Description: light-harvesting chlorophyll a/b binding protein
  misc_feature (1)..(166): NCBI GI NO: 430947 NR Description: PSI type III chlorophyll a/b-binding protein
  misc_feature (1)..(166): NCBI GI NO: 21554335 NR Description: PSI type III chlorophyll a/b-binding protein
  misc_feature (1)..(166): NCBI GI NO: 82080 NR Description: chlorophyll a/b-binding protein type III precursor
  misc_feature (1)..(166): NCBI GI NO: 115813 NR Description: Chlorophyll A-B binding protein 8
  misc_feature (1)..(166): NCBI GI NO: 7443229 NR Description: probable chlorophyll a/b-binding protein type IIIprecursor
  misc_feature (1)..(166): NCBI GI NO: 99487 NR Description: chlorophyll a/b-binding protein
  misc_feature (1)..(157): NCBI GI NO: 7271947 NR Description: chlorophyll a/b-binding protein type III
  misc_feature (1)..(162): NCBI GI NO: 40714511 NR Description: light-harvesting chlorophyll-a/b protein ofphotosystem I
  misc_feature (2)..(166): NCBI GI NO: 37780998 NR Description: chlorophyll a/b binding protein [Vitis vinifera]
MLGAAGAIAPEILGKAGLIPADTALPWFQTGVIPPAGTYSYWADPYTLFVLEMALMGFAEHRRLQDWYNPGSMGKQYFLGLEKGFAGSGDPSYPGGPFFNPLGFGKDEKSMKELKLKEVKNGRLAMLAILGYFVQGLVTGVGPYQNLLDHLADPVNNNVLTSLKFH

SEQ ID NO: 20622 - DNA, 780 bp, Zea mays subsp. mays
  misc_feature (1)..(780): Ceres Seq. ID no. 15175364
aaaatccgatccaaatccctccaccgccgtcccggatttaccaaaaacccggccaccaccgccatgggctccgcgagccgcgccatctcgtgcctgtgctgcccctgcaggtgcctcttcagctgcctgtgcagcatcctcgtctcgctcgccgtcacgctgggcctcctggccctcgccctctacctcatattgaagccgcgcatgatcgcggccaccgtcgactcggcctcgctctcccagttcgcgctctccgcttcctccacgctcgcctacgacctcaacgtcaccatgacggtgcgcaaccccaacacgcgggtggggctctactacgacgacgtccaggcgctggcctcgtacgagggccagcgcttcggctacgcgccgctcgacgccttctatcagggcacgggggcggccaccaagctggcgccggggttccgcggcacgcagctgctccagggcgacgtcgccgccggccagttcaggcagcagcagtccgcggggcgcttcgacgtcgacgtggatctcaacgccaagctcagggtcaagttctgggcgttcaaggcccacgggcccaacgcgaagatcacgtgcacgctctccgtccccgccgccgccagcgcctcgccctttcagcccacggattgcaaagtgtggttctgatttttggctgataggatagggatactctgcctgctgctgctgctgtacatcgccgtggacagcgaataacgctcgtgcgccctggtggccacaagacaagtttgtttttctgac

SEQ ID NO: 20623 - protein, 224 aa, Zea mays subsp. mays
  peptide (1)..(224): Ceres Seq. ID no. 15175365
NPIQIPPPPSRIYQKPGHHRHGLREPRHLVPVLPLQVPLQLPVQHPRLARRHAGPPGPRPLPHIEAAHDRGHRRLGLALPVRALRFLHARLRPQRHHDGAQPQHAGGALLRRRPGAGLVRGPALRLRAARRLLSGHGGGHQAGAGVPRHAAAPGRRRRRPVQAAAVRGALRRRRGSQRQAQGQVLGVQGPRAQREDHVHALRPRRRQRLALSAHGLQSVVLIFG

SEQ ID NO: 20624 - protein, 221 aa, Zea mays subsp. mays
  peptide (1)..(221): Ceres Seq. ID no. 15175366
  misc_feature (22)..(221): NCBI GI NO: 32488714 NR Description: OSJNBa0088H09.15
  misc_feature (22)..(221): NCBI GI NO: 7489482 NR Description: hin1 protein homolog - rice
  misc_feature (33)..(220): NCBI GI NO: 7417006 NR Description: harpin inducing protein [Nicotiana tabacum]
  misc_feature (33)..(220): NCBI GI NO: 24429927 NR Description: hin1-like protein [Solanum tuberosum]
  misc_feature (30)..(217): NCBI GI NO: 9502174 NR Description: NDR1/HIN1-Like protein 2 [Arabidopsis thaliana]
  misc_feature (15)..(220): NCBI GI NO: 7489141 NR Description: hin1 protein - common tobacco
  misc_feature (30)..(217): NCBI GI NO: 18399306 NR Description: harpin-induced protein family
  misc_feature (30)..(219): NCBI GI NO: 15226994 NR Description: harpin-induced protein 1 family (HIN1)
  misc_feature (31)..(221): NCBI GI NO: 15239999 NR Description: harpin-induced protein 1 family
  misc_feature (31)..(221): NCBI GI NO: 21450870 NR Description: putative harpin-induced protein
KIRSKSLHRRPGFTKNPATTAMGSASRAISCLCCPCRCLFSCLCSILVSLAVTLGLLALALYLILKPRMIAATVDSASLSQFALSASSTLAYDLNVTMTVRNPNTRVGLYYDDVQALASYEGQRFGYAPLDAFYQGTGAATKLAPGFRGTQLLQGDVAAGQFRQQQSAGRFDVDVDLNAKLRVKFWAFKAHGPNAKITCTLSVPAAASASPFQPTDCKVWF

SEQ ID NO: 20625 - protein, 200 aa, Zea mays subsp. mays
  peptide (1)..(200): Ceres Seq. ID no. 15175367
  misc_feature (1)..(200): NCBI GI NO: 32488714 NR Description: OSJNBa0088H09.15
  misc_feature (1)..(200): NCBI GI NO: 7489482 NR Description: hin1 protein homolog - rice
  misc_feature (12)..(199): NCBI GI NO: 7417006 NR Description: harpin inducing protein [Nicotiana tabacum]
  misc_feature (12)..(199): NCBI GI NO: 24429927 NR Description: hin1-like protein [Solanum tuberosum]
  misc_feature (9)..(196): NCBI GI NO: 9502174 NR Description: NDR1/HIN1-Like protein 2 [Arabidopsis thaliana]
  misc_feature (1)..(199): NCBI GI NO: 7489141 NR Description: hin1 protein - common tobacco
  misc_feature (9)..(196): NCBI GI NO: 18399306 NR Description: harpin-induced protein family
  misc_feature (9)..(198): NCBI GI NO: 15226994 NR Description: harpin-induced protein 1 family (HIN1)
  misc_feature (10)..(200): NCBI GI NO: 15239999 NR Description: harpin-induced protein 1 family
  misc_feature (10)..(200): NCBI GI NO: 21450870 NR Description: putative harpin-induced protein
MGSASRAISCLCCPCRCLFSCLCSILVSLAVTLGLLALALYLILKPRMIAATVDSASLSQFALSASSTLAYDLNVTMTVRNPNTRVGLYYDDVQALASYEGQRFGYAPLDAFYQGTGAATKLAPGFRGTQLLQGDVAAGQFRQQQSAGRFDVDVDLNAKLRVKFWAFKAHGPNAKITCTLSVPAAASASPFQPTDCKVWF

SEQ ID NO: 20626 - DNA, 972 bp, Zea mays subsp. mays
  misc_feature (1)..(972): Ceres Seq. ID no. 15174020
tccaatatctaaaaggagttctcaagaataataaaacaagaaaagtaataattgtgtaaaagatcagcaaaatggttgctcaagggttcactgtggatcttgacaagccccttgctttccaggttggtcatctcggagaagcttacgacgaatgggttcaccaacctattgtaaccaaggaaggccctcggtttttccatagtgacttttgggagttcttgacccttacagtttggtgggcggttcctgtcatttggttgccagttgttgtctggtgcatctccatgtcagtaagcatcggctgttcattcccagaaattgtctcattggttgccttgggaatatttatctggacttttatagaatactgtcttcaccgtttccttttccacatgaagaccaagagttactggggaaacacggcacactatcttattcacggataccatcacaagcacccaatggaccaccttcgactcgtctttcctcctgccttaacagctattatgtgctttcctctctggaaccttgcgaagctaatcgcaactccttcaaccgcacctgcattgtttggaggcggcctgctcggctatgtgatgtacgatcttactcactactaccttcaccatgccaacccaaccataccagtaaccaaaagcctcaagaaatcccatttgaaccatcacttcaggattcaggacaagggatatggagtaacttcgtcgctatgggacatagtgtttggtacccttcccaccacaaaagctctcaaaagagcgcaacaaaagtactaagatggatgcaaaacgaaaaggatatttgtaatacactgtttatcttaaactattaatcatcactctatgttaatctgatcacgtttcatttgggcaatgtctttgtatatcaatatacttcacatcctatgtaatagtttttatgtgtttcacaacttaaaaaaaaaagactttgttt

SEQ ID NO: 20627 - protein, 240 aa, Zea mays subsp. mays
  peptide (1)..(240): Ceres Seq. ID no. 15174021
  misc_feature (86)..(229): Pfam Name: Pfam Description:  Fatty acid hydroxylase
  misc_feature (1)..(237): NCBI GI NO: 15226828 NR Description: fatty acid hydroxylase (FAH1)
  misc_feature (1)..(232): NCBI GI NO: 15233426 NR Description: fatty acid hydroxylase, putative
  misc_feature (1)..(231): NCBI GI NO: 34897078 NR Description: putative fatty acid hydroxylase
  misc_feature (71)..(237): NCBI GI NO: 20071844 NR Description: Faxdc1 protein [Mus musculus]
  misc_feature (16)..(68): NCBI GI NO: 20071844 NR Description: Faxdc1 protein [Mus musculus]
  misc_feature (8)..(226): NCBI GI NO: 32404274 NR Description: hypothetical protein [Neurospora crassa]
  misc_feature (8)..(234): NCBI GI NO: 40746791 NR Description: hypothetical protein AN0918.2
  misc_feature (8)..(226): NCBI GI NO: 18447515 NR Description: RE63157p [Drosophila melanogaster]
  misc_feature (8)..(226): NCBI GI NO: 6323928 NR Description: Required for the hydroxylation of the very longchain fatty acid
  misc_feature (6)..(234): NCBI GI NO: 31200833 NR Description: ENSANGP00000014963 [Anopheles gambiae]
MVAQGFTVDLDKPLAFQVGHLGEAYDEWVHQPIVTKEGPRFFHSDFWEFLTLTVWWAVPVIWLPVVVWCISMSVSIGCSFPEIVSLVALGIFIWTFIEYCLHRFLFHMKTKSYWGNTAHYLIHGYHHKHPMDHLRLVFPPALTAIMCFPLWNLAKLIATPSTAPALFGGGLLGYVMYDLTHYYLHHANPTIPVTKSLKKSHLNHHFRIQDKGYGVTSSLWDIVFGTLPTTKALKRAQQKY

SEQ ID NO: 20628 - protein, 169 aa, Zea mays subsp. mays
  peptide (1)..(169): Ceres Seq. ID no. 15174022
  misc_feature (15)..(158): Pfam Name: Pfam Description:  Fatty acid hydroxylase
  misc_feature (1)..(166): NCBI GI NO: 15226828 NR Description: fatty acid hydroxylase (FAH1)
  misc_feature (1)..(161): NCBI GI NO: 15233426 NR Description: fatty acid hydroxylase, putative
  misc_feature (1)..(160): NCBI GI NO: 34897078 NR Description: putative fatty acid hydroxylase
  misc_feature (1)..(166): NCBI GI NO: 20071844 NR Description: Faxdc1 protein [Mus musculus]
  misc_feature (1)..(155): NCBI GI NO: 32404274 NR Description: hypothetical protein [Neurospora crassa]
  misc_feature (1)..(163): NCBI GI NO: 40746791 NR Description: hypothetical protein AN0918.2
  misc_feature (1)..(155): NCBI GI NO: 18447515 NR Description: RE63157p [Drosophila melanogaster]
  misc_feature (1)..(155): NCBI GI NO: 6323928 NR Description: Required for the hydroxylation of the very longchain fatty acid
  misc_feature (1)..(163): NCBI GI NO: 31200833 NR Description: ENSANGP00000014963 [Anopheles gambiae]
  misc_feature (1)..(156): NCBI GI NO: 39589620 NR Description: Hypothetical protein CBG12227
MSVSIGCSFPEIVSLVALGIFIWTFIEYCLHRFLFHMKTKSYWGNTAHYLIHGYHHKHPMDHLRLVFPPALTAIMCFPLWNLAKLIATPSTAPALFGGGLLGYVMYDLTHYYLHHANPTIPVTKSLKKSHLNHHFRIQDKGYGVTSSLWDIVFGTLPTTKALKRAQQKY

SEQ ID NO: 20629 - protein, 133 aa, Zea mays subsp. mays
  peptide (1)..(133): Ceres Seq. ID no. 15174023
  misc_feature (1)..(122): Pfam Name: Pfam Description:  Fatty acid hydroxylase
  misc_feature (1)..(130): NCBI GI NO: 15226828 NR Description: fatty acid hydroxylase (FAH1)
  misc_feature (1)..(125): NCBI GI NO: 15233426 NR Description: fatty acid hydroxylase, putative
  misc_feature (1)..(124): NCBI GI NO: 34897078 NR Description: putative fatty acid hydroxylase
  misc_feature (1)..(130): NCBI GI NO: 20071844 NR Description: Faxdc1 protein [Mus musculus]
  misc_feature (1)..(119): NCBI GI NO: 32404274 NR Description: hypothetical protein [Neurospora crassa]
  misc_feature (1)..(127): NCBI GI NO: 40746791 NR Description: hypothetical protein AN0918.2
  misc_feature (1)..(119): NCBI GI NO: 18447515 NR Description: RE63157p [Drosophila melanogaster]
  misc_feature (1)..(119): NCBI GI NO: 6323928 NR Description: Required for the hydroxylation of the very longchain fatty acid
  misc_feature (1)..(127): NCBI GI NO: 31200833 NR Description: ENSANGP00000014963 [Anopheles gambiae]
  misc_feature (1)..(120): NCBI GI NO: 39589620 NR Description: Hypothetical protein CBG12227
MKTKSYWGNTAHYLIHGYHHKHPMDHLRLVFPPALTAIMCFPLWNLAKLIATPSTAPALFGGGLLGYVMYDLTHYYLHHANPTIPVTKSLKKSHLNHHFRIQDKGYGVTSSLWDIVFGTLPTTKALKRAQQKY

SEQ ID NO: 20630 - DNA, 817 bp, Zea mays subsp. mays
  misc_feature (1)..(817): Ceres Seq. ID no. 15179979
aagagacgaatctctctcttagatcgtatgatctgatccgaagagaagctcaggaagaagatgggaatcgtattcacgaagctgttttcctccgtgtttggaaacaaagaagctcgtatcctcgtcctcggcctcgacaatgccggaaaaaccaccatcctctatcggcttcagatgggagaggtcgtctccacgatcccgactattggatttaacgtggagactgtgcagtacaacaatatcaagtttcaggtctgggatttaggtggacaaacgagtatcaggccatattggagatgctattttccaaatacacaggcagtgatttacgttgttgattcgagtgatactgatagaattggagtggcgaaagaggagttccatgcaattttggaggaagaggaattgaaaggtgcaatggttcttatatttgcaaacaagcaggatctgccaggcgcacttgacgatgcggctgtgacagaggccttggagttgcacaagataaagagtcgtcaatgggcaatcttcaaaacttgtgctgtgaaaggcgaaggacttttcgaaggcctagactggttgagtaataccctcaaatcagggacgggttaacctcatcactcaccacaaagcagcagcgtgcgtgtatcacatcttttctactgttagctttgcattcttcgacaaagagttgatagcgtctcagttattaatctcttatgtttttgtccgaagaagataagacttgtggatttgttgttgtgacatttaagacaggatattgatttttaacatgaaatataacatattaagaatcacc

SEQ ID NO: 20631 - protein, 182 aa, Zea mays subsp. mays
  peptide (1)..(182): Ceres Seq. ID no. 15179980
  misc_feature (4)..(177): Pfam Name: Pfam Description:  ADP-ribosylation factor family
  misc_feature (1)..(182): NCBI GI NO: 3182922 NR Description: ADP-ribosylation factor 1
  misc_feature (1)..(182): NCBI GI NO: 30682545 NR Description: ADP-ribosylation factor 3 (ARF3)
  misc_feature (1)..(179): NCBI GI NO: 40253742 NR Description: putative ADP-ribosylation factor 3
  misc_feature (1)..(179): NCBI GI NO: 13385340 NR Description: ADP-ribosylation-like 1 [Mus musculus]
  misc_feature (1)..(179): NCBI GI NO: 11693150 NR Description: ADP-ribosylation factor-like 1 [Rattus norvegicus]
  misc_feature (1)..(179): NCBI GI NO: 4502227 NR Description: ADP-ribosylation factor-like 1 [Homo sapiens]
  misc_feature (1)..(179): NCBI GI NO: 39653273 NR Description: ADP-ribosylation factor [Medicago sativa]
  misc_feature (1)..(179): NCBI GI NO: 29124979 NR Description: ADP-ribosylation factor 1 [Populus tremuloides]
  misc_feature (1)..(179): NCBI GI NO: 11131023 NR Description: ADP-ribosylation factor 1
  misc_feature (1)..(179): NCBI GI NO: 31240205 NR Description: ENSANGP00000015770 [Anopheles gambiae]
MGIVFTKLFSSVFGNKEARILVLGLDNAGKTTILYRLQMGEVVSTIPTIGFNVETVQYNNIKFQVWDLGGQTSIRPYWRCYFPNTQAVIYVVDSSDTDRIGVAKEEFHAILEEEELKGAMVLIFANKQDLPGALDDAAVTEALELHKIKSRQWAIFKTCAVKGEGLFEGLDWLSNTLKSGTG

SEQ ID NO: 20632 - protein, 144 aa, Zea mays subsp. mays
  peptide (1)..(144): Ceres Seq. ID no. 15179981
  misc_feature (1)..(139): Pfam Name: Pfam Description:  ADP-ribosylation factor family
  misc_feature (1)..(144): NCBI GI NO: 3182922 NR Description: ADP-ribosylation factor 1
  misc_feature (1)..(144): NCBI GI NO: 30682545 NR Description: ADP-ribosylation factor 3 (ARF3)
  misc_feature (1)..(141): NCBI GI NO: 40253742 NR Description: putative ADP-ribosylation factor 3
  misc_feature (1)..(141): NCBI GI NO: 13385340 NR Description: ADP-ribosylation-like 1 [Mus musculus]
  misc_feature (1)..(141): NCBI GI NO: 11693150 NR Description: ADP-ribosylation factor-like 1 [Rattus norvegicus]
  misc_feature (1)..(141): NCBI GI NO: 4502227 NR Description: ADP-ribosylation factor-like 1 [Homo sapiens]
  misc_feature (1)..(141): NCBI GI NO: 39653273 NR Description: ADP-ribosylation factor [Medicago sativa]
  misc_feature (1)..(141): NCBI GI NO: 29124979 NR Description: ADP-ribosylation factor 1 [Populus tremuloides]
  misc_feature (1)..(141): NCBI GI NO: 11131023 NR Description: ADP-ribosylation factor 1
  misc_feature (1)..(141): NCBI GI NO: 31240205 NR Description: ENSANGP00000015770 [Anopheles gambiae]
MGEVVSTIPTIGFNVETVQYNNIKFQVWDLGGQTSIRPYWRCYFPNTQAVIYVVDSSDTDRIGVAKEEFHAILEEEELKGAMVLIFANKQDLPGALDDAAVTEALELHKIKSRQWAIFKTCAVKGEGLFEGLDWLSNTLKSGTG

SEQ ID NO: 20633 - DNA, 1061 bp, Zea mays subsp. mays
  misc_feature (1)..(1061): Ceres Seq. ID no. 15179996
attcaccaatctctaaccaatagtcacacactcacaatggccaccgtcgctaacttctcagccaaccgaatcaccaccgtgattccacggccaacatccgccgttgcctcaacctcctccttcgtattcttcgaccccaaacccaactcactgatcctaaagcagagatgggtaaaaaatccctcgaaaagaagcttctcagccgtgaaggtcaaggccggtgcggcatcgccggggaaggtgggtacaccggcggtgaatgacgagaaagtgcaaaagattcacagcggagaggagttcgacgaagcgcttaagaaggccaagaacaagcttgtggttgtggagtttgccacgagtaagagtgatcagagcaacaagatatatccgtttatggtggagctgagcaggacatgtaacgacgtcgatttcttgctcgtcatgggtgatgagtctgaaacgaccagagagctttgtcggagagagaagatcgagaaagttcctcacttcagcttttataagagcatggagaaaatacacgaggaagaaggtattggaccggaccagctaatgggggacgtactatattacggagacagccactcggcggttgtgcagctgcacggccgagctgatgtggagaagcttattgatgagaaccgtactggaggcaagctgattgtactcgacgtcggtctgaaacactgtgggccatgtgtcaaggtttatccgacggtgctgaagctttcccggtcgatgtcggagaccatcgtgttcgctagaatgaacggggacgagaacgatagctgtatggagtttctaaaggacatgaatgttatcgaagtgcccacgttcttgttcattagaaacggtgatatttgtgggcggtatgttggttccggtaaaggagaacttattggagagattctccggtactcaggcgtccgtgtcacttattaagttgtatcaaaactcgatttattgaaaggaaatgcttttgtgggttttgtttgtaccatccgagaccggttaatatgaaaaaaacgcatgtgattcttggtttg

SEQ ID NO: 20634 - protein, 318 aa, Zea mays subsp. mays
  peptide (1)..(318): Ceres Seq. ID no. 15179997
  misc_feature (211)..(313): Pfam Name: Pfam Description:  Thioredoxin
  misc_feature (13)..(318): NCBI GI NO: 15222954 NR Description: thioredoxin family [Arabidopsis thaliana]
  misc_feature (13)..(318): NCBI GI NO: 21554102 NR Description: chloroplast drought-induced stress protein
  misc_feature (13)..(318): NCBI GI NO: 7489278 NR Description: thioredoxin-like protein CDSP32
  misc_feature (80)..(317): NCBI GI NO: 34901636 NR Description: putative plastid thioredoxin
  misc_feature (191)..(311): NCBI GI NO: 25990392 NR Description: thioredoxin h [Brassica rapa]
  misc_feature (201)..(304): NCBI GI NO: 34394553 NR Description: putative thioredoxin
  misc_feature (203)..(304): NCBI GI NO: 38048645 NR Description: similar to Drosophila melanogaster thioredoxin
  misc_feature (199)..(308): NCBI GI NO: 15218902 NR Description: thioredoxin, putative [Arabidopsis thaliana]
  misc_feature (205)..(317): NCBI GI NO: 40287476 NR Description: thioredoxin [Capsicum annuum]
IHQSLTNSHTLTMATVANFSANRITTVIPRPTSAVASTSSFVFFDPKPNSLILKQRWVKNPSKRSFSAVKVKAGAASPGKVGTPAVNDEKVQKIHSGEEFDEALKKAKNKLVVVEFATSKSDQSNKIYPFMVELSRTCNDVDFLLVMGDESETTRELCRREKIEKVPHFSFYKSMEKIHEEEGIGPDQLMGDVLYYGDSHSAVVQLHGRADVEKLIDENRTGGKLIVLDVGLKHCGPCVKVYPTVLKLSRSMSETIVFARMNGDENDSCMEFLKDMNVIEVPTFLFIRNGDICGRYVGSGKGELIGEILRYSGVRVTY

SEQ ID NO: 20635 - protein, 306 aa, Zea mays subsp. mays
  peptide (1)..(306): Ceres Seq. ID no. 15179998
  misc_feature (199)..(301): Pfam Name: Pfam Description:  Thioredoxin
  misc_feature (1)..(306): NCBI GI NO: 15222954 NR Description: thioredoxin family [Arabidopsis thaliana]
  misc_feature (1)..(306): NCBI GI NO: 21554102 NR Description: chloroplast drought-induced stress protein
  misc_feature (1)..(306): NCBI GI NO: 7489278 NR Description: thioredoxin-like protein CDSP32
  misc_feature (68)..(305): NCBI GI NO: 34901636 NR Description: putative plastid thioredoxin
  misc_feature (179)..(299): NCBI GI NO: 25990392 NR Description: thioredoxin h [Brassica rapa]
  misc_feature (189)..(292): NCBI GI NO: 34394553 NR Description: putative thioredoxin
  misc_feature (191)..(292): NCBI GI NO: 38048645 NR Description: similar to Drosophila melanogaster thioredoxin
  misc_feature (187)..(296): NCBI GI NO: 15218902 NR Description: thioredoxin, putative [Arabidopsis thaliana]
  misc_feature (193)..(305): NCBI GI NO: 40287476 NR Description: thioredoxin [Capsicum annuum]
MATVANFSANRITTVIPRPTSAVASTSSFVFFDPKPNSLILKQRWVKNPSKRSFSAVKVKAGAASPGKVGTPAVNDEKVQKIHSGEEFDEALKKAKNKLVVVEFATSKSDQSNKIYPFMVELSRTCNDVDFLLVMGDESETTRELCRREKIEKVPHFSFYKSMEKIHEEEGIGPDQLMGDVLYYGDSHSAVVQLHGRADVEKLIDENRTGGKLIVLDVGLKHCGPCVKVYPTVLKLSRSMSETIVFARMNGDENDSCMEFLKDMNVIEVPTFLFIRNGDICGRYVGSGKGELIGEILRYSGVRVTY

SEQ ID NO: 20636 - protein, 188 aa, Zea mays subsp. mays
  peptide (1)..(188): Ceres Seq. ID no. 15179999
  misc_feature (81)..(183): Pfam Name: Pfam Description:  Thioredoxin
  misc_feature (1)..(188): NCBI GI NO: 15222954 NR Description: thioredoxin family [Arabidopsis thaliana]
  misc_feature (1)..(188): NCBI GI NO: 21554102 NR Description: chloroplast drought-induced stress protein
  misc_feature (1)..(188): NCBI GI NO: 7489278 NR Description: thioredoxin-like protein CDSP32
  misc_feature (1)..(187): NCBI GI NO: 34901636 NR Description: putative plastid thioredoxin
  misc_feature (61)..(181): NCBI GI NO: 25990392 NR Description: thioredoxin h [Brassica rapa]
  misc_feature (71)..(174): NCBI GI NO: 34394553 NR Description: putative thioredoxin
  misc_feature (73)..(174): NCBI GI NO: 38048645 NR Description: similar to Drosophila melanogaster thioredoxin
  misc_feature (69)..(178): NCBI GI NO: 15218902 NR Description: thioredoxin, putative [Arabidopsis thaliana]
  misc_feature (75)..(187): NCBI GI NO: 40287476 NR Description: thioredoxin [Capsicum annuum]
MVELSRTCNDVDFLLVMGDESETTRELCRREKIEKVPHFSFYKSMEKIHEEEGIGPDQLMGDVLYYGDSHSAVVQLHGRADVEKLIDENRTGGKLIVLDVGLKHCGPCVKVYPTVLKLSRSMSETIVFARMNGDENDSCMEFLKDMNVIEVPTFLFIRNGDICGRYVGSGKGELIGEILRYSGVRVTY

SEQ ID NO: 20637 - DNA, 591 bp, Zea mays subsp. mays
  misc_feature (1)..(591): Ceres Seq. ID no. 15179096
attttcgtctctttcgcttttacatcacaaaaccgaagcgatgcagtcattgaccgtcgcagcagcgaagacgctacgaaaccggatcttctcccggtccggatccacatccgccgggccgagccgctgggccacgccgggccacgaggagcggcccaagggctacttcatgaaccgcacccctccgccgccgggacagtcgcgcaaatgggaggactgggagcttccttgctacatcacgagcttcctcacgatcgtcatcctcggcgtcgggctcaacgctaagcctgatctctcgatcgagacctgggctcatcagaaggccctggaacgcctccagatggagaggctcgcttcgtcagccggagattcttccgattgagcttcaccgcttgatctccggaaggtggattgtggcgatcaagaaggcttggagagagttagggctttctgaagaagtttgtttttggatatcgtttgtttagtcgataatgatgaaataagtgttatttaactgtttttgacgcattacatttctcaaagttgatcacttttgatacaacatctgcaatttgatttgctccttcgaag

SEQ ID NO: 20638 - protein, 126 aa, Zea mays subsp. mays
  peptide (1)..(126): Ceres Seq. ID no. 15179097
  misc_feature (15)..(126): NCBI GI NO: 15227917 NR Description: expressed protein [Arabidopsis thaliana]
  misc_feature (19)..(125): NCBI GI NO: 7485503 NR Description: hypothetical protein F15B8
  misc_feature (19)..(125): NCBI GI NO: 18410807 NR Description: expressed protein [Arabidopsis thaliana]
  misc_feature (3)..(115): NCBI GI NO: 9858777 NR Description: BAC19.9 [Lycopersicon esculentum]
  misc_feature (1)..(113): NCBI GI NO: 29150398 NR Description: hypothetical protein
FSSLSLLHHKTEAMQSLTVAAAKTLRNRIFSRSGSTSAGPSRWATPGHEERPKGYFMNRTPPPPGQSRKWEDWELPCYITSFLTIVILGVGLNAKPDLSIETWAHQKALERLQMERLASSAGDSSD

SEQ ID NO: 20639 - protein, 113 aa, Zea mays subsp. mays
  peptide (1)..(113): Ceres Seq. ID no. 15179098
  misc_feature (2)..(113): NCBI GI NO: 15227917 NR Description: expressed protein [Arabidopsis thaliana]
  misc_feature (6)..(112): NCBI GI NO: 7485503 NR Description: hypothetical protein F15B8
  misc_feature (6)..(112): NCBI GI NO: 18410807 NR Description: expressed protein [Arabidopsis thaliana]
  misc_feature (1)..(102): NCBI GI NO: 9858777 NR Description: BAC19.9 [Lycopersicon esculentum]
  misc_feature (1)..(100): NCBI GI NO: 29150398 NR Description: hypothetical protein
MQSLTVAAAKTLRNRIFSRSGSTSAGPSRWATPGHEERPKGYFMNRTPPPPGQSRKWEDWELPCYITSFLTIVILGVGLNAKPDLSIETWAHQKALERLQMERLASSAGDSSD

SEQ ID NO: 20640 - protein, 94 aa, Zea mays subsp. mays
  peptide (1)..(94): Ceres Seq. ID no. 15179099
IFVSFAFTSQNRSDAVIDRRSSEDATKPDLLPVRIHIRRAEPLGHAGPRGAAQGLLHEPHPSAAGTVAQMGGLGASLLHHELPHDRHPRRRAQR

SEQ ID NO: 20641 - DNA, 1175 bp, Zea mays subsp. mays; identical to SEQ ID NO: 7792
  misc_feature (1)..(1175): Ceres Seq. ID no. 15179075

SEQ ID NO: 20642 - protein, 285 aa, Zea mays subsp. mays; identical to SEQ ID NO: 7793
  peptide (1)..(285): Ceres Seq. ID no. 15179076
  misc_feature (78)..(132): Pfam Name: Pfam Description:  Homeobox domain
  misc_feature (1)..(285): NCBI GI NO: 15222452 NR Description: homeobox-leucine zipper protein ATHB-13
  misc_feature (7)..(285): NCBI GI NO: 21555784 NR Description: homeobox gene 13 protein [Arabidopsis thaliana]
  misc_feature (1)..(285): NCBI GI NO: 7446247 NR Description: homeotic protein - common sunflower
  misc_feature (1)..(231): NCBI GI NO: 18396130 NR Description: homeobox-leucine zipper protein. putative
  misc_feature (47)..(285): NCBI GI NO: 1435022 NR Description: DNA-binding protein [Daucus carota]
  misc_feature (43)..(231): NCBI GI NO: 25386233 NR Description: hypothetical protein T2P11
  misc_feature (24)..(219): NCBI GI NO: 19071644 NR Description: putative DNA-binding protein
  misc_feature (37)..(283): NCBI GI NO: 7446243 NR Description: homeotic protein - carrot
  misc_feature (78)..(273): NCBI GI NO: 6175248 NR Description: jasmonic acid 1 [Lycopersicon esculentum]
  misc_feature (7)..(280): NCBI GI NO: 15232066 NR Description: Homeobox-leucine zipper protein/HD-Ziptranscription factor

SEQ ID NO: 20643 - protein, 279 aa, Zea mays subsp. mays; identical to SEQ ID NO: 7794
  peptide (1)..(279): Ceres Seq. ID no. 15179077
  misc_feature (72)..(126): Pfam Name: Pfam Description:  Homeobox domain
  misc_feature (1)..(279): NCBI GI NO: 15222452 NR Description: homeobox-leucine zipper protein ATHB-13
  misc_feature (1)..(279): NCBI GI NO: 21555784 NR Description: homeobox gene 13 protein [Arabidopsis thaliana]
  misc_feature (1)..(279): NCBI GI NO: 7446247 NR Description: homeotic protein - common sunflower
  misc_feature (1)..(225): NCBI GI NO: 18396130 NR Description: homeobox-leucine zipper protein. putative
  misc_feature (41)..(279): NCBI GI NO: 1435022 NR Description: DNA-binding protein [Daucus carota]
  misc_feature (37)..(225): NCBI GI NO: 25386233 NR Description: hypothetical protein T2P11
  misc_feature (18)..(213): NCBI GI NO: 19071644 NR Description: putative DNA-binding protein
  misc_feature (31)..(277): NCBI GI NO: 7446243 NR Description: homeotic protein - carrot
  misc_feature (72)..(267): NCBI GI NO: 6175248 NR Description: jasmonic acid 1 [Lycopersicon esculentum]
  misc_feature (1)..(274): NCBI GI NO: 15232066 NR Description: Homeobox-leucine zipper protein/HD-Ziptranscription factor

SEQ ID NO: 20644 - protein, 271 aa, Zea mays subsp. mays; identical to SEQ ID NO: 7795
  peptide (1)..(271): Ceres Seq. ID no. 15179078
  misc_feature (64)..(118): Pfam Name: Pfam Description:  Homeobox domain
  misc_feature (1)..(271): NCBI GI NO: 15222452 NR Description: homeobox-leucine zipper protein ATHB-13
  misc_feature (1)..(271): NCBI GI NO: 21555784 NR Description: homeobox gene 13 protein [Arabidopsis thaliana]
  misc_feature (1)..(271): NCBI GI NO: 7446247 NR Description: homeotic protein - common sunflower
  misc_feature (1)..(217): NCBI GI NO: 18396130 NR Description: homeobox-leucine zipper protein. putative
  misc_feature (33)..(271): NCBI GI NO: 1435022 NR Description: DNA-binding protein [Daucus carota]
  misc_feature (29)..(217): NCBI GI NO: 25386233 NR Description: hypothetical protein T2P11
  misc_feature (10)..(205): NCBI GI NO: 19071644 NR Description: putative DNA-binding protein
  misc_feature (23)..(269): NCBI GI NO: 7446243 NR Description: homeotic protein - carrot
  misc_feature (64)..(259): NCBI GI NO: 6175248 NR Description: jasmonic acid 1 [Lycopersicon esculentum]
  misc_feature (1)..(266): NCBI GI NO: 15232066 NR Description: Homeobox-leucine zipper protein/HD-Ziptranscription factor

SEQ ID NO: 20645 - protein, 224 aa, Zea mays subsp. mays
  peptide (1)..(224): Ceres Seq. ID no. 15179079
  misc_feature (17)..(71): Pfam Name: Pfam Description:  Homeobox domain
  misc_feature (1)..(224): NCBI GI NO: 15222452 NR Description: homeobox-leucine zipper protein ATHB-13
  misc_feature (1)..(224): NCBI GI NO: 21555784 NR Description: homeobox gene 13 protein [Arabidopsis thaliana]
  misc_feature (1)..(224): NCBI GI NO: 7446247 NR Description: homeotic protein - common sunflower
  misc_feature (1)..(170): NCBI GI NO: 18396130 NR Description: homeobox-leucine zipper protein. putative
  misc_feature (1)..(224): NCBI GI NO: 1435022 NR Description: DNA-binding protein [Daucus carota]
  misc_feature (1)..(170): NCBI GI NO: 25386233 NR Description: hypothetical protein T2P11
  misc_feature (1)..(158): NCBI GI NO: 19071644 NR Description: putative DNA-binding protein
  misc_feature (1)..(222): NCBI GI NO: 7446243 NR Description: homeotic protein - carrot
  misc_feature (17)..(212): NCBI GI NO: 6175248 NR Description: jasmonic acid 1 [Lycopersicon esculentum]
  misc_feature (1)..(219): NCBI GI NO: 15232066 NR Description: Homeobox-leucine zipper protein/HD-Ziptranscription factor
MNGEEDYSDDGSQMGEKKRRLNMEQVKTLEKNFELGNKLDPERKMQLARALGLQPRQIAIWFQNRRARWKTKQLEKDYDTLKRQFDSLKAENDHLQTHNQKLQAEIMSSRNREQTESINLNKETEGSCSNRSDNSSDNFRLDISTAVPSVDSTITGGHPPAPQTVGRHFFPPATATTTTTTMQFFQNSSSGQSMVKEENSISNMFCAMDDHSGFWPWLDQQQYN

SEQ ID NO: 20646 - DNA, 786 bp, Zea mays subsp. mays
  misc_feature (1)..(786): Ceres Seq. ID no. 15174400
agatctatcataccgtctcctctcaacgaaaacttacaaaaaattcaccctaaatactttagtttataaataaagctcccaaaatctaagagaggagaagacaaagacttacaagataaaaggcatcataatggccaaattcttcatcgtgttccttgcctctgccctatgtttcaccactctccttcacttggtggccgctgatgccgacgactttgaccgtttcaacatcacgggctccgtctactgcgacacatgccgcgtccaattcgttacccgcctcagtaaattcctcgaaggggcaaaggtaaagcttgagtgcaagagtcgtgtgaaccagacagtgacactgaccaaagaagctgtgactgacaaagacggaaaataccagatggaagttatgggagaccacgaagaggaactgtgcgagatcatcctcgtccaatcaccggacgcagagtgtggcgaagtgaacaacgaagagttcctaagaaacgcagcaaggatcagtctcacggctaacgatggcattgtctctaatgagattcgaaccattaacccacttgggttcatgaggaagactcctctcgccgattgtcctcaagttttcaaggagcttggaatcgtccctgacgtcatcttctaagcttaataccgatatacatcgatctctgaacaattttaatttttgttgtaactctttacatttcgtatataacaacatttatatttgatttcacttgttgtcggtaaaagatacttaactaacgctgttttcttctttcc

SEQ ID NO: 20647 - protein, 171 aa, Zea mays subsp. mays
  peptide (1)..(171): Ceres Seq. ID no. 15174401
  misc_feature (34)..(158): Pfam Name: Pfam Description:  Pollen proteins Ole e I family
  misc_feature (1)..(171): NCBI GI NO: 15218844 NR Description: expressed protein [Arabidopsis thaliana]
  misc_feature (2)..(171): NCBI GI NO: 18422603 NR Description: Ole e I (main olive allergen)-related protein
  misc_feature (2)..(171): NCBI GI NO: 21593871 NR Description: Ole e I (main olive allergen)-like protein
  misc_feature (2)..(171): NCBI GI NO: 18415132 NR Description: Ole e I (main olive allergen)-related protein
  misc_feature (1)..(168): NCBI GI NO: 7486300 NR Description: hypothetical protein F28J12
  misc_feature (16)..(171): NCBI GI NO: 9758935 NR Description: Ole e I (main olive allergen)-like protein
  misc_feature (57)..(171): NCBI GI NO: 28393099 NR Description: unknown protein [Arabidopsis thaliana]
  misc_feature (1)..(168): NCBI GI NO: 28380096 NR Description: Olee1-like protein precursor
  misc_feature (1)..(165): NCBI GI NO: 22074346 NR Description: Che a 1 allergen precursor [Chenopodium album]
  misc_feature (1)..(167): NCBI GI NO: 125887 NR Description: Anther specific LAT52 protein precursor
MAKFFIVFLASALCFTTLLHLVAADADDFDRFNITGSVYCDTCRVQFVTRLSKFLEGAKVKLECKSRVNQTVTLTKEAVTDKDGKYQMEVMGDHEEELCEIILVQSPDAECGEVNNEEFLRNAARISLTANDGIVSNEIRTINPLGFMRKTPLADCPQVFKELGIVPDVIF

SEQ ID NO: 20648 - DNA, 806 bp, Zea mays subsp. mays
  misc_feature (1)..(806): Ceres Seq. ID no. 15178993
aatttcatctttggagaggagtgatcggaaactatcatcatcggcgatgggttggctgacgagatttctaaccgcggtagcgtttttagccgccggagttatattctcaccggagacattcggatcgctgtccaagggcgagaatccagcgaaggttttgatattcgtgaagctagctcatctcctcagcttcgctacagcttggggagctgctctctgggctaccttcatcggcggaatcatcatgttcaagaacttaccgaggcatcagttcggtaacctccagagcaagatgtttccagcttatttcactctcgttggttcttgctgcgccatttcactctctgcgtttggttacttgcatccatggaagtcatcttctaccgcggagaagtatcagcttgggttcctcgtctccgcttttgctttcaatctcaccaatttgctcgtcttcactcccatgaccatcgatatgatgaagcaaaggcacaaagtagagagagagaacaacattggagatgaagttggttggtccaagaacagggagaaggctaagactatccctaagctagctgccatgaacaagaagtttggtatgattcacggcttgtcgtctctagctaacatcttttcttttgggagccttgccatgcattcttggtaccttgctgggaagttggatctctaagtttcttttcacaaaggtctgagctttttatgtcacccttcatgaataaaatatatatctcttgctttgtaagattatcatacccggcagtgaaatcatgaaacagtttgttataatg

SEQ ID NO: 20649 - protein, 228 aa, Zea mays subsp. mays
  peptide (1)..(228): Ceres Seq. ID no. 15178994
  misc_feature (16)..(228): NCBI GI NO: 18412424 NR Description: membrane protein -related [Arabidopsis thaliana]
  misc_feature (16)..(215): NCBI GI NO: 15724187 NR Description: AT3g62580/T12C14_280 [Arabidopsis thaliana]
  misc_feature (58)..(202): NCBI GI NO: 11357672 NR Description: hypothetical protein F26K9
  misc_feature (43)..(224): NCBI GI NO: 31982159 NR Description: hypothetical protein MGC18837 [Mus musculus]
  misc_feature (43)..(224): NCBI GI NO: 7259296 NR Description: contains transmembrane (TM) region [Mus musculus]
  misc_feature (56)..(224): NCBI GI NO: 37552510 NR Description: similar to Hypothetical protein MGC18837
  misc_feature (43)..(224): NCBI GI NO: 27719651 NR Description: similar to hypothetical protein MBC3205
  misc_feature (60)..(226): NCBI GI NO: 38112002 NR Description: hypothetical protein MG10156.4
  misc_feature (57)..(226): NCBI GI NO: 31204397 NR Description: ENSANGP00000020420 [Anopheles gambiae]
  misc_feature (60)..(227): NCBI GI NO: 40741706 NR Description: hypothetical protein AN4553.2
ISSLERSDRKLSSSAMGWLTRFLTAVAFLAAGVIFSPETFGSLSKGENPAKVLIFVKLAHLLSFATAWGAALWATFIGGIIMFKNLPRHQFGNLQSKMFPAYFTLVGSCCAISLSAFGYLHPWKSSSTAEKYQLGFLVSAFAFNLTNLLVFTPMTIDMMKQRHKVERENNIGDEVGWSKNREKAKTIPKLAAMNKKFGMIHGLSSLANIFSFGSLAMHSWYLAGKLDL

SEQ ID NO: 20650 - protein, 213 aa, Zea mays subsp. mays
  peptide (1)..(213): Ceres Seq. ID no. 15178995
  misc_feature (1)..(213): NCBI GI NO: 18412424 NR Description: membrane protein -related [Arabidopsis thaliana]
  misc_feature (1)..(200): NCBI GI NO: 15724187 NR Description: AT3g62580/T12C14_280 [Arabidopsis thaliana]
  misc_feature (43)..(187): NCBI GI NO: 11357672 NR Description: hypothetical protein F26K9
  misc_feature (28)..(209): NCBI GI NO: 31982159 NR Description: hypothetical protein MGC18837 [Mus musculus]
  misc_feature (28)..(209): NCBI GI NO: 7259296 NR Description: contains transmembrane (TM) region [Mus musculus]
  misc_feature (41)..(209): NCBI GI NO: 37552510 NR Description: similar to Hypothetical protein MGC18837
  misc_feature (28)..(209): NCBI GI NO: 27719651 NR Description: similar to hypothetical protein MBC3205
  misc_feature (45)..(211): NCBI GI NO: 38112002 NR Description: hypothetical protein MG10156.4
  misc_feature (42)..(211): NCBI GI NO: 31204397 NR Description: ENSANGP00000020420 [Anopheles gambiae]
  misc_feature (45)..(212): NCBI GI NO: 40741706 NR Description: hypothetical protein AN4553.2
MGWLTRFLTAVAFLAAGVIFSPETFGSLSKGENPAKVLIFVKLAHLLSFATAWGAALWATFIGGIIMFKNLPRHQFGNLQSKMFPAYFTLVGSCCAISLSAFGYLHPWKSSSTAEKYQLGFLVSAFAFNLTNLLVFTPMTIDMMKQRHKVERENNIGDEVGWSKNREKAKTIPKLAAMNKKFGMIHGLSSLANIFSFGSLAMHSWYLAGKLDL

SEQ ID NO: 20651 - protein, 147 aa, Zea mays subsp. mays
  peptide (1)..(147): Ceres Seq. ID no. 15178996
  misc_feature (1)..(147): NCBI GI NO: 18412424 NR Description: membrane protein -related [Arabidopsis thaliana]
  misc_feature (1)..(134): NCBI GI NO: 15724187 NR Description: AT3g62580/T12C14_280 [Arabidopsis thaliana]
  misc_feature (1)..(121): NCBI GI NO: 11357672 NR Description: hypothetical protein F26K9
  misc_feature (1)..(143): NCBI GI NO: 31982159 NR Description: hypothetical protein MGC18837 [Mus musculus]
  misc_feature (1)..(143): NCBI GI NO: 7259296 NR Description: contains transmembrane (TM) region [Mus musculus]
  misc_feature (1)..(143): NCBI GI NO: 37552510 NR Description: similar to Hypothetical protein MGC18837
  misc_feature (1)..(143): NCBI GI NO: 27719651 NR Description: similar to hypothetical protein MBC3205
  misc_feature (1)..(145): NCBI GI NO: 38112002 NR Description: hypothetical protein MG10156.4
  misc_feature (1)..(145): NCBI GI NO: 31204397 NR Description: ENSANGP00000020420 [Anopheles gambiae]
  misc_feature (1)..(146): NCBI GI NO: 40741706 NR Description: hypothetical protein AN4553.2
MFKNLPRHQFGNLQSKMFPAYFTLVGSCCAISLSAFGYLHPWKSSSTAEKYQLGFLVSAFAFNLTNLLVFTPMTIDMMKQRHKVERENNIGDEVGWSKNREKAKTIPKLAAMNKKFGMIHGLSSLANIFSFGSLAMHSWYLAGKLDL

SEQ ID NO: 20652 - DNA, 1264 bp, Zea mays subsp. mays
  misc_feature (1)..(1264): Ceres Seq. ID no. 15177718
ttttccgacggaaaaaccaaggaatctcctccactatgctctctctatactcctcctctaccatcaaagcctcttttcattcttcctttcctcctctccgatcatcaccaccaccactctccgttggatctcatatccggctcgttaagcgagatcactccgtagccgctgcttctggtggtgtctcgatgtcaacgaacagagattctcacggatcgtcctcgcaggtcgctgaaccgtttttcagaagcgttttaggacagatggaaacggtttacctaaaccggaacccgacgcctagatcagtcttggagcttgtcagatccgttgatgacgagcagctttgctatgatcatctcgctttcaggacctttgggattggcggttatgggattgactcgcttgcaagcttcttccttgactatgggtatacccaaatggatgagctgaggtttcctgccaaaaagctgagagctttgtggtttgcgcctcctcatgcttctgctgttcctggtggaagtggtgtagatggtcctttaccgagagtttttatctcagagctccttgtcgaacagatgagtacacagactcaggatgtgatcaggagatacactgaaacatcgcctaatgggagaaagtatgctgctctctctagtgctttgggtagtttaccatgggaaaagcccctatcttctgagtttgaacagttggctagggaaagtgaatacgcagcatggacgcttgccaatggctatgcacttaaccacgtgactatctctgtccatcggcttaaatctcatctaaacaagattaagaagctcaatcagttttttgaagaaaaaggtttcaaattgaactctgaaggaggagtccttaaagttagtcctgatggtggtttgctgcaaagctctactgtggcagactctatttctttcaagttctctgatggagtcaccaaatctatcccttgttcatacattgagtttgctgaacgccttgtgcttccccagtttcagaatgtacccgaaagcgatataaaagagtttcatagaagagatggatttgaggtgggaaatgcagacaagatcttcgagagcacaaatcaggagcagctttcccgacgaaccggctgatggcaaaatagccacagcttcagccaccatataaattccatcatgccttgtacatttacatgtaaagaataagagctgaaactgtttgtaatgtctttaatcagtaacaataactaatccaaaacctccct

SEQ ID NO: 20653 - protein, 376 aa, Zea mays subsp. mays
  peptide (1)..(376): Ceres Seq. ID no. 15177719
  misc_feature (12)..(376): NCBI GI NO: 18390717 NR Description: expressed protein [Arabidopsis thaliana]
  misc_feature (77)..(375): NCBI GI NO: 37535166 NR Description: unknown protein
  misc_feature (77)..(366): NCBI GI NO: 15223410 NR Description: expressed protein [Arabidopsis thaliana]
  misc_feature (70)..(366): NCBI GI NO: 18396149 NR Description: expressed protein [Arabidopsis thaliana]
  misc_feature (151)..(375): NCBI GI NO: 22973852 NR Description: hypothetical protein [Chloroflexus aurantiacus]
  misc_feature (92)..(367): NCBI GI NO: 28899568 NR Description: conserved hypothetical protein
  misc_feature (92)..(341): NCBI GI NO: 15642610 NR Description: conserved hypothetical protein [Vibrio cholerae]
  misc_feature (92)..(370): NCBI GI NO: 24372211 NR Description: conserved hypothetical protein
  misc_feature (92)..(331): NCBI GI NO: 27364716 NR Description: Conserved hypothetical protein
FRRKNQGISSTMLSLYSSSTIKASFHSSFPPLRSSPPPLSVGSHIRLVKRDHSVAAASGGVSMSTNRDSHGSSSQVAEPFFRSVLGQMETVYLNRNPTPRSVLELVRSVDDEQLCYDHLAFRTFGIGGYGIDSLASFFLDYGYTQMDELRFPAKKLRALWFAPPHASAVPGGSGVDGPLPRVFISELLVEQMSTQTQDVIRRYTETSPNGRKYAALSSALGSLPWEKPLSSEFEQLARESEYAAWTLANGYALNHVTISVHRLKSHLNKIKKLNQFFEEKGFKLNSEGGVLKVSPDGGLLQSSTVADSISFKFSDGVTKSIPCSYIEFAERLVLPQFQNVPESDIKEFHRRDGFEVGNADKIFESTNQEQLSRRTG

SEQ ID NO: 20654 - protein, 365 aa, Zea mays subsp. mays
  peptide (1)..(365): Ceres Seq. ID no. 15177720
  misc_feature (1)..(365): NCBI GI NO: 18390717 NR Description: expressed protein [Arabidopsis thaliana]
  misc_feature (66)..(364): NCBI GI NO: 37535166 NR Description: unknown protein
  misc_feature (66)..(355): NCBI GI NO: 15223410 NR Description: expressed protein [Arabidopsis thaliana]
  misc_feature (59)..(355): NCBI GI NO: 18396149 NR Description: expressed protein [Arabidopsis thaliana]
  misc_feature (140)..(364): NCBI GI NO: 22973852 NR Description: hypothetical protein [Chloroflexus aurantiacus]
  misc_feature (81)..(356): NCBI GI NO: 28899568 NR Description: conserved hypothetical protein
  misc_feature (81)..(330): NCBI GI NO: 15642610 NR Description: conserved hypothetical protein [Vibrio cholerae]
  misc_feature (81)..(359): NCBI GI NO: 24372211 NR Description: conserved hypothetical protein
  misc_feature (81)..(320): NCBI GI NO: 27364716 NR Description: Conserved hypothetical protein
MLSLYSSSTIKASFHSSFPPLRSSPPPLSVGSHIRLVKRDHSVAAASGGVSMSTNRDSHGSSSQVAEPFFRSVLGQMETVYLNRNPTPRSVLELVRSVDDEQLCYDHLAFRTFGIGGYGIDSLASFFLDYGYTQMDELRFPAKKLRALWFAPPHASAVPGGSGVDGPLPRVFISELLVEQMSTQTQDVIRRYTETSPNGRKYAALSSALGSLPWEKPLSSEFEQLARESEYAAWTLANGYALNHVTISVHRLKSHLNKIKKLNQFFEEKGFKLNSEGGVLKVSPDGGLLQSSTVADSISFKFSDGVTKSIPCSYIEFAERLVLPQFQNVPESDIKEFHRRDGFEVGNADKIFESTNQEQLSRRTG

SEQ ID NO: 20655 - protein, 314 aa, Zea mays subsp. mays
  peptide (1)..(314): Ceres Seq. ID no. 15177721
  misc_feature (1)..(314): NCBI GI NO: 18390717 NR Description: expressed protein [Arabidopsis thaliana]
  misc_feature (15)..(313): NCBI GI NO: 37535166 NR Description: unknown protein
  misc_feature (15)..(304): NCBI GI NO: 15223410 NR Description: expressed protein [Arabidopsis thaliana]
  misc_feature (8)..(304): NCBI GI NO: 18396149 NR Description: expressed protein [Arabidopsis thaliana]
  misc_feature (89)..(313): NCBI GI NO: 22973852 NR Description: hypothetical protein [Chloroflexus aurantiacus]
  misc_feature (30)..(305): NCBI GI NO: 28899568 NR Description: conserved hypothetical protein
  misc_feature (30)..(279): NCBI GI NO: 15642610 NR Description: conserved hypothetical protein [Vibrio cholerae]
  misc_feature (30)..(308): NCBI GI NO: 24372211 NR Description: conserved hypothetical protein
  misc_feature (30)..(269): NCBI GI NO: 27364716 NR Description: Conserved hypothetical protein
MSTNRDSHGSSSQVAEPFFRSVLGQMETVYLNRNPTPRSVLELVRSVDDEQLCYDHLAFRTFGIGGYGIDSLASFFLDYGYTQMDELRFPAKKLRALWFAPPHASAVPGGSGVDGPLPRVFISELLVEQMSTQTQDVIRRYTETSPNGRKYAALSSALGSLPWEKPLSSEFEQLARESEYAAWTLANGYALNHVTISVHRLKSHLNKIKKLNQFFEEKGFKLNSEGGVLKVSPDGGLLQSSTVADSISFKFSDGVTKSIPCSYIEFAERLVLPQFQNVPESDIKEFHRRDGFEVGNADKIFESTNQEQLSRRTG

SEQ ID NO: 20656 - DNA, 856 bp, Zea mays subsp. mays
  misc_feature (1)..(856): Ceres Seq. ID no. 15178359
acgacctaaaaaaatcagagattcgagttttcgtactcttctctctctcttaatacgattctgattctatttttctcaccaaccattgaaaattctccatagacctcttctctttttgctatccaattttatctgccatgggacacggaacaatggcgacaccaccgacaaccaccatcaccgccaagacgacgctcgtgttcacgtacggtactctaaagagaggattctcgaaccacgtcctgatgcaagatctgatccgatcaggcgacgcatctttaaaaggagtctaccaaacgctagagaaatatcccctcgtctgcggaccataccgagtccctttcctcctcaacaagcctggaacgggccatcgcgtgacgggagagctttacgtggtttctcctcgcggtctctcgcgtctggacgagcttgaagggatcgctaggggacattacgtgaggcaaccgatccgtctagctgctgctgagaaagaaggaggagatctggaagcagagcatgcgacgtcgtcgtgcgtggtggaagcgtattacgcgcacaagagctacgaggaggagctgtggaagaggaatggagggagatcgttcggcgcgtacacggagaacgaagcgcgtggatatgtgaagcgtaaggatcggccgcagcatcttaccttcttggaccatatccgtattttcgtttcttctccatgtgactgatttcgattattccctctctcattttttatcttattcaagggaaattaaataagaaagtacaaacgcaaacaactagtttcatctattctaaggggtcccacttgttcgtcgtacccgtacaacggttgttgttagttgtt

SEQ ID NO: 20657 - protein, 192 aa, Zea mays subsp. mays
  peptide (1)..(192): Ceres Seq. ID no. 15178360
  misc_feature (28)..(141): Pfam Name: UPF0131 Pfam Description: Uncharacterised protein family
  misc_feature (1)..(192): NCBI GI NO: 21555032 NR Description: unknown [Arabidopsis thaliana]
  misc_feature (1)..(192): NCBI GI NO: 18396380 NR Description: expressed protein [Arabidopsis thaliana]
  misc_feature (16)..(192): NCBI GI NO: 11387354 NR Description: Hypothetical UPF0131 protein At3g02910
  misc_feature (7)..(189): NCBI GI NO: 29126342 NR Description: unknown protein
  misc_feature (20)..(192): NCBI GI NO: 15237492 NR Description: expressed protein [Arabidopsis thaliana]
  misc_feature (15)..(148): NCBI GI NO: 13279332 NR Description: Unknown (protein for IMAGE:2822295) [Homo sapiens]
  misc_feature (21)..(146): NCBI GI NO: 34876150 NR Description: similar to cDNA sequence BC006662
  misc_feature (20)..(148): NCBI GI NO: 33875960 NR Description: LOC87769 protein [Homo sapiens]
  misc_feature (14)..(99): NCBI GI NO: 24762794 NR Description: CG2803-PA [Drosophila melanogaster]
MGHGTMATPPTTTITAKTTLVFTYGTLKRGFSNHVLMQDLIRSGDASLKGVYQTLEKYPLVCGPYRVPFLLNKPGTGHRVTGELYVVSPRGLSRLDELEGIARGHYVRQPIRLAAAEKEGGDLEAEHATSSCVVEAYYAHKSYEEELWKRNGGRSFGAYTENEARGYVKRKDRPQHLTFLDHIRIFVSSPCD

SEQ ID NO: 20658 - protein, 187 aa, Zea mays subsp. mays
  peptide (1)..(187): Ceres Seq. ID no. 15178361
  misc_feature (23)..(136): Pfam Name: UPF0131 Pfam Description: Uncharacterised protein family
  misc_feature (1)..(187): NCBI GI NO: 21555032 NR Description: unknown [Arabidopsis thaliana]
  misc_feature (1)..(187): NCBI GI NO: 18396380 NR Description: expressed protein [Arabidopsis thaliana]
  misc_feature (11)..(187): NCBI GI NO: 11387354 NR Description: Hypothetical UPF0131 protein At3g02910
  misc_feature (2)..(184): NCBI GI NO: 29126342 NR Description: unknown protein
  misc_feature (15)..(187): NCBI GI NO: 15237492 NR Description: expressed protein [Arabidopsis thaliana]
  misc_feature (10)..(143): NCBI GI NO: 13279332 NR Description: Unknown (protein for IMAGE:2822295) [Homo sapiens]
  misc_feature (16)..(141): NCBI GI NO: 34876150 NR Description: similar to cDNA sequence BC006662
  misc_feature (15)..(143): NCBI GI NO: 33875960 NR Description: LOC87769 protein [Homo sapiens]
  misc_feature (9)..(94): NCBI GI NO: 24762794 NR Description: CG2803-PA [Drosophila melanogaster]
MATPPTTTITAKTTLVFTYGTLKRGFSNHVLMQDLIRSGDASLKGVYQTLEKYPLVCGPYRVPFLLNKPGTGHRVTGELYVVSPRGLSRLDELEGIARGHYVRQPIRLAAAEKEGGDLEAEHATSSCVVEAYYAHKSYEEELWKRNGGRSFGAYTENEARGYVKRKDRPQHLTFLDHIRIFVSSPCD

SEQ ID NO: 20659 - protein, 156 aa, Zea mays subsp. mays
  peptide (1)..(156): Ceres Seq. ID no. 15178362
  misc_feature (1)..(105): Pfam Name: UPF0131 Pfam Description: Uncharacterised protein family
  misc_feature (1)..(156): NCBI GI NO: 21555032 NR Description: unknown [Arabidopsis thaliana]
  misc_feature (1)..(156): NCBI GI NO: 18396380 NR Description: expressed protein [Arabidopsis thaliana]
  misc_feature (1)..(156): NCBI GI NO: 11387354 NR Description: Hypothetical UPF0131 protein At3g02910
  misc_feature (1)..(153): NCBI GI NO: 29126342 NR Description: unknown protein
  misc_feature (1)..(156): NCBI GI NO: 15237492 NR Description: expressed protein [Arabidopsis thaliana]
  misc_feature (1)..(112): NCBI GI NO: 13279332 NR Description: Unknown (protein for IMAGE:2822295) [Homo sapiens]
  misc_feature (1)..(110): NCBI GI NO: 34876150 NR Description: similar to cDNA sequence BC006662
  misc_feature (1)..(112): NCBI GI NO: 33875960 NR Description: LOC87769 protein [Homo sapiens]
  misc_feature (1)..(63): NCBI GI NO: 24762794 NR Description: CG2803-PA [Drosophila melanogaster]
MQDLIRSGDASLKGVYQTLEKYPLVCGPYRVPFLLNKPGTGHRVTGELYVVSPRGLSRLDELEGIARGHYVRQPIRLAAAEKEGGDLEAEHATSSCVVEAYYAHKSYEEELWKRNGGRSFGAYTENEARGYVKRKDRPQHLTFLDHIRIFVSSPCD

SEQ ID NO: 20660 - DNA, 487 bp, Zea mays subsp. mays
  misc_feature (1)..(487): Ceres Seq. ID no. 15178813
acactctggaaaaaaaacctttctaaagctttaagcattttcgaatcaacaaaaaaaaaaacactagcctccttttgctccctctcccttctctctctaacacaaatggcgttgtcaaagtcttccgtcgttgctctcgtcgcggtgatcgtctccgtcgtagctaccgtcgcttctgctcagtctgagtctccagccccaagccctacgtccggatctggtgctttctctccgtcgatcgtttcagctggagttgcggccgtcgcggctcttgttttcgggtctgctcttcggatctaagtctttgcgatggagattcgtatttttggaaaaaaaaattgatcgggtatagcattattattattattcatgatgttcgttcgtgtgtattccggagctatagatctctttctatttttctatatcttaccttccttcatatctgtatgagggtagtactatatctatatctagagtattgtggttt

SEQ ID NO: 20661 - protein, 99 aa, Zea mays subsp. mays
  peptide (1)..(99): Ceres Seq. ID no. 15178814
  misc_feature (36)..(99): NCBI GI NO: 15239156 NR Description: arabinogalactan-protein (AGP15)
  misc_feature (42)..(99): NCBI GI NO: 25992536 NR Description: fiber protein Fb7 [Gossypium barbadense]
  misc_feature (37)..(98): NCBI GI NO: 7484750 NR Description: gibberellin-responsive protein CRG16 - cucumber
TLWKKNLSKALSIFESTKKKTLASFCSLSLLSLTQMALSKSSVVALVAVIVSVVATVASAQSESPAPSPTSGSGAFSPSIVSAGVAAVAALVFGSALRI

SEQ ID NO: 20662 - protein, 64 aa, Zea mays subsp. mays
  peptide (1)..(64): Ceres Seq. ID no. 15178815
  misc_feature (1)..(64): NCBI GI NO: 15239156 NR Description: arabinogalactan-protein (AGP15)
  misc_feature (7)..(64): NCBI GI NO: 25992536 NR Description: fiber protein Fb7 [Gossypium barbadense]
  misc_feature (2)..(63): NCBI GI NO: 7484750 NR Description: gibberellin-responsive protein CRG16 - cucumber
MALSKSSVVALVAVIVSVVATVASAQSESPAPSPTSGSGAFSPSIVSAGVAAVAALVFGSALRI

SEQ ID NO: 20663 - DNA, 632 bp, Zea mays subsp. mays
  misc_feature (1)..(632): Ceres Seq. ID no. 15178120
attaatcattatccaatcatagaagtaagaagaaacaggttgcgtttctgactttctccgcaagaatcaaacatcttcttcttctcattccatcaatcctctctctattatcagaagtaaagatgaataaaggcagcagctttaagctggacaacgatttcgaaaagaggaaagctgaagctggaaggatcttagagaagtaccctgacagaatcccggtgattgtggaaaaggctgagaaaagtgatatcccagacattgacaagaagaaataccttgtgccatcagacctaacagttggacaatttgtgtatgtgattcggaagagaatcaaactaagtgccgagaaagcaatcttcatattcgtagacaatgtccttcctcccacaggagagattatgtcaagcgtctacgaggagaagaaagaccaagatggcttcctctacatcacttacagtggcgagaacacatttggtgcttcctcaatctaaacctcagtgtgatgttcccctctttcaatttgtgtatatagttctaataataatttatcgtttctatgttcttgcactttgttaaaatgtatatagactaatattaaaatattatctttattcgcattattatcttaaagt

SEQ ID NO: 20664 - protein, 122 aa, Zea mays subsp. mays
  peptide (1)..(122): Ceres Seq. ID no. 15178121
  misc_feature (15)..(118): Pfam Name: Pfam Description:  Microtubule associated protein 1A/1B
  misc_feature (1)..(122): NCBI GI NO: 15724332 NR Description: At2g45170/T14P1.2 [Arabidopsis thaliana]
  misc_feature (1)..(122): NCBI GI NO: 15225418 NR Description: microtubule-associated protein -related
  misc_feature (5)..(121): NCBI GI NO: 18414683 NR Description: symbiosis-related like protein
  misc_feature (5)..(118): NCBI GI NO: 21615419 NR Description: microtubule associated protein [Cicer arietinum]
  misc_feature (6)..(120): NCBI GI NO: 15232387 NR Description: (AtAPG8g) autophagy 8g protein
  misc_feature (5)..(119): NCBI GI NO: 34595981 NR Description: microtubule-associated protein 1 light chain 3
  misc_feature (5)..(118): NCBI GI NO: 40253647 NR Description: putative microtubial binding protein
  misc_feature (5)..(118): NCBI GI NO: 38344173 NR Description: OSJNBa0053K19.12
  misc_feature (5)..(118): NCBI GI NO: 21592920 NR Description: putative microtubule-associated protein
  misc_feature (5)..(118): NCBI GI NO: 23394382 NR Description: microtubial binding protein
MNKGSSFKLDNDFEKRKAEAGRILEKYPDRIPVIVEKAEKSDIPDIDKKKYLVPSDLTVGQFVYVIRKRIKLSAEKAIFIFVDNVLPPTGEIMSSVYEEKKDQDGFLYITYSGENTFGASSI

SEQ ID NO: 20665 - protein, 67 aa, Zea mays subsp. mays
  peptide (1)..(67): Ceres Seq. ID no. 15178122
MSFLPQERLCQASTRRRKTKMASSTSLTVARTHLVLPQSKPQCDVPLFQFVYIVLIIIYRFYVLALC

SEQ ID NO: 20666 - DNA, 1077 bp, Zea mays subsp. mays
  misc_feature (1)..(1077): Ceres Seq. ID no. 15177486
agtattattaatagtacaaaatttaatttgattgcgaaaatctatacatacacagagacttactttatatgtaaaggaggcattgacgtgacaaactgtccaccgtcctcctcctcctcctcctcctcctcctccttgtctccgccagcatgcccccttcctcctcctcatcatccctccacccctgcaagcattccccgtcagcaactctcgacctcctaatcctaatcctcgtcgtcttctccggcgcattcctcatctcctcctacttctcgtacctaatccactccttatctctcctctcctctcatttcccatcgatcgccctctctctctcctctctccctctccctctgatcctcctcttctccgatcacgaccacgatcccgatgatgaagatcacgacggaatctctctggcgtcgtttgtgttcgtgttcgcggtcttcttcgctgcctcggtcgcgttcctcgacctgtgctgcggctcgaggtcgaggaggtgccgtaaccctaaatgcaaagggctgaagaaagctatggagtttgatttgcagctgcagacggaggagagtgttaggacgggattggggaaggagattgaacggttgccgtgaaaggagggagcgagagcaatcctgattacgagtgtttgagagctgagcttaggaagatggctccggttaatggtcgagctgttttgcttttccggtcaaggtgtggttgccctgttgctaagcttgaagggcgggggcctaagagaagccgccgtcttaaaaaattgccggcaaaattagctgtaaaggggtgtgtagacaatcactgacctggaaaatctccaaactatacttacagattatcacattaaaagttgttgcagatgtacaatttgcaggttcttcctctatgattacacattcatttaggattatgaggaaaacataaaagtattgaattttttccatttcttatatagttaatccctgaaactctaaatgccttcttactctgtgaacacttgtataacttatatgtactatgaaaaatcaaaattcaatgttatcaaaaatcaaatgc

SEQ ID NO: 20667 - protein, 155 aa, Zea mays subsp. mays
  peptide (1)..(155): Ceres Seq. ID no. 15177487
  misc_feature (1)..(155): NCBI GI NO: 15239636 NR Description: pentatricopeptide (PPR) repeat-containing protein
  misc_feature (1)..(155): NCBI GI NO: 15230653 NR Description: expressed protein [Arabidopsis thaliana]
  misc_feature (98)..(149): NCBI GI NO: 18395728 NR Description: expressed protein [Arabidopsis thaliana]
  misc_feature (98)..(149): NCBI GI NO: 6714471 NR Description: unknown protein [Arabidopsis thaliana]
MPPSSSSSSLHPCKHSPSATLDLLILILVVFSGAFLISSYFSYLIHSLSLLSSHFPSIALSLSSLPLPLILLFSDHDHDPDDEDHDGISLASFVFVFAVFFAASVAFLDLCCGSRSRRCRNPKCKGLKKAMEFDLQLQTEESVRTGLGKEIERLP

SEQ ID NO: 20668 - DNA, 1132 bp, Zea mays subsp. mays
  misc_feature (1)..(1132): Ceres Seq. ID no. 15177475
aacggagctcaaaaaatggaatcgaaagctatttggttagggtttcttccgccaagacttcaactttcatctcgagtttcactctcccgccctcatggttcttccacatctccaaaatctgatgtcagacaaacccttgtctggagcaaaccacaaggtggaggttacttgaaccgaggccgtgtcctatgttcttctcaacctgatagtaatgttcctcgagctgagctgttccgtggaaagtctggttcagtttctttcaacggtctaacccaccagctggttgaagaaagtaaacttgtctcagctccgtttcaagaagaagacaaaggttccctctggtgggtcttggctcctgctgtcttgatatcctcactgattcttccgcagttctttctcagtggtgccattgaagctacctttaaaaacgacaccgttgcagagattgttacttctttctgctttgagacggcgttttatgctggtctggcgatattcctgtctgtgactgaccgagtgcagaggccctacttagacttcagctccaagagatggggtttaatcactggactaagaggatacctcatgtccacatttctgatgatgggtttgaaagttgtagtccctgtgtttgctgtatacatgacttggccagctcttgggatggatgccttgattgcagtccttcctttcttggttggatgtgcggttcaacgaggtttcgaggctcagcttgaaagacgcggctcttcgtgttggcccattgttccaatagtctttgaggtatataggctgtatcaggtgacaagggcagccacttttgttcagaggctgatgtttatgatgaaagatgcgtcaactactgtagagattacagagcgaggagttgcgcttgttggtttggttgtgactttgcagtttctagctgttctgtgtctctggtcgctgatcacttttctaatgcgcctttttccttcgagacctgtagctgaaaactactaaatcaatagtagtgtttagtgaaagccattgagctttgatttctgtgtttctttcagaggattaacgtgttgtatcgagtcaggaattgcagtgtaggacacttttgatcacgagggatgaaattggctgc

SEQ ID NO: 20669 - protein, 333 aa, Zea mays subsp. mays
  peptide (1)..(333): Ceres Seq. ID no. 15177476
  misc_feature (6)..(333): NCBI GI NO: 15221197 NR Description: expressed protein [Arabidopsis thaliana]
  misc_feature (6)..(333): NCBI GI NO: 25405928 NR Description: protein T1N15.7 [imported] - Arabidopsis thaliana
  misc_feature (80)..(331): NCBI GI NO: 34910348 NR Description: P0684B02.8
  misc_feature (80)..(327): NCBI GI NO: 9758304 NR Description: emb|CAB81845
  misc_feature (80)..(327): NCBI GI NO: 18424658 NR Description: expressed protein [Arabidopsis thaliana]
  misc_feature (80)..(327): NCBI GI NO: 21592953 NR Description: unknown [Arabidopsis thaliana]
  misc_feature (207)..(327): NCBI GI NO: 26450751 NR Description: unknown protein [Arabidopsis thaliana]
  misc_feature (75)..(273): NCBI GI NO: 11281196 NR Description: hypothetical protein T8B10
NGAQKMESKAIWLGFLPPRLQLSSRVSLSRPHGSSTSPKSDVRQTLVWSKPQGGGYLNRGRVLCSSQPDSNVPRAELFRGKSGSVSFNGLTHQLVEESKLVSAPFQEEDKGSLWWVLAPAVLISSLILPQFFLSGAIEATFKNDTVAEIVTSFCFETAFYAGLAIFLSVTDRVQRPYLDFSSKRWGLITGLRGYLMSTFLMMGLKVVVPVFAVYMTWPALGMDALIAVLPFLVGCAVQRGFEAQLERRGSSCWPIVPIVFEVYRLYQVTRAATFVQRLMFMMKDASTTVEITERGVALVGLVVTLQFLAVLCLWSLITFLMRLFPSRPVAENY

SEQ ID NO: 20670 - protein, 328 aa, Zea mays subsp. mays
  peptide (1)..(328): Ceres Seq. ID no. 15177477
  misc_feature (1)..(328): NCBI GI NO: 15221197 NR Description: expressed protein [Arabidopsis thaliana]
  misc_feature (1)..(328): NCBI GI NO: 25405928 NR Description: protein T1N15.7 [imported] - Arabidopsis thaliana
  misc_feature (75)..(326): NCBI GI NO: 34910348 NR Description: P0684B02.8
  misc_feature (75)..(322): NCBI GI NO: 9758304 NR Description: emb|CAB81845
  misc_feature (75)..(322): NCBI GI NO: 18424658 NR Description: expressed protein [Arabidopsis thaliana]
  misc_feature (75)..(322): NCBI GI NO: 21592953 NR Description: unknown [Arabidopsis thaliana]
  misc_feature (202)..(322): NCBI GI NO: 26450751 NR Description: unknown protein [Arabidopsis thaliana]
  misc_feature (70)..(268): NCBI GI NO: 11281196 NR Description: hypothetical protein T8B10
MESKAIWLGFLPPRLQLSSRVSLSRPHGSSTSPKSDVRQTLVWSKPQGGGYLNRGRVLCSSQPDSNVPRAELFRGKSGSVSFNGLTHQLVEESKLVSAPFQEEDKGSLWWVLAPAVLISSLILPQFFLSGAIEATFKNDTVAEIVTSFCFETAFYAGLAIFLSVTDRVQRPYLDFSSKRWGLITGLRGYLMSTFLMMGLKVVVPVFAVYMTWPALGMDALIAVLPFLVGCAVQRGFEAQLERRGSSCWPIVPIVFEVYRLYQVTRAATFVQRLMFMMKDASTTVEITERGVALVGLVVTLQFLAVLCLWSLITFLMRLFPSRPVAENY

SEQ ID NO: 20671 - DNA, 702 bp, Zea mays subsp. mays
  misc_feature (1)..(702): Ceres Seq. ID no. 15175150
atcaccaaaccaaaaaatctctctgagaatccctaaatccacttgaaaaaaatggcagaaaccgcggaaacaatcaacaccaccgtctcaccgccgcattccgaatcggagggctccaccacattgcccgcgacgacgccagatcagacatcggatgaaacctcaaaagccgcagatctgaagaaggaagagtccgtcccagagacgaagccaggaggaggcaactcgctccgcatttggcctccgactcagaaaactcgcgacgccgtcttgaagcgcctgatcgagacgctctccaccgaatccatcctctccaagaggtacggcacgctcaactccgacgaggcttccgccgtcgccaaatccatcgaggaggaagcctacggcgtcgcgtccaacgctgtgtctgacgacgacgatgggatcaagatccttgaggtttactccaaggagattagcaagaggatgcttgagacggtgaaggatcgatctgcagccgccgccaacaaggaagcggttgaggaagctgcgaaagacgatgaagctcctgagtcggagaagagtgaggcgtaactcgttcttgatccttaccttatctattagggtttcgctagattcgtatgagtttctcagagtttatgacgacagatctcttcttgtggatttggtatttgcctatttcgaagatgcttccttcttcct

SEQ ID NO: 20672 - protein, 173 aa, Zea mays subsp. mays
  peptide (1)..(173): Ceres Seq. ID no. 15175151
  misc_feature (1)..(173): NCBI GI NO: 18401618 NR Description: expressed protein [Arabidopsis thaliana]
  misc_feature (1)..(173): NCBI GI NO: 21553809 NR Description: unknown [Arabidopsis thaliana]
  misc_feature (17)..(169): NCBI GI NO: 15239170 NR Description: expressed protein [Arabidopsis thaliana]
  misc_feature (17)..(169): NCBI GI NO: 21618109 NR Description: MFP1 attachment factor 1 [Arabidopsis thaliana]
  misc_feature (59)..(173): NCBI GI NO: 7546725 NR Description: MFP1 attachment factor 1 [Lycopersicon esculentum]
  misc_feature (28)..(162): NCBI GI NO: 7546729 NR Description: MFP1 attachment factor 1 [Glycine max]
  misc_feature (1)..(154): NCBI GI NO: 18421176 NR Description: expressed protein [Arabidopsis thaliana]
  misc_feature (1)..(154): NCBI GI NO: 21553983 NR Description: unknown [Arabidopsis thaliana]
  misc_feature (40)..(152): NCBI GI NO: 7546731 NR Description: MFP1 attachment factor 1 [Canna edulis]
  misc_feature (51)..(173): NCBI GI NO: 26006500 NR Description: Unknown protein
MAETAETINTTVSPPHSESEGSTTLPATTPDQTSDETSKAADLKKEESVPETKPGGGNSLRIWPPTQKTRDAVLKRLIETLSTESILSKRYGTLNSDEASAVAKSIEEEAYGVASNAVSDDDDGIKILEVYSKEISKRMLETVKDRSAAAANKEAVEEAAKDDEAPESEKSEA

SEQ ID NO: 20673 - DNA, 1006 bp, Zea mays subsp. mays
  misc_feature (1)..(1006): Ceres Seq. ID no. 15179305
cttttagttctcccatgaatcccgagaagattcatattaaacacctcttcttctgattcacatatcggagactcagatctgcaatcgaagttcttggcaggggatccaatttgtttcaatttgacaagagaagaagaagcatggacacctttacggcggaggatctctcgacgatcggcggaatcgccaccgtgtcgctcctccattcgttcattccaacgcactggctacctttctcaatcgtcggacgcgcgcagaaatggactctttccagaacgctcttcgtcactgcatttggagcagttctgcatgtcatatccacttctcttcttggtataacagcgatcactatggcgaataccatcgccggtgaagagactgttcacaagcttgcttcccttttgcttgtgattctcggtggaagctatgtcttgctgtttctggctggtaaaggaggccacactcattctcataaccaacccatggagaaaatggctgttgctgggcttgtccttgttcctgcattatctccatgtgcaacaactcttcctgtttttctcgctgttggaaactcaaagcccatgatggttctcgccatcatagttctgctgatcagcaccgtattggtgatgacatcgctggtggctctatcgttctatggtgctagccagctgaagtttcactgggtggagcgatacgacaagctactggttggttcggtcctgtgtctggtaggtatcttaacccttttcttccatgatcatgaccaccatggtcatgaagctcatcagctccccaggaaaatcattactctttagagtccgctctcgaatctctgttttgtctgtttgttatagagcgccttaagggctttcccgttgtatgtctataactagttctaacgctctctattgcacgtgaagaaacatatgtatgtgtttttttttttttgatcgaacaacattagttgtgaatgtgattttcataagcagtacatcaaatccct

SEQ ID NO: 20674 - protein, 225 aa, Zea mays subsp. mays
  peptide (1)..(225): Ceres Seq. ID no. 15179306
  misc_feature (1)..(225): NCBI GI NO: 15242149 NR Description: expressed protein [Arabidopsis thaliana]
  misc_feature (1)..(225): NCBI GI NO: 21593186 NR Description: unknown [Arabidopsis thaliana]
  misc_feature (4)..(225): NCBI GI NO: 34903290 NR Description: unnamed protein product
  misc_feature (115)..(215): NCBI GI NO: 15209177 NR Description: hypothetical protein [Solanum demissum]
  misc_feature (18)..(204): NCBI GI NO: 16124575 NR Description: hypothetical protein [Caulobacter crescentus CB15]
MDTFTAEDLSTIGGIATVSLLHSFIPTHWLPFSIVGRAQKWTLSRTLFVTAFGAVLHVISTSLLGITAITMANTIAGEETVHKLASLLLVILGGSYVLLFLAGKGGHTHSHNQPMEKMAVAGLVLVPALSPCATTLPVFLAVGNSKPMMVLAIIVLLISTVLVMTSLVALSFYGASQLKFHWVERYDKLLVGSVLCLVGILTLFFHDHDHHGHEAHQLPRKIITL

SEQ ID NO: 20675 - protein, 155 aa, Zea mays subsp. mays
  peptide (1)..(155): Ceres Seq. ID no. 15179307
  misc_feature (1)..(155): NCBI GI NO: 15242149 NR Description: expressed protein [Arabidopsis thaliana]
  misc_feature (1)..(155): NCBI GI NO: 21593186 NR Description: unknown [Arabidopsis thaliana]
  misc_feature (1)..(155): NCBI GI NO: 34903290 NR Description: unnamed protein product
  misc_feature (45)..(145): NCBI GI NO: 15209177 NR Description: hypothetical protein [Solanum demissum]
  misc_feature (1)..(134): NCBI GI NO: 16124575 NR Description: hypothetical protein [Caulobacter crescentus CB15]
MANTIAGEETVHKLASLLLVILGGSYVLLFLAGKGGHTHSHNQPMEKMAVAGLVLVPALSPCATTLPVFLAVGNSKPMMVLAIIVLLISTVLVMTSLVALSFYGASQLKFHWVERYDKLLVGSVLCLVGILTLFFHDHDHHGHEAHQLPRKIITL

SEQ ID NO: 20676 - DNA, 686 bp, Zea mays subsp. mays
  misc_feature (1)..(686): Ceres Seq. ID no. 15179376
acattctcacaactcttctgcatctctctctgtaaaaatctgaacaaaactctttccaacttcgatcaagaaaaccaagaacgatgcctaaagacaggaagatcggaatcgcgatggatttatcagagagcagcaagaacgcactcaaatgggccatcgagaacttagctgacaaaggagacacactttacatcatccacacactaccaacctctgaagctgaatctcgtaacgccctctggctcgaatccggttctcctctcataccgttggttgagtttagggaaccgaagatcatggagaactacggtgtcaagatcgacatcgcatgtcttgacatgctcgacactggttcaaggaagaaagaggtgcatgtagtgacaaaactatactggggagatgcaagagagaagctcgttgatgctgttaaagaactcaaacttgattctattgtcatgggaagcagaggactcagtgcccttcaaaggataataatgggaagcgtgagcagctttgtgatcgaccacgcgccttgccctgtcaccattgtcaaggataactaaaaagagatggctttatctcatatgttctgccaaaaataatgtcgcaatttatgtttttaataaaagaaccttttttcttggttgtgtttgttctatttaaaataatatcaatatatgaaatcc

SEQ ID NO: 20677 - protein, 159 aa, Zea mays subsp. mays
  peptide (1)..(159): Ceres Seq. ID no. 15179377
  misc_feature (4)..(157): Pfam Name: Pfam Description:  Universal stress protein family
  misc_feature (1)..(159): NCBI GI NO: 30693971 NR Description: expressed protein [Arabidopsis thaliana]
  misc_feature (3)..(158): NCBI GI NO: 11602751 NR Description: ENOD18 protein [Vicia faba]
  misc_feature (1)..(158): NCBI GI NO: 11602747 NR Description: early nodulin ENOD18 [Vicia faba]
  misc_feature (1)..(158): NCBI GI NO: 11602749 NR Description: early nodulin ENOD18 [Vicia faba]
  misc_feature (4)..(157): NCBI GI NO: 32352136 NR Description: hypothetical protein
  misc_feature (1)..(159): NCBI GI NO: 30678807 NR Description: expressed protein [Arabidopsis thaliana]
  misc_feature (1)..(98): NCBI GI NO: 21555070 NR Description: unknown [Arabidopsis thaliana]
  misc_feature (4)..(157): NCBI GI NO: 20160561 NR Description: P0414E03.3
  misc_feature (1)..(149): NCBI GI NO: 18396497 NR Description: expressed protein [Arabidopsis thaliana]
  misc_feature (5)..(157): NCBI GI NO: 18401345 NR Description: expressed protein [Arabidopsis thaliana]
MPKDRKIGIAMDLSESSKNALKWAIENLADKGDTLYIIHTLPTSEAESRNALWLESGSPLIPLVEFREPKIMENYGVKIDIACLDMLDTGSRKKEVHVVTKLYWGDAREKLVDAVKELKLDSIVMGSRGLSALQRIIMGSVSSFVIDHAPCPVTIVKDN

SEQ ID NO: 20678 - protein, 149 aa, Zea mays subsp. mays
  peptide (1)..(149): Ceres Seq. ID no. 15179378
  misc_feature (1)..(147): Pfam Name: Pfam Description:  Universal stress protein family
  misc_feature (1)..(149): NCBI GI NO: 30693971 NR Description: expressed protein [Arabidopsis thaliana]
  misc_feature (1)..(148): NCBI GI NO: 11602751 NR Description: ENOD18 protein [Vicia faba]
  misc_feature (1)..(148): NCBI GI NO: 11602747 NR Description: early nodulin ENOD18 [Vicia faba]
  misc_feature (1)..(148): NCBI GI NO: 11602749 NR Description: early nodulin ENOD18 [Vicia faba]
  misc_feature (1)..(147): NCBI GI NO: 32352136 NR Description: hypothetical protein
  misc_feature (1)..(149): NCBI GI NO: 30678807 NR Description: expressed protein [Arabidopsis thaliana]
  misc_feature (1)..(88): NCBI GI NO: 21555070 NR Description: unknown [Arabidopsis thaliana]
  misc_feature (1)..(147): NCBI GI NO: 20160561 NR Description: P0414E03.3
  misc_feature (1)..(139): NCBI GI NO: 18396497 NR Description: expressed protein [Arabidopsis thaliana]
  misc_feature (1)..(147): NCBI GI NO: 18401345 NR Description: expressed protein [Arabidopsis thaliana]
MDLSESSKNALKWAIENLADKGDTLYIIHTLPTSEAESRNALWLESGSPLIPLVEFREPKIMENYGVKIDIACLDMLDTGSRKKEVHVVTKLYWGDAREKLVDAVKELKLDSIVMGSRGLSALQRIIMGSVSSFVIDHAPCPVTIVKDN

SEQ ID NO: 20679 - protein, 88 aa, Zea mays subsp. mays
  peptide (1)..(88): Ceres Seq. ID no. 15179379
  misc_feature (1)..(86): Pfam Name: Pfam Description:  Universal stress protein family
  misc_feature (1)..(88): NCBI GI NO: 30693971 NR Description: expressed protein [Arabidopsis thaliana]
  misc_feature (1)..(87): NCBI GI NO: 11602751 NR Description: ENOD18 protein [Vicia faba]
  misc_feature (1)..(87): NCBI GI NO: 11602747 NR Description: early nodulin ENOD18 [Vicia faba]
  misc_feature (1)..(87): NCBI GI NO: 11602749 NR Description: early nodulin ENOD18 [Vicia faba]
  misc_feature (1)..(86): NCBI GI NO: 32352136 NR Description: hypothetical protein
  misc_feature (1)..(88): NCBI GI NO: 30678807 NR Description: expressed protein [Arabidopsis thaliana]
  misc_feature (1)..(27): NCBI GI NO: 21555070 NR Description: unknown [Arabidopsis thaliana]
  misc_feature (1)..(86): NCBI GI NO: 20160561 NR Description: P0414E03.3
  misc_feature (1)..(78): NCBI GI NO: 18396497 NR Description: expressed protein [Arabidopsis thaliana]
  misc_feature (1)..(86): NCBI GI NO: 18401345 NR Description: expressed protein [Arabidopsis thaliana]
MENYGVKIDIACLDMLDTGSRKKEVHVVTKLYWGDAREKLVDAVKELKLDSIVMGSRGLSALQRIIMGSVSSFVIDHAPCPVTIVKDN

SEQ ID NO: 20680 - DNA, 1118 bp, Zea mays subsp. mays
  misc_feature (1)..(1118): Ceres Seq. ID no. 15174376
ttctttcgtttcgcctttgatctatagcccctttcgcttttaacttttctctcgatcagctaagtttcgatccattcttgttctcgcttttcaatatcttctcctccttcgcttgattccttctgttctcagatctattcttcgtttgatttcagatctagatctagggtttgttcgaataaaaattgggggaatttgaaaaaagaaggaatgattacagattctctatgagctactcagttcttcttcgtcgtattcgcatagtacactctttctccgtcgtttatctctactacacctacgtcttctcatgaactaatcgtctccgatctcatctcaaataaaacatttctgagttttttttttctttctatacaatctaaccgattctttgatagattagagagcggggaatttaagatctgtgggtaatttatagggatttagaaaaaaaaattatattatttaattttggtgaggaaaaagtcaaaaagtcaacggaaatggggtcgaaaagtcctgattccgacaacgatccgaggtacgcttccgtcacggacgagaggaagaggaagagaatgatctccaacagagagtccgctcggagatcaaggatgaggaagcagaagcagctcggcgatctcatcaacgaggtcactgtgctcaagaacgataacgctaagatcactgagcaggttgatgcggctacgaggaggtacgtggagatggagtccaagaacgatgtcttgagagcgcaagaggtggagctgaaggagaggttgaggtcgttgaactctgtgctggagatggttgaggagattagtggtcaggctttggatattcctgagattcagaacccttggcagattccttgtccgatcatgcaaaccaatcatggtttctgctgatatgtttgaatgcattgtcttgtctgttagagttttgtaacaactagtgtcattggtgtgtgtcgtctttatacaacttcagtctcttgtttttcagttatttcagtttgtgtggtcttgcggttgtcttttattcttatgtcggcttattacataagataaggttgtcatgtatttgtgtttcttaatcaattcaagctttgtgttgtt

SEQ ID NO: 20681 - protein, 134 aa, Zea mays subsp. mays
  peptide (1)..(134): Ceres Seq. ID no. 15174377
  misc_feature (17)..(81): Pfam Name: Pfam Description:  bZIP transcription factor
  misc_feature (5)..(126): NCBI GI NO: 15228754 NR Description: bZIP family transcription factor
  misc_feature (5)..(125): NCBI GI NO: 9650826 NR Description: common plant regulatory factor 6
  misc_feature (19)..(126): NCBI GI NO: 7489297 NR Description: DNA-binding protein bZIP-1 - garden snapdragon
  misc_feature (5)..(126): NCBI GI NO: 10241920 NR Description: TBZF [Nicotiana tabacum]
  misc_feature (5)..(126): NCBI GI NO: 16580132 NR Description: bZIP transcription factor BZI-3
  misc_feature (1)..(126): NCBI GI NO: 7489118 NR Description: DNA-binding protein tbz17 - common tobacco
  misc_feature (1)..(126): NCBI GI NO: 3986151 NR Description: rdLIP [Raphanus sativus]
  misc_feature (4)..(126): NCBI GI NO: 7489298 NR Description: DNA-binding protein bZIP-2 - garden snapdragon
  misc_feature (1)..(126): NCBI GI NO: 5901747 NR Description: bZIP DNA-binding protein [Lycopersicon esculentum]
  misc_feature (2)..(125): NCBI GI NO: 40019253 NR Description: ocs-element binding factor 1 [Secale cereale]
MGSKSPDSDNDPRYASVTDERKRKRMISNRESARRSRMRKQKQLGDLINEVTVLKNDNAKITEQVDAATRRYVEMESKNDVLRAQEVELKERLRSLNSVLEMVEEISGQALDIPEIQNPWQIPCPIMQTNHGFC

SEQ ID NO: 20682 - protein, 109 aa, Zea mays subsp. mays
  peptide (1)..(109): Ceres Seq. ID no. 15174378
  misc_feature (1)..(56): Pfam Name: Pfam Description:  bZIP transcription factor
  misc_feature (1)..(101): NCBI GI NO: 15228754 NR Description: bZIP family transcription factor
  misc_feature (1)..(100): NCBI GI NO: 9650826 NR Description: common plant regulatory factor 6
  misc_feature (1)..(101): NCBI GI NO: 7489297 NR Description: DNA-binding protein bZIP-1 - garden snapdragon
  misc_feature (1)..(101): NCBI GI NO: 10241920 NR Description: TBZF [Nicotiana tabacum]
  misc_feature (1)..(101): NCBI GI NO: 16580132 NR Description: bZIP transcription factor BZI-3
  misc_feature (1)..(101): NCBI GI NO: 7489118 NR Description: DNA-binding protein tbz17 - common tobacco
  misc_feature (1)..(101): NCBI GI NO: 3986151 NR Description: rdLIP [Raphanus sativus]
  misc_feature (1)..(101): NCBI GI NO: 7489298 NR Description: DNA-binding protein bZIP-2 - garden snapdragon
  misc_feature (1)..(101): NCBI GI NO: 5901747 NR Description: bZIP DNA-binding protein [Lycopersicon esculentum]
  misc_feature (1)..(100): NCBI GI NO: 40019253 NR Description: ocs-element binding factor 1 [Secale cereale]
MISNRESARRSRMRKQKQLGDLINEVTVLKNDNAKITEQVDAATRRYVEMESKNDVLRAQEVELKERLRSLNSVLEMVEEISGQALDIPEIQNPWQIPCPIMQTNHGFC

SEQ ID NO: 20683 - protein, 97 aa, Zea mays subsp. mays
  peptide (1)..(97): Ceres Seq. ID no. 15174379
  misc_feature (1)..(89): NCBI GI NO: 15228754 NR Description: bZIP family transcription factor
  misc_feature (1)..(88): NCBI GI NO: 9650826 NR Description: common plant regulatory factor 6
  misc_feature (1)..(89): NCBI GI NO: 7489297 NR Description: DNA-binding protein bZIP-1 - garden snapdragon
  misc_feature (1)..(89): NCBI GI NO: 10241920 NR Description: TBZF [Nicotiana tabacum]
  misc_feature (1)..(89): NCBI GI NO: 16580132 NR Description: bZIP transcription factor BZI-3
  misc_feature (1)..(89): NCBI GI NO: 7489118 NR Description: DNA-binding protein tbz17 - common tobacco
  misc_feature (1)..(89): NCBI GI NO: 3986151 NR Description: rdLIP [Raphanus sativus]
  misc_feature (1)..(89): NCBI GI NO: 7489298 NR Description: DNA-binding protein bZIP-2 - garden snapdragon
  misc_feature (1)..(89): NCBI GI NO: 5901747 NR Description: bZIP DNA-binding protein [Lycopersicon esculentum]
  misc_feature (1)..(88): NCBI GI NO: 40019253 NR Description: ocs-element binding factor 1 [Secale cereale]
MRKQKQLGDLINEVTVLKNDNAKITEQVDAATRRYVEMESKNDVLRAQEVELKERLRSLNSVLEMVEEISGQALDIPEIQNPWQIPCPIMQTNHGFC

SEQ ID NO: 20684 - DNA, 956 bp, Zea mays subsp. mays
  misc_feature (1)..(956): Ceres Seq. ID no. 15179191
agcaaagcaagtctgtttggttttggctcatccactgaaacattgagtcgtgaagaagacatggcaattctcagcaacgtctcgttttcccgcagcaacgtctatctaaaaccatctctctctcatctccctagctctccttcttctcgtcatcattgtctcattcgctgctcactggaagggaaagaagtggtgagtccattggtctggtcattaggagaggaggtttcaaagagaagcttacttgcacttgtctctgcttctctcttcgttgttgatcctgcccttgcttttaagggtggaggtccctatggacaaggagtcaccaggggacaagacttatcaggcaaagattttagtggccagactctgatcaggcaggacttcaagacgtccatccttaggcaagccaacttcaagggtgctaagttgttaggtgctagcttctttgatgcagacctaacaggtgctgatttatccgaaactgatctccgaggtgcagatttctccttggctaacgtaacaaaggtgaatttaacaaacgctaacttggaaggagcaactgctactggaaacacatcattcaagggatcaaacattacaggcgcagatttcactgatgttcttctaagagatgaccaacgagaatacctttgcaaaatcgctgatggggttaatgcgaccactgggaatgccacacgggacacattgctctgcaactaaactgtcaagtgtaaacctttgtcttcttcatctgagtttttgtacaagtttttttgtgtgtgaatgatgttgcagagtgagtgtgtatataaatatgcttactatactcaaatttgacattgagagattatgtatgctactttactttcggcctacaaaacaatatataaagtttggaactgtacttgtaaaatcacttgtttatttttttcaaccaactttcagtttttctt

SEQ ID NO: 20685 - protein, 240 aa, Zea mays subsp. mays
  peptide (1)..(240): Ceres Seq. ID no. 15179192
  misc_feature (172)..(212): Pfam Name: 8 copies Pfam Description: Pentapeptide repeats
  misc_feature (21)..(240): NCBI GI NO: 18406661 NR Description: thylakoid lumen pentapeptide repeat family protein
  misc_feature (21)..(203): NCBI GI NO: 18406663 NR Description: thylakoid lumen pentapeptide repeat family protein
  misc_feature (71)..(239): NCBI GI NO: 34895746 NR Description: P0024G09.19
  misc_feature (21)..(183): NCBI GI NO: 7486947 NR Description: hypothetical protein At2g44920
  misc_feature (139)..(240): NCBI GI NO: 7486947 NR Description: hypothetical protein At2g44920
  misc_feature (118)..(239): NCBI GI NO: 23128511 NR Description: hypothetical protein [Nostoc punctiforme]
  misc_feature (81)..(239): NCBI GI NO: 33865584 NR Description: conserved hypothetical protein
  misc_feature (110)..(239): NCBI GI NO: 16331083 NR Description: unknown protein [Synechocystis sp. PCC 6803]
  misc_feature (110)..(212): NCBI GI NO: 37523071 NR Description: hypothetical protein glr3502
  misc_feature (110)..(240): NCBI GI NO: 23043019 NR Description: hypothetical protein
SKASLFGFGSSTETLSREEDMAILSNVSFSRSNVYLKPSLSHLPSSPSSRHHCLIRCSLEGKEVVSPLVWSLGEEVSKRSLLALVSASLFVVDPALAFKGGGPYGQGVTRGQDLSGKDFSGQTLIRQDFKTSILRQANFKGAKLLGASFFDADLTGADLSETDLRGADFSLANVTKVNLTNANLEGATATGNTSFKGSNITGADFTDVLLRDDQREYLCKIADGVNATTGNATRDTLLCN

SEQ ID NO: 20686 - protein, 220 aa, Zea mays subsp. mays
  peptide (1)..(220): Ceres Seq. ID no. 15179193
  misc_feature (152)..(192): Pfam Name: 8 copies Pfam Description: Pentapeptide repeats
  misc_feature (1)..(220): NCBI GI NO: 18406661 NR Description: thylakoid lumen pentapeptide repeat family protein
  misc_feature (1)..(183): NCBI GI NO: 18406663 NR Description: thylakoid lumen pentapeptide repeat family protein
  misc_feature (51)..(219): NCBI GI NO: 34895746 NR Description: P0024G09.19
  misc_feature (1)..(163): NCBI GI NO: 7486947 NR Description: hypothetical protein At2g44920
  misc_feature (119)..(220): NCBI GI NO: 7486947 NR Description: hypothetical protein At2g44920
  misc_feature (98)..(219): NCBI GI NO: 23128511 NR Description: hypothetical protein [Nostoc punctiforme]
  misc_feature (61)..(219): NCBI GI NO: 33865584 NR Description: conserved hypothetical protein
  misc_feature (90)..(219): NCBI GI NO: 16331083 NR Description: unknown protein [Synechocystis sp. PCC 6803]
  misc_feature (90)..(192): NCBI GI NO: 37523071 NR Description: hypothetical protein glr3502
  misc_feature (90)..(220): NCBI GI NO: 23043019 NR Description: hypothetical protein
MAILSNVSFSRSNVYLKPSLSHLPSSPSSRHHCLIRCSLEGKEVVSPLVWSLGEEVSKRSLLALVSASLFVVDPALAFKGGGPYGQGVTRGQDLSGKDFSGQTLIRQDFKTSILRQANFKGAKLLGASFFDADLTGADLSETDLRGADFSLANVTKVNLTNANLEGATATGNTSFKGSNITGADFTDVLLRDDQREYLCKIADGVNATTGNATRDTLLCN

SEQ ID NO: 20687 - DNA, 736 bp, Zea mays subsp. mays
  misc_feature (1)..(736): Ceres Seq. ID no. 15179194
aagagaaaagagaaaaagaagaagaagaagagaagaactagtacgtaatggcttcctctatgctctcctctgccaccgtggttagctcaccggctcaagcggccatggttgctccattcacaggcttgaagtcatccgctgcattcccagtcactcgcaagaccgacactgacattacttccatggcaagcaatggaggaagagttaactgcatgaaggtgtggccaccagtcgggaagaagaagtttgagactctctcttaccttcctgatcttactgacgtcgaattgtctaaggaagttgactatcttcttcgcaacaagtggattccttgtgttgaattcgaattggaacatggatttgtataccgtgaacacggaaacacacccggatactatgacggacgttactggacaatgtggaaacttcctttgttcggatgcactgactctgctcaagtgttgaaggaagtgcaagagtgcaagaaggaatatcctaacgctttcattagaatcatcggattcgacaacaaccgtcaagtccagtgcatcagtttcatcgcctacaagccaccaagcttcaccggtgcttaatttcgttgtctaaaacattcatataataattttcactcatttcgtttccaattatctgtcctttttgctttttgaatttttgttgctgagacattctctatcggattgtcacaatgtctgatttatgaatatgtaacttctac

SEQ ID NO: 20688 - protein, 181 aa, Zea mays subsp. mays
  peptide (1)..(181): Ceres Seq. ID no. 15179195
  misc_feature (56)..(175): Pfam Name: Pfam Description:  Ribulose bisphosphate carboxylase, small chain
  misc_feature (1)..(181): NCBI GI NO: 480983 NR Description: ribulose-bisphosphate carboxylase (EC 4
  misc_feature (1)..(181): NCBI GI NO: 132091 NR Description: Ribulose bisphosphate carboxylase small chain F1
  misc_feature (1)..(181): NCBI GI NO: 266891 NR Description: Ribulose bisphosphate carboxylase small chain
  misc_feature (1)..(181): NCBI GI NO: 15240901 NR Description: ribulose bisphosphate carboxylase small chain 3bprecursor
  misc_feature (1)..(181): NCBI GI NO: 132154 NR Description: Ribulose bisphosphate carboxylase small chain
  misc_feature (1)..(181): NCBI GI NO: 68060 NR Description: ribulose-bisphosphate carboxylase (EC 4
  misc_feature (1)..(181): NCBI GI NO: 15240912 NR Description: ribulose bisphosphate carboxylase small chain 1bprecursor
  misc_feature (1)..(180): NCBI GI NO: 15219826 NR Description: ribulose -bisphosphate carboxylase small unit -related
  misc_feature (1)..(180): NCBI GI NO: 68063 NR Description: ribulose-bisphosphate carboxylase (EC 4
  misc_feature (1)..(181): NCBI GI NO: 68064 NR Description: ribulose-bisphosphate carboxylase (EC 4
MASSMLSSATVVSSPAQAAMVAPFTGLKSSAAFPVTRKTDTDITSMASNGGRVNCMKVWPPVGKKKFETLSYLPDLTDVELSKEVDYLLRNKWIPCVEFELEHGFVYREHGNTPGYYDGRYWTMWKLPLFGCTDSAQVLKEVQECKKEYPNAFIRIIGFDNNRQVQCISFIAYKPPSFTGA

SEQ ID NO: 20689 - protein, 177 aa, Zea mays subsp. mays
  peptide (1)..(177): Ceres Seq. ID no. 15179196
  misc_feature (52)..(171): Pfam Name: Pfam Description:  Ribulose bisphosphate carboxylase, small chain
  misc_feature (1)..(177): NCBI GI NO: 480983 NR Description: ribulose-bisphosphate carboxylase (EC 4
  misc_feature (1)..(177): NCBI GI NO: 132091 NR Description: Ribulose bisphosphate carboxylase small chain F1
  misc_feature (1)..(177): NCBI GI NO: 266891 NR Description: Ribulose bisphosphate carboxylase small chain
  misc_feature (1)..(177): NCBI GI NO: 15240901 NR Description: ribulose bisphosphate carboxylase small chain 3bprecursor
  misc_feature (1)..(177): NCBI GI NO: 132154 NR Description: Ribulose bisphosphate carboxylase small chain
  misc_feature (1)..(177): NCBI GI NO: 68060 NR Description: ribulose-bisphosphate carboxylase (EC 4
  misc_feature (1)..(177): NCBI GI NO: 15240912 NR Description: ribulose bisphosphate carboxylase small chain 1bprecursor
  misc_feature (1)..(176): NCBI GI NO: 15219826 NR Description: ribulose -bisphosphate carboxylase small unit -related
  misc_feature (1)..(176): NCBI GI NO: 68063 NR Description: ribulose-bisphosphate carboxylase (EC 4
  misc_feature (1)..(177): NCBI GI NO: 68064 NR Description: ribulose-bisphosphate carboxylase (EC 4
MLSSATVVSSPAQAAMVAPFTGLKSSAAFPVTRKTDTDITSMASNGGRVNCMKVWPPVGKKKFETLSYLPDLTDVELSKEVDYLLRNKWIPCVEFELEHGFVYREHGNTPGYYDGRYWTMWKLPLFGCTDSAQVLKEVQECKKEYPNAFIRIIGFDNNRQVQCISFIAYKPPSFTGA

SEQ ID NO: 20690 - protein, 162 aa, Zea mays subsp. mays
  peptide (1)..(162): Ceres Seq. ID no. 15179197
  misc_feature (37)..(156): Pfam Name: Pfam Description:  Ribulose bisphosphate carboxylase, small chain
  misc_feature (1)..(162): NCBI GI NO: 480983 NR Description: ribulose-bisphosphate carboxylase (EC 4
  misc_feature (1)..(162): NCBI GI NO: 132091 NR Description: Ribulose bisphosphate carboxylase small chain F1
  misc_feature (1)..(162): NCBI GI NO: 266891 NR Description: Ribulose bisphosphate carboxylase small chain
  misc_feature (1)..(162): NCBI GI NO: 15240901 NR Description: ribulose bisphosphate carboxylase small chain 3bprecursor
  misc_feature (1)..(162): NCBI GI NO: 132154 NR Description: Ribulose bisphosphate carboxylase small chain
  misc_feature (1)..(162): NCBI GI NO: 68060 NR Description: ribulose-bisphosphate carboxylase (EC 4
  misc_feature (1)..(162): NCBI GI NO: 15240912 NR Description: ribulose bisphosphate carboxylase small chain 1bprecursor
  misc_feature (1)..(161): NCBI GI NO: 15219826 NR Description: ribulose -bisphosphate carboxylase small unit -related
  misc_feature (1)..(161): NCBI GI NO: 68063 NR Description: ribulose-bisphosphate carboxylase (EC 4
  misc_feature (1)..(162): NCBI GI NO: 68064 NR Description: ribulose-bisphosphate carboxylase (EC 4
MVAPFTGLKSSAAFPVTRKTDTDITSMASNGGRVNCMKVWPPVGKKKFETLSYLPDLTDVELSKEVDYLLRNKWIPCVEFELEHGFVYREHGNTPGYYDGRYWTMWKLPLFGCTDSAQVLKEVQECKKEYPNAFIRIIGFDNNRQVQCISFIAYKPPSFTGA

SEQ ID NO: 20691 - DNA, 763 bp, Zea mays subsp. mays
  misc_feature (1)..(763): Ceres Seq. ID no. 15179171
actgtgagaaaggagagaagaaaaataaataggcgaaagctttggacattaaggaagacactggagagtagtaataatgccttctcattctggagatgacaatgttcttcaagttctcatcaagaacttcgatgttcttgctcttccattggttgctctcgtctaccctctatatgcatcagtgaaagcaatagagacaaaatcattagcagaagacgagcaatggctcacctattgggttctctacgcaatcatctccctcttcgaactcattttctccaaactcctcgaatggttcccgatatggccgttcttgaagctggtggggatatgctggctagtgctaccacagtttaatggagcagaacacgtctacagacatttcatcaggccattctacatgaatcctcaaagagcttccaccaatatttggtacgttcctcagaaaaagttcaacttctttcccaaacgtgacgacgacgatatcctcactgctgccgagaaatacatggaaaaacacggcaccgacgcatttgagcgaatgatcgtcaggaaggatagttatgaaagagggaggagaggaggaggtggaggaagcaataactacatgatctttgatgatgattataggtactaagtttaccaagttcttgtcgttttgatcggtcactgatctgatcttaaacctgtttggctacattattaagtttgtaagctggttgtctgacttttgtttatctctatgacttttataattgccagg

SEQ ID NO: 20692 - protein, 186 aa, Zea mays subsp. mays
  peptide (1)..(186): Ceres Seq. ID no. 15179172
  misc_feature (11)..(108): Pfam Name: Pfam Description:  TB2/DP1, HVA22 family
  misc_feature (1)..(186): NCBI GI NO: 15222421 NR Description: AtHVA22c [Arabidopsis thaliana]
  misc_feature (5)..(165): NCBI GI NO: 15221266 NR Description: AtHVA22a [Arabidopsis thaliana]
  misc_feature (5)..(158): NCBI GI NO: 4884934 NR Description: AtHVA22b [Arabidopsis thaliana]
  misc_feature (5)..(158): NCBI GI NO: 15241840 NR Description: AtHVA22b-related protein [Arabidopsis thaliana]
  misc_feature (36)..(157): NCBI GI NO: 34910810 NR Description: P0042A10.34
  misc_feature (21)..(105): NCBI GI NO: 18423191 NR Description: expressed protein [Arabidopsis thaliana]
  misc_feature (24)..(133): NCBI GI NO: 18416458 NR Description: abscisic acid-induced - like protein
  misc_feature (28)..(105): NCBI GI NO: 8777395 NR Description: gene_id:MFB16
  misc_feature (28)..(105): NCBI GI NO: 7484787 NR Description: abscisic acid-induced protein homolog F13M23
  misc_feature (25)..(109): NCBI GI NO: 182403 NR Description: TB2
MPSHSGDDNVLQVLIKNFDVLALPLVALVYPLYASVKAIETKSLAEDEQWLTYWVLYAIISLFELIFSKLLEWFPIWPFLKLVGICWLVLPQFNGAEHVYRHFIRPFYMNPQRASTNIWYVPQKKFNFFPKRDDDDILTAAEKYMEKHGTDAFERMIVRKDSYERGRRGGGGGSNNYMIFDDDYRY

SEQ ID NO: 20693 - DNA, 1069 bp, Zea mays subsp. mays
  misc_feature (1)..(1069): Ceres Seq. ID no. 15179988
gtcaggatctcagatttgtcacactctcggtgatcatccggcgacaatgagctctccgggaataacgagtatgttcacaaatttcactaagctctgcaaaggacttgctcttgtgcttgtggtgggacacctcctagttcagttcgttcccgccaccgtcccttacctcgctctcattccggcgaggactattccttttggctggaacctgattactagcggctactttgaactctctgtacatggggttgtcatcagcacggtttctctcctctttatggggaagtttctggagcctgtctggggttccaaggagtttcttaagttcatctttgtggtgaacttccttacgtatctctgtgttttcgtcacagccattgctttgtactacattacaaggctcgaaatctacctatatatgccctttgcaggttttcatggtgtcttggcaggccttcttgtcgggattaagcagataatacctgaccaggaggtgttgctcgtaaagatcaaagcaaagtggttgccctctattacgctagttttgtcaatagcctcaagcttcttcacactaaattcagcagcgtaccttcccactttgatattcggtacatatatgggctggttatacctcagatactttcagaggagaacagagacaaagctcagaggtgatccgagtgatgactttgccttctctactttctttcctgaacttctcagaccgataattgaccctatagcctcaatctttcaccggatgctttgtggacgatcaaatgccaccagcgaggaccatggttatactaccagcggtgctccattacccggttctgactctgctgaagcatctaggaggagagaaagaggagcaagggctctagaggagagacttgcaactgaaaggttggttcctccaaggaacaaagaagagttacagagtgatgctttggatagcgtttaagtggagactgcaactagtgtattgaagaagctgtgtgagggttcttacttgtttcaggtggacagtgtttattttttgttaattaaattggctttatacagaacc

SEQ ID NO: 20694 - protein, 320 aa, Zea mays subsp. mays
  peptide (1)..(320): Ceres Seq. ID no. 15179989
  misc_feature (16)..(320): NCBI GI NO: 18398108 NR Description: expressed protein [Arabidopsis thaliana]
  misc_feature (22)..(320): NCBI GI NO: 6648207 NR Description: unknown protein [Arabidopsis thaliana]
  misc_feature (13)..(320): NCBI GI NO: 34395257 NR Description: putative placental protein 6
  misc_feature (10)..(301): NCBI GI NO: 21741573 NR Description: OSJNBa0094O15.3
  misc_feature (56)..(319): NCBI GI NO: 5902022 NR Description: PL6 protein [Homo sapiens]
  misc_feature (33)..(298): NCBI GI NO: 9790165 NR Description: PL6 protein; PL-6; placental protein 6
  misc_feature (33)..(298): NCBI GI NO: 34865897 NR Description: similar to PL6 protein [Rattus norvegicus]
  misc_feature (21)..(301): NCBI GI NO: 19920824 NR Description: CG9536-PA [Drosophila melanogaster]
  misc_feature (26)..(297): NCBI GI NO: 32413290 NR Description: hypothetical protein [Neurospora crassa]
  misc_feature (33)..(287): NCBI GI NO: 31197821 NR Description: ENSANGP00000018642 [Anopheles gambiae]
SGSQICHTLGDHPATMSSPGITSMFTNFTKLCKGLALVLVVGHLLVQFVPATVPYLALIPARTIPFGWNLITSGYFELSVHGVVISTVSLLFMGKFLEPVWGSKEFLKFIFVVNFLTYLCVFVTAIALYYITRLEIYLYMPFAGFHGVLAGLLVGIKQIIPDQEVLLVKIKAKWLPSITLVLSIASSFFTLNSAAYLPTLIFGTYMGWLYLRYFQRRTETKLRGDPSDDFAFSTFFPELLRPIIDPIASIFHRMLCGRSNATSEDHGYTTSGAPLPGSDSAEASRRRERGARALEERLATERLVPPRNKEELQSDALDSV

SEQ ID NO: 20695 - protein, 305 aa, Zea mays subsp. mays
  peptide (1)..(305): Ceres Seq. ID no. 15179990
  misc_feature (1)..(305): NCBI GI NO: 18398108 NR Description: expressed protein [Arabidopsis thaliana]
  misc_feature (7)..(305): NCBI GI NO: 6648207 NR Description: unknown protein [Arabidopsis thaliana]
  misc_feature (1)..(305): NCBI GI NO: 34395257 NR Description: putative placental protein 6
  misc_feature (1)..(286): NCBI GI NO: 21741573 NR Description: OSJNBa0094O15.3
  misc_feature (41)..(304): NCBI GI NO: 5902022 NR Description: PL6 protein [Homo sapiens]
  misc_feature (18)..(283): NCBI GI NO: 9790165 NR Description: PL6 protein; PL-6; placental protein 6
  misc_feature (18)..(283): NCBI GI NO: 34865897 NR Description: similar to PL6 protein [Rattus norvegicus]
  misc_feature (6)..(286): NCBI GI NO: 19920824 NR Description: CG9536-PA [Drosophila melanogaster]
  misc_feature (11)..(282): NCBI GI NO: 32413290 NR Description: hypothetical protein [Neurospora crassa]
  misc_feature (18)..(272): NCBI GI NO: 31197821 NR Description: ENSANGP00000018642 [Anopheles gambiae]
MSSPGITSMFTNFTKLCKGLALVLVVGHLLVQFVPATVPYLALIPARTIPFGWNLITSGYFELSVHGVVISTVSLLFMGKFLEPVWGSKEFLKFIFVVNFLTYLCVFVTAIALYYITRLEIYLYMPFAGFHGVLAGLLVGIKQIIPDQEVLLVKIKAKWLPSITLVLSIASSFFTLNSAAYLPTLIFGTYMGWLYLRYFQRRTETKLRGDPSDDFAFSTFFPELLRPIIDPIASIFHRMLCGRSNATSEDHGYTTSGAPLPGSDSAEASRRRERGARALEERLATERLVPPRNKEELQSDALDSV

SEQ ID NO: 20696 - protein, 297 aa, Zea mays subsp. mays
  peptide (1)..(297): Ceres Seq. ID no. 15179991
  misc_feature (1)..(297): NCBI GI NO: 18398108 NR Description: expressed protein [Arabidopsis thaliana]
  misc_feature (1)..(297): NCBI GI NO: 6648207 NR Description: unknown protein [Arabidopsis thaliana]
  misc_feature (1)..(297): NCBI GI NO: 34395257 NR Description: putative placental protein 6
  misc_feature (1)..(278): NCBI GI NO: 21741573 NR Description: OSJNBa0094O15.3
  misc_feature (33)..(296): NCBI GI NO: 5902022 NR Description: PL6 protein [Homo sapiens]
  misc_feature (10)..(275): NCBI GI NO: 9790165 NR Description: PL6 protein; PL-6; placental protein 6
  misc_feature (10)..(275): NCBI GI NO: 34865897 NR Description: similar to PL6 protein [Rattus norvegicus]
  misc_feature (1)..(278): NCBI GI NO: 19920824 NR Description: CG9536-PA [Drosophila melanogaster]
  misc_feature (3)..(274): NCBI GI NO: 32413290 NR Description: hypothetical protein [Neurospora crassa]
  misc_feature (10)..(264): NCBI GI NO: 31197821 NR Description: ENSANGP00000018642 [Anopheles gambiae]
MFTNFTKLCKGLALVLVVGHLLVQFVPATVPYLALIPARTIPFGWNLITSGYFELSVHGVVISTVSLLFMGKFLEPVWGSKEFLKFIFVVNFLTYLCVFVTAIALYYITRLEIYLYMPFAGFHGVLAGLLVGIKQIIPDQEVLLVKIKAKWLPSITLVLSIASSFFTLNSAAYLPTLIFGTYMGWLYLRYFQRRTETKLRGDPSDDFAFSTFFPELLRPIIDPIASIFHRMLCGRSNATSEDHGYTTSGAPLPGSDSAEASRRRERGARALEERLATERLVPPRNKEELQSDALDSV

SEQ ID NO: 20697 - DNA, 811 bp, Zea mays subsp. mays
  misc_feature (1)..(811): Ceres Seq. ID no. 15179986
aaatgcagcaaaaaccttacatctgatagaaaagaagagcttcgttcgctaaaaagatgagtttgatcctcagattcagacaacacttatcaacaaggttatcacaaacctccagatcaccactcgcttctcttctcaacggtcgccggagtttcggacaaccggcgggaaaacaagatgaagaggaagaagaagaaatagatcagaggaagctcccaaccgactacgacgccgcgacattcgatccgacagaacaccgaagtccgccaacggaccgcgtgttccgcctcgtcgacgagatctcgtctctaacgctatcggaaatctcagagctcggcgcgattatactgaagaagagagggatcacggagacaccaaccgtcgccgttatgaagcccggagctgtcgctgccggcgggatcgctcagggcggaggcggtggcggagcgagtgaagaagcgaaagtggagaagacagtgtttgagataaagcttgagggttttgaagcgtctgggaagatcaagattattaaggaggtgaggagctttactgatctgggacttaaggaagcgaaggagttggtggagaagactccttcggttttgaaagctggtgtttctaaagaggaaggtgagaagattgttgacaagcttaaggctcttggtgctaaagttgttcttgagtgagtttcttgatcttcgattttctttttctttggttccattttaataggagctaataatgtaatagatttacacttaagcagctttgtctcattgctataattggtggaagtacatcaatgtttggg

SEQ ID NO: 20698 - protein, 209 aa, Zea mays subsp. mays
  peptide (1)..(209): Ceres Seq. ID no. 15179987
  misc_feature (142)..(209): Pfam Name: Pfam Description:  Ribosomal protein L7/L12 C-terminal domain
  misc_feature (1)..(209): NCBI GI NO: 18409467 NR Description: expressed protein [Arabidopsis thaliana]
  misc_feature (83)..(209): NCBI GI NO: 15209174 NR Description: hypothetical protein [Solanum demissum]
  misc_feature (61)..(209): NCBI GI NO: 15234393 NR Description: ribosomal protein [Arabidopsis thaliana]
  misc_feature (51)..(209): NCBI GI NO: 34913132 NR Description: contains EST AU058363
  misc_feature (44)..(209): NCBI GI NO: 15230614 NR Description: expressed protein [Arabidopsis thaliana]
  misc_feature (122)..(209): NCBI GI NO: 15227539 NR Description: 50S ribosomal protein L7/L12
  misc_feature (72)..(209): NCBI GI NO: 15235649 NR Description: ribosomal - like protein [Arabidopsis thaliana]
  misc_feature (69)..(209): NCBI GI NO: 40745733 NR Description: hypothetical protein AN2057.2
  misc_feature (53)..(209): NCBI GI NO: 6321369 NR Description: Protein required for cell viability; Ygl068wp
  misc_feature (78)..(208): NCBI GI NO: 730573 NR Description: 50S ribosomal protein L7/L12
MSLILRFRQHLSTRLSQTSRSPLASLLNGRRSFGQPAGKQDEEEEEEIDQRKLPTDYDAATFDPTEHRSPPTDRVFRLVDEISSLTLSEISELGAIILKKRGITETPTVAVMKPGAVAAGGIAQGGGGGGASEEAKVEKTVFEIKLEGFEASGKIKIIKEVRSFTDLGLKEAKELVEKTPSVLKAGVSKEEGEKIVDKLKALGAKVVLE

SEQ ID NO: 20699 - DNA, 1131 bp, Zea mays subsp. mays
  misc_feature (1)..(1131): Ceres Seq. ID no. 15175169
aaaaaaaagcaaattttgatttcttagagagagataggagacggagggaagatcggtaaggaggagagaggaagatgatcaccggcgggagctacacgactatcgacgcccagaaagtctctggatctgtaccttctgttccagatccaggccacaccaccgtcaaattcgcagagtcaaatcttcaaacctttcctccgtctgctactcagggcaagatctctggtggtagtaatcctcctcgagatgctgacgatacattttctgggaatggtaatagtagtacagatgagcctcagtctggtggctggctccataaattcactgtcggtgcttacaagcctttctttgatgtcgacacttctgatgttgtggagaggctcaaagaatctctcttcccgttccgtggaacttttacggagaagactgccgataagcctgacttgtatggtccattttggatatgcacgactttgatattcgtggcggcatcgatcggcacgtttgtcacatacgtggcacacaaatggaagaaacaagaatggaactacgatatcaatcttgtgacttggtccgcaggagtgttctacggttatgtcacgcttgttcctctcgcgttatatgtcgttctcaagtacttctctgcaccttcgggactagtccagctcttctgtctctacggctattctctattcgtgtttatccccgcattgtgcctctcggtcgtgccagtggagatcttcagatgggttattgcgggtgtagcagggttcatgtctgcaacctttgtggctctcaacctcaaagcgcatatcaattctgctggggagagatcgatcctgataatcgcaagcatctttcttttgcagctcgggcttgcggttgtgctgaagctttatctattcactgtcaccgtatgatccatttagacctttgttcttcctataacctgaaaaggtaatgtgagtttctgataatttgtagatccatccataacgttttctcctcaaattttatccaaatttttgtacggcttggatgctctatgattccatttcatttagttacttgaaccttcccatggtatacttgtagaaaatattgtaataaaaatatatcgatttgtttgcg

SEQ ID NO: 20700 - protein, 281 aa, Zea mays subsp. mays
  peptide (1)..(281): Ceres Seq. ID no. 15175170
  misc_feature (92)..(257): Pfam Name: Pfam Description:  Yip1 domain
  misc_feature (1)..(281): NCBI GI NO: 30679454 NR Description: expressed protein [Arabidopsis thaliana]
  misc_feature (2)..(281): NCBI GI NO: 6729038 NR Description: unknown protein [Arabidopsis thaliana]
  misc_feature (1)..(281): NCBI GI NO: 30690667 NR Description: expressed protein [Arabidopsis thaliana]
  misc_feature (1)..(281): NCBI GI NO: 38564308 NR Description: At5g27490 [Arabidopsis thaliana]
  misc_feature (1)..(281): NCBI GI NO: 34912560 NR Description: P0410E03.18
  misc_feature (6)..(277): NCBI GI NO: 30688039 NR Description: expressed protein [Arabidopsis thaliana]
  misc_feature (24)..(277): NCBI GI NO: 32408303 NR Description: hypothetical protein [Neurospora crassa]
  misc_feature (24)..(277): NCBI GI NO: 40740298 NR Description: hypothetical protein AN4017.2
  misc_feature (24)..(277): NCBI GI NO: 10092643 NR Description: hypothetical protein DJ167A19.1 [Homo sapiens]
  misc_feature (57)..(277): NCBI GI NO: 21704084 NR Description: RIKEN cDNA C030002N13 [Mus musculus]
MITGGSYTTIDAQKVSGSVPSVPDPGHTTVKFAESNLQTFPPSATQGKISGGSNPPRDADDTFSGNGNSSTDEPQSGGWLHKFTVGAYKPFFDVDTSDVVERLKESLFPFRGTFTEKTADKPDLYGPFWICTTLIFVAASIGTFVTYVAHKWKKQEWNYDINLVTWSAGVFYGYVTLVPLALYVVLKYFSAPSGLVQLFCLYGYSLFVFIPALCLSVVPVEIFRWVIAGVAGFMSATFVALNLKAHINSAGERSILIIASIFLLQLGLAVVLKLYLFTVTV

SEQ ID NO: 20701 - protein, 165 aa, Zea mays subsp. mays
  peptide (1)..(165): Ceres Seq. ID no. 15175171
MHDFDIRGGIDRHVCHIRGTQMEETRMELRYQSCDLVRRSVLRLCHACSSRVICRSQVLLCTFGTSPALLSLRLFSIRVYPRIVPLGRASGDLQMGYCGCSRVHVCNLCGSQPQSAYQFCWGEIDPDNRKHLSFAARACGCAEALSIHCHRMIHLDLCSSYNLKR

SEQ ID NO: 20702 - protein, 144 aa, Zea mays subsp. mays
  peptide (1)..(144): Ceres Seq. ID no. 15175172
MEETRMELRYQSCDLVRRSVLRLCHACSSRVICRSQVLLCTFGTSPALLSLRLFSIRVYPRIVPLGRASGDLQMGYCGCSRVHVCNLCGSQPQSAYQFCWGEIDPDNRKHLSFAARACGCAEALSIHCHRMIHLDLCSSYNLKR

SEQ ID NO: 20703 - DNA, 1414 bp, Zea mays subsp. mays
  misc_feature (1)..(1414): Ceres Seq. ID no. 15179340
attatttttaacattttaatataaaaaccatcaaatgatctccaaaagttgattagctctctcttcgtttctgaataccaaacttttgttttgagctttaacccaaaccctaattttcgttttcttttctctcaagattatctttgaaaataattaagccatcgatgcttgaagttggagcaatggatatgactcctaaatctcctgaacccgaatccgaaacaccaacccggatccaaccagctaaaccgatctccttcagcaacggaatcatcaaacgccaccaccacatccaccaccacacagtcaccgtcacatacaaagaatgcctcaagaaccacgctgccgcgattggaggtcacgcgctagacggttgcggcgagttcatgccttctccttcctccacgccttccgatccaacttccctcaagtgtgccgcctgcggttgccaccgtaacttccaccgccgtgaccccgatgactcttccctcatttccgccgtgcctccaccgtctctccctccatcctccactaccgccgcaatcgagtaccagcctcaccaccgtcaccaccctcccccaccggctcctcctctccctcgcagccctacttcctcctctccgccgcctatctcctcttcttacatgctcctcgctctctccggtaacaataaacccggcggaaacagcttaccgttctcagatctcaacttcgcggccaacaacctctccactcaccaccaccacaaccacaatactccaggctcccggaagcggttcaggactaagttcagccaaacccagaaagacaagatgcacgagttcgccgaccgtatcggctggaagattcagaagcgcgacgaggacgaggtgcgcgacttctgccgcgaggtcggtgttgataaaggcgtgctcaaggtctggatgcacaataacaaaaacaccttcaacacccgccgcgaccagccgttctccggcgacaccaccgtccagaagatcgacaacggcgtcgctgtttctggcggcgagaatattaataataataataataataataacaacgcggtggatgttggcgttcacggtggaaacggtttaaaacacgacctgcacggcggcgatggtgggaggttcgagagtgatagcggcggagctgcggctaacgggtcgtcgtctacgtcgtgaagatgagaaactgtttttgttttgcagggaaagagcaataaagaagcttaagcttctgtttagcttagatcgtagagtaagaagcactgctattatcatcgttaatacgtttattaatattaattaaactcctttttagctcttttgtttctttttttattattagtttgttttccgacattaccatgaacttgtctcaaggaggtaataatataacacgttcaggagtt

SEQ ID NO: 20704 - protein, 339 aa, Zea mays subsp. mays
  peptide (1)..(339): Ceres Seq. ID no. 15179341
  misc_feature (50)..(108): Pfam Name: Pfam Description:  ZF-HD protein dimerisation region
  misc_feature (10)..(338): NCBI GI NO: 18421904 NR Description: expressed protein [Arabidopsis thaliana]
  misc_feature (1)..(282): NCBI GI NO: 15228530 NR Description: expressed protein [Arabidopsis thaliana]
  misc_feature (10)..(338): NCBI GI NO: 21592512 NR Description: unknown [Arabidopsis thaliana]
  misc_feature (10)..(311): NCBI GI NO: 13277220 NR Description: ZF-HD homeobox protein [Flaveria bidentis]
  misc_feature (74)..(339): NCBI GI NO: 13277222 NR Description: ZF-HD homeobox protein [Flaveria bidentis]
  misc_feature (133)..(287): NCBI GI NO: 13277216 NR Description: ZF-HD homeobox protein [Flaveria trinervia]
  misc_feature (16)..(144): NCBI GI NO: 13277216 NR Description: ZF-HD homeobox protein [Flaveria trinervia]
  misc_feature (13)..(183): NCBI GI NO: 15242243 NR Description: expressed protein [Arabidopsis thaliana]
  misc_feature (16)..(298): NCBI GI NO: 15226993 NR Description: expressed protein [Arabidopsis thaliana]
  misc_feature (16)..(293): NCBI GI NO: 20148768 NR Description: hypothetical protein At2g02540/T822.16
MLEVGAMDMTPKSPEPESETPTRIQPAKPISFSNGIIKRHHHIHHHTVTVTYKECLKNHAAAIGGHALDGCGEFMPSPSSTPSDPTSLKCAACGCHRNFHRRDPDDSSLISAVPPPSLPPSSTTAAIEYQPHHRHHPPPPAPPLPRSPTSSSPPPISSSYMLLALSGNNKPGGNSLPFSDLNFAANNLSTHHHHNHNTPGSRKRFRTKFSQTQKDKMHEFADRIGWKIQKRDEDEVRDFCREVGVDKGVLKVWMHNNKNTFNTRRDQPFSGDTTVQKIDNGVAVSGGENINNNNNNNNNAVDVGVHGGNGLKHDLHGGDGGRFESDSGGAAANGSSSTS

SEQ ID NO: 20705 - protein, 333 aa, Zea mays subsp. mays
  peptide (1)..(333): Ceres Seq. ID no. 15179342
  misc_feature (44)..(102): Pfam Name: Pfam Description:  ZF-HD protein dimerisation region
  misc_feature (4)..(332): NCBI GI NO: 18421904 NR Description: expressed protein [Arabidopsis thaliana]
  misc_feature (1)..(276): NCBI GI NO: 15228530 NR Description: expressed protein [Arabidopsis thaliana]
  misc_feature (4)..(332): NCBI GI NO: 21592512 NR Description: unknown [Arabidopsis thaliana]
  misc_feature (4)..(305): NCBI GI NO: 13277220 NR Description: ZF-HD homeobox protein [Flaveria bidentis]
  misc_feature (68)..(333): NCBI GI NO: 13277222 NR Description: ZF-HD homeobox protein [Flaveria bidentis]
  misc_feature (127)..(281): NCBI GI NO: 13277216 NR Description: ZF-HD homeobox protein [Flaveria trinervia]
  misc_feature (10)..(138): NCBI GI NO: 13277216 NR Description: ZF-HD homeobox protein [Flaveria trinervia]
  misc_feature (7)..(177): NCBI GI NO: 15242243 NR Description: expressed protein [Arabidopsis thaliana]
  misc_feature (10)..(292): NCBI GI NO: 15226993 NR Description: expressed protein [Arabidopsis thaliana]
  misc_feature (10)..(287): NCBI GI NO: 20148768 NR Description: hypothetical protein At2g02540/T822.16
MDMTPKSPEPESETPTRIQPAKPISFSNGIIKRHHHIHHHTVTVTYKECLKNHAAAIGGHALDGCGEFMPSPSSTPSDPTSLKCAACGCHRNFHRRDPDDSSLISAVPPPSLPPSSTTAAIEYQPHHRHHPPPPAPPLPRSPTSSSPPPISSSYMLLALSGNNKPGGNSLPFSDLNFAANNLSTHHHHNHNTPGSRKRFRTKFSQTQKDKMHEFADRIGWKIQKRDEDEVRDFCREVGVDKGVLKVWMHNNKNTFNTRRDQPFSGDTTVQKIDNGVAVSGGENINNNNNNNNNAVDVGVHGGNGLKHDLHGGDGGRFESDSGGAAANGSSSTS

SEQ ID NO: 20706 - protein, 331 aa, Zea mays subsp. mays
  peptide (1)..(331): Ceres Seq. ID no. 15179343
  misc_feature (42)..(100): Pfam Name: Pfam Description:  ZF-HD protein dimerisation region
  misc_feature (2)..(330): NCBI GI NO: 18421904 NR Description: expressed protein [Arabidopsis thaliana]
  misc_feature (1)..(274): NCBI GI NO: 15228530 NR Description: expressed protein [Arabidopsis thaliana]
  misc_feature (2)..(330): NCBI GI NO: 21592512 NR Description: unknown [Arabidopsis thaliana]
  misc_feature (2)..(303): NCBI GI NO: 13277220 NR Description: ZF-HD homeobox protein [Flaveria bidentis]
  misc_feature (66)..(331): NCBI GI NO: 13277222 NR Description: ZF-HD homeobox protein [Flaveria bidentis]
  misc_feature (125)..(279): NCBI GI NO: 13277216 NR Description: ZF-HD homeobox protein [Flaveria trinervia]
  misc_feature (8)..(136): NCBI GI NO: 13277216 NR Description: ZF-HD homeobox protein [Flaveria trinervia]
  misc_feature (5)..(175): NCBI GI NO: 15242243 NR Description: expressed protein [Arabidopsis thaliana]
  misc_feature (8)..(290): NCBI GI NO: 15226993 NR Description: expressed protein [Arabidopsis thaliana]
  misc_feature (8)..(285): NCBI GI NO: 20148768 NR Description: hypothetical protein At2g02540/T822.16
MTPKSPEPESETPTRIQPAKPISFSNGIIKRHHHIHHHTVTVTYKECLKNHAAAIGGHALDGCGEFMPSPSSTPSDPTSLKCAACGCHRNFHRRDPDDSSLISAVPPPSLPPSSTTAAIEYQPHHRHHPPPPAPPLPRSPTSSSPPPISSSYMLLALSGNNKPGGNSLPFSDLNFAANNLSTHHHHNHNTPGSRKRFRTKFSQTQKDKMHEFADRIGWKIQKRDEDEVRDFCREVGVDKGVLKVWMHNNKNTFNTRRDQPFSGDTTVQKIDNGVAVSGGENINNNNNNNNNAVDVGVHGGNGLKHDLHGGDGGRFESDSGGAAANGSSSTS

SEQ ID NO: 20707 - DNA, 1077 bp, Zea mays subsp. mays
  misc_feature (1)..(1077): Ceres Seq. ID no. 15179351
agaccaatcactacacaaataaaccataactctctctctctcaaaacattttaacttcaaaccaattaattctcaccgatcatgccgatcagaaacatcgccatcggcggagtccaaggagaagtgactcaccccagcgcacttagggcggcactcgctgagtttatctccactttgatctttgtcttcgccggctcaggatccggaatcgctttcaacaagctcactgacaatggtgcgaccactccttcaggcctcgtcgccgctgctttagctcatgctttcggtctcttcgtcgctgtttccgtcggtgctaacatctctggtggtcacgttaacccagccgttaccttcggtgctttcgtcggtggaaacatcactctcctccgtggtatcctctattggattgctcagcttcttggctcagtcgtcgcttgtctcctccttaaattcgccaccggtggcttggcagttccagcttttggtctctctgctggagttgaatccttaaacggtttcgtcttcgagatcgtgatgaccttcgggctcgtctacaccgtctacgccacagccgttgaccccaagaacggtagtctcggaacaatcgcaccaatcgccataggtttcatcgttggagctaacatcctcgccggtggagctttcagcggagcctccatgaacccagccgtggcttttggaccagccgtcgtgagctggacgtggaccaaccactggatctactgggctggtcctcttgtcggtggtggactcgctggactcatctacgagtttgtcttcatcaaccaaaacggccacgagcaattgcccaccactgattactgtctactgaagactgccaaaactcaatatgatttgatttgtttttatttcgcatcgtaatggggtcgttggatcttttttagatgaatcgttgtatgttgattttattgtgtatttgggtttgtcgttggagttttagttccctggaatgcttttgtgcaattgtattgtacggtacggtacggtactgatgactatgaatgataaaaccagggaatgtgaattacccaagcttcc

SEQ ID NO: 20708 - protein, 272 aa, Zea mays subsp. mays
  peptide (1)..(272): Ceres Seq. ID no. 15179352
  misc_feature (14)..(235): Pfam Name: Pfam Description:  Major intrinsic protein
  misc_feature (1)..(253): NCBI GI NO: 1514977 NR Description: VM23 [Raphanus sativus]
  misc_feature (1)..(253): NCBI GI NO: 5081419 NR Description: tonoplast intrinsic protein [Brassica napus]
  misc_feature (1)..(253): NCBI GI NO: 15231569 NR Description: tonoplast intrinsic protein, putative
  misc_feature (1)..(253): NCBI GI NO: 11357300 NR Description: gamma tonoplast intrinsic protein 2
  misc_feature (1)..(253): NCBI GI NO: 21593151 NR Description: putative aquaporin
  misc_feature (1)..(253): NCBI GI NO: 475048 NR Description: tonoplast intrinsic protein gamma (gamma-TIP)
  misc_feature (1)..(253): NCBI GI NO: 15228041 NR Description: major intrinsic protein (MIP) family
  misc_feature (1)..(253): NCBI GI NO: 22858917 NR Description: tonoplast intrinsic protein bobTIP26-2
  misc_feature (1)..(253): NCBI GI NO: 21284370 NR Description: tonoplast intrinsic protein bobTIP26-1
  misc_feature (1)..(241): NCBI GI NO: 99747 NR Description: probable membrane channel protein RB7 - Arabidopsisthaliana
MPIRNIAIGGVQGEVTHPSALRAALAEFISTLIFVFAGSGSGIAFNKLTDNGATTPSGLVAAALAHAFGLFVAVSVGANISGGHVNPAVTFGAFVGGNITLLRGILYWIAQLLGSVVACLLLKFATGGLAVPAFGLSAGVESLNGFVFEIVMTFGLVYTVYATAVDPKNGSLGTIAPIAIGFIVGANILAGGAFSGASMNPAVAFGPAVVSWTWTNHWIYWAGPLVGGGLAGLIYEFVFINQNGHEQLPTTDYCLLKTAKTQYDLICFYFAS

SEQ ID NO: 20709 - DNA, 712 bp, Zea mays subsp. mays
  misc_feature (1)..(712): Ceres Seq. ID no. 15179357
attcctcgttatctccaaagctccgttaatctaattatcaccaatcttgatcaaatccaatggatcaaaggcctctgggattgctaacgatccacgtcaaaagagggattaatctcgccattcgcgaccatcgaagcagcgatccttatgttgttatcaccgtcgccgaccagacattgaagacgcgtgtggtgaagaaaaactgcaatcctgtatggaatgaagaaatgaccgttgctatcaaagatcccaatgtccctatccgcttgacagtgtttgactgggacaagttcactggagatgacaagatgggagatgcaaacttagacattcagccctacttagagtctctcaaaatgggaatggagcttttgaggctccctaatggatgcgctatcaaaagggttcagccctccaggcacaactgtttatctgacgaaagcagcatcgtgtggaacaatggtaaaatcacgcaagacatgatccttaggctaaacaatgtcgagtgcggcgagattgaggtcatgcttgaatggcatgaaggtgctggttgcagaggtatcacttccaaaggagtaggtggaggctcttcctctacctaaaataatatggttgttcttcttgtcgtatacctgtttgaatgaaattgatctattgactattgttgttgttgtttccatatgtcgtagaatttttgtatctctttcttccg

SEQ ID NO: 20710 - protein, 180 aa, Zea mays subsp. mays
  peptide (1)..(180): Ceres Seq. ID no. 15179358
  misc_feature (9)..(88): Pfam Name: Pfam Description:  C2 domain
  misc_feature (1)..(180): NCBI GI NO: 15226306 NR Description: C2 domain-containing protein
  misc_feature (1)..(172): NCBI GI NO: 18409675 NR Description: C2 domain-containing protein
  misc_feature (6)..(168): NCBI GI NO: 18409682 NR Description: C2 domain-containing protein
  misc_feature (6)..(168): NCBI GI NO: 13430460 NR Description: unknown protein [Arabidopsis thaliana]
  misc_feature (6)..(168): NCBI GI NO: 15240322 NR Description: C2 domain-containing protein
  misc_feature (6)..(168): NCBI GI NO: 15221907 NR Description: C2 domain-containing protein
  misc_feature (6)..(168): NCBI GI NO: 25405940 NR Description: protein T1N15.21 [imported] - Arabidopsis thaliana
  misc_feature (6)..(168): NCBI GI NO: 15223248 NR Description: hypothetical protein [Arabidopsis thaliana]
  misc_feature (1)..(168): NCBI GI NO: 30684739 NR Description: C2 domain-containing protein
  misc_feature (6)..(164): NCBI GI NO: 18408493 NR Description: C2 domain-containing protein
MDQRPLGLLTIHVKRGINLAIRDHRSSDPYVVITVADQTLKTRVVKKNCNPVWNEEMTVAIKDPNVPIRLTVFDWDKFTGDDKMGDANLDIQPYLESLKMGMELLRLPNGCAIKRVQPSRHNCLSDESSIVWNNGKITQDMILRLNNVECGEIEVMLEWHEGAGCRGITSKGVGGGSSST

SEQ ID NO: 20711 - protein, 124 aa, Zea mays subsp. mays
  peptide (1)..(124): Ceres Seq. ID no. 15179359
  misc_feature (1)..(124): NCBI GI NO: 15226306 NR Description: C2 domain-containing protein
  misc_feature (1)..(116): NCBI GI NO: 18409675 NR Description: C2 domain-containing protein
  misc_feature (1)..(112): NCBI GI NO: 18409682 NR Description: C2 domain-containing protein
  misc_feature (1)..(112): NCBI GI NO: 13430460 NR Description: unknown protein [Arabidopsis thaliana]
  misc_feature (1)..(112): NCBI GI NO: 15240322 NR Description: C2 domain-containing protein
  misc_feature (1)..(112): NCBI GI NO: 15221907 NR Description: C2 domain-containing protein
  misc_feature (1)..(112): NCBI GI NO: 25405940 NR Description: protein T1N15.21 [imported] - Arabidopsis thaliana
  misc_feature (1)..(112): NCBI GI NO: 15223248 NR Description: hypothetical protein [Arabidopsis thaliana]
  misc_feature (1)..(112): NCBI GI NO: 30684739 NR Description: C2 domain-containing protein
  misc_feature (1)..(108): NCBI GI NO: 18408493 NR Description: C2 domain-containing protein
MTVAIKDPNVPIRLTVFDWDKFTGDDKMGDANLDIQPYLESLKMGMELLRLPNGCAIKRVQPSRHNCLSDESSIVWNNGKITQDMILRLNNVECGEIEVMLEWHEGAGCRGITSKGVGGGSSST

SEQ ID NO: 20712 - protein, 97 aa, Zea mays subsp. mays
  peptide (1)..(97): Ceres Seq. ID no. 15179360
  misc_feature (1)..(97): NCBI GI NO: 15226306 NR Description: C2 domain-containing protein
  misc_feature (1)..(89): NCBI GI NO: 18409675 NR Description: C2 domain-containing protein
  misc_feature (1)..(85): NCBI GI NO: 18409682 NR Description: C2 domain-containing protein
  misc_feature (1)..(85): NCBI GI NO: 13430460 NR Description: unknown protein [Arabidopsis thaliana]
  misc_feature (1)..(85): NCBI GI NO: 15240322 NR Description: C2 domain-containing protein
  misc_feature (1)..(85): NCBI GI NO: 15221907 NR Description: C2 domain-containing protein
  misc_feature (1)..(85): NCBI GI NO: 25405940 NR Description: protein T1N15.21 [imported] - Arabidopsis thaliana
  misc_feature (1)..(85): NCBI GI NO: 15223248 NR Description: hypothetical protein [Arabidopsis thaliana]
  misc_feature (1)..(85): NCBI GI NO: 30684739 NR Description: C2 domain-containing protein
  misc_feature (1)..(81): NCBI GI NO: 18408493 NR Description: C2 domain-containing protein
MGDANLDIQPYLESLKMGMELLRLPNGCAIKRVQPSRHNCLSDESSIVWNNGKITQDMILRLNNVECGEIEVMLEWHEGAGCRGITSKGVGGGSSST

SEQ ID NO: 20713 - DNA, 1001 bp, Zea mays subsp. mays
  misc_feature (1)..(1001): Ceres Seq. ID no. 15177518
atcaaccatggcttactcagctcccatatctccatccctatccttcttcaaaaacccccaactcaccagactctcgttccctttctccccactttactctcgccctagggttcagaatccaagtctgctcacgaagaacaagacgtggtcgtcgtccgtggtggtggcggcgacggcggcggagaagcagaagaagagataccctggagaatcgaaagggtttgtggaggagatgaggtttgtggcgatgagacttcacacgaaggagcaggccaaggaaggtgagaaagagacaaaatctcccgaggaacgtcctgtcgctaaatgggaaccgactgttgaaggttacttgaggtttttggtggatagcaagttggtttacgacacgcttgaagggattattcatcagtccactttcccaacttatgcggaattcaagaacactgggctggaaagggcagagaaattggacactgatctgaagtggttcaaagaacaaggctacgagattccagaaccaactgatactggtaaaaaatattctcagtatttaaaggatttagcagacaaggatcctccatcattcatttgtcacttctacaacatctacttcgcccacagcgctggtggtcgaatgattggaagaaaggtagcggaaaggattctcgacaatagagaactcgagttttacaaatgggacggcgacctttccggattgttgcagaacgtgagggaaaaactgaacaaagttgcagaggagtggacgagagaagagaagaatcattgtttggaagagaccgagaaatcgttcaagtattctggtgagatacttcgtctcatattgtcctgattcctctctttatatacgcgcttgtggcaactaaaatccctgctcaagttttttattcctgtattatatttttaaactcgcttctgcttgtttgtatcatcaaactcttatttgcttcaaagcttaatacgacgttggaagttcagcgttc

SEQ ID NO: 20714 - protein, 282 aa, Zea mays subsp. mays
  peptide (1)..(282): Ceres Seq. ID no. 15177519
  misc_feature (88)..(279): Pfam Name: Pfam Description:  Heme oxygenase
  misc_feature (3)..(282): NCBI GI NO: 15225771 NR Description: heme oxygenase 1 (HO1) [Arabidopsis thaliana]
  misc_feature (17)..(282): NCBI GI NO: 21450864 NR Description: putative heme oxygenase HO1 [Arabidopsis thaliana]
  misc_feature (43)..(282): NCBI GI NO: 14030647 NR Description: At2g26670/F18A8.4 [Arabidopsis thaliana]
  misc_feature (42)..(282): NCBI GI NO: 15222425 NR Description: heme oxygenase -related [Arabidopsis thaliana]
  misc_feature (3)..(282): NCBI GI NO: 14485575 NR Description: heme oxygenase 1 [Lycopersicon esculentum]
  misc_feature (52)..(282): NCBI GI NO: 15076863 NR Description: putative heme oxygenase 1 precursor
  misc_feature (51)..(282): NCBI GI NO: 14485569 NR Description: heme oxygenase 3 [Glycine max]
  misc_feature (51)..(282): NCBI GI NO: 14485567 NR Description: heme oxygenase 1 [Glycine max]
  misc_feature (53)..(282): NCBI GI NO: 14485579 NR Description: heme oxygenase 1 [Pinus taeda]
  misc_feature (46)..(282): NCBI GI NO: 15217926 NR Description: plastid heme oxygenase -related
STMAYSAPISPSLSFFKNPQLTRLSFPFSPLYSRPRVQNPSLLTKNKTWSSSVVVAATAAEKQKKRYPGESKGFVEEMRFVAMRLHTKEQAKEGEKETKSPEERPVAKWEPTVEGYLRFLVDSKLVYDTLEGIIHQSTFPTYAEFKNTGLERAEKLDTDLKWFKEQGYEIPEPTDTGKKYSQYLKDLADKDPPSFICHFYNIYFAHSAGGRMIGRKVAERILDNRELEFYKWDGDLSGLLQNVREKLNKVAEEWTREEKNHCLEETEKSFKYSGEILRLILS

SEQ ID NO: 20715 - protein, 280 aa, Zea mays subsp. mays
  peptide (1)..(280): Ceres Seq. ID no. 15177520
  misc_feature (86)..(277): Pfam Name: Pfam Description:  Heme oxygenase
  misc_feature (1)..(280): NCBI GI NO: 15225771 NR Description: heme oxygenase 1 (HO1) [Arabidopsis thaliana]
  misc_feature (15)..(280): NCBI GI NO: 21450864 NR Description: putative heme oxygenase HO1 [Arabidopsis thaliana]
  misc_feature (41)..(280): NCBI GI NO: 14030647 NR Description: At2g26670/F18A8.4 [Arabidopsis thaliana]
  misc_feature (40)..(280): NCBI GI NO: 15222425 NR Description: heme oxygenase -related [Arabidopsis thaliana]
  misc_feature (1)..(280): NCBI GI NO: 14485575 NR Description: heme oxygenase 1 [Lycopersicon esculentum]
  misc_feature (50)..(280): NCBI GI NO: 15076863 NR Description: putative heme oxygenase 1 precursor
  misc_feature (49)..(280): NCBI GI NO: 14485569 NR Description: heme oxygenase 3 [Glycine max]
  misc_feature (49)..(280): NCBI GI NO: 14485567 NR Description: heme oxygenase 1 [Glycine max]
  misc_feature (51)..(280): NCBI GI NO: 14485579 NR Description: heme oxygenase 1 [Pinus taeda]
  misc_feature (44)..(280): NCBI GI NO: 15217926 NR Description: plastid heme oxygenase -related
MAYSAPISPSLSFFKNPQLTRLSFPFSPLYSRPRVQNPSLLTKNKTWSSSVVVAATAAEKQKKRYPGESKGFVEEMRFVAMRLHTKEQAKEGEKETKSPEERPVAKWEPTVEGYLRFLVDSKLVYDTLEGIIHQSTFPTYAEFKNTGLERAEKLDTDLKWFKEQGYEIPEPTDTGKKYSQYLKDLADKDPPSFICHFYNIYFAHSAGGRMIGRKVAERILDNRELEFYKWDGDLSGLLQNVREKLNKVAEEWTREEKNHCLEETEKSFKYSGEILRLILS

SEQ ID NO: 20716 - protein, 205 aa, Zea mays subsp. mays
  peptide (1)..(205): Ceres Seq. ID no. 15177521
  misc_feature (11)..(202): Pfam Name: Pfam Description:  Heme oxygenase
  misc_feature (1)..(205): NCBI GI NO: 15225771 NR Description: heme oxygenase 1 (HO1) [Arabidopsis thaliana]
  misc_feature (1)..(205): NCBI GI NO: 21450864 NR Description: putative heme oxygenase HO1 [Arabidopsis thaliana]
  misc_feature (1)..(205): NCBI GI NO: 14030647 NR Description: At2g26670/F18A8.4 [Arabidopsis thaliana]
  misc_feature (1)..(205): NCBI GI NO: 15222425 NR Description: heme oxygenase -related [Arabidopsis thaliana]
  misc_feature (1)..(205): NCBI GI NO: 14485575 NR Description: heme oxygenase 1 [Lycopersicon esculentum]
  misc_feature (1)..(205): NCBI GI NO: 15076863 NR Description: putative heme oxygenase 1 precursor
  misc_feature (1)..(205): NCBI GI NO: 14485569 NR Description: heme oxygenase 3 [Glycine max]
  misc_feature (1)..(205): NCBI GI NO: 14485567 NR Description: heme oxygenase 1 [Glycine max]
  misc_feature (1)..(205): NCBI GI NO: 14485579 NR Description: heme oxygenase 1 [Pinus taeda]
  misc_feature (1)..(205): NCBI GI NO: 15217926 NR Description: plastid heme oxygenase -related
MRFVAMRLHTKEQAKEGEKETKSPEERPVAKWEPTVEGYLRFLVDSKLVYDTLEGIIHQSTFPTYAEFKNTGLERAEKLDTDLKWFKEQGYEIPEPTDTGKKYSQYLKDLADKDPPSFICHFYNIYFAHSAGGRMIGRKVAERILDNRELEFYKWDGDLSGLLQNVREKLNKVAEEWTREEKNHCLEETEKSFKYSGEILRLILS

SEQ ID NO: 20717 - DNA, 831 bp, Zea mays subsp. mays
  misc_feature (1)..(831): Ceres Seq. ID no. 15177889
acaccaaacaacacactaacatacacatcatctcctctctcttctcttatcttctccgctatgaagctagccactagcctcaactccaagttcctccgcctcagccctaaacgtatcttccgctccaagtccaagtcctcctccgtctccagatccgaaccttcgtccttcagctccggtgcttcttccgacggctcctacagcgacctcaagccaggtcccgccgccactcccatcagtgtcctccccggagaccacgatggtttttactccgagctgatccaagcgtttaagctcatagaccgcgacgacgacggcgtggtttcaagaagagacctagccgcgctccttagcaggctgagtcctgaaccgccgagtcaagaagaggttactctaatgcttcaagaagtcgatggaggaggagacggttgtatcagtctcgaggagcttgctagccgcgtggcgggaacctcctctgactctgatgaaggctccgtcgagatgagagaggtgtttgagttttttgacgtggatcacgacgggaggatatcggcggaggagttgcatagagtttttggagttatcggagacgagcggtgcacgttagaggagtgtgtgcgtatgattgcgaccgttgatgggaacggtgacggttttgtttgctttgatgacttttgccgcatgatggaagcatcaggctccagcgatgaatgatcatcattgagtcatgtttgtatggttgatgataatgacatcgttatgctctcccacattattttatattattgtaatttatatattccggtgggtataattttgtctcgggaaaac

SEQ ID NO: 20718 - protein, 237 aa, Zea mays subsp. mays
  peptide (1)..(237): Ceres Seq. ID no. 15177890
  misc_feature (204)..(229): Pfam Name: Pfam Description:  EF hand
  misc_feature (21)..(229): NCBI GI NO: 15227349 NR Description: calmodulin, putative [Arabidopsis thaliana]
  misc_feature (21)..(229): NCBI GI NO: 21536925 NR Description: calmodulin-like protein [Arabidopsis thaliana]
  misc_feature (21)..(229): NCBI GI NO: 322474 NR Description: calmodulin-related protein
  misc_feature (30)..(230): NCBI GI NO: 15228219 NR Description: calmodulin, putative [Arabidopsis thaliana]
  misc_feature (78)..(237): NCBI GI NO: 34895640 NR Description: OSJNBa0083M16.33
  misc_feature (88)..(235): NCBI GI NO: 21618074 NR Description: calmodulin-related protein [Arabidopsis thaliana]
  misc_feature (13)..(235): NCBI GI NO: 28301674 NR Description: calcium-binding protein
  misc_feature (88)..(235): NCBI GI NO: 18408502 NR Description: calmodulin-related protein, putative
  misc_feature (66)..(234): NCBI GI NO: 19386815 NR Description: B1147A04.10
  misc_feature (97)..(237): NCBI GI NO: 13397927 NR Description: putative calmodulin-related protein
TPNNTLTYTSSPLSSLIFSAMKLATSLNSKFLRLSPKRIFRSKSKSSSVSRSEPSSFSSGASSDGSYSDLKPGPAATPISVLPGDHDGFYSELIQAFKLIDRDDDGVVSRRDLAALLSRLSPEPPSQEEVTLMLQEVDGGGDGCISLEELASRVAGTSSDSDEGSVEMREVFEFFDVDHDGRISAEELHRVFGVIGDERCTLEECVRMIATVDGNGDGFVCFDDFCRMMEASGSSDE

SEQ ID NO: 20719 - protein, 217 aa, Zea mays subsp. mays
  peptide (1)..(217): Ceres Seq. ID no. 15177891
  misc_feature (184)..(209): Pfam Name: Pfam Description:  EF hand
  misc_feature (1)..(209): NCBI GI NO: 15227349 NR Description: calmodulin, putative [Arabidopsis thaliana]
  misc_feature (1)..(209): NCBI GI NO: 21536925 NR Description: calmodulin-like protein [Arabidopsis thaliana]
  misc_feature (1)..(209): NCBI GI NO: 322474 NR Description: calmodulin-related protein
  misc_feature (10)..(210): NCBI GI NO: 15228219 NR Description: calmodulin, putative [Arabidopsis thaliana]
  misc_feature (58)..(217): NCBI GI NO: 34895640 NR Description: OSJNBa0083M16.33
  misc_feature (68)..(215): NCBI GI NO: 21618074 NR Description: calmodulin-related protein [Arabidopsis thaliana]
  misc_feature (1)..(215): NCBI GI NO: 28301674 NR Description: calcium-binding protein
  misc_feature (68)..(215): NCBI GI NO: 18408502 NR Description: calmodulin-related protein, putative
  misc_feature (46)..(214): NCBI GI NO: 19386815 NR Description: B1147A04.10
  misc_feature (77)..(217): NCBI GI NO: 13397927 NR Description: putative calmodulin-related protein
MKLATSLNSKFLRLSPKRIFRSKSKSSSVSRSEPSSFSSGASSDGSYSDLKPGPAATPISVLPGDHDGFYSELIQAFKLIDRDDDGVVSRRDLAALLSRLSPEPPSQEEVTLMLQEVDGGGDGCISLEELASRVAGTSSDSDEGSVEMREVFEFFDVDHDGRISAEELHRVFGVIGDERCTLEECVRMIATVDGNGDGFVCFDDFCRMMEASGSSDE

SEQ ID NO: 20720 - DNA, 1036 bp, Zea mays subsp. mays
  misc_feature (1)..(1036): Ceres Seq. ID no. 15178108
ttctttcgattcccctttgatctatagcctttttgattttcgttttctctctcgatctaataatctctttctcgcttttcaaaatcatctcctccttcgtttgattctgttctctgttgattttagatctaagatctagtaatgattctatgagctgctcaattctgtttcgtcggattcgcattgtacactctttctccgtcgtttacctctactactcttacgtcttctcatgaacttctaatcgtctccgatctgattttgtttagctctctctcgaataaaagtttttttttttcgtttccttcgatctaactgattctttgctagtttagaggaatctagaagaaatataattttaaatatttgtgagaataaaaaaaagtcaatggggtcgttgcaaagacagacaagtcctgattccgacaacgatccgaggtacgctgccgtcacggacgagaggaagaggaagaggatgatctccaacagagagtccgctcggagatcgaggatgaggaagcagaagcagctcggagatctcatcaacgaggtgactgttctcaagaacgataacgccaagatcaccgagcaggtcgatgcagccacgaggaagtacgtggagatggagtcaaggaacgacgtgttgagagcacaggcctcggagttgacggagaggttgaggtcgttgaactctgtgcttgagatggttgaagagattagtggtcaggctttggatattcctgagattaatccttggcaggtttcttgtccgatgcaaccgattagggcttctgctgatatgtttgattgctgaggatttgcttatttgtctttgtccttgtgttgtggtggttcgagttttgttgaatggtgtgtgtgtcatctttataatatattgtttgtctggttggtgttgttgtgtaatcctctagtgtcgtctattgcataagataagtttgttatgtaatttgttttttttttgtgtttcttaatgtattcaagctttgtgttatatgatttctttataaatcttccc

SEQ ID NO: 20721 - protein, 141 aa, Zea mays subsp. mays
  peptide (1)..(141): Ceres Seq. ID no. 15178109
  misc_feature (21)..(85): Pfam Name: Pfam Description:  bZIP transcription factor
  misc_feature (1)..(141): NCBI GI NO: 15228754 NR Description: bZIP family transcription factor
  misc_feature (5)..(139): NCBI GI NO: 9650826 NR Description: common plant regulatory factor 6
  misc_feature (1)..(139): NCBI GI NO: 10241920 NR Description: TBZF [Nicotiana tabacum]
  misc_feature (1)..(139): NCBI GI NO: 16580132 NR Description: bZIP transcription factor BZI-3
  misc_feature (1)..(138): NCBI GI NO: 7489118 NR Description: DNA-binding protein tbz17 - common tobacco
  misc_feature (1)..(139): NCBI GI NO: 5901747 NR Description: bZIP DNA-binding protein [Lycopersicon esculentum]
  misc_feature (1)..(141): NCBI GI NO: 7489297 NR Description: DNA-binding protein bZIP-1 - garden snapdragon
  misc_feature (7)..(139): NCBI GI NO: 7489298 NR Description: DNA-binding protein bZIP-2 - garden snapdragon
  misc_feature (1)..(138): NCBI GI NO: 3986151 NR Description: rdLIP [Raphanus sativus]
  misc_feature (6)..(136): NCBI GI NO: 40019253 NR Description: ocs-element binding factor 1 [Secale cereale]
MGSLQRQTSPDSDNDPRYAAVTDERKRKRMISNRESARRSRMRKQKQLGDLINEVTVLKNDNAKITEQVDAATRKYVEMESRNDVLRAQASELTERLRSLNSVLEMVEEISGQALDIPEINPWQVSCPMQPIRASADMFDC

SEQ ID NO: 20722 - protein, 112 aa, Zea mays subsp. mays
  peptide (1)..(112): Ceres Seq. ID no. 15178110
  misc_feature (1)..(56): Pfam Name: Pfam Description:  bZIP transcription factor
  misc_feature (1)..(112): NCBI GI NO: 15228754 NR Description: bZIP family transcription factor
  misc_feature (1)..(110): NCBI GI NO: 9650826 NR Description: common plant regulatory factor 6
  misc_feature (1)..(110): NCBI GI NO: 10241920 NR Description: TBZF [Nicotiana tabacum]
  misc_feature (1)..(110): NCBI GI NO: 16580132 NR Description: bZIP transcription factor BZI-3
  misc_feature (1)..(109): NCBI GI NO: 7489118 NR Description: DNA-binding protein tbz17 - common tobacco
  misc_feature (1)..(110): NCBI GI NO: 5901747 NR Description: bZIP DNA-binding protein [Lycopersicon esculentum]
  misc_feature (1)..(112): NCBI GI NO: 7489297 NR Description: DNA-binding protein bZIP-1 - garden snapdragon
  misc_feature (1)..(110): NCBI GI NO: 7489298 NR Description: DNA-binding protein bZIP-2 - garden snapdragon
  misc_feature (1)..(109): NCBI GI NO: 3986151 NR Description: rdLIP [Raphanus sativus]
  misc_feature (1)..(107): NCBI GI NO: 40019253 NR Description: ocs-element binding factor 1 [Secale cereale]
MISNRESARRSRMRKQKQLGDLINEVTVLKNDNAKITEQVDAATRKYVEMESRNDVLRAQASELTERLRSLNSVLEMVEEISGQALDIPEINPWQVSCPMQPIRASADMFDC

SEQ ID NO: 20723 - protein, 100 aa, Zea mays subsp. mays
  peptide (1)..(100): Ceres Seq. ID no. 15178111
  misc_feature (1)..(100): NCBI GI NO: 15228754 NR Description: bZIP family transcription factor
  misc_feature (1)..(98): NCBI GI NO: 9650826 NR Description: common plant regulatory factor 6
  misc_feature (1)..(98): NCBI GI NO: 10241920 NR Description: TBZF [Nicotiana tabacum]
  misc_feature (1)..(98): NCBI GI NO: 16580132 NR Description: bZIP transcription factor BZI-3
  misc_feature (1)..(97): NCBI GI NO: 7489118 NR Description: DNA-binding protein tbz17 - common tobacco
  misc_feature (1)..(98): NCBI GI NO: 5901747 NR Description: bZIP DNA-binding protein [Lycopersicon esculentum]
  misc_feature (1)..(100): NCBI GI NO: 7489297 NR Description: DNA-binding protein bZIP-1 - garden snapdragon
  misc_feature (1)..(98): NCBI GI NO: 7489298 NR Description: DNA-binding protein bZIP-2 - garden snapdragon
  misc_feature (1)..(97): NCBI GI NO: 3986151 NR Description: rdLIP [Raphanus sativus]
  misc_feature (1)..(95): NCBI GI NO: 40019253 NR Description: ocs-element binding factor 1 [Secale cereale]
MRKQKQLGDLINEVTVLKNDNAKITEQVDAATRKYVEMESRNDVLRAQASELTERLRSLNSVLEMVEEISGQALDIPEINPWQVSCPMQPIRASADMFDC

SEQ ID NO: 20724 - DNA, 1620 bp, Zea mays subsp. mays
  misc_feature (1)..(1620): Ceres Seq. ID no. 15179055
gtttaactgccgtaaattatctggaacttgcaccaactaggtcaccataacgtcttgatcacgtggcggaatcccccagcaaaacgctgaaacatggagagactttcaaggaacctccgatgtttacagagcaaaagcaagctccagcgttgttggtacacaaaagatcgagtcacttatacagaaacggaagcccaagtttgacactaacaagttgcagcaagtagcaacggatgataaaggattgtggattgctgtcgtggggttggtgctgatgtcatcatgacttcagagtcttgcagaaatggtactgagctgtgcagcgaagcaatagaaaatctggagaagaagtatgatgtggtccttaacattcaaggagatgaacaactcattgagcctgtgattatagacagtattgtcaaagcacttcaggtagcacctgatgcagtatttagcacagcggtgacgtcattaaaaccagaagacggagatgatcctaaccgagtcaaatgtgtggtggacaaccgtggctatactgtctatatctccaggggtttggttccgtataacacgagtggtaacgtcaatccagatttccttacatgcttcatcttgaaatacagctacgacatctaattggacggagctttttgtttcacattttctctatctcaggccattcgtgaagatggcatgtataatcttccccggaagatgtgttcagtcaggtcacgcttcccataagcttctgagactgcttactggaatttttggagaaaacaaggaggttaaaatggattttaatcccaaactatctcatctttctttcaccctggcttggttacttaggctcagagggtggtccccctttctcgcgtaaaagcgatcctggaccattcagcctctctcaaccaagtatccccttcccttattaaataaagtagctaatgaaatgaggcaggttgtgctagaagtctgttccaaagagcttggctcttagtaggcaagacggtctttgttttttgttactatatccatgagaatactaatgtttaatggatcaggaagtttactcttttgtgtttgttgataggatggtagcacatgcgatggagttatggacagctgtaagcgatgaaggagaagttcttgcacatgttcttgcacatgagggagcagcgacatttgggtggagtcaacatggaagatctacatagacttgactatgctcaagtctttcttcttatgctctgactctgaagatctcaggaatacataactggaaacatggaggaaaggttcggggattttttggcttcagcaagtctgggattagcgctgtctcaaagtgactgcttaacagctgcttgattctgttggaaagccattgtctgataaaaatcttacggtcctccaggccatatttgaaacatatttcattatgtgcatccttcttcatactttgacattgtctaacgggaaggcctggtggagctgttgggttccgaattgcagatctttggctgtcttgattttcttcacaaatattaatcatttatatcttctgttttctttgctaatgactttggttctataaatatatgtcctgaaattagagcc

SEQ ID NO: 20725 - protein, 117 aa, Zea mays subsp. mays
  peptide (1)..(117): Ceres Seq. ID no. 15179056
  misc_feature (1)..(105): Pfam Name: Pfam Description:  Cytidylyltransferase
  misc_feature (1)..(105): NCBI GI NO: 30695393 NR Description: CMP-KDO synthetase -related [Arabidopsis thaliana]
  misc_feature (1)..(105): NCBI GI NO: 7688435 NR Description: CMP-KDO synthetase [Zea mays]
  misc_feature (1)..(105): NCBI GI NO: 7688437 NR Description: CMP-KDO synthetase [Zea mays]
  misc_feature (1)..(96): NCBI GI NO: 15602723 NR Description: KdsB [Pasteurella multocida]
  misc_feature (1)..(96): NCBI GI NO: 15604902 NR Description: CMP-2-keto-3-deoxyoctulosonic acid synthetase
  misc_feature (1)..(96): NCBI GI NO: 1361311 NR Description: CMP-2-keto-3-deoxyoctulosonic acid synthetase homolog
  misc_feature (1)..(96): NCBI GI NO: 14194887 NR Description: 3-DEOXY-MANNO-OCTULOSONATE CYTIDYLYLTRANSFERASE
  misc_feature (1)..(102): NCBI GI NO: 19704142 NR Description: 3-deoxy-manno-octulosonate cytidylyltransferase
  misc_feature (1)..(104): NCBI GI NO: 28897758 NR Description: 3-deoxy-manno-octulosonate cytidylyltransferase
  misc_feature (1)..(104): NCBI GI NO: 34541435 NR Description: 3-deoxy-D-manno-octulosonate cytidylyltransferase
MTSESCRNGTELCSEAIENLEKKYDVVLNIQGDEQLIEPVIIDSIVKALQVAPDAVFSTAVTSLKPEDGDDPNRVKCVVDNRGYTVYISRGLVPYNTSGNVNPDFLTCFILKYSYDI

SEQ ID NO: 20726 - protein, 63 aa, Zea mays subsp. mays
  peptide (1)..(63): Ceres Seq. ID no. 15179057
  misc_feature (1)..(34): NCBI GI NO: 13605599 NR Description: AT4g32910/F26P21_30 [Arabidopsis thaliana]
  misc_feature (1)..(34): NCBI GI NO: 18418112 NR Description: expressed protein [Arabidopsis thaliana]
  misc_feature (1)..(33): NCBI GI NO: 7452449 NR Description: hypothetical protein F26P21
  misc_feature (1)..(34): NCBI GI NO: 34909454 NR Description: OSJNBa0014K08.23
MACIIFPGRCVQSGHASHKLLRLLTGIFGENKEVKMDFNPKLSHLSFTLAWLLRLRGWSPFLA

SEQ ID NO: 20727 - DNA, 1575 bp, Zea mays subsp. mays
  misc_feature (1)..(1575): Ceres Seq. ID no. 15179007
aagttttagtttcagcttcactgtcttttttaacgactctgttccttctccgaccaaaagcgagaaaaaaaatggcgtctcttggccaaatcaccctcccgcgagcgccatcgttgcagaaaggcctcctacgccgtccgatcagaaccccaatcagattcaacggccggatcgcgagtgtattgactaacgcgggttcggtgaaagcaagtgtgagccagaaggtgattgaagaggaggcgaaagttctggtgggtacctacgcgcgtgctccagtggtgctctcgagtgggaaaggttgtaaattgatggacgcagaagggaaagagtatcttgattgtgcatctggaatcgctgtgaatgctctgggccatggagatcctgattggcttcaagctgtcactgaccaagcttctgttctttcccacgtcagcaatgtctattacaccattcctcagatagaactagcgaaacgccttgtggcaagttctttcgcagaccgtgtattcttctgtaactctggaacagaagccaacgaagcagccatcaagttttctagaaagttccagagattcacccatcctgaagacaaggaagtcgccacaagcttcatcgcctttacgaatagtttccatggtagaaccttaggagctcttgcattaacaagcaaagaacagtacagaactcctttcgaacctatcatgccaggcgttacgttcttggaatatggtaacactcaagcagccactgatcttatccgctccggtaaaatagctgctgtgtttgtggagcctattcaaggagaaggtggggtttactctgctacaaaagagtttctccagtctcttcgctcagcttgtgatgctgcaggatctcttctcgtcttcgatgaggttcagtgtggtttgggtcgaaccggtaacctatgggcatatgaagcatttggtgtaacacctgacataatgacagttgcaaagcctttagcaggtggtttaccaattggagcggtgcttgtaactgaaaaagttgctgagaccatcaaatatggagatcatggaagcacatttgcagggaaccctcttgtgtgtagtgcagccatcgctgtttttgataaagtatctaaatcctctttcttggccagtgtctcgagcaaaggtttatactttaaggatctgttggtgaagaaactaggaggaaacttgcacgtgaaggaagtgagaggagaagggcttattattggagtggagctggacgtgcccgcaggtccgttggtcgatgcttgtcgtgattctggtcttctgatcttgacggcagggaaagggaatgtcgtcaggattgttccgccgttgattatatcggaggaggaaatcgaacgtgccgttgagattattttccatgatttaactgcgcttgactgaatattgttgttgaacataaatgttcatcgactatgaactgtgtttttaaaattctgtactttacttaaataagctcaagtataacagtaaatgtgcctgttacagttcataactgctgtttcttggttctgtttttttgaaacatttttcttggttc

SEQ ID NO: 20728 - protein, 471 aa, Zea mays subsp. mays
  peptide (1)..(471): Ceres Seq. ID no. 15179008
  misc_feature (81)..(471): Pfam Name: Pfam Description:  Aminotransferase class-III
  misc_feature (24)..(471): NCBI GI NO: 15220176 NR Description: acetylornithine aminotransferase, mitochondrial
  misc_feature (24)..(471): NCBI GI NO: 21554043 NR Description: putative acetylornithine transaminase
  misc_feature (24)..(471): NCBI GI NO: 2811029 NR Description: Acetylornithine aminotransferase
  misc_feature (204)..(444): NCBI GI NO: 34394063 NR Description: putative acetylornithine aminotransferase
  misc_feature (74)..(460): NCBI GI NO: 22972847 NR Description: hypothetical protein [Chloroflexus aurantiacus]
  misc_feature (76)..(463): NCBI GI NO: 15668902 NR Description: acetylornithine aminotransferase (argD)
  misc_feature (75)..(463): NCBI GI NO: 23112365 NR Description: hypothetical protein
  misc_feature (83)..(463): NCBI GI NO: 15644529 NR Description: acetylornithine aminotransferase
  misc_feature (72)..(470): NCBI GI NO: 15679337 NR Description: N-acetylornithine aminotransferase
  misc_feature (37)..(463): NCBI GI NO: 40747112 NR Description: hypothetical protein AN1150.2
VLVSASLSFLTTLFLLRPKARKKMASLGQITLPRAPSLQKGLLRRPIRTPIRFNGRIASVLTNAGSVKASVSQKVIEEEAKVLVGTYARAPVVLSSGKGCKLMDAEGKEYLDCASGIAVNALGHGDPDWLQAVTDQASVLSHVSNVYYTIPQIELAKRLVASSFADRVFFCNSGTEANEAAIKFSRKFQRFTHPEDKEVATSFIAFTNSFHGRTLGALALTSKEQYRTPFEPIMPGVTFLEYGNTQAATDLIRSGKIAAVFVEPIQGEGGVYSATKEFLQSLRSACDAAGSLLVFDEVQCGLGRTGNLWAYEAFGVTPDIMTVAKPLAGGLPIGAVLVTEKVAETIKYGDHGSTFAGNPLVCSAAIAVFDKVSKSSFLASVSSKGLYFKDLLVKKLGGNLHVKEVRGEGLIIGVELDVPAGPLVDACRDSGLLILTAGKGNVVRIVPPLIISEEEIERAVEIIFHDLTALD

SEQ ID NO: 20729 - protein, 448 aa, Zea mays subsp. mays
  peptide (1)..(448): Ceres Seq. ID no. 15179009
  misc_feature (58)..(448): Pfam Name: Pfam Description:  Aminotransferase class-III
  misc_feature (1)..(448): NCBI GI NO: 15220176 NR Description: acetylornithine aminotransferase, mitochondrial
  misc_feature (1)..(448): NCBI GI NO: 21554043 NR Description: putative acetylornithine transaminase
  misc_feature (1)..(448): NCBI GI NO: 2811029 NR Description: Acetylornithine aminotransferase
  misc_feature (181)..(421): NCBI GI NO: 34394063 NR Description: putative acetylornithine aminotransferase
  misc_feature (51)..(437): NCBI GI NO: 22972847 NR Description: hypothetical protein [Chloroflexus aurantiacus]
  misc_feature (53)..(440): NCBI GI NO: 15668902 NR Description: acetylornithine aminotransferase (argD)
  misc_feature (52)..(440): NCBI GI NO: 23112365 NR Description: hypothetical protein
  misc_feature (60)..(440): NCBI GI NO: 15644529 NR Description: acetylornithine aminotransferase
  misc_feature (49)..(447): NCBI GI NO: 15679337 NR Description: N-acetylornithine aminotransferase
  misc_feature (14)..(440): NCBI GI NO: 40747112 NR Description: hypothetical protein AN1150.2
MASLGQITLPRAPSLQKGLLRRPIRTPIRFNGRIASVLTNAGSVKASVSQKVIEEEAKVLVGTYARAPVVLSSGKGCKLMDAEGKEYLDCASGIAVNALGHGDPDWLQAVTDQASVLSHVSNVYYTIPQIELAKRLVASSFADRVFFCNSGTEANEAAIKFSRKFQRFTHPEDKEVATSFIAFTNSFHGRTLGALALTSKEQYRTPFEPIMPGVTFLEYGNTQAATDLIRSGKIAAVFVEPIQGEGGVYSATKEFLQSLRSACDAAGSLLVFDEVQCGLGRTGNLWAYEAFGVTPDIMTVAKPLAGGLPIGAVLVTEKVAETIKYGDHGSTFAGNPLVCSAAIAVFDKVSKSSFLASVSSKGLYFKDLLVKKLGGNLHVKEVRGEGLIIGVELDVPAGPLVDACRDSGLLILTAGKGNVVRIVPPLIISEEEIERAVEIIFHDLTALD

SEQ ID NO: 20730 - protein, 369 aa, Zea mays subsp. mays
  peptide (1)..(369): Ceres Seq. ID no. 15179010
  misc_feature (1)..(369): Pfam Name: Pfam Description:  Aminotransferase class-III
  misc_feature (1)..(369): NCBI GI NO: 15220176 NR Description: acetylornithine aminotransferase, mitochondrial
  misc_feature (1)..(369): NCBI GI NO: 21554043 NR Description: putative acetylornithine transaminase
  misc_feature (1)..(369): NCBI GI NO: 2811029 NR Description: Acetylornithine aminotransferase
  misc_feature (102)..(342): NCBI GI NO: 34394063 NR Description: putative acetylornithine aminotransferase
  misc_feature (1)..(358): NCBI GI NO: 22972847 NR Description: hypothetical protein [Chloroflexus aurantiacus]
  misc_feature (1)..(361): NCBI GI NO: 15668902 NR Description: acetylornithine aminotransferase (argD)
  misc_feature (1)..(361): NCBI GI NO: 23112365 NR Description: hypothetical protein
  misc_feature (1)..(361): NCBI GI NO: 15644529 NR Description: acetylornithine aminotransferase
  misc_feature (1)..(368): NCBI GI NO: 15679337 NR Description: N-acetylornithine aminotransferase
  misc_feature (1)..(361): NCBI GI NO: 40747112 NR Description: hypothetical protein AN1150.2
MDAEGKEYLDCASGIAVNALGHGDPDWLQAVTDQASVLSHVSNVYYTIPQIELAKRLVASSFADRVFFCNSGTEANEAAIKFSRKFQRFTHPEDKEVATSFIAFTNSFHGRTLGALALTSKEQYRTPFEPIMPGVTFLEYGNTQAATDLIRSGKIAAVFVEPIQGEGGVYSATKEFLQSLRSACDAAGSLLVFDEVQCGLGRTGNLWAYEAFGVTPDIMTVAKPLAGGLPIGAVLVTEKVAETIKYGDHGSTFAGNPLVCSAAIAVFDKVSKSSFLASVSSKGLYFKDLLVKKLGGNLHVKEVRGEGLIIGVELDVPAGPLVDACRDSGLLILTAGKGNVVRIVPPLIISEEEIERAVEIIFHDLTALD

SEQ ID NO: 20731 - DNA, 754 bp, Zea mays subsp. mays
  misc_feature (1)..(754): Ceres Seq. ID no. 15179090
gagctgagatgctgaagctacaagtaagcgggaaggcgatcttgtccactgttcgctgtcggagacaggcaagagtaagcgggaaagtaatcttttcgagcgttcgttgtcggagagagatgtcgacttcttcttccttcgtgtttgggccttacaagatcgatccgcgtgaagtgttctacgcaactcctctctcttacgccatggttaatctccgaccccttcttcctggtcatgttcttgtctgcccgagacgccttgtgccgcgctttactgatctcacagctgatgagaccagtgacctttggcttactgctcagaaggttggctctcggattgagaccttccataatgcaacttctctcacgttagctatccaagatgggcctcaggcgggacagagtgttcctcatgtgcacattcacgtcttgcctcgtaaaggcggcgactttgagaagaatgatgagatttacgatgcaattgatgagaaggagaaggaacttaagcagaagcttgatcttgacaaagatcgtgttgataggagcattgaggagatggctaacgaggcttcacagtaccggtctcttttcgattgctagttatgagcaaaagctatccattggcttccaagccttttcaataagaccaagcgaccctcaagttgaagttgatgttagagacttcaattcaaacttgtaatctctttcttatgccaccaaaactgagaatcatcgaaatgttttagttctggttg

SEQ ID NO: 20732 - protein, 198 aa, Zea mays subsp. mays
  peptide (1)..(198): Ceres Seq. ID no. 15179091
  misc_feature (24)..(198): NCBI GI NO: 27808510 NR Description: At5g58240 [Arabidopsis thaliana]
  misc_feature (24)..(198): NCBI GI NO: 30697031 NR Description: bis
  misc_feature (41)..(198): NCBI GI NO: 8777325 NR Description: bis(5'-adenosyl)-triphosphatase-like protein
  misc_feature (44)..(196): NCBI GI NO: 27542770 NR Description: ATPase-like protein [Sorghum bicolor]
  misc_feature (44)..(196): NCBI GI NO: 37589828 NR Description: Unknown (protein for MGC:73176) [Danio rerio]
  misc_feature (48)..(197): NCBI GI NO: 28828402 NR Description: similar to diadenosine tetraphosphatase
  misc_feature (48)..(189): NCBI GI NO: 40738785 NR Description: hypothetical protein AN6189.2
  misc_feature (45)..(196): NCBI GI NO: 4503719 NR Description: fragile histidine triad gene; bis
  misc_feature (45)..(196): NCBI GI NO: 11120730 NR Description: fragile histidine triad protein
  misc_feature (45)..(196): NCBI GI NO: 15215093 NR Description: Fhit protein [Mus musculus]
AEMLKLQVSGKAILSTVRCRRQARVSGKVIFSSVRCRREMSTSSSFVFGPYKIDPREVFYATPLSYAMVNLRPLLPGHVLVCPRRLVPRFTDLTADETSDLWLTAQKVGSRIETFHNATSLTLAIQDGPQAGQSVPHVHIHVLPRKGGDFEKNDEIYDAIDEKEKELKQKLDLDKDRVDRSIEEMANEASQYRSLFDC

SEQ ID NO: 20733 - protein, 196 aa, Zea mays subsp. mays
  peptide (1)..(196): Ceres Seq. ID no. 15179092
  misc_feature (22)..(196): NCBI GI NO: 27808510 NR Description: At5g58240 [Arabidopsis thaliana]
  misc_feature (22)..(196): NCBI GI NO: 30697031 NR Description: bis
  misc_feature (39)..(196): NCBI GI NO: 8777325 NR Description: bis(5'-adenosyl)-triphosphatase-like protein
  misc_feature (42)..(194): NCBI GI NO: 27542770 NR Description: ATPase-like protein [Sorghum bicolor]
  misc_feature (42)..(194): NCBI GI NO: 37589828 NR Description: Unknown (protein for MGC:73176) [Danio rerio]
  misc_feature (46)..(195): NCBI GI NO: 28828402 NR Description: similar to diadenosine tetraphosphatase
  misc_feature (46)..(187): NCBI GI NO: 40738785 NR Description: hypothetical protein AN6189.2
  misc_feature (43)..(194): NCBI GI NO: 4503719 NR Description: fragile histidine triad gene; bis
  misc_feature (43)..(194): NCBI GI NO: 11120730 NR Description: fragile histidine triad protein
  misc_feature (43)..(194): NCBI GI NO: 15215093 NR Description: Fhit protein [Mus musculus]
MLKLQVSGKAILSTVRCRRQARVSGKVIFSSVRCRREMSTSSSFVFGPYKIDPREVFYATPLSYAMVNLRPLLPGHVLVCPRRLVPRFTDLTADETSDLWLTAQKVGSRIETFHNATSLTLAIQDGPQAGQSVPHVHIHVLPRKGGDFEKNDEIYDAIDEKEKELKQKLDLDKDRVDRSIEEMANEASQYRSLFDC

SEQ ID NO: 20734 - protein, 159 aa, Zea mays subsp. mays
  peptide (1)..(159): Ceres Seq. ID no. 15179093
  misc_feature (1)..(159): NCBI GI NO: 27808510 NR Description: At5g58240 [Arabidopsis thaliana]
  misc_feature (1)..(159): NCBI GI NO: 30697031 NR Description: bis
  misc_feature (2)..(159): NCBI GI NO: 8777325 NR Description: bis(5'-adenosyl)-triphosphatase-like protein
  misc_feature (5)..(157): NCBI GI NO: 27542770 NR Description: ATPase-like protein [Sorghum bicolor]
  misc_feature (5)..(157): NCBI GI NO: 37589828 NR Description: Unknown (protein for MGC:73176) [Danio rerio]
  misc_feature (9)..(158): NCBI GI NO: 28828402 NR Description: similar to diadenosine tetraphosphatase
  misc_feature (9)..(150): NCBI GI NO: 40738785 NR Description: hypothetical protein AN6189.2
  misc_feature (6)..(157): NCBI GI NO: 4503719 NR Description: fragile histidine triad gene; bis
  misc_feature (6)..(157): NCBI GI NO: 11120730 NR Description: fragile histidine triad protein
  misc_feature (6)..(157): NCBI GI NO: 15215093 NR Description: Fhit protein [Mus musculus]
MSTSSSFVFGPYKIDPREVFYATPLSYAMVNLRPLLPGHVLVCPRRLVPRFTDLTADETSDLWLTAQKVGSRIETFHNATSLTLAIQDGPQAGQSVPHVHIHVLPRKGGDFEKNDEIYDAIDEKEKELKQKLDLDKDRVDRSIEEMANEASQYRSLFDC

SEQ ID NO: 20735 - DNA, 1086 bp, Zea mays subsp. mays
  misc_feature (1)..(1086): Ceres Seq. ID no. 15179068
aagaaaaacaataaatcagaacagagtgatgaatcaagagaaacccacttcttgttgctgtgttcttgatgcttccacttatgtgggtttctggattctcaagaaattgctcaccagaggctactctgttcgtgcagccatccgtaaaaatggggagagtatactcgaggagaaaatcaggaacatgcaagccacagaggagagattagttgtttacgatgtggatgtgttggattaccagagcatccttgtttctctcaacaactgtaacgctgtgttctgttgcttggacaatcctgaagggtacgatgagatggaagttgatttggaggtgagaggagcgattaatgtggtggaagcatgtgcaagaacagagaatatagacaagattgtcttctcttcttcactaactgctgcaatttggacagataacattggaactcaaaaagatgttgatgagaagtcttggagtgatctagacttttgtctcaaaaagaagctatggcatgcgctggccaagacacaatctgagaaggcggcttgggcactagccatggaccgtatggtcaacatggtctcagttaacccagggctcattgttggaccctcagtgactcaacacaaccctagacccaccatgtctttcctgaagggggctgcgcagatgtatgagaacggtgtgttagcctacgtagacgtagagtttgtagcagatgttcacattcgagttttcgaggatacttcggcttgtggtagatacttttgcttcaaccaaattgtaaataccgaagaagaagctctcaaacttgtggagattctatctcctttgattcctatgccaccaaggtatgagaaagagatgcaaggaagtgaagtttatgaagagaggttgagaaacaataaactcaacaagctggtggaagctggctctgcttgttaattacatggagatagtacaatgttctatatataaactcaagagaaccaaacgatacataatatgtttatcataagcatagtttattttctctcttttgtcttttgcttgtaatctcaattcagtataaataatattttcttttgtcc

SEQ ID NO: 20736 - protein, 312 aa, Zea mays subsp. mays
  peptide (1)..(312): Ceres Seq. ID no. 15179069
  misc_feature (10)..(312): NCBI GI NO: 25412171 NR Description: probable cinnamoyl CoA reductase
  misc_feature (10)..(312): NCBI GI NO: 18400407 NR Description: cinnamoyl-CoA reductase-related
  misc_feature (10)..(312): NCBI GI NO: 21553382 NR Description: putative cinnamoyl CoA reductase
  misc_feature (10)..(312): NCBI GI NO: 15234751 NR Description: cinnamoyl-CoA reductase-related
  misc_feature (10)..(312): NCBI GI NO: 21553548 NR Description: cinnamoyl-CoA reductase-like protein
  misc_feature (8)..(306): NCBI GI NO: 37537132 NR Description: putative cinnamoyl-CoA reductase
  misc_feature (20)..(305): NCBI GI NO: 9964087 NR Description: cinnamoyl CoA reductase [Lolium perenne]
  misc_feature (20)..(305): NCBI GI NO: 25140432 NR Description: cinnamoyl CoA reductase [Hordeum vulgare]
  misc_feature (20)..(305): NCBI GI NO: 3341511 NR Description: cinnamoyl-CoA reductase [Saccharum officinarum]
  misc_feature (20)..(312): NCBI GI NO: 34911590 NR Description: putative cinnamoyl CoA reductase
RKTINQNRVMNQEKPTSCCCVLDASTYVGFWILKKLLTRGYSVRAAIRKNGESILEEKIRNMQATEERLVVYDVDVLDYQSILVSLNNCNAVFCCLDNPEGYDEMEVDLEVRGAINVVEACARTENIDKIVFSSSLTAAIWTDNIGTQKDVDEKSWSDLDFCLKKKLWHALAKTQSEKAAWALAMDRMVNMVSVNPGLIVGPSVTQHNPRPTMSFLKGAAQMYENGVLAYVDVEFVADVHIRVFEDTSACGRYFCFNQIVNTEEEALKLVEILSPLIPMPPRYEKEMQGSEVYEERLRNNKLNKLVEAGSAC

SEQ ID NO: 20737 - protein, 303 aa, Zea mays subsp. mays
  peptide (1)..(303): Ceres Seq. ID no. 15179070
  misc_feature (1)..(303): NCBI GI NO: 25412171 NR Description: probable cinnamoyl CoA reductase
  misc_feature (1)..(303): NCBI GI NO: 18400407 NR Description: cinnamoyl-CoA reductase-related
  misc_feature (1)..(303): NCBI GI NO: 21553382 NR Description: putative cinnamoyl CoA reductase
  misc_feature (1)..(303): NCBI GI NO: 15234751 NR Description: cinnamoyl-CoA reductase-related
  misc_feature (1)..(303): NCBI GI NO: 21553548 NR Description: cinnamoyl-CoA reductase-like protein
  misc_feature (1)..(297): NCBI GI NO: 37537132 NR Description: putative cinnamoyl-CoA reductase
  misc_feature (11)..(296): NCBI GI NO: 9964087 NR Description: cinnamoyl CoA reductase [Lolium perenne]
  misc_feature (11)..(296): NCBI GI NO: 25140432 NR Description: cinnamoyl CoA reductase [Hordeum vulgare]
  misc_feature (11)..(296): NCBI GI NO: 3341511 NR Description: cinnamoyl-CoA reductase [Saccharum officinarum]
  misc_feature (11)..(303): NCBI GI NO: 34911590 NR Description: putative cinnamoyl CoA reductase
MNQEKPTSCCCVLDASTYVGFWILKKLLTRGYSVRAAIRKNGESILEEKIRNMQATEERLVVYDVDVLDYQSILVSLNNCNAVFCCLDNPEGYDEMEVDLEVRGAINVVEACARTENIDKIVFSSSLTAAIWTDNIGTQKDVDEKSWSDLDFCLKKKLWHALAKTQSEKAAWALAMDRMVNMVSVNPGLIVGPSVTQHNPRPTMSFLKGAAQMYENGVLAYVDVEFVADVHIRVFEDTSACGRYFCFNQIVNTEEEALKLVEILSPLIPMPPRYEKEMQGSEVYEERLRNNKLNKLVEAGSAC

SEQ ID NO: 20738 - protein, 251 aa, Zea mays subsp. mays
  peptide (1)..(251): Ceres Seq. ID no. 15179071
  misc_feature (1)..(251): NCBI GI NO: 25412171 NR Description: probable cinnamoyl CoA reductase
  misc_feature (1)..(251): NCBI GI NO: 18400407 NR Description: cinnamoyl-CoA reductase-related
  misc_feature (1)..(251): NCBI GI NO: 21553382 NR Description: putative cinnamoyl CoA reductase
  misc_feature (1)..(251): NCBI GI NO: 15234751 NR Description: cinnamoyl-CoA reductase-related
  misc_feature (1)..(251): NCBI GI NO: 21553548 NR Description: cinnamoyl-CoA reductase-like protein
  misc_feature (1)..(245): NCBI GI NO: 37537132 NR Description: putative cinnamoyl-CoA reductase
  misc_feature (1)..(244): NCBI GI NO: 9964087 NR Description: cinnamoyl CoA reductase [Lolium perenne]
  misc_feature (1)..(244): NCBI GI NO: 25140432 NR Description: cinnamoyl CoA reductase [Hordeum vulgare]
  misc_feature (1)..(244): NCBI GI NO: 3341511 NR Description: cinnamoyl-CoA reductase [Saccharum officinarum]
  misc_feature (1)..(251): NCBI GI NO: 34911590 NR Description: putative cinnamoyl CoA reductase
MQATEERLVVYDVDVLDYQSILVSLNNCNAVFCCLDNPEGYDEMEVDLEVRGAINVVEACARTENIDKIVFSSSLTAAIWTDNIGTQKDVDEKSWSDLDFCLKKKLWHALAKTQSEKAAWALAMDRMVNMVSVNPGLIVGPSVTQHNPRPTMSFLKGAAQMYENGVLAYVDVEFVADVHIRVFEDTSACGRYFCFNQIVNTEEEALKLVEILSPLIPMPPRYEKEMQGSEVYEERLRNNKLNKLVEAGSAC

SEQ ID NO: 20739 - DNA, 631 bp, Zea mays subsp. mays
  misc_feature (1)..(631): Ceres Seq. ID no. 15179011
ctgggattagagtttatagaaaatcggaaagagagagagagagagagacgagttctccgatcaacaacgccagcaaaatggagatggaaacagaagtctctgagaagaaggagatagtggtgcttctggttggtccgccaggaagcggcaaatcgacgttcagtgagtccgtaatgaaatcatctcaccgcccttggtctcgcatctgtcaggacattattaacaatggcaaagctggaagcaaagctcagtgcctaaagatggctatagaatccctcaaggaagggaagagcgtctttattgacagatgcaatcttgacagggagcagcgctccgagtttattaagctcggtggtccccttgttgaagtccatgcactggttctcgaactttctgctcaagtttgtatatctagatcagtcaaaagaagtggccatgagggtaatctacaaggcggaagagctgcagctgttgtgaacaagatgcttcggagtaaggaacttcccaaattgaatgaaggcttttctcggattctgttttgttacaacgacgcagatgttgagaatgctgtttttttttttttttttttttgaatgaatgttaaatttattcaaaaaagcctttatacaac

SEQ ID NO: 20740 - protein, 196 aa, Zea mays subsp. mays
  peptide (1)..(196): Ceres Seq. ID no. 15179012
  misc_feature (9)..(190): NCBI GI NO: 15240948 NR Description: hypothetical protein [Arabidopsis thaliana]
  misc_feature (5)..(177): NCBI GI NO: 32416758 NR Description: hypothetical protein [Neurospora crassa]
GIRVYRKSERERERETSSPINNASKMEMETEVSEKKEIVVLLVGPPGSGKSTFSESVMKSSHRPWSRICQDIINNGKAGSKAQCLKMAIESLKEGKSVFIDRCNLDREQRSEFIKLGGPLVEVHALVLELSAQVCISRSVKRSGHEGNLQGGRAAAVVNKMLRSKELPKLNEGFSRILFCYNDADVENAVFFFFFF

SEQ ID NO: 20741 - protein, 171 aa, Zea mays subsp. mays
  peptide (1)..(171): Ceres Seq. ID no. 15179013
  misc_feature (1)..(165): NCBI GI NO: 15240948 NR Description: hypothetical protein [Arabidopsis thaliana]
  misc_feature (1)..(152): NCBI GI NO: 32416758 NR Description: hypothetical protein [Neurospora crassa]
MEMETEVSEKKEIVVLLVGPPGSGKSTFSESVMKSSHRPWSRICQDIINNGKAGSKAQCLKMAIESLKEGKSVFIDRCNLDREQRSEFIKLGGPLVEVHALVLELSAQVCISRSVKRSGHEGNLQGGRAAAVVNKMLRSKELPKLNEGFSRILFCYNDADVENAVFFFFFF

SEQ ID NO: 20742 - protein, 169 aa, Zea mays subsp. mays
  peptide (1)..(169): Ceres Seq. ID no. 15179014
  misc_feature (1)..(163): NCBI GI NO: 15240948 NR Description: hypothetical protein [Arabidopsis thaliana]
  misc_feature (1)..(150): NCBI GI NO: 32416758 NR Description: hypothetical protein [Neurospora crassa]
METEVSEKKEIVVLLVGPPGSGKSTFSESVMKSSHRPWSRICQDIINNGKAGSKAQCLKMAIESLKEGKSVFIDRCNLDREQRSEFIKLGGPLVEVHALVLELSAQVCISRSVKRSGHEGNLQGGRAAAVVNKMLRSKELPKLNEGFSRILFCYNDADVENAVFFFFFF

SEQ ID NO: 20743 - DNA, 710 bp, Zea mays subsp. mays
  misc_feature (1)..(710): Ceres Seq. ID no. 15179033
aaaagtgtatagcgagcgcaacaattcaaatctattagatggcaatctccggtaacgccgtggcatacctccggcgacggctcctcccaactacgctaatccacgtcacggctcttgacggcatcgtgaacgtcaattccctcttctcgctcgctcttttcctcggcctcaccacaagcggaaacatcaccttcccggtttcctcctccgccgccgccggaaaccaacatcttcgccgatgtattgccgcaaaaggcccagtattagcggaaaggctagtctcaagccacgtttactctttcagcttctttctcttctccagcctcatcgctatgtctctcaagcaagcaatccggacaacgaccaacgggagcatcgttgaggaggaggcgcgggtgctaaacgcgggaatggggcgcgtgaatttggcggctttgagagttggaatcgtggcttcgtgtgttggatctgttttgggatgtgggttcttgacgatggctttagtagatcttgttcaggtcaagcttgggcctttagaatgtacgaaaagctttaacacgcttgcagctattgttcctcttgttgtgcttgttccttctgcacttcttatctatgtcttacttgttctctacgctttcatttattaacactttattgatatttctacaacacttcttattaaagatttgagttagatcacttcctgagat

SEQ ID NO: 20744 - protein, 202 aa, Zea mays subsp. mays
  peptide (1)..(202): Ceres Seq. ID no. 15179034
  misc_feature (1)..(202): NCBI GI NO: 15232676 NR Description: expressed protein [Arabidopsis thaliana]
  misc_feature (18)..(200): NCBI GI NO: 15239293 NR Description: expressed protein [Arabidopsis thaliana]
  misc_feature (19)..(200): NCBI GI NO: 34395171 NR Description: unknown protein
  misc_feature (19)..(200): NCBI GI NO: 34900646 NR Description: hypothetical protein~similar to Arabidopsisthaliana chromosome5
  misc_feature (18)..(202): NCBI GI NO: 37531676 NR Description: hypothetical protein
  misc_feature (30)..(200): NCBI GI NO: 6041846 NR Description: unknown protein [Arabidopsis thaliana]
  misc_feature (30)..(200): NCBI GI NO: 18397969 NR Description: expressed protein [Arabidopsis thaliana]
  misc_feature (16)..(192): NCBI GI NO: 6041846 NR Description: unknown protein [Arabidopsis thaliana]
  misc_feature (16)..(192): NCBI GI NO: 18397969 NR Description: expressed protein [Arabidopsis thaliana]
MAISGNAVAYLRRRLLPTTLIHVTALDGIVNVNSLFSLALFLGLTTSGNITFPVSSSAAAGNQHLRRCIAAKGPVLAERLVSSHVYSFSFFLFSSLIAMSLKQAIRTTTNGSIVEEEARVLNAGMGRVNLAALRVGIVASCVGSVLGCGFLTMALVDLVQVKLGPLECTKSFNTLAAIVPLVVLVPSALLIYVLLVLYAFIY

SEQ ID NO: 20745 - protein, 104 aa, Zea mays subsp. mays
  peptide (1)..(104): Ceres Seq. ID no. 15179035
  misc_feature (1)..(104): NCBI GI NO: 15232676 NR Description: expressed protein [Arabidopsis thaliana]
  misc_feature (1)..(102): NCBI GI NO: 15239293 NR Description: expressed protein [Arabidopsis thaliana]
  misc_feature (1)..(102): NCBI GI NO: 34395171 NR Description: unknown protein
  misc_feature (1)..(102): NCBI GI NO: 34900646 NR Description: hypothetical protein~similar to Arabidopsisthaliana chromosome5
  misc_feature (1)..(104): NCBI GI NO: 37531676 NR Description: hypothetical protein
  misc_feature (1)..(102): NCBI GI NO: 6041846 NR Description: unknown protein [Arabidopsis thaliana]
  misc_feature (1)..(102): NCBI GI NO: 18397969 NR Description: expressed protein [Arabidopsis thaliana]
  misc_feature (1)..(94): NCBI GI NO: 6041846 NR Description: unknown protein [Arabidopsis thaliana]
  misc_feature (1)..(94): NCBI GI NO: 18397969 NR Description: expressed protein [Arabidopsis thaliana]
MSLKQAIRTTTNGSIVEEEARVLNAGMGRVNLAALRVGIVASCVGSVLGCGFLTMALVDLVQVKLGPLECTKSFNTLAAIVPLVVLVPSALLIYVLLVLYAFIY

SEQ ID NO: 20746 - DNA, 1459 bp, Zea mays subsp. mays
  misc_feature (1)..(1459): Ceres Seq. ID no. 15176161
aaaaagcctctctctaactaaaatggtggaagctcaatcatggaccacgcggcggatgagcaacccgaggttcgacgccgccgccaccaccacaccaacagtcatcgacatccccggaacacctccacactcctccgcctcctccaatggaaaacccttcttcctctcctcccccacagtatctccctccgtcctcacggcggcgattatcgctgcctggttcggttccaacataggagtcctcctcctgaacaagtacctcctcttctactacggcttccgctatccaatcttcttgaccatgacgcacatgctctcctgcgccgcctacagctccgccgtcatcaacatcgccggtatcgtgccgcgtcagcacatcctctcccgccgtcagtttctgaagattcttgcactctcggcgatcttttgcctatccgtagtgtgcggcaacacttctctccgttacatccctgtttcttttaatcaggcgatcggagccaccacgccgttcttcaccgccgtcttctctttcctcattacctgtaaaacagagtccaccgaagtttacttggttttgcttcccgtcgtttccggcatagttctcgcttctaactccgagccttcgtttcatctctttggtttcctcatttgcgtcgcttccaccgccggtagagctcttaaatccgtcgtccaggggattattctgacgtcagaatcagagaagctacattcaatgaatcttctgctctacatggctccaatggcggcttgtatcttactaccatttacgctatacatcgaaggaaacgtactaaggatcctaattgaaaaggcgaggaccgatccattgatcatcttcttgctcgcagggaatgcgacagtggcatatttagtaaatttgacgaacttcttggtgacaaagcacacaagtgctctcaccttgcaggttttaggtaacggaaaagccgcggtggctgccggagtctcggttttgatatttaggaatccggtgacggtgatgggtgttgctggatttggcgtcacgattatgggagtggttctctacagcgaagctaggaagagatccaagttgcttaaccagaagtgaaatgtgaaagtggggaaagaaactggatttaaaccggtgaagtaatttcttattttatggtatttttcggttaaagtatcttgattctttgaaattctgctattgttttgaaccggtttgagagggggaaatgtaactgtaaatggttgagattgattgggggaaaatataaaattaaaaagggtaatatatatataacaaaagtggaaaagtagggggcagaattaaaagaaaacacattgtatcgttcttttatttttctttaaattcttctcttgtattattatttcgttttatagtttgtaatttattaccaaaattatcgaaacataaggggaaaaagttaaaaat

SEQ ID NO: 20747 - protein, 368 aa, Zea mays subsp. mays
  peptide (1)..(368): Ceres Seq. ID no. 15176162
  misc_feature (80)..(203): Pfam Name: Pfam Description:  Integral membrane protein DUF6
  misc_feature (8)..(368): NCBI GI NO: 15221371 NR Description: phosphate translocator-related
  misc_feature (66)..(363): NCBI GI NO: 27476065 NR Description: Putative phosphate/phosphoenolpyruvate translocatorprotein
  misc_feature (66)..(363): NCBI GI NO: 9759107 NR Description: phosphate/phosphoenolpyruvate translocator protein-like
  misc_feature (66)..(363): NCBI GI NO: 30681126 NR Description: phosphate translocator-related
  misc_feature (55)..(361): NCBI GI NO: 15237644 NR Description: phosphate translocator-related
  misc_feature (55)..(361): NCBI GI NO: 17064798 NR Description: phosphate/phosphoenolpyruvate translocator-like
  misc_feature (55)..(361): NCBI GI NO: 15228248 NR Description: phosphate translocator-related
  misc_feature (177)..(363): NCBI GI NO: 15229717 NR Description: phosphate translocator-related
  misc_feature (66)..(314): NCBI GI NO: 15229717 NR Description: phosphate translocator-related
  misc_feature (70)..(359): NCBI GI NO: 18411611 NR Description: glucose-6-phosphate/phosphate translocator-related
KSLSLTKMVEAQSWTTRRMSNPRFDAAATTTPTVIDIPGTPPHSSASSNGKPFFLSSPTVSPSVLTAAIIAAWFGSNIGVLLLNKYLLFYYGFRYPIFLTMTHMLSCAAYSSAVINIAGIVPRQHILSRRQFLKILALSAIFCLSVVCGNTSLRYIPVSFNQAIGATTPFFTAVFSFLITCKTESTEVYLVLLPVVSGIVLASNSEPSFHLFGFLICVASTAGRALKSVVQGIILTSESEKLHSMNLLLYMAPMAACILLPFTLYIEGNVLRILIEKARTDPLIIFLLAGNATVAYLVNLTNFLVTKHTSALTLQVLGNGKAAVAAGVSVLIFRNPVTVMGVAGFGVTIMGVVLYSEARKRSKLLNQK

SEQ ID NO: 20748 - protein, 361 aa, Zea mays subsp. mays
  peptide (1)..(361): Ceres Seq. ID no. 15176163
  misc_feature (73)..(196): Pfam Name: Pfam Description:  Integral membrane protein DUF6
  misc_feature (1)..(361): NCBI GI NO: 15221371 NR Description: phosphate translocator-related
  misc_feature (59)..(356): NCBI GI NO: 27476065 NR Description: Putative phosphate/phosphoenolpyruvate translocatorprotein
  misc_feature (59)..(356): NCBI GI NO: 9759107 NR Description: phosphate/phosphoenolpyruvate translocator protein-like
  misc_feature (59)..(356): NCBI GI NO: 30681126 NR Description: phosphate translocator-related
  misc_feature (48)..(354): NCBI GI NO: 15237644 NR Description: phosphate translocator-related
  misc_feature (48)..(354): NCBI GI NO: 17064798 NR Description: phosphate/phosphoenolpyruvate translocator-like
  misc_feature (48)..(354): NCBI GI NO: 15228248 NR Description: phosphate translocator-related
  misc_feature (170)..(356): NCBI GI NO: 15229717 NR Description: phosphate translocator-related
  misc_feature (59)..(307): NCBI GI NO: 15229717 NR Description: phosphate translocator-related
  misc_feature (63)..(352): NCBI GI NO: 18411611 NR Description: glucose-6-phosphate/phosphate translocator-related
MVEAQSWTTRRMSNPRFDAAATTTPTVIDIPGTPPHSSASSNGKPFFLSSPTVSPSVLTAAIIAAWFGSNIGVLLLNKYLLFYYGFRYPIFLTMTHMLSCAAYSSAVINIAGIVPRQHILSRRQFLKILALSAIFCLSVVCGNTSLRYIPVSFNQAIGATTPFFTAVFSFLITCKTESTEVYLVLLPVVSGIVLASNSEPSFHLFGFLICVASTAGRALKSVVQGIILTSESEKLHSMNLLLYMAPMAACILLPFTLYIEGNVLRILIEKARTDPLIIFLLAGNATVAYLVNLTNFLVTKHTSALTLQVLGNGKAAVAAGVSVLIFRNPVTVMGVAGFGVTIMGVVLYSEARKRSKLLNQK

SEQ ID NO: 20749 - protein, 350 aa, Zea mays subsp. mays
  peptide (1)..(350): Ceres Seq. ID no. 15176164
  misc_feature (62)..(185): Pfam Name: Pfam Description:  Integral membrane protein DUF6
  misc_feature (1)..(350): NCBI GI NO: 15221371 NR Description: phosphate translocator-related
  misc_feature (48)..(345): NCBI GI NO: 27476065 NR Description: Putative phosphate/phosphoenolpyruvate translocatorprotein
  misc_feature (48)..(345): NCBI GI NO: 9759107 NR Description: phosphate/phosphoenolpyruvate translocator protein-like
  misc_feature (48)..(345): NCBI GI NO: 30681126 NR Description: phosphate translocator-related
  misc_feature (37)..(343): NCBI GI NO: 15237644 NR Description: phosphate translocator-related
  misc_feature (37)..(343): NCBI GI NO: 17064798 NR Description: phosphate/phosphoenolpyruvate translocator-like
  misc_feature (37)..(343): NCBI GI NO: 15228248 NR Description: phosphate translocator-related
  misc_feature (159)..(345): NCBI GI NO: 15229717 NR Description: phosphate translocator-related
  misc_feature (48)..(296): NCBI GI NO: 15229717 NR Description: phosphate translocator-related
  misc_feature (52)..(341): NCBI GI NO: 18411611 NR Description: glucose-6-phosphate/phosphate translocator-related
MSNPRFDAAATTTPTVIDIPGTPPHSSASSNGKPFFLSSPTVSPSVLTAAIIAAWFGSNIGVLLLNKYLLFYYGFRYPIFLTMTHMLSCAAYSSAVINIAGIVPRQHILSRRQFLKILALSAIFCLSVVCGNTSLRYIPVSFNQAIGATTPFFTAVFSFLITCKTESTEVYLVLLPVVSGIVLASNSEPSFHLFGFLICVASTAGRALKSVVQGIILTSESEKLHSMNLLLYMAPMAACILLPFTLYIEGNVLRILIEKARTDPLIIFLLAGNATVAYLVNLTNFLVTKHTSALTLQVLGNGKAAVAAGVSVLIFRNPVTVMGVAGFGVTIMGVVLYSEARKRSKLLNQK

SEQ ID NO: 20750 - DNA, 1194 bp, Zea mays subsp. mays
  misc_feature (1)..(1194): Ceres Seq. ID no. 15176835
acttcgccttctctacacaaacaaaactggttcgctaagagctccgacaatggctgtctgcgcaactcactcctctctcatgatagcatacgccgcatccaaggaccttacaattccgtctcttttctcatctgccaacccaagacccaacaagttgagcgtcgcactctatccccctcttgttctccttgcggggagaagagcttcgaacccatccttcccggtggttgtctcagccgtagccgcagaggctgatgtcgacacggaggacgcggagcagaacgaagccacctccaccaccgccacagccgtcctcgatccgccaaagcctaagaaaggaaaagcagctttgcttctcaagagagatagaacaaggtctaagaggtttctggaaatccaaaagctaagggaaaccaaaaaggagtacgacgtcaagactgctatatctttgcttaagcaaaccgctaacacaaggtttgtggagtcggtcgaagcccatttccgtctcaacatcgatcctaagtacaatgatcagcagctgcgagcaaccgtgagccttcctaaaggaacagggcaaactgttaaagtggctgttcttgcacaaggtgagaaggtcgatgaagcaaaaaatgcaggggcagatattgtgggcagtgatgatttgatcgaacagataaaaggagggttcatggagttcgataagttaattgcatccccggatatgatggtcaaggttgctggcctgggaaagattcttggtccacgaggactcatgccaaatcccaaggctggtaccgtcacagctaacattccacaggctatagaagagttcaagaagggaaaagtagaattcagagcagacaaaactgggattgttcacattccgtttgggaaagtgaatttcacagaggaagacctgctcgtaaacttccttgcagcagtgaaatcggtggagacaaacaagccaaagggagcaaaaggagtgtactggaaaagcgcacacatatgttcgtcaatggggccatccatcaagttgaacataagggagatgatagagttcaagccataaataaccacatttgtgtttttttttttgtgagtgtaggcgaacaccattagttatctcttgtatacctcaccggttgtatcaccttaactctgataagaccatttgctttattgattattactgtt

SEQ ID NO: 20751 - protein, 355 aa, Zea mays subsp. mays
  peptide (1)..(355): Ceres Seq. ID no. 15176836
  misc_feature (138)..(342): Pfam Name: Pfam Description:  Ribosomal protein L1p/L10e family
  misc_feature (17)..(355): NCBI GI NO: 25456457 NR Description: ribosomal protein L1 protein
  misc_feature (17)..(355): NCBI GI NO: 15229443 NR Description: ribosomal protein L1p family
  misc_feature (76)..(355): NCBI GI NO: 25453504 NR Description: ribosomal protein L1 [imported] - spinach
  misc_feature (102)..(277): NCBI GI NO: 1350625 NR Description: 50S RIBOSOMAL PROTEIN L1, CHLOROPLAST PRECURSOR
  misc_feature (123)..(354): NCBI GI NO: 22297840 NR Description: 50S ribosomal protein L1
  misc_feature (126)..(354): NCBI GI NO: 17232793 NR Description: 50S ribosomal protein L1 [Nostoc sp. PCC 7120]
  misc_feature (126)..(349): NCBI GI NO: 11467612 NR Description: ribosomal protein L1 [Guillardia theta]
  misc_feature (126)..(354): NCBI GI NO: 16330010 NR Description: 50S ribosomal protein L1
  misc_feature (126)..(354): NCBI GI NO: 37521169 NR Description: 50S ribosomal protein L1 [Gloeobacter violaceus]
  misc_feature (126)..(350): NCBI GI NO: 39997957 NR Description: ribosomal protein L1
LRLLYTNKTGSLRAPTMAVCATHSSLMIAYAASKDLTIPSLFSSANPRPNKLSVALYPPLVLLAGRRASNPSFPVVVSAVAAEADVDTEDAEQNEATSTTATAVLDPPKPKKGKAALLLKRDRTRSKRFLEIQKLRETKKEYDVKTAISLLKQTANTRFVESVEAHFRLNIDPKYNDQQLRATVSLPKGTGQTVKVAVLAQGEKVDEAKNAGADIVGSDDLIEQIKGGFMEFDKLIASPDMMVKVAGLGKILGPRGLMPNPKAGTVTANIPQAIEEFKKGKVEFRADKTGIVHIPFGKVNFTEEDLLVNFLAAVKSVETNKPKGAKGVYWKSAHICSSMGPSIKLNIREMIEFKP

SEQ ID NO: 20752 - protein, 339 aa, Zea mays subsp. mays
  peptide (1)..(339): Ceres Seq. ID no. 15176837
  misc_feature (122)..(326): Pfam Name: Pfam Description:  Ribosomal protein L1p/L10e family
  misc_feature (1)..(339): NCBI GI NO: 25456457 NR Description: ribosomal protein L1 protein
  misc_feature (1)..(339): NCBI GI NO: 15229443 NR Description: ribosomal protein L1p family
  misc_feature (60)..(339): NCBI GI NO: 25453504 NR Description: ribosomal protein L1 [imported] - spinach
  misc_feature (86)..(261): NCBI GI NO: 1350625 NR Description: 50S RIBOSOMAL PROTEIN L1, CHLOROPLAST PRECURSOR
  misc_feature (107)..(338): NCBI GI NO: 22297840 NR Description: 50S ribosomal protein L1
  misc_feature (110)..(338): NCBI GI NO: 17232793 NR Description: 50S ribosomal protein L1 [Nostoc sp. PCC 7120]
  misc_feature (110)..(333): NCBI GI NO: 11467612 NR Description: ribosomal protein L1 [Guillardia theta]
  misc_feature (110)..(338): NCBI GI NO: 16330010 NR Description: 50S ribosomal protein L1
  misc_feature (110)..(338): NCBI GI NO: 37521169 NR Description: 50S ribosomal protein L1 [Gloeobacter violaceus]
  misc_feature (110)..(334): NCBI GI NO: 39997957 NR Description: ribosomal protein L1
MAVCATHSSLMIAYAASKDLTIPSLFSSANPRPNKLSVALYPPLVLLAGRRASNPSFPVVVSAVAAEADVDTEDAEQNEATSTTATAVLDPPKPKKGKAALLLKRDRTRSKRFLEIQKLRETKKEYDVKTAISLLKQTANTRFVESVEAHFRLNIDPKYNDQQLRATVSLPKGTGQTVKVAVLAQGEKVDEAKNAGADIVGSDDLIEQIKGGFMEFDKLIASPDMMVKVAGLGKILGPRGLMPNPKAGTVTANIPQAIEEFKKGKVEFRADKTGIVHIPFGKVNFTEEDLLVNFLAAVKSVETNKPKGAKGVYWKSAHICSSMGPSIKLNIREMIEFKP

SEQ ID NO: 20753 - protein, 329 aa, Zea mays subsp. mays
  peptide (1)..(329): Ceres Seq. ID no. 15176838
  misc_feature (112)..(316): Pfam Name: Pfam Description:  Ribosomal protein L1p/L10e family
  misc_feature (1)..(329): NCBI GI NO: 25456457 NR Description: ribosomal protein L1 protein
  misc_feature (1)..(329): NCBI GI NO: 15229443 NR Description: ribosomal protein L1p family
  misc_feature (50)..(329): NCBI GI NO: 25453504 NR Description: ribosomal protein L1 [imported] - spinach
  misc_feature (76)..(251): NCBI GI NO: 1350625 NR Description: 50S RIBOSOMAL PROTEIN L1, CHLOROPLAST PRECURSOR
  misc_feature (97)..(328): NCBI GI NO: 22297840 NR Description: 50S ribosomal protein L1
  misc_feature (100)..(328): NCBI GI NO: 17232793 NR Description: 50S ribosomal protein L1 [Nostoc sp. PCC 7120]
  misc_feature (100)..(323): NCBI GI NO: 11467612 NR Description: ribosomal protein L1 [Guillardia theta]
  misc_feature (100)..(328): NCBI GI NO: 16330010 NR Description: 50S ribosomal protein L1
  misc_feature (100)..(328): NCBI GI NO: 37521169 NR Description: 50S ribosomal protein L1 [Gloeobacter violaceus]
  misc_feature (100)..(324): NCBI GI NO: 39997957 NR Description: ribosomal protein L1
MIAYAASKDLTIPSLFSSANPRPNKLSVALYPPLVLLAGRRASNPSFPVVVSAVAAEADVDTEDAEQNEATSTTATAVLDPPKPKKGKAALLLKRDRTRSKRFLEIQKLRETKKEYDVKTAISLLKQTANTRFVESVEAHFRLNIDPKYNDQQLRATVSLPKGTGQTVKVAVLAQGEKVDEAKNAGADIVGSDDLIEQIKGGFMEFDKLIASPDMMVKVAGLGKILGPRGLMPNPKAGTVTANIPQAIEEFKKGKVEFRADKTGIVHIPFGKVNFTEEDLLVNFLAAVKSVETNKPKGAKGVYWKSAHICSSMGPSIKLNIREMIEFKP

SEQ ID NO: 20754 - DNA, 1409 bp, Zea mays subsp. mays
  misc_feature (1)..(1409): Ceres Seq. ID no. 15177522
gacttcgacagtcttcttcttcaatcgatcttgatatctgtcttttttcctcccaaaatggcccttcaagctgcttctttggtctcctctgctttttctgtccgaaaagatggaaaactgaatgcttcttcatcatccttcaaggaatcgagtctttttggtgcctccattacagaacatggctctttctcatttagattcaagagagaacatagctcgaggaatgtgctcgcagttcgtgcccaaacagccgcaacttcaagcccctcggtcacaaaatcttcatctggcggcaagaaaacgttgaggaaaggtaccgtggtggtcacgggagcctcgtcagggttaggtttagccacggctaaagctcttgcggagacaggtaaatggcacgtgataatggcgtgcagggactttcttaaagccgagagagccgctaaatccgcagggatgcctaaagacagctacacggtgatgcatttggacttagcctcgttggacagcgtgagacagttcgttgatagcttcaggagatcggagatgcctctcgatgttttggtctgcaacgctgcggtttatttccctacagctaaagaacctacttacagtgcagaagggtttgagcttagtgttgccacgaatcacttgggacattttcttctctcgaggttgttgcttgatgacttgaagaagtctgattacccttcaaagcgtctcattatcgtcggttccattaccgggaacaccaatacattggctggtaatgttccaccgaaggcgaatctaggcgatctgagaggtttagcgggtggattgaacggattaaacagctcggcgatgattgatggtggagattttgacggtgcaaaggcttacaaagacagcaaagtgtgcaacatgttgacgatgcaagagtttcacaggcgttaccatgaagaaactggagtcacattcgcttcgctttaccctggttgcattgcctctacgggtctattcagagagcacattccgctgttccgtacactcttccctccgtttcagaagtacatcactaaaggttatgtctccgagacagagtctggcaaaagacttgctcaggtggtgagtgatccgagcttgacgaagtcaggggtttactggagctggaacaaggcttcggcgtctttcgagaacgagttatcagaagaagcaagcgatgttgagaaggctcgtaaagtgtgggagatcagtgagaagctcgttgggttggcttaatgacacttggaatctcttctttctgatgagatcatgttgtgccaaatgatgaaatacctagaggatgttctagatttttagatgtctgattctgttgagtgtagatctgtttggcttgtagccccataataaagaaataaaagttggccagcatc

SEQ ID NO: 20755 - protein, 417 aa, Zea mays subsp. mays
  peptide (1)..(417): Ceres Seq. ID no. 15177523
  misc_feature (20)..(417): NCBI GI NO: 15234129 NR Description: protochlorophyllide reductase B (PCR B/POR B)
  misc_feature (20)..(417): NCBI GI NO: 21593167 NR Description: protochlorophyllide reductase precursor
  misc_feature (20)..(417): NCBI GI NO: 15239574 NR Description: protochlorophyllide reductase A (PCR A/POR A)
  misc_feature (20)..(417): NCBI GI NO: 968975 NR Description: NADPH:protochlorophyllide oxidoreductase A
  misc_feature (20)..(417): NCBI GI NO: 10720233 NR Description: Protochlorophyllide reductase
  misc_feature (20)..(417): NCBI GI NO: 81946 NR Description: protochlorophyllide reductase (EC 1
  misc_feature (20)..(417): NCBI GI NO: 266742 NR Description: Protochlorophyllide reductase
  misc_feature (20)..(417): NCBI GI NO: 21068893 NR Description: NADPH:protochlorophyllide oxidoreductase
  misc_feature (20)..(417): NCBI GI NO: 10720220 NR Description: Protochlorophyllide reductase
  misc_feature (20)..(417): NCBI GI NO: 9587209 NR Description: NADPH-protochlorophyllide oxidoreductase
DFDSLLLQSILISVFFPPKMALQAASLVSSAFSVRKDGKLNASSSSFKESSLFGASITEHGSFSFRFKREHSSRNVLAVRAQTAATSSPSVTKSSSGGKKTLRKGTVVVTGASSGLGLATAKALAETGKWHVIMACRDFLKAERAAKSAGMPKDSYTVMHLDLASLDSVRQFVDSFRRSEMPLDVLVCNAAVYFPTAKEPTYSAEGFELSVATNHLGHFLLSRLLLDDLKKSDYPSKRLIIVGSITGNTNTLAGNVPPKANLGDLRGLAGGLNGLNSSAMIDGGDFDGAKAYKDSKVCNMLTMQEFHRRYHEETGVTFASLYPGCIASTGLFREHIPLFRTLFPPFQKYITKGYVSETESGKRLAQVVSDPSLTKSGVYWSWNKASASFENELSEEASDVEKARKVWEISEKLVGLA

SEQ ID NO: 20756 - protein, 398 aa, Zea mays subsp. mays
  peptide (1)..(398): Ceres Seq. ID no. 15177524
  misc_feature (1)..(398): NCBI GI NO: 15234129 NR Description: protochlorophyllide reductase B (PCR B/POR B)
  misc_feature (1)..(398): NCBI GI NO: 21593167 NR Description: protochlorophyllide reductase precursor
  misc_feature (1)..(398): NCBI GI NO: 15239574 NR Description: protochlorophyllide reductase A (PCR A/POR A)
  misc_feature (1)..(398): NCBI GI NO: 968975 NR Description: NADPH:protochlorophyllide oxidoreductase A
  misc_feature (1)..(398): NCBI GI NO: 10720233 NR Description: Protochlorophyllide reductase
  misc_feature (1)..(398): NCBI GI NO: 81946 NR Description: protochlorophyllide reductase (EC 1
  misc_feature (1)..(398): NCBI GI NO: 266742 NR Description: Protochlorophyllide reductase
  misc_feature (1)..(398): NCBI GI NO: 21068893 NR Description: NADPH:protochlorophyllide oxidoreductase
  misc_feature (1)..(398): NCBI GI NO: 10720220 NR Description: Protochlorophyllide reductase
  misc_feature (1)..(398): NCBI GI NO: 9587209 NR Description: NADPH-protochlorophyllide oxidoreductase
MALQAASLVSSAFSVRKDGKLNASSSSFKESSLFGASITEHGSFSFRFKREHSSRNVLAVRAQTAATSSPSVTKSSSGGKKTLRKGTVVVTGASSGLGLATAKALAETGKWHVIMACRDFLKAERAAKSAGMPKDSYTVMHLDLASLDSVRQFVDSFRRSEMPLDVLVCNAAVYFPTAKEPTYSAEGFELSVATNHLGHFLLSRLLLDDLKKSDYPSKRLIIVGSITGNTNTLAGNVPPKANLGDLRGLAGGLNGLNSSAMIDGGDFDGAKAYKDSKVCNMLTMQEFHRRYHEETGVTFASLYPGCIASTGLFREHIPLFRTLFPPFQKYITKGYVSETESGKRLAQVVSDPSLTKSGVYWSWNKASASFENELSEEASDVEKARKVWEISEKLVGLA

SEQ ID NO: 20757 - protein, 284 aa, Zea mays subsp. mays
  peptide (1)..(284): Ceres Seq. ID no. 15177525
  misc_feature (1)..(284): NCBI GI NO: 15234129 NR Description: protochlorophyllide reductase B (PCR B/POR B)
  misc_feature (1)..(284): NCBI GI NO: 21593167 NR Description: protochlorophyllide reductase precursor
  misc_feature (1)..(284): NCBI GI NO: 15239574 NR Description: protochlorophyllide reductase A (PCR A/POR A)
  misc_feature (1)..(284): NCBI GI NO: 968975 NR Description: NADPH:protochlorophyllide oxidoreductase A
  misc_feature (1)..(284): NCBI GI NO: 10720233 NR Description: Protochlorophyllide reductase
  misc_feature (1)..(284): NCBI GI NO: 81946 NR Description: protochlorophyllide reductase (EC 1
  misc_feature (1)..(284): NCBI GI NO: 266742 NR Description: Protochlorophyllide reductase
  misc_feature (1)..(284): NCBI GI NO: 21068893 NR Description: NADPH:protochlorophyllide oxidoreductase
  misc_feature (1)..(284): NCBI GI NO: 10720220 NR Description: Protochlorophyllide reductase
  misc_feature (1)..(284): NCBI GI NO: 9587209 NR Description: NADPH-protochlorophyllide oxidoreductase
MACRDFLKAERAAKSAGMPKDSYTVMHLDLASLDSVRQFVDSFRRSEMPLDVLVCNAAVYFPTAKEPTYSAEGFELSVATNHLGHFLLSRLLLDDLKKSDYPSKRLIIVGSITGNTNTLAGNVPPKANLGDLRGLAGGLNGLNSSAMIDGGDFDGAKAYKDSKVCNMLTMQEFHRRYHEETGVTFASLYPGCIASTGLFREHIPLFRTLFPPFQKYITKGYVSETESGKRLAQVVSDPSLTKSGVYWSWNKASASFENELSEEASDVEKARKVWEISEKLVGLA

SEQ ID NO: 20758 - DNA, 826 bp, Zea mays subsp. mays
  misc_feature (1)..(826): Ceres Seq. ID no. 15178880
agcttcttctgccacattgccaaatcctcaaatcttctctcgagagagctaaaccaaaaagaaaatggcagcttcctcttctccatctctccttctaccactaggttcagcatctaggaatggtccaaccatgaagactccaagatgcatatctacaagagccatcacagcttcagaaacaagaaacaaaagctgtagccgtagagacgcaatgctattggttctcggcgtgtcaggactctcaatgagctacttgcctgcggcatatgcagctggtttgcctccagaggataaaccgaggctttgtgaagctgaatgcgagaaagagcttgaaaatgttccaatggtaactacagagtcagggcttcagtataaagatatcaaagttggtaaaggccctagtccccctgttggttatcaggttgctgctaactatgtagctatggttccttcagggcagatttttgacagttctttggagaaaggtctaccgtatctgttccgagttgggtctggccaggtgatcaagggacttgatgaaggactcttgactatgaaagctggtggcaaacgcagactttacattccagggcctttggcgtttccaaagggtctagtctcagctccagggaggccaagagttgcaccgaacagtcctgttgtatttgatgtgagcttagagtacattccagggcttgagtcagatgaagagtgaaactcttttttaaagttcagattataatatgaattacatatacatataacagacttttctgtgatggtgtctcatttatattttcatttcgttgtaaaaacaacctcaact

SEQ ID NO: 20759 - protein, 216 aa, Zea mays subsp. mays
  peptide (1)..(216): Ceres Seq. ID no. 15178881
  misc_feature (109)..(206): Pfam Name: Pfam Description:  FKBP-type peptidyl-prolyl cis-trans isomerase
  misc_feature (3)..(216): NCBI GI NO: 15224305 NR Description: immunophilin / FKBP-type peptidyl-prolyl cis-transisomerase
  misc_feature (50)..(216): NCBI GI NO: 25408885 NR Description: hypothetical protein At2g43560
  misc_feature (34)..(214): NCBI GI NO: 38636681 NR Description: putative immunophilin / FKBP-type peptidyl-prolylcis-trans isomerase
  misc_feature (52)..(216): NCBI GI NO: 18252321 NR Description: putative FKBP type peptidyl-prolyl cis-transisomerase
  misc_feature (51)..(205): NCBI GI NO: 16329650 NR Description: FKBP-type peptidyl-prolyl cis-trans isomerase
  misc_feature (69)..(205): NCBI GI NO: 22298646 NR Description: FKBP-type peptidyl-prolyl cis-trans isomerase
  misc_feature (95)..(205): NCBI GI NO: 23053670 NR Description: hypothetical protein [Geobacter metallireducens]
  misc_feature (50)..(205): NCBI GI NO: 23129112 NR Description: hypothetical protein [Nostoc punctiforme]
  misc_feature (95)..(205): NCBI GI NO: 39997372 NR Description: FKBP-type peptidyl-prolyl cis-trans isomerase
  misc_feature (96)..(205): NCBI GI NO: 37520410 NR Description: FKBP-type peptidyl-prolyl cis-trans isomerase
MAASSSPSLLLPLGSASRNGPTMKTPRCISTRAITASETRNKSCSRRDAMLLVLGVSGLSMSYLPAAYAAGLPPEDKPRLCEAECEKELENVPMVTTESGLQYKDIKVGKGPSPPVGYQVAANYVAMVPSGQIFDSSLEKGLPYLFRVGSGQVIKGLDEGLLTMKAGGKRRLYIPGPLAFPKGLVSAPGRPRVAPNSPVVFDVSLEYIPGLESDEE

SEQ ID NO: 20760 - protein, 194 aa, Zea mays subsp. mays
  peptide (1)..(194): Ceres Seq. ID no. 15178882
  misc_feature (87)..(184): Pfam Name: Pfam Description:  FKBP-type peptidyl-prolyl cis-trans isomerase
  misc_feature (1)..(194): NCBI GI NO: 15224305 NR Description: immunophilin / FKBP-type peptidyl-prolyl cis-transisomerase
  misc_feature (28)..(194): NCBI GI NO: 25408885 NR Description: hypothetical protein At2g43560
  misc_feature (12)..(192): NCBI GI NO: 38636681 NR Description: putative immunophilin / FKBP-type peptidyl-prolylcis-trans isomerase
  misc_feature (30)..(194): NCBI GI NO: 18252321 NR Description: putative FKBP type peptidyl-prolyl cis-transisomerase
  misc_feature (29)..(183): NCBI GI NO: 16329650 NR Description: FKBP-type peptidyl-prolyl cis-trans isomerase
  misc_feature (47)..(183): NCBI GI NO: 22298646 NR Description: FKBP-type peptidyl-prolyl cis-trans isomerase
  misc_feature (73)..(183): NCBI GI NO: 23053670 NR Description: hypothetical protein [Geobacter metallireducens]
  misc_feature (28)..(183): NCBI GI NO: 23129112 NR Description: hypothetical protein [Nostoc punctiforme]
  misc_feature (73)..(183): NCBI GI NO: 39997372 NR Description: FKBP-type peptidyl-prolyl cis-trans isomerase
  misc_feature (74)..(183): NCBI GI NO: 37520410 NR Description: FKBP-type peptidyl-prolyl cis-trans isomerase
MKTPRCISTRAITASETRNKSCSRRDAMLLVLGVSGLSMSYLPAAYAAGLPPEDKPRLCEAECEKELENVPMVTTESGLQYKDIKVGKGPSPPVGYQVAANYVAMVPSGQIFDSSLEKGLPYLFRVGSGQVIKGLDEGLLTMKAGGKRRLYIPGPLAFPKGLVSAPGRPRVAPNSPVVFDVSLEYIPGLESDEE

SEQ ID NO: 20761 - protein, 167 aa, Zea mays subsp. mays
  peptide (1)..(167): Ceres Seq. ID no. 15178883
  misc_feature (60)..(157): Pfam Name: Pfam Description:  FKBP-type peptidyl-prolyl cis-trans isomerase
  misc_feature (1)..(167): NCBI GI NO: 15224305 NR Description: immunophilin / FKBP-type peptidyl-prolyl cis-transisomerase
  misc_feature (1)..(167): NCBI GI NO: 25408885 NR Description: hypothetical protein At2g43560
  misc_feature (1)..(165): NCBI GI NO: 38636681 NR Description: putative immunophilin / FKBP-type peptidyl-prolylcis-trans isomerase
  misc_feature (3)..(167): NCBI GI NO: 18252321 NR Description: putative FKBP type peptidyl-prolyl cis-transisomerase
  misc_feature (2)..(156): NCBI GI NO: 16329650 NR Description: FKBP-type peptidyl-prolyl cis-trans isomerase
  misc_feature (20)..(156): NCBI GI NO: 22298646 NR Description: FKBP-type peptidyl-prolyl cis-trans isomerase
  misc_feature (46)..(156): NCBI GI NO: 23053670 NR Description: hypothetical protein [Geobacter metallireducens]
  misc_feature (1)..(156): NCBI GI NO: 23129112 NR Description: hypothetical protein [Nostoc punctiforme]
  misc_feature (46)..(156): NCBI GI NO: 39997372 NR Description: FKBP-type peptidyl-prolyl cis-trans isomerase
  misc_feature (47)..(156): NCBI GI NO: 37520410 NR Description: FKBP-type peptidyl-prolyl cis-trans isomerase
MLLVLGVSGLSMSYLPAAYAAGLPPEDKPRLCEAECEKELENVPMVTTESGLQYKDIKVGKGPSPPVGYQVAANYVAMVPSGQIFDSSLEKGLPYLFRVGSGQVIKGLDEGLLTMKAGGKRRLYIPGPLAFPKGLVSAPGRPRVAPNSPVVFDVSLEYIPGLESDEE

SEQ ID NO: 20762 - DNA, 926 bp, Zea mays subsp. mays
  misc_feature (1)..(926): Ceres Seq. ID no. 15174351
ctttttattcttcttcatctctttgatcgtcatcacacagatcctccattctcttttcgttcagatcttggaaggtcctcagctcaaggagaggagaagaggaacgtaaagactttgaaggatgtcttcattcacaggaactcagcagaagtgcaaggcttgcgagaagacggtgtaccctgtggagcttctctctgctgatggtgtcagctatcacaagtcttgcttcaaatgctctcactgcaaatccaggcttcagctgagcagatactcatcaatggaaggtgtgctgtactgtaagcctcattatgagcagctcttcaaggagtctggtagcttcaccaagaactttcagtcccctgttaaacctgcggctgagaaatcaagtcctgagctgacaaggacccctagccgagttgccggtatgttctcaggcacacaagaaaaatgcgccacttgcagtaaaactgtctatcctatcgaaaaggtaacagtggagagccagacgtatcacaagtcctgcttcaagtgctcacacggaggctgcccaatctcgccttcaaactacgcagctcttgaaggaatcctctactgcaagcaccatttcgctcagcttttcaaggaaaagggaagctacaaccacttaatcaaatccgcttccatcaaacgctctgtagctgctgcagtcgctgctggtgcacctgcagccgccgttcctgaatcttaataaactcaataatcctctctcttctctagtctaaaattgaaaactcaatgccaaactgattcagtttgttttctcttttgtgtctttatgtgtgagcgtgtgtaatctatctctttgtttacattgttatctcctaaaaagcttgtttgttgtcataactttggtatctatatataaaaaactgagactttcccttttc

SEQ ID NO: 20763 - protein, 201 aa, Zea mays subsp. mays
  peptide (1)..(201): Ceres Seq. ID no. 15174352
  misc_feature (110)..(167): Pfam Name: Pfam Description:  LIM domain
  misc_feature (3)..(201): NCBI GI NO: 15228188 NR Description: transcription factor L2 [Arabidopsis thaliana]
  misc_feature (3)..(201): NCBI GI NO: 15225592 NR Description: LIM-domain protein -related [Arabidopsis thaliana]
  misc_feature (3)..(201): NCBI GI NO: 7489184 NR Description: probable transcription factor SF3 - common tobacco
  misc_feature (3)..(169): NCBI GI NO: 11282608 NR Description: transcription factor L2
  misc_feature (4)..(197): NCBI GI NO: 34902012 NR Description: putative LIM-domain protein
  misc_feature (3)..(191): NCBI GI NO: 17227092 NR Description: LIM domain protein [Gossypium hirsutum]
  misc_feature (53)..(201): NCBI GI NO: 13926203 NR Description: transcription factor L2 [Arabidopsis thaliana]
  misc_feature (3)..(187): NCBI GI NO: 8515104 NR Description: LIM domain protein PLIM-2 [Nicotiana tabacum]
  misc_feature (3)..(195): NCBI GI NO: 15225897 NR Description: LIM-domain protein -related [Arabidopsis thaliana]
  misc_feature (3)..(175): NCBI GI NO: 6467903 NR Description: pollen specific LIM domain protein 1a
MSSFTGTQQKCKACEKTVYPVELLSADGVSYHKSCFKCSHCKSRLQLSRYSSMEGVLYCKPHYEQLFKESGSFTKNFQSPVKPAAEKSSPELTRTPSRVAGMFSGTQEKCATCSKTVYPIEKVTVESQTYHKSCFKCSHGGCPISPSNYAALEGILYCKHHFAQLFKEKGSYNHLIKSASIKRSVAAAVAAGAPAAAVPES

SEQ ID NO: 20764 - protein, 149 aa, Zea mays subsp. mays
  peptide (1)..(149): Ceres Seq. ID no. 15174353
  misc_feature (58)..(115): Pfam Name: Pfam Description:  LIM domain
  misc_feature (1)..(149): NCBI GI NO: 15228188 NR Description: transcription factor L2 [Arabidopsis thaliana]
  misc_feature (1)..(149): NCBI GI NO: 15225592 NR Description: LIM-domain protein -related [Arabidopsis thaliana]
  misc_feature (1)..(149): NCBI GI NO: 7489184 NR Description: probable transcription factor SF3 - common tobacco
  misc_feature (1)..(117): NCBI GI NO: 11282608 NR Description: transcription factor L2
  misc_feature (1)..(145): NCBI GI NO: 34902012 NR Description: putative LIM-domain protein
  misc_feature (1)..(139): NCBI GI NO: 17227092 NR Description: LIM domain protein [Gossypium hirsutum]
  misc_feature (1)..(149): NCBI GI NO: 13926203 NR Description: transcription factor L2 [Arabidopsis thaliana]
  misc_feature (1)..(135): NCBI GI NO: 8515104 NR Description: LIM domain protein PLIM-2 [Nicotiana tabacum]
  misc_feature (1)..(143): NCBI GI NO: 15225897 NR Description: LIM-domain protein -related [Arabidopsis thaliana]
  misc_feature (1)..(123): NCBI GI NO: 6467903 NR Description: pollen specific LIM domain protein 1a
MEGVLYCKPHYEQLFKESGSFTKNFQSPVKPAAEKSSPELTRTPSRVAGMFSGTQEKCATCSKTVYPIEKVTVESQTYHKSCFKCSHGGCPISPSNYAALEGILYCKHHFAQLFKEKGSYNHLIKSASIKRSVAAAVAAGAPAAAVPES

SEQ ID NO: 20765 - protein, 100 aa, Zea mays subsp. mays
  peptide (1)..(100): Ceres Seq. ID no. 15174354
  misc_feature (9)..(66): Pfam Name: Pfam Description:  LIM domain
  misc_feature (1)..(100): NCBI GI NO: 15228188 NR Description: transcription factor L2 [Arabidopsis thaliana]
  misc_feature (1)..(100): NCBI GI NO: 15225592 NR Description: LIM-domain protein -related [Arabidopsis thaliana]
  misc_feature (1)..(100): NCBI GI NO: 7489184 NR Description: probable transcription factor SF3 - common tobacco
  misc_feature (1)..(68): NCBI GI NO: 11282608 NR Description: transcription factor L2
  misc_feature (1)..(96): NCBI GI NO: 34902012 NR Description: putative LIM-domain protein
  misc_feature (1)..(90): NCBI GI NO: 17227092 NR Description: LIM domain protein [Gossypium hirsutum]
  misc_feature (1)..(100): NCBI GI NO: 13926203 NR Description: transcription factor L2 [Arabidopsis thaliana]
  misc_feature (1)..(86): NCBI GI NO: 8515104 NR Description: LIM domain protein PLIM-2 [Nicotiana tabacum]
  misc_feature (1)..(94): NCBI GI NO: 15225897 NR Description: LIM-domain protein -related [Arabidopsis thaliana]
  misc_feature (1)..(74): NCBI GI NO: 6467903 NR Description: pollen specific LIM domain protein 1a
MFSGTQEKCATCSKTVYPIEKVTVESQTYHKSCFKCSHGGCPISPSNYAALEGILYCKHHFAQLFKEKGSYNHLIKSASIKRSVAAAVAAGAPAAAVPES

SEQ ID NO: 20766 - DNA, 1006 bp, Zea mays subsp. mays
  misc_feature (1)..(1006): Ceres Seq. ID no. 15178924
aagtgtaaacattgtattccacaaactgcacttttcaaacaaattttgtaaaaaggcactctaaaacaataaaccatatatataaacagcataaatctgttcagtatccaaatccctctgagtctcttacataaacatcaatcccaacgaatcatctatgaaaaaacccctttgagaaaaataatccaaaacaatgtacttttcatcgtctgtactaaaacgcctcattttgatcaatttcttagccatacaactactccttataagcagcgaattgcccttaaacacgaccaatgagtatctcaaccacaaatgcttggttagtgaaggaaaatacaagccgggaagtgaatacgagagacatttaaataatatcatcaaaatgttctacagtggcagttacagaggtttctacctgttcggtatgaataatgataacgctatcctccagtgccgcgccgattcctacgggaccaagtgccacgactgctttgccaccgccctcgctaagcttcgcaggaaatgtccgtggtataagggcatgataatttggtatgaccaatgtcttctcgccattactactacagatgctattgggaagatcgattacgacaataacttttgtatgtccaatgcaaagaagttgggaggagataagagcgcttttacaaggacttggaaaactctcatggacaatctgacgactttagctaccaccactaaaggtaaagatacgtacacaatgttctctgcgggggagacgttgtacaagggtgataagatgtatggaatggtgcagtgtacatatgacttatcactaagagcttgtaaggagtgtttggtttttaatagcgtgcgttttcaagattgcttgagtgatacaagaggagcgagatttgtgggtgggacctgtacttttaggtttgagttttatccttttatttctaagccggtcctaaatatttaatgagctaaataaatgttatactattggtttgaatttccc

SEQ ID NO: 20767 - protein, 257 aa, Zea mays subsp. mays
  peptide (1)..(257): Ceres Seq. ID no. 15178925
  misc_feature (84)..(135): Pfam Name: Pfam Description:  Domain of unknown function DUF26
  misc_feature (1)..(251): NCBI GI NO: 15233201 NR Description: receptor-like protein kinase-related
  misc_feature (1)..(250): NCBI GI NO: 15233368 NR Description: receptor-like protein kinase-related
  misc_feature (7)..(251): NCBI GI NO: 9279744 NR Description: contains similarity to receptor proteinkinase~gene_id:MZN24
  misc_feature (7)..(251): NCBI GI NO: 15233207 NR Description: receptor-like protein kinase-related
  misc_feature (7)..(251): NCBI GI NO: 15233204 NR Description: pollen coat receptor kinase, putative
  misc_feature (1)..(250): NCBI GI NO: 15233236 NR Description: receptor-like protein kinase-related
  misc_feature (1)..(250): NCBI GI NO: 15233238 NR Description: receptor-like protein kinase-related
  misc_feature (5)..(250): NCBI GI NO: 15233235 NR Description: receptor-like kinase-related
  misc_feature (5)..(250): NCBI GI NO: 15233366 NR Description: pollen coat receptor kinase, putative
  misc_feature (86)..(251): NCBI GI NO: 11994709 NR Description: contains similarity to receptor proteinkinase~gene_id:MRI12
MYFSSSVLKRLILINFLAIQLLLISSELPLNTTNEYLNHKCLVSEGKYKPGSEYERHLNNIIKMFYSGSYRGFYLFGMNNDNAILQCRADSYGTKCHDCFATALAKLRRKCPWYKGMIIWYDQCLLAITTTDAIGKIDYDNNFCMSNAKKLGGDKSAFTRTWKTLMDNLTTLATTTKGKDTYTMFSAGETLYKGDKMYGMVQCTYDLSLRACKECLVFNSVRFQDCLSDTRGARFVGGTCTFRFEFYPFISKPVLNI

SEQ ID NO: 20768 - protein, 194 aa, Zea mays subsp. mays
  peptide (1)..(194): Ceres Seq. ID no. 15178926
  misc_feature (21)..(72): Pfam Name: Pfam Description:  Domain of unknown function DUF26
  misc_feature (1)..(188): NCBI GI NO: 15233201 NR Description: receptor-like protein kinase-related
  misc_feature (1)..(187): NCBI GI NO: 15233368 NR Description: receptor-like protein kinase-related
  misc_feature (1)..(188): NCBI GI NO: 9279744 NR Description: contains similarity to receptor proteinkinase~gene_id:MZN24
  misc_feature (1)..(188): NCBI GI NO: 15233207 NR Description: receptor-like protein kinase-related
  misc_feature (1)..(188): NCBI GI NO: 15233204 NR Description: pollen coat receptor kinase, putative
  misc_feature (1)..(187): NCBI GI NO: 15233236 NR Description: receptor-like protein kinase-related
  misc_feature (1)..(187): NCBI GI NO: 15233238 NR Description: receptor-like protein kinase-related
  misc_feature (1)..(187): NCBI GI NO: 15233235 NR Description: receptor-like kinase-related
  misc_feature (1)..(187): NCBI GI NO: 15233366 NR Description: pollen coat receptor kinase, putative
  misc_feature (23)..(188): NCBI GI NO: 11994709 NR Description: contains similarity to receptor proteinkinase~gene_id:MRI12
MFYSGSYRGFYLFGMNNDNAILQCRADSYGTKCHDCFATALAKLRRKCPWYKGMIIWYDQCLLAITTTDAIGKIDYDNNFCMSNAKKLGGDKSAFTRTWKTLMDNLTTLATTTKGKDTYTMFSAGETLYKGDKMYGMVQCTYDLSLRACKECLVFNSVRFQDCLSDTRGARFVGGTCTFRFEFYPFISKPVLNI

SEQ ID NO: 20769 - protein, 180 aa, Zea mays subsp. mays
  peptide (1)..(180): Ceres Seq. ID no. 15178927
  misc_feature (7)..(58): Pfam Name: Pfam Description:  Domain of unknown function DUF26
  misc_feature (1)..(174): NCBI GI NO: 15233201 NR Description: receptor-like protein kinase-related
  misc_feature (1)..(173): NCBI GI NO: 15233368 NR Description: receptor-like protein kinase-related
  misc_feature (1)..(174): NCBI GI NO: 9279744 NR Description: contains similarity to receptor proteinkinase~gene_id:MZN24
  misc_feature (1)..(174): NCBI GI NO: 15233207 NR Description: receptor-like protein kinase-related
  misc_feature (1)..(174): NCBI GI NO: 15233204 NR Description: pollen coat receptor kinase, putative
  misc_feature (1)..(173): NCBI GI NO: 15233236 NR Description: receptor-like protein kinase-related
  misc_feature (1)..(173): NCBI GI NO: 15233238 NR Description: receptor-like protein kinase-related
  misc_feature (1)..(173): NCBI GI NO: 15233235 NR Description: receptor-like kinase-related
  misc_feature (1)..(173): NCBI GI NO: 15233366 NR Description: pollen coat receptor kinase, putative
  misc_feature (9)..(174): NCBI GI NO: 11994709 NR Description: contains similarity to receptor proteinkinase~gene_id:MRI12
MNNDNAILQCRADSYGTKCHDCFATALAKLRRKCPWYKGMIIWYDQCLLAITTTDAIGKIDYDNNFCMSNAKKLGGDKSAFTRTWKTLMDNLTTLATTTKGKDTYTMFSAGETLYKGDKMYGMVQCTYDLSLRACKECLVFNSVRFQDCLSDTRGARFVGGTCTFRFEFYPFISKPVLNI

SEQ ID NO: 20770 - DNA, 845 bp, Zea mays subsp. mays
  misc_feature (1)..(845): Ceres Seq. ID no. 15178843
tctttcgctcagccttatcgccgctgtttcgtcttaaattcttcaagggttaggcgttcttctgtggataaaagtggttcaaagaagatgaatcattgcaaccttcagcagaacgccttcatgtcttcccatgacgagtccagaggatttgttgttcctgtctcttctgttgtttgtcctaagcctcgtcgcgttagcattctctccaataacgttattcatccgttgagatcacattctagtcaaccaggagcagctgatgtatgtgattctcaagccggggcagagcttttggacatccttcgtagaaaggaagaaacattgtctggtgtagcttcatcacctccattcttcctcgggtctcccccaagcagagcatcaaacccgttagctcaagatgcacgatttggagatgagaagctcaaccttctttcaccctcactctcaacattcctcacatctccttctccatcgccatctcgtgtcaaaggagggggctgtggtggtcgagtgaagtacgggcttaaaccggcagctgtcagagttgaagggttcaactgcttaaacagggaccgccaaagctcaaacatatctgccatggcttagaagaagaacaaagaagaaggaacagagattcacaaagtgtaaataaaatcctgaatcaagactatatttatctttgaagatcagtctacatcaccagttaagcctttgaccacagttttctttaactttgaggtcaatatttgtgtatatatatataacggtaacaacaaagatgtgttatattgagtctcgttgtaacatatttttttttttcccgtctggtaaattcattcaaagtg

SEQ ID NO: 20771 - protein, 201 aa, Zea mays subsp. mays
  peptide (1)..(201): Ceres Seq. ID no. 15178844
  misc_feature (30)..(201): NCBI GI NO: 18396232 NR Description: expressed protein [Arabidopsis thaliana]
  misc_feature (28)..(201): NCBI GI NO: 30685676 NR Description: expressed protein [Arabidopsis thaliana]
  misc_feature (30)..(201): NCBI GI NO: 11762168 NR Description: AT5g16110 [Arabidopsis thaliana]
  misc_feature (30)..(201): NCBI GI NO: 18409044 NR Description: expressed protein [Arabidopsis thaliana]
  misc_feature (30)..(201): NCBI GI NO: 15222278 NR Description: expressed protein [Arabidopsis thaliana]
SFAQPYRRCFVLNSSRVRRSSVDKSGSKKMNHCNLQQNAFMSSHDESRGFVVPVSSVVCPKPRRVSILSNNVIHPLRSHSSQPGAADVCDSQAGAELLDILRRKEETLSGVASSPPFFLGSPPSRASNPLAQDARFGDEKLNLLSPSLSTFLTSPSPSPSRVKGGGCGGRVKYGLKPAAVRVEGFNCLNRDRQSSNISAMA

SEQ ID NO: 20772 - protein, 172 aa, Zea mays subsp. mays
  peptide (1)..(172): Ceres Seq. ID no. 15178845
  misc_feature (1)..(172): NCBI GI NO: 18396232 NR Description: expressed protein [Arabidopsis thaliana]
  misc_feature (1)..(172): NCBI GI NO: 30685676 NR Description: expressed protein [Arabidopsis thaliana]
  misc_feature (1)..(172): NCBI GI NO: 11762168 NR Description: AT5g16110 [Arabidopsis thaliana]
  misc_feature (1)..(172): NCBI GI NO: 18409044 NR Description: expressed protein [Arabidopsis thaliana]
  misc_feature (1)..(172): NCBI GI NO: 15222278 NR Description: expressed protein [Arabidopsis thaliana]
MNHCNLQQNAFMSSHDESRGFVVPVSSVVCPKPRRVSILSNNVIHPLRSHSSQPGAADVCDSQAGAELLDILRRKEETLSGVASSPPFFLGSPPSRASNPLAQDARFGDEKLNLLSPSLSTFLTSPSPSPSRVKGGGCGGRVKYGLKPAAVRVEGFNCLNRDRQSSNISAMA

SEQ ID NO: 20773 - protein, 161 aa, Zea mays subsp. mays
  peptide (1)..(161): Ceres Seq. ID no. 15178846
  misc_feature (1)..(161): NCBI GI NO: 18396232 NR Description: expressed protein [Arabidopsis thaliana]
  misc_feature (1)..(161): NCBI GI NO: 30685676 NR Description: expressed protein [Arabidopsis thaliana]
  misc_feature (1)..(161): NCBI GI NO: 11762168 NR Description: AT5g16110 [Arabidopsis thaliana]
  misc_feature (1)..(161): NCBI GI NO: 18409044 NR Description: expressed protein [Arabidopsis thaliana]
  misc_feature (1)..(161): NCBI GI NO: 15222278 NR Description: expressed protein [Arabidopsis thaliana]
MSSHDESRGFVVPVSSVVCPKPRRVSILSNNVIHPLRSHSSQPGAADVCDSQAGAELLDILRRKEETLSGVASSPPFFLGSPPSRASNPLAQDARFGDEKLNLLSPSLSTFLTSPSPSPSRVKGGGCGGRVKYGLKPAAVRVEGFNCLNRDRQSSNISAMA

SEQ ID NO: 20774 - DNA, 864 bp, Zea mays subsp. mays
  misc_feature (1)..(864): Ceres Seq. ID no. 15178824
aattggatcagtttctttcttcctctctaaacaacaagagattctttcttcctctttatcttcaccactttcacgtttcatctttctctccaaacactccagctcaaacaacatgacacgttcctctagattccttggaactgagtcggcgccgccaccgccggaagaaatactagccgccgaaactgacatggttgtgatactctcagctcttctctgcgctctcatatgcgtatccggcttagccgcggtagctcgctgcgcctggatccgccgtctggccggcgtcaactcctccgccgtaggagaatctccacccccgaacaaaggtctcaagaaaaaagctctccagtccctccctaagtcaaccttcaccgccgcagactcgccgagctcctcctccggaaagggagaatcatccaccgagtgcgccatatgcttaatggagttttcagacggagaagagatcaggatattacccttatgcagacacgccttccacgtggcgtgcatagataagtggttgacttctcggtcgtcgtgtccttcttgtcgtagaattttggttccggtgaagtgtgatcggtgtggccaccacgattccacggcggaggctcatggcaaagatcagcctcctcgtcatcaacatccttcacagttcagttccgccaatattcctgcttttcttccttaaaacgttctttttactttctctattttacaaatttgtgaaaaattatcggcaataattaagaaaagtaaagtattaattaactaggggtcttttagttacttcgatttttatcctctgtaagactgtaacactgttctgaatctgaatcagtccgatgcgtgtttacaagt

SEQ ID NO: 20775 - protein, 230 aa, Zea mays subsp. mays
  peptide (1)..(230): Ceres Seq. ID no. 15178825
  misc_feature (143)..(184): Pfam Name: RING finger Pfam Description: Zinc finger, C3HC4 type
  misc_feature (38)..(230): NCBI GI NO: 15237013 NR Description: RING-H2 finger protein RHA3b
  misc_feature (38)..(230): NCBI GI NO: 15227839 NR Description: RING zinc finger protein -related
  misc_feature (43)..(230): NCBI GI NO: 15218042 NR Description: RING zinc finger protein -related
  misc_feature (43)..(197): NCBI GI NO: 15223041 NR Description: RING zinc finger protein -related
  misc_feature (43)..(197): NCBI GI NO: 21555237 NR Description: putative RING zinc finger protein
  misc_feature (35)..(194): NCBI GI NO: 7489432 NR Description: probable ring finger protein - barley
  misc_feature (109)..(196): NCBI GI NO: 37536508 NR Description: putative ring finger protein
  misc_feature (42)..(106): NCBI GI NO: 37536508 NR Description: putative ring finger protein
  misc_feature (46)..(230): NCBI GI NO: 32487554 NR Description: OSJNBa0013K16.6
  misc_feature (9)..(218): NCBI GI NO: 9293902 NR Description: contains similarity to RING zinc fingerprotein~gene_id:MVE11
IGSVSFFLSKQQEILSSSLSSPLSRFIFLSKHSSSNNMTRSSRFLGTESAPPPPEEILAAETDMVVILSALLCALICVSGLAAVARCAWIRRLAGVNSSAVGESPPPNKGLKKKALQSLPKSTFTAADSPSSSSGKGESSTECAICLMEFSDGEEIRILPLCRHAFHVACIDKWLTSRSSCPSCRRILVPVKCDRCGHHDSTAEAHGKDQPPRHQHPSQFSSANIPAFLP

SEQ ID NO: 20776 - protein, 193 aa, Zea mays subsp. mays
  peptide (1)..(193): Ceres Seq. ID no. 15178826
  misc_feature (106)..(147): Pfam Name: RING finger Pfam Description: Zinc finger, C3HC4 type
  misc_feature (1)..(193): NCBI GI NO: 15237013 NR Description: RING-H2 finger protein RHA3b
  misc_feature (1)..(193): NCBI GI NO: 15227839 NR Description: RING zinc finger protein -related
  misc_feature (6)..(193): NCBI GI NO: 15218042 NR Description: RING zinc finger protein -related
  misc_feature (6)..(160): NCBI GI NO: 15223041 NR Description: RING zinc finger protein -related
  misc_feature (6)..(160): NCBI GI NO: 21555237 NR Description: putative RING zinc finger protein
  misc_feature (1)..(157): NCBI GI NO: 7489432 NR Description: probable ring finger protein - barley
  misc_feature (72)..(159): NCBI GI NO: 37536508 NR Description: putative ring finger protein
  misc_feature (5)..(69): NCBI GI NO: 37536508 NR Description: putative ring finger protein
  misc_feature (9)..(193): NCBI GI NO: 32487554 NR Description: OSJNBa0013K16.6
  misc_feature (1)..(181): NCBI GI NO: 9293902 NR Description: contains similarity to RING zinc fingerprotein~gene_id:MVE11
MTRSSRFLGTESAPPPPEEILAAETDMVVILSALLCALICVSGLAAVARCAWIRRLAGVNSSAVGESPPPNKGLKKKALQSLPKSTFTAADSPSSSSGKGESSTECAICLMEFSDGEEIRILPLCRHAFHVACIDKWLTSRSSCPSCRRILVPVKCDRCGHHDSTAEAHGKDQPPRHQHPSQFSSANIPAFLP

SEQ ID NO: 20777 - protein, 167 aa, Zea mays subsp. mays
  peptide (1)..(167): Ceres Seq. ID no. 15178827
  misc_feature (80)..(121): Pfam Name: RING finger Pfam Description: Zinc finger, C3HC4 type
  misc_feature (1)..(167): NCBI GI NO: 15237013 NR Description: RING-H2 finger protein RHA3b
  misc_feature (1)..(167): NCBI GI NO: 15227839 NR Description: RING zinc finger protein -related
  misc_feature (1)..(167): NCBI GI NO: 15218042 NR Description: RING zinc finger protein -related
  misc_feature (1)..(134): NCBI GI NO: 15223041 NR Description: RING zinc finger protein -related
  misc_feature (1)..(134): NCBI GI NO: 21555237 NR Description: putative RING zinc finger protein
  misc_feature (1)..(131): NCBI GI NO: 7489432 NR Description: probable ring finger protein - barley
  misc_feature (46)..(133): NCBI GI NO: 37536508 NR Description: putative ring finger protein
  misc_feature (1)..(43): NCBI GI NO: 37536508 NR Description: putative ring finger protein
  misc_feature (1)..(167): NCBI GI NO: 32487554 NR Description: OSJNBa0013K16.6
  misc_feature (1)..(155): NCBI GI NO: 9293902 NR Description: contains similarity to RING zinc fingerprotein~gene_id:MVE11
MVVILSALLCALICVSGLAAVARCAWIRRLAGVNSSAVGESPPPNKGLKKKALQSLPKSTFTAADSPSSSSGKGESSTECAICLMEFSDGEEIRILPLCRHAFHVACIDKWLTSRSSCPSCRRILVPVKCDRCGHHDSTAEAHGKDQPPRHQHPSQFSSANIPAFLP

SEQ ID NO: 20778 - DNA, 885 bp, Zea mays subsp. mays
  misc_feature (1)..(885): Ceres Seq. ID no. 15176511
ataacaaaaaaaaaatggcgaccgcgtctctcgtcccgacatcaaacatcttccatgtctctccgtcagttagaacaagagctagcgtcattgttgcatcatctcatcaacaacaaccaagaaggagagacttactgctgaaaacagcggtggctattcctgcgattttgaacttgaaggaagctcctatctctgaggcgcgtgaggtggaagtgggatcgttcttaccaccttctgagtctgacccttccttcgtcctcttcaaagccaaaccttctgatactcctgctctccgcgcagggaacgtgcagccgtatcagtttgttctaccaccgaactggaaacagcttcgaatagccaacatcttgtcaggcaactactgccaaccgaaatgcgcagagccatggatagaagtgaagttcgagaacgagaagcaagggaaagttcaagtagttgcttctcctttgattcgtttaaccaacaagccaaacgcaactattgaagatctcggtgagcctgagagagtgattgcttctctcggtccctttgtcactggaaactcttatgattctgatgagcttgtggatacatcaatcgaaaagatcggtgatcaaacgtactataagtatgtgttggagacgccgtttgcgctaacgggaagtcataaccttgcaaaagcgacagcgaaagggaacactgtggttctgtttgtggtgagtgctactgagaagcaatggcagagctcacagaagactcttcaagccattcttgattcttttcaactgtaaaatcagagttattgttatgactctaaaagaaactatagagcaaacggtttgtgtgtgattgtttgtgtgtagtacaatataacgaagtcatttcttc

SEQ ID NO: 20779 - protein, 261 aa, Zea mays subsp. mays
  peptide (1)..(261): Ceres Seq. ID no. 15176512
  misc_feature (5)..(261): NCBI GI NO: 15228983 NR Description: thylakoid lumenal 20 kDa protein
  misc_feature (41)..(205): NCBI GI NO: 34909044 NR Description: P0034E02.35
  misc_feature (226)..(261): NCBI GI NO: 34909044 NR Description: P0034E02.35
  misc_feature (104)..(261): NCBI GI NO: 30699237 NR Description: thylakoid lumenal 29.8 kDa protein
  misc_feature (104)..(261): NCBI GI NO: 8928455 NR Description: Thylakoid lumenal 29
NKKKMATASLVPTSNIFHVSPSVRTRASVIVASSHQQQPRRRDLLLKTAVAIPAILNLKEAPISEAREVEVGSFLPPSESDPSFVLFKAKPSDTPALRAGNVQPYQFVLPPNWKQLRIANILSGNYCQPKCAEPWIEVKFENEKQGKVQVVASPLIRLTNKPNATIEDLGEPERVIASLGPFVTGNSYDSDELVDTSIEKIGDQTYYKYVLETPFALTGSHNLAKATAKGNTVVLFVVSATEKQWQSSQKTLQAILDSFQL

SEQ ID NO: 20780 - protein, 257 aa, Zea mays subsp. mays
  peptide (1)..(257): Ceres Seq. ID no. 15176513
  misc_feature (1)..(257): NCBI GI NO: 15228983 NR Description: thylakoid lumenal 20 kDa protein
  misc_feature (37)..(201): NCBI GI NO: 34909044 NR Description: P0034E02.35
  misc_feature (222)..(257): NCBI GI NO: 34909044 NR Description: P0034E02.35
  misc_feature (100)..(257): NCBI GI NO: 30699237 NR Description: thylakoid lumenal 29.8 kDa protein
  misc_feature (100)..(257): NCBI GI NO: 8928455 NR Description: Thylakoid lumenal 29
MATASLVPTSNIFHVSPSVRTRASVIVASSHQQQPRRRDLLLKTAVAIPAILNLKEAPISEAREVEVGSFLPPSESDPSFVLFKAKPSDTPALRAGNVQPYQFVLPPNWKQLRIANILSGNYCQPKCAEPWIEVKFENEKQGKVQVVASPLIRLTNKPNATIEDLGEPERVIASLGPFVTGNSYDSDELVDTSIEKIGDQTYYKYVLETPFALTGSHNLAKATAKGNTVVLFVVSATEKQWQSSQKTLQAILDSFQL

SEQ ID NO: 20781 - DNA, 738 bp, Zea mays subsp. mays
  misc_feature (1)..(738): Ceres Seq. ID no. 15178860
attcttttgtaagaaaaaagatcagaaggaaagaagagaagaaaaatgccgcatggaacgcttgaagttgttcttgtcagtgccaaaggtctggaggattctgattttctgaatagcatggatccttatgtgctcctcacttgccggactcaagatcagaagagcaatgttgcctcaggacaaggcacaactcctgagtggaatgagacatttatcttcaatgtctctgaaggaactacagagttaaaagccaaaatatttgacacagatgttggcacagaggatgatccccttggtgaagcaactattccattggaggcggttttcctggaaggagatatcccaccagctgcatacaatgtcgtgaaggatgaggagttcaaaggcgagatctggatcgcactatccttcaaaccttcggaaaaccgaagcaggggtttcgaagaggagtcttatggaggctggaaaaactctgaagcttcttactaaagaggaagaacagtaaatgtgtgttgctctttaatttattgagtcttgggaataaaatgttgagcttcccctcttggaaaggattttgttaagaccgtttcttcttattaatattattgttctgttcggtttgaaattcaaaactcttgagaatttgattcttttgtcaagaatttgtttcagtcttttttttttctttggtaatcaatttgtttcagtcttgttttggtatttaagaaaatattatac

SEQ ID NO: 20782 - protein, 147 aa, Zea mays subsp. mays
  peptide (1)..(147): Ceres Seq. ID no. 15178861
  misc_feature (6)..(87): Pfam Name: Pfam Description:  C2 domain
  misc_feature (1)..(147): NCBI GI NO: 15221718 NR Description: C2 domain-containing protein
  misc_feature (1)..(147): NCBI GI NO: 21553977 NR Description: putative elicitor-responsive gene
  misc_feature (1)..(143): NCBI GI NO: 11358958 NR Description: elicitor-responsive gene 3 [imported] - rice
  misc_feature (1)..(140): NCBI GI NO: 7489756 NR Description: hypothetical protein - maize
  misc_feature (1)..(140): NCBI GI NO: 38345558 NR Description: OSJNBa0032F06.15
  misc_feature (1)..(128): NCBI GI NO: 5565983 NR Description: unknown [Zea mays]
  misc_feature (1)..(147): NCBI GI NO: 3860331 NR Description: hypothetical protein [Cicer arietinum]
  misc_feature (4)..(143): NCBI GI NO: 7489474 NR Description: FIERG2 protein - rice
  misc_feature (1)..(144): NCBI GI NO: 15233278 NR Description: C2 domain-containing protein
  misc_feature (4)..(143): NCBI GI NO: 21998841 NR Description: RPP17-1 [Oryza sativa (japonica cultivar-group)]
MPHGTLEVVLVSAKGLEDSDFLNSMDPYVLLTCRTQDQKSNVASGQGTTPEWNETFIFNVSEGTTELKAKIFDTDVGTEDDPLGEATIPLEAVFLEGDIPPAAYNVVKDEEFKGEIWIALSFKPSENRSRGFEEESYGGWKNSEASY

SEQ ID NO: 20783 - protein, 123 aa, Zea mays subsp. mays
  peptide (1)..(123): Ceres Seq. ID no. 15178862
  misc_feature (1)..(63): Pfam Name: Pfam Description:  C2 domain
  misc_feature (1)..(123): NCBI GI NO: 15221718 NR Description: C2 domain-containing protein
  misc_feature (1)..(123): NCBI GI NO: 21553977 NR Description: putative elicitor-responsive gene
  misc_feature (1)..(119): NCBI GI NO: 11358958 NR Description: elicitor-responsive gene 3 [imported] - rice
  misc_feature (1)..(116): NCBI GI NO: 7489756 NR Description: hypothetical protein - maize
  misc_feature (1)..(116): NCBI GI NO: 38345558 NR Description: OSJNBa0032F06.15
  misc_feature (1)..(104): NCBI GI NO: 5565983 NR Description: unknown [Zea mays]
  misc_feature (1)..(123): NCBI GI NO: 3860331 NR Description: hypothetical protein [Cicer arietinum]
  misc_feature (1)..(119): NCBI GI NO: 7489474 NR Description: FIERG2 protein - rice
  misc_feature (1)..(120): NCBI GI NO: 15233278 NR Description: C2 domain-containing protein
  misc_feature (1)..(119): NCBI GI NO: 21998841 NR Description: RPP17-1 [Oryza sativa (japonica cultivar-group)]
MDPYVLLTCRTQDQKSNVASGQGTTPEWNETFIFNVSEGTTELKAKIFDTDVGTEDDPLGEATIPLEAVFLEGDIPPAAYNVVKDEEFKGEIWIALSFKPSENRSRGFEEESYGGWKNSEASY

SEQ ID NO: 20784 - DNA, 870 bp, Zea mays subsp. mays
  misc_feature (1)..(870): Ceres Seq. ID no. 15178805
aaaaacaggttaacaacaacacatacacatctctctctctctctcttcttcgttttatatttccattctttttcttcatttccgccatttctgttttattttggttgccgagaaaacgcaggaactcggtgacctaattatagtctcgtcgattgtctttttcagaattttcgacgaattttattgattaataattaattaatggcggaagaacatccatgtcagacgccggaaggccaccgtctctgcgttaacaactgcggtttcttcggaagctcagccaccatgaatctctgctccaactgctacggcgacctctgcctcaagaaccagcagcaagcttccatgaaatcaaccgtcgagtcctccctctccgccgcatctcctccgtcgtcaccggagatccagtcaatctccacgtcgacgatcgcgcccgtcgtccaaatttacgcggcggagatacagatagagaaacaaatccagcagcaacggcctaatcggtgcaccgtgtgcaggaaacgggtcgggttaaccgggttcatgtgccggtgcgggacgactttctgcgggacccacaggtatccggaggttcacggatgcacgttcgatttcaaatcggctgggcgcgaggagatcgcgaaggctaacccgttggttgtagccgcgaagctccagaagatatgatctgagccgttgcttgcgttgttcaccgtgaaacatacttttatgttacggacatgtgtttacgtaattaatggttgagacagttttcattcaccttttaattattttccttttcttccggaagaattttaaagttttataattgtgtggctttgtgcttgtaaaaaaaaagattttcttttgcgg

SEQ ID NO: 20785 - protein, 160 aa, Zea mays subsp. mays
  peptide (1)..(160): Ceres Seq. ID no. 15178806
  misc_feature (101)..(141): Pfam Name: Pfam Description:  AN1-like Zinc finger
  misc_feature (1)..(160): NCBI GI NO: 18404102 NR Description: expressed protein [Arabidopsis thaliana]
  misc_feature (1)..(160): NCBI GI NO: 15231686 NR Description: zinc finger - like protein [Arabidopsis thaliana]
  misc_feature (1)..(160): NCBI GI NO: 14596167 NR Description: zinc finger-like protein [Arabidopsis thaliana]
  misc_feature (7)..(160): NCBI GI NO: 18403408 NR Description: expressed protein [Arabidopsis thaliana]
  misc_feature (7)..(160): NCBI GI NO: 25082726 NR Description: expressed protein [Arabidopsis thaliana]
  misc_feature (1)..(160): NCBI GI NO: 15225894 NR Description: zinc finger protein -related
  misc_feature (4)..(160): NCBI GI NO: 30908921 NR Description: putative zinc finger transcription factor ZFP33
  misc_feature (3)..(160): NCBI GI NO: 35187687 NR Description: zinc-finger protein
  misc_feature (1)..(160): NCBI GI NO: 8778645 NR Description: F5O11.17 [Arabidopsis thaliana]
  misc_feature (14)..(159): NCBI GI NO: 15235819 NR Description: zinc finger -related protein
MAEEHPCQTPEGHRLCVNNCGFFGSSATMNLCSNCYGDLCLKNQQQASMKSTVESSLSAASPPSSPEIQSISTSTIAPVVQIYAAEIQIEKQIQQQRPNRCTVCRKRVGLTGFMCRCGTTFCGTHRYPEVHGCTFDFKSAGREEIAKANPLVVAAKLQKI

SEQ ID NO: 20786 - protein, 132 aa, Zea mays subsp. mays
  peptide (1)..(132): Ceres Seq. ID no. 15178807
  misc_feature (73)..(113): Pfam Name: Pfam Description:  AN1-like Zinc finger
  misc_feature (1)..(132): NCBI GI NO: 18404102 NR Description: expressed protein [Arabidopsis thaliana]
  misc_feature (1)..(132): NCBI GI NO: 15231686 NR Description: zinc finger - like protein [Arabidopsis thaliana]
  misc_feature (1)..(132): NCBI GI NO: 14596167 NR Description: zinc finger-like protein [Arabidopsis thaliana]
  misc_feature (1)..(132): NCBI GI NO: 18403408 NR Description: expressed protein [Arabidopsis thaliana]
  misc_feature (1)..(132): NCBI GI NO: 25082726 NR Description: expressed protein [Arabidopsis thaliana]
  misc_feature (1)..(132): NCBI GI NO: 15225894 NR Description: zinc finger protein -related
  misc_feature (1)..(132): NCBI GI NO: 30908921 NR Description: putative zinc finger transcription factor ZFP33
  misc_feature (1)..(132): NCBI GI NO: 35187687 NR Description: zinc-finger protein
  misc_feature (1)..(132): NCBI GI NO: 8778645 NR Description: F5O11.17 [Arabidopsis thaliana]
  misc_feature (1)..(131): NCBI GI NO: 15235819 NR Description: zinc finger -related protein
MNLCSNCYGDLCLKNQQQASMKSTVESSLSAASPPSSPEIQSISTSTIAPVVQIYAAEIQIEKQIQQQRPNRCTVCRKRVGLTGFMCRCGTTFCGTHRYPEVHGCTFDFKSAGREEIAKANPLVVAAKLQKI

SEQ ID NO: 20787 - protein, 112 aa, Zea mays subsp. mays
  peptide (1)..(112): Ceres Seq. ID no. 15178808
  misc_feature (53)..(93): Pfam Name: Pfam Description:  AN1-like Zinc finger
  misc_feature (1)..(112): NCBI GI NO: 18404102 NR Description: expressed protein [Arabidopsis thaliana]
  misc_feature (1)..(112): NCBI GI NO: 15231686 NR Description: zinc finger - like protein [Arabidopsis thaliana]
  misc_feature (1)..(112): NCBI GI NO: 14596167 NR Description: zinc finger-like protein [Arabidopsis thaliana]
  misc_feature (1)..(112): NCBI GI NO: 18403408 NR Description: expressed protein [Arabidopsis thaliana]
  misc_feature (1)..(112): NCBI GI NO: 25082726 NR Description: expressed protein [Arabidopsis thaliana]
  misc_feature (1)..(112): NCBI GI NO: 15225894 NR Description: zinc finger protein -related
  misc_feature (1)..(112): NCBI GI NO: 30908921 NR Description: putative zinc finger transcription factor ZFP33
  misc_feature (1)..(112): NCBI GI NO: 35187687 NR Description: zinc-finger protein
  misc_feature (1)..(112): NCBI GI NO: 8778645 NR Description: F5O11.17 [Arabidopsis thaliana]
  misc_feature (1)..(111): NCBI GI NO: 15235819 NR Description: zinc finger -related protein
MKSTVESSLSAASPPSSPEIQSISTSTIAPVVQIYAAEIQIEKQIQQQRPNRCTVCRKRVGLTGFMCRCGTTFCGTHRYPEVHGCTFDFKSAGREEIAKANPLVVAAKLQKI

SEQ ID NO: 20788 - DNA, 1447 bp, Zea mays subsp. mays
  misc_feature (1)..(1447): Ceres Seq. ID no. 15179593
attttccacgccttcattctctctataagattcattttatagattccatggccaccgtctcctccgcttctccctggccaagcgtttccacctccgcctcagattcgaactctgctgttccctctcaccaccgcgatcgtggagacgagaccgagtctctcgattccttctcctccatgagcctcaactccgaagagattactcataattccgatcgaattccggagtctcaaacaccggcgaatcctcccccgtcgctgctccacctctccttcaaccaggaccacgcctgcttcgccgtcggcaccgaccgcggcttccggatcctcaactgcgatccgttccgcgaaatcttccggcgcgatttcgatcggggcggtggagtcgccgtcgtggagatgctcttcagatgcaatatcctagcgctcgtaggcggcggacctgatccgcagtatccgccgaacaaggtcatgatttgggacgatcaccagagccggtgcatcggcgagctctccttcaggtccgatgttcgatccgttaggctcaggagggatcggattatcgtggtcctcgagcagaagatttttgtttacaacttcgcggaccttaagctgatgcatcagattgagactattgcgaaccctaagggcttgtgcgctgtctctcagggtgctggctctatggtgttggtgtgtcctggtttgcagaaaggacaactgaggatcgagcattatgcttcgaagcggactaagttcgtcatggctcatgattcgaggattgcttgctttgctctcacgcaggatgggcatttgttggccacggctagctctaaggggactctggttcggatctttaatactgttgatggcaccttgcgccaagaggttaggaggggtgcagatagagcagagatatacagtctggctttctcttcaaatgctcagtggttagctgtctcaagtgacaaaggaaccgtccatgtctttggtctcaaaggcaactccggtgctcaggtgaaagacacacccagaattgcatctgatcttactcgtacttcctcatccccatcctcgtccctgtcattattcaaaggagtgttgcccaagtatttcagctcggagtggtcggtggctcagttccggttggttgaaggaactcagtacgtagtcgcctttggacatcagaagaatactgttgttattcttggcatggatgggagcttctacagatgccagtttgatccggtgaatgggggagaaatgtctcagcttgagtatcacaactgtctaaaacctcctgttttctagatgcaactattttcttaagttccttctatcttttatctctgctctacttaagtggtgagagtcggtgcaaccatatggtgttaatgtatatagtttgtgtgtataataattacgaatggttcttataatttccaaaaacc

SEQ ID NO: 20789 - protein, 434 aa, Zea mays subsp. mays
  peptide (1)..(434): Ceres Seq. ID no. 15179594
  misc_feature (293)..(329): Pfam Name: Pfam Description:  WD domain, G-beta repeat
  misc_feature (16)..(434): NCBI GI NO: 14517420 NR Description: AT3g62770/F26K9_200 [Arabidopsis thaliana]
  misc_feature (16)..(434): NCBI GI NO: 11288364 NR Description: hypothetical protein F26K9
  misc_feature (18)..(431): NCBI GI NO: 34907164 NR Description: P0423A12.19
  misc_feature (16)..(297): NCBI GI NO: 18412493 NR Description: expressed protein [Arabidopsis thaliana]
  misc_feature (57)..(430): NCBI GI NO: 30688413 NR Description: WD-40 repeat protein family [Arabidopsis thaliana]
  misc_feature (86)..(430): NCBI GI NO: 30694449 NR Description: WD-40 repeat protein family [Arabidopsis thaliana]
  misc_feature (86)..(430): NCBI GI NO: 7487233 NR Description: hypothetical protein At2g40810
  misc_feature (86)..(359): NCBI GI NO: 34896164 NR Description: hypothetical protein~similar to Arabidopsisthaliana chromosome 2
  misc_feature (365)..(430): NCBI GI NO: 34896164 NR Description: hypothetical protein~similar to Arabidopsisthaliana chromosome 2
  misc_feature (84)..(236): NCBI GI NO: 16740527 NR Description: Required for cytoplasm to vacuole targeting of proaminopeptidase I and starvation induced autophagy
FPRLHSLYKIHFIDSMATVSSASPWPSVSTSASDSNSAVPSHHRDRGDETESLDSFSSMSLNSEEITHNSDRIPESQTPANPPPSLLHLSFNQDHACFAVGTDRGFRILNCDPFREIFRRDFDRGGGVAVVEMLFRCNILALVGGGPDPQYPPNKVMIWDDHQSRCIGELSFRSDVRSVRLRRDRIIVVLEQKIFVYNFADLKLMHQIETIANPKGLCAVSQGAGSMVLVCPGLQKGQLRIEHYASKRTKFVMAHDSRIACFALTQDGHLLATASSKGTLVRIFNTVDGTLRQEVRRGADRAEIYSLAFSSNAQWLAVSSDKGTVHVFGLKGNSGAQVKDTPRIASDLTRTSSSPSSSLSLFKGVLPKYFSSEWSVAQFRLVEGTQYVVAFGHQKNTVVILGMDGSFYRCQFDPVNGGEMSQLEYHNCLKPPVF

SEQ ID NO: 20790 - protein, 419 aa, Zea mays subsp. mays
  peptide (1)..(419): Ceres Seq. ID no. 15179595
  misc_feature (278)..(314): Pfam Name: Pfam Description:  WD domain, G-beta repeat
  misc_feature (1)..(419): NCBI GI NO: 14517420 NR Description: AT3g62770/F26K9_200 [Arabidopsis thaliana]
  misc_feature (1)..(419): NCBI GI NO: 11288364 NR Description: hypothetical protein F26K9
  misc_feature (3)..(416): NCBI GI NO: 34907164 NR Description: P0423A12.19
  misc_feature (1)..(282): NCBI GI NO: 18412493 NR Description: expressed protein [Arabidopsis thaliana]
  misc_feature (42)..(415): NCBI GI NO: 30688413 NR Description: WD-40 repeat protein family [Arabidopsis thaliana]
  misc_feature (71)..(415): NCBI GI NO: 30694449 NR Description: WD-40 repeat protein family [Arabidopsis thaliana]
  misc_feature (71)..(415): NCBI GI NO: 7487233 NR Description: hypothetical protein At2g40810
  misc_feature (71)..(344): NCBI GI NO: 34896164 NR Description: hypothetical protein~similar to Arabidopsisthaliana chromosome 2
  misc_feature (350)..(415): NCBI GI NO: 34896164 NR Description: hypothetical protein~similar to Arabidopsisthaliana chromosome 2
  misc_feature (69)..(221): NCBI GI NO: 16740527 NR Description: Required for cytoplasm to vacuole targeting of proaminopeptidase I and starvation induced autophagy
MATVSSASPWPSVSTSASDSNSAVPSHHRDRGDETESLDSFSSMSLNSEEITHNSDRIPESQTPANPPPSLLHLSFNQDHACFAVGTDRGFRILNCDPFREIFRRDFDRGGGVAVVEMLFRCNILALVGGGPDPQYPPNKVMIWDDHQSRCIGELSFRSDVRSVRLRRDRIIVVLEQKIFVYNFADLKLMHQIETIANPKGLCAVSQGAGSMVLVCPGLQKGQLRIEHYASKRTKFVMAHDSRIACFALTQDGHLLATASSKGTLVRIFNTVDGTLRQEVRRGADRAEIYSLAFSSNAQWLAVSSDKGTVHVFGLKGNSGAQVKDTPRIASDLTRTSSSPSSSLSLFKGVLPKYFSSEWSVAQFRLVEGTQYVVAFGHQKNTVVILGMDGSFYRCQFDPVNGGEMSQLEYHNCLKPPVF

SEQ ID NO: 20791 - protein, 376 aa, Zea mays subsp. mays
  peptide (1)..(376): Ceres Seq. ID no. 15179596
  misc_feature (235)..(271): Pfam Name: Pfam Description:  WD domain, G-beta repeat
  misc_feature (1)..(376): NCBI GI NO: 14517420 NR Description: AT3g62770/F26K9_200 [Arabidopsis thaliana]
  misc_feature (1)..(376): NCBI GI NO: 11288364 NR Description: hypothetical protein F26K9
  misc_feature (1)..(373): NCBI GI NO: 34907164 NR Description: P0423A12.19
  misc_feature (1)..(239): NCBI GI NO: 18412493 NR Description: expressed protein [Arabidopsis thaliana]
  misc_feature (1)..(372): NCBI GI NO: 30688413 NR Description: WD-40 repeat protein family [Arabidopsis thaliana]
  misc_feature (28)..(372): NCBI GI NO: 30694449 NR Description: WD-40 repeat protein family [Arabidopsis thaliana]
  misc_feature (28)..(372): NCBI GI NO: 7487233 NR Description: hypothetical protein At2g40810
  misc_feature (28)..(301): NCBI GI NO: 34896164 NR Description: hypothetical protein~similar to Arabidopsisthaliana chromosome 2
  misc_feature (307)..(372): NCBI GI NO: 34896164 NR Description: hypothetical protein~similar to Arabidopsisthaliana chromosome 2
  misc_feature (26)..(178): NCBI GI NO: 16740527 NR Description: Required for cytoplasm to vacuole targeting of proaminopeptidase I and starvation induced autophagy
MSLNSEEITHNSDRIPESQTPANPPPSLLHLSFNQDHACFAVGTDRGFRILNCDPFREIFRRDFDRGGGVAVVEMLFRCNILALVGGGPDPQYPPNKVMIWDDHQSRCIGELSFRSDVRSVRLRRDRIIVVLEQKIFVYNFADLKLMHQIETIANPKGLCAVSQGAGSMVLVCPGLQKGQLRIEHYASKRTKFVMAHDSRIACFALTQDGHLLATASSKGTLVRIFNTVDGTLRQEVRRGADRAEIYSLAFSSNAQWLAVSSDKGTVHVFGLKGNSGAQVKDTPRIASDLTRTSSSPSSSLSLFKGVLPKYFSSEWSVAQFRLVEGTQYVVAFGHQKNTVVILGMDGSFYRCQFDPVNGGEMSQLEYHNCLKPPVF

SEQ ID NO: 20792 - DNA, 1410 bp, Zea mays subsp. mays
  misc_feature (1)..(1410): Ceres Seq. ID no. 15177500
agagatgatcgagcaatggcgacgactttaacgttgactctcttcctccttttttcaacaaaacttccggcgtcagtctccggcaagtgcaccaccaccacatccacaaaaaccttcgagaaatgcatctctcttcccacacaacaagcttcaatcgcgtggacataccatccacacaacgcgaccctcgacctctgcttcttcggaacattcatctcgccttccgggtgggtcgggtgggggatcaacccggatactccctcccagatgaccggctctcgagtcctcatcgcgtttccggatcctaactcgggtcagctcatcctcctcccttacgttcttgactcttctgtcaagctccagaaaggccctctgctttctcgtccccttgacctcctccgtctctcctcctcctccgcttctctgtacggagggaacatggcgactatacgcaacggcgcctccgttcagatttacgcatcggtgaaactctcgtcgaacaacaccaagatccaccatgtttggaacagaggtctttacgttcaaggttactctcccaccattcatcccaccacttccactgatctctcctccttctccaccttcgatgttacttcaggttttgcaacggttaaaagaaacagcggttcgagagctttgaaagtgacacacggagtgatcaacgcggtggcgtggggtttcctcctcccggcgggagcagtaacagctcgataccttcgtcaaatgcagtcaataggaccaacttggttctacatccacgcagccatacagctaaccggtttcctcctcggaacaatcggcttctcactaggattggtgctcggccgaaactcccccggagtgacctacggcttacaccggagcctcgggatagcaacgttcacgctggcggcgctgcaaacgctggctttgctgttcagaccaaagacgactaacaagttcaggagatactggaagtcttaccatcatttcgtcgggtacggttgcgtggtgatgggagtggtgaatgtgttccaagggtttgatgttttgagggaaggaggatcgtacgcaaagcttggttactgtatgtgtctgtccacgctggtcggtgtctgtgtggcgatggaagttaactcgtgggttgtgttttgccgcaaggcgaaagaggagaagatgaagagagagggtttgactgatgatagatgcagcagtgggattcattcatagttagttcttgtgtcctaattataagagagaatgagcaagacacaacaccaatttttatgtatttttgctttggttatatacattgttgaggtgtttacatcactgttcctagaagatcttgattttgtttaaactttcatatactaaagagcagtgttctaaacgaaacaatttttccag

SEQ ID NO: 20793 - protein, 409 aa, Zea mays subsp. mays
  peptide (1)..(409): Ceres Seq. ID no. 15177501
  misc_feature (90)..(231): Pfam Name: DUF568 Pfam Description: Protein of unknown function
  misc_feature (6)..(409): NCBI GI NO: 18395877 NR Description: auxin-induced protein, putative
  misc_feature (6)..(409): NCBI GI NO: 21536849 NR Description: unknown [Arabidopsis thaliana]
  misc_feature (27)..(400): NCBI GI NO: 24414274 NR Description: Hypothetical protein
  misc_feature (133)..(409): NCBI GI NO: 25411125 NR Description: hypothetical protein At2g04850
  misc_feature (6)..(207): NCBI GI NO: 25411125 NR Description: hypothetical protein At2g04850
  misc_feature (14)..(408): NCBI GI NO: 18421491 NR Description: auxin-induced protein family
  misc_feature (14)..(408): NCBI GI NO: 21592781 NR Description: putative membrane protein [Arabidopsis thaliana]
  misc_feature (7)..(394): NCBI GI NO: 18404500 NR Description: auxin-induced protein family
  misc_feature (10)..(394): NCBI GI NO: 15235545 NR Description: auxin-induced protein, putative
  misc_feature (10)..(394): NCBI GI NO: 21593814 NR Description: unknown [Arabidopsis thaliana]
RDDRAMATTLTLTLFLLFSTKLPASVSGKCTTTTSTKTFEKCISLPTQQASIAWTYHPHNATLDLCFFGTFISPSGWVGWGINPDTPSQMTGSRVLIAFPDPNSGQLILLPYVLDSSVKLQKGPLLSRPLDLLRLSSSSASLYGGNMATIRNGASVQIYASVKLSSNNTKIHHVWNRGLYVQGYSPTIHPTTSTDLSSFSTFDVTSGFATVKRNSGSRALKVTHGVINAVAWGFLLPAGAVTARYLRQMQSIGPTWFYIHAAIQLTGFLLGTIGFSLGLVLGRNSPGVTYGLHRSLGIATFTLAALQTLALLFRPKTTNKFRRYWKSYHHFVGYGCVVMGVVNVFQGFDVLREGGSYAKLGYCMCLSTLVGVCVAMEVNSWVVFCRKAKEEKMKREGLTDDRCSSGIHS

SEQ ID NO: 20794 - protein, 404 aa, Zea mays subsp. mays
  peptide (1)..(404): Ceres Seq. ID no. 15177502
  misc_feature (85)..(226): Pfam Name: DUF568 Pfam Description: Protein of unknown function
  misc_feature (1)..(404): NCBI GI NO: 18395877 NR Description: auxin-induced protein, putative
  misc_feature (1)..(404): NCBI GI NO: 21536849 NR Description: unknown [Arabidopsis thaliana]
  misc_feature (22)..(395): NCBI GI NO: 24414274 NR Description: Hypothetical protein
  misc_feature (128)..(404): NCBI GI NO: 25411125 NR Description: hypothetical protein At2g04850
  misc_feature (1)..(202): NCBI GI NO: 25411125 NR Description: hypothetical protein At2g04850
  misc_feature (9)..(403): NCBI GI NO: 18421491 NR Description: auxin-induced protein family
  misc_feature (9)..(403): NCBI GI NO: 21592781 NR Description: putative membrane protein [Arabidopsis thaliana]
  misc_feature (2)..(389): NCBI GI NO: 18404500 NR Description: auxin-induced protein family
  misc_feature (5)..(389): NCBI GI NO: 15235545 NR Description: auxin-induced protein, putative
  misc_feature (5)..(389): NCBI GI NO: 21593814 NR Description: unknown [Arabidopsis thaliana]
MATTLTLTLFLLFSTKLPASVSGKCTTTTSTKTFEKCISLPTQQASIAWTYHPHNATLDLCFFGTFISPSGWVGWGINPDTPSQMTGSRVLIAFPDPNSGQLILLPYVLDSSVKLQKGPLLSRPLDLLRLSSSSASLYGGNMATIRNGASVQIYASVKLSSNNTKIHHVWNRGLYVQGYSPTIHPTTSTDLSSFSTFDVTSGFATVKRNSGSRALKVTHGVINAVAWGFLLPAGAVTARYLRQMQSIGPTWFYIHAAIQLTGFLLGTIGFSLGLVLGRNSPGVTYGLHRSLGIATFTLAALQTLALLFRPKTTNKFRRYWKSYHHFVGYGCVVMGVVNVFQGFDVLREGGSYAKLGYCMCLSTLVGVCVAMEVNSWVVFCRKAKEEKMKREGLTDDRCSSGIHS

SEQ ID NO: 20795 - protein, 320 aa, Zea mays subsp. mays
  peptide (1)..(320): Ceres Seq. ID no. 15177503
  misc_feature (1)..(142): Pfam Name: DUF568 Pfam Description: Protein of unknown function
  misc_feature (1)..(320): NCBI GI NO: 18395877 NR Description: auxin-induced protein, putative
  misc_feature (1)..(320): NCBI GI NO: 21536849 NR Description: unknown [Arabidopsis thaliana]
  misc_feature (1)..(311): NCBI GI NO: 24414274 NR Description: Hypothetical protein
  misc_feature (44)..(320): NCBI GI NO: 25411125 NR Description: hypothetical protein At2g04850
  misc_feature (1)..(118): NCBI GI NO: 25411125 NR Description: hypothetical protein At2g04850
  misc_feature (1)..(319): NCBI GI NO: 18421491 NR Description: auxin-induced protein family
  misc_feature (1)..(319): NCBI GI NO: 21592781 NR Description: putative membrane protein [Arabidopsis thaliana]
  misc_feature (1)..(305): NCBI GI NO: 18404500 NR Description: auxin-induced protein family
  misc_feature (1)..(305): NCBI GI NO: 15235545 NR Description: auxin-induced protein, putative
  misc_feature (1)..(305): NCBI GI NO: 21593814 NR Description: unknown [Arabidopsis thaliana]
MTGSRVLIAFPDPNSGQLILLPYVLDSSVKLQKGPLLSRPLDLLRLSSSSASLYGGNMATIRNGASVQIYASVKLSSNNTKIHHVWNRGLYVQGYSPTIHPTTSTDLSSFSTFDVTSGFATVKRNSGSRALKVTHGVINAVAWGFLLPAGAVTARYLRQMQSIGPTWFYIHAAIQLTGFLLGTIGFSLGLVLGRNSPGVTYGLHRSLGIATFTLAALQTLALLFRPKTTNKFRRYWKSYHHFVGYGCVVMGVVNVFQGFDVLREGGSYAKLGYCMCLSTLVGVCVAMEVNSWVVFCRKAKEEKMKREGLTDDRCSSGIHS

SEQ ID NO: 20796 - DNA, 754 bp, Zea mays subsp. mays
  misc_feature (1)..(754): Ceres Seq. ID no. 15179480
atatctaaatcctctttctctctgcttcttcaaattttacagtttctttctaaagctgccctcgaattttacattaattacataaatgtccggaatcttagttaattctgccgctaactccctccgcttctcgccgggagctagccttcctcatccgaagccaaccagatcacacaacggcagcgcgcggttccccaccggagccaactcgttcagagcttccgcgcagactctcaacgcggagccaaccgtaacggaatccgttcgccggcgagcgtcgagcctctacgatctgctgaaagtcaacgaaacggcgtccttgccggagatcaagacggcgtaccggagcctagctaaagtctaccatcccgacgcgtcggagtcggacgggcgagatttcatggagatccacaaagcttacgcgacgctcgcggatccgacgacgagagcgatctacgattcgacgctgggagcgcgacggagacgtgtgcaggtcggggcgatgggtcgggcgggtcgggtgtattcgacgacccggagatgggagacggatcagtgttggtgatttaggtttcaggtgatgatgactttgcagcaagggcacttttttttacttcatttttccccttttgttacttttttttttttccttttgtcgtgtattgggaaaattaaggggaaagataagttttatcagtccttagctttaactttgttaacataaattatgaatagagagatgtatattattttt

SEQ ID NO: 20797 - protein, 159 aa, Zea mays subsp. mays
  peptide (1)..(159): Ceres Seq. ID no. 15179481
  misc_feature (66)..(128): Pfam Name: Pfam Description:  DnaJ domain
  misc_feature (1)..(159): NCBI GI NO: 15231204 NR Description: DnaJ protein family [Arabidopsis thaliana]
  misc_feature (12)..(159): NCBI GI NO: 7488763 NR Description: DnaJ protein homolog - kidney bean (fragment)
  misc_feature (5)..(159): NCBI GI NO: 9843641 NR Description: J11 protein [Arabidopsis thaliana]
  misc_feature (5)..(159): NCBI GI NO: 15233446 NR Description: DnaJ protein family [Arabidopsis thaliana]
  misc_feature (10)..(159): NCBI GI NO: 15227919 NR Description: J11 protein, putative [Arabidopsis thaliana]
  misc_feature (44)..(128): NCBI GI NO: 6691127 NR Description: DnaJ-like protein [Arabidopsis thaliana]
  misc_feature (44)..(128): NCBI GI NO: 15236355 NR Description: DnaJ protein family [Arabidopsis thaliana]
  misc_feature (44)..(128): NCBI GI NO: 30682610 NR Description: DnaJ protein family [Arabidopsis thaliana]
  misc_feature (66)..(147): NCBI GI NO: 34894012 NR Description: P0672D08.16
  misc_feature (66)..(128): NCBI GI NO: 13507741 NR Description: similar to j-domain of DnaJ
MSGILVNSAANSLRFSPGASLPHPKPTRSHNGSARFPTGANSFRASAQTLNAEPTVTESVRRRASSLYDLLKVNETASLPEIKTAYRSLAKVYHPDASESDGRDFMEIHKAYATLADPTTRAIYDSTLGARRRRVQVGAMGRAGRVYSTTRRWETDQCW

SEQ ID NO: 20798 - DNA, 870 bp, Zea mays subsp. mays
  misc_feature (1)..(870): Ceres Seq. ID no. 15179249
agagataaaaaaagtaagtaatttaataattaattaccgcatttaagaaaatctcacattcacatataaagatgacaaggaccattacgctcctatctctcgccgtcaccgtcttggccattaccgctgtcttcgccgctgatcctccaacaccagccggagcgcctaaagccaacgccaacaaaagctcacccactcctcccgccgccgcagcatcccccaaacaacccgccgcagcatcccccaaacaacccgccgcaggatcaccaaaaccaaccaccgcaggatcccccaaacaacccgccgcagcatccccaaaatccaccgcttccgccccaacctcgccgcctacggcttctgctcccaccaccaccaagaagaactcctccgccactccaagcgcttccccatcttcaggtggtggcgcccccacaaacgctccaaaatcttcgtcagccaaaactccggctccaagccccgactcaagcaccggaggtcctaccagctcatccgaaggtcctacaagctcatcggaaggtcctacaagctcgtccgaaggccctacaagctcgtctgaaggccctacaagctcgtctgaaggtcctactagctcgtccgactcaccatccgcatcttctccgccgtctccgacaccagacatgtctccgtcgtcgtcccctgatgaaggacccaccagtgaaggccccgaagcttcagccccgacgggaagagcctcgtcgcttgagatctctatctctggatctgttctcatcgcagctgcatggttcttcttcatatgatgaaatgttactcttgtgtttcttattacacttaaaaaggctcgtttcatttaatattttttgattcctt

SEQ ID NO: 20799 - protein, 242 aa, Zea mays subsp. mays
  peptide (1)..(242): Ceres Seq. ID no. 15179250
  misc_feature (14)..(217): Pfam Name: Pfam Description:  Glycoprotein GG/GX
  misc_feature (16)..(237): NCBI GI NO: 13592175 NR Description: ppg3 [Leishmania major]
  misc_feature (16)..(231): NCBI GI NO: 13592175 NR Description: ppg3 [Leishmania major]
  misc_feature (16)..(237): NCBI GI NO: 13592175 NR Description: ppg3 [Leishmania major]
  misc_feature (28)..(237): NCBI GI NO: 5420387 NR Description: proteophosphoglycan [Leishmania major]
  misc_feature (16)..(237): NCBI GI NO: 13592175 NR Description: ppg3 [Leishmania major]
  misc_feature (22)..(231): NCBI GI NO: 13592175 NR Description: ppg3 [Leishmania major]
  misc_feature (37)..(223): NCBI GI NO: 32699068 NR Description: hypothetical protein FLJ35107 [Homo sapiens]
  misc_feature (22)..(237): NCBI GI NO: 5420387 NR Description: proteophosphoglycan [Leishmania major]
  misc_feature (25)..(231): NCBI GI NO: 11359723 NR Description: proteophosphoglycan, membrane-associated
  misc_feature (34)..(231): NCBI GI NO: 11359723 NR Description: proteophosphoglycan, membrane-associated
MTRTITLLSLAVTVLAITAVFAADPPTPAGAPKANANKSSPTPPAAAASPKQPAAASPKQPAAGSPKPTTAGSPKQPAAASPKSTASAPTSPPTASAPTTTKKNSSATPSASPSSGGGAPTNAPKSSSAKTPAPSPDSSTGGPTSSSEGPTSSSEGPTSSSEGPTSSSEGPTSSSEGPTSSSDSPSASSPPSPTPDMSPSSSPDEGPTSEGPEASAPTGRASSLEISISGSVLIAAAWFFFI

SEQ ID NO: 20800 - DNA, 746 bp, Zea mays subsp. mays
  misc_feature (1)..(746): Ceres Seq. ID no. 15179616
aattagttgtcctcttctctaaaacattttcaacaaagaaaacggtaataagagagaagaggtggtagtaaacaagatcagaatctttaacattttcaaaacaaatggcgaccaaagccatcttcttcttctttgtctcggccgtgtgcctgtcctctctcgccggcgttgccaacgctgacgccgacgactttgacagtttccaaatccagggatcggtttactgtgacacttgccgtgtccaattcgttacccgcctcagccaattccttgaaggtgcgaaagtgaagctagagtgcaggagtagaacaaacggaactgtaacgttgactaaagaagccgtgacggacaaatcaggaagctacaaaatggaagtcaccggtgaccacgaggaggaagtctgcgagctcgttctcctccaatcaccagacagtggttgcagcgacgtcagcacagaggcttacctacgtaacgccgctaaggttagtctgaccgcgaatgacggtatcgtctcacacgagacacgtatcgttaacccccttggtttcatggttaagacgccgttagctgattgtcccgccgcatttaaggagcttggaatcgtccctgacgtcatcttctaaatatgatgacgacttgtaccaattcaagatcgttatttaactgtcatctattatttgctttcttgtatacagaaaacgtaatttgataaaaatacaaaaaagcggcaattctatatttattat

SEQ ID NO: 20801 - protein, 172 aa, Zea mays subsp. mays
  peptide (1)..(172): Ceres Seq. ID no. 15179617
  misc_feature (35)..(159): Pfam Name: Pfam Description:  Pollen proteins Ole e I family
  misc_feature (1)..(169): NCBI GI NO: 7486300 NR Description: hypothetical protein F28J12
  misc_feature (1)..(172): NCBI GI NO: 18415132 NR Description: Ole e I (main olive allergen)-related protein
  misc_feature (1)..(172): NCBI GI NO: 18422603 NR Description: Ole e I (main olive allergen)-related protein
  misc_feature (1)..(172): NCBI GI NO: 21593871 NR Description: Ole e I (main olive allergen)-like protein
  misc_feature (16)..(172): NCBI GI NO: 9758935 NR Description: Ole e I (main olive allergen)-like protein
  misc_feature (5)..(172): NCBI GI NO: 15218844 NR Description: expressed protein [Arabidopsis thaliana]
  misc_feature (58)..(172): NCBI GI NO: 28393099 NR Description: unknown protein [Arabidopsis thaliana]
  misc_feature (1)..(166): NCBI GI NO: 22074346 NR Description: Che a 1 allergen precursor [Chenopodium album]
  misc_feature (13)..(169): NCBI GI NO: 28380096 NR Description: Olee1-like protein precursor
  misc_feature (4)..(168): NCBI GI NO: 125887 NR Description: Anther specific LAT52 protein precursor
MATKAIFFFFVSAVCLSSLAGVANADADDFDSFQIQGSVYCDTCRVQFVTRLSQFLEGAKVKLECRSRTNGTVTLTKEAVTDKSGSYKMEVTGDHEEEVCELVLLQSPDSGCSDVSTEAYLRNAAKVSLTANDGIVSHETRIVNPLGFMVKTPLADCPAAFKELGIVPDVIF

SEQ ID NO: 20802 - DNA, 973 bp, Zea mays subsp. mays
  misc_feature (1)..(973): Ceres Seq. ID no. 15179159
gtattatacagatcaaatggcgtcgagcgatgagcttccgggaccgtatcctgcacgtgatggaggagacatacctccgggagatccgactacgatgaagacgatgatgattgacaaaggagctgcgatgcttcaatctttcaaaccaatcaagcagatgagtcttcatatgtgttcctttgcttgttacggtcacgatcctagccgtcaaatcgaagtccatttctatgttcatcgtgtcaacgaagactttctccagtgtgctgtttacgactgcgactccgctaagacccacctcatcgggatcgagtatattgtgtccgagaggttatttgagagcctttcctcggaagagcagaagctttggcattctcatgactatgagatccaaacaggtcttctaatgactccaagggtccctgagcttgtagctaagccagaacttcaaaatattgccaaaacttatggaaagttttggtgcacttggcagaccgaccgtggggataaattgccactaggtgcgccagcactaatgatgtcaccacaagacgtgaacatagggaagattaagccagggctactgaagaaacgagacgacgaatatggtatctcgacggaatcattgaagacatctcgagctgagattgtaggattggagaggaagaacccgatggctgattactgggttcatcatgggaaagggtttgctgtcgatataatcgagacggatatgaagaagtgtgctccgttcccgtaatataagttggtgttcaacgaacaataacatataatattcgtatgtactaaatgtggaccgttaagtatataatgtaagttataaataatgatgtgtaatgctacgggcattactacatcattgaggaggctgtttgtttgtttgttttcttcgtgtcattttctttcgtctgagaaactataagctgcgtacgtatataaaataccggtttggcat

SEQ ID NO: 20803 - protein, 251 aa, Zea mays subsp. mays
  peptide (1)..(251): Ceres Seq. ID no. 15179160
  misc_feature (6)..(251): NCBI GI NO: 15242474 NR Description: expressed protein [Arabidopsis thaliana]
  misc_feature (6)..(251): NCBI GI NO: 9758672 NR Description: gene_id:MRA19
  misc_feature (6)..(251): NCBI GI NO: 18415199 NR Description: expressed protein [Arabidopsis thaliana]
  misc_feature (6)..(251): NCBI GI NO: 21617913 NR Description: unknown [Arabidopsis thaliana]
  misc_feature (6)..(251): NCBI GI NO: 7452426 NR Description: hypothetical protein F13C5
  misc_feature (6)..(251): NCBI GI NO: 34909516 NR Description: P0481E12.28
  misc_feature (18)..(251): NCBI GI NO: 15220516 NR Description: expressed protein [Arabidopsis thaliana]
  misc_feature (6)..(251): NCBI GI NO: 34910820 NR Description: P0456A01.15
  misc_feature (2)..(228): NCBI GI NO: 32413853 NR Description: hypothetical protein [Neurospora crassa]
YYTDQMASSDELPGPYPARDGGDIPPGDPTTMKTMMIDKGAAMLQSFKPIKQMSLHMCSFACYGHDPSRQIEVHFYVHRVNEDFLQCAVYDCDSAKTHLIGIEYIVSERLFESLSSEEQKLWHSHDYEIQTGLLMTPRVPELVAKPELQNIAKTYGKFWCTWQTDRGDKLPLGAPALMMSPQDVNIGKIKPGLLKKRDDEYGISTESLKTSRAEIVGLERKNPMADYWVHHGKGFAVDIIETDMKKCAPFP

SEQ ID NO: 20804 - protein, 246 aa, Zea mays subsp. mays
  peptide (1)..(246): Ceres Seq. ID no. 15179161
  misc_feature (1)..(246): NCBI GI NO: 15242474 NR Description: expressed protein [Arabidopsis thaliana]
  misc_feature (1)..(246): NCBI GI NO: 9758672 NR Description: gene_id:MRA19
  misc_feature (1)..(246): NCBI GI NO: 18415199 NR Description: expressed protein [Arabidopsis thaliana]
  misc_feature (1)..(246): NCBI GI NO: 21617913 NR Description: unknown [Arabidopsis thaliana]
  misc_feature (1)..(246): NCBI GI NO: 7452426 NR Description: hypothetical protein F13C5
  misc_feature (1)..(246): NCBI GI NO: 34909516 NR Description: P0481E12.28
  misc_feature (13)..(246): NCBI GI NO: 15220516 NR Description: expressed protein [Arabidopsis thaliana]
  misc_feature (1)..(246): NCBI GI NO: 34910820 NR Description: P0456A01.15
  misc_feature (1)..(223): NCBI GI NO: 32413853 NR Description: hypothetical protein [Neurospora crassa]
MASSDELPGPYPARDGGDIPPGDPTTMKTMMIDKGAAMLQSFKPIKQMSLHMCSFACYGHDPSRQIEVHFYVHRVNEDFLQCAVYDCDSAKTHLIGIEYIVSERLFESLSSEEQKLWHSHDYEIQTGLLMTPRVPELVAKPELQNIAKTYGKFWCTWQTDRGDKLPLGAPALMMSPQDVNIGKIKPGLLKKRDDEYGISTESLKTSRAEIVGLERKNPMADYWVHHGKGFAVDIIETDMKKCAPFP

SEQ ID NO: 20805 - protein, 220 aa, Zea mays subsp. mays
  peptide (1)..(220): Ceres Seq. ID no. 15179162
  misc_feature (1)..(220): NCBI GI NO: 15242474 NR Description: expressed protein [Arabidopsis thaliana]
  misc_feature (1)..(220): NCBI GI NO: 9758672 NR Description: gene_id:MRA19
  misc_feature (1)..(220): NCBI GI NO: 18415199 NR Description: expressed protein [Arabidopsis thaliana]
  misc_feature (1)..(220): NCBI GI NO: 21617913 NR Description: unknown [Arabidopsis thaliana]
  misc_feature (1)..(220): NCBI GI NO: 7452426 NR Description: hypothetical protein F13C5
  misc_feature (1)..(220): NCBI GI NO: 34909516 NR Description: P0481E12.28
  misc_feature (1)..(220): NCBI GI NO: 15220516 NR Description: expressed protein [Arabidopsis thaliana]
  misc_feature (1)..(220): NCBI GI NO: 34910820 NR Description: P0456A01.15
  misc_feature (1)..(197): NCBI GI NO: 32413853 NR Description: hypothetical protein [Neurospora crassa]
MKTMMIDKGAAMLQSFKPIKQMSLHMCSFACYGHDPSRQIEVHFYVHRVNEDFLQCAVYDCDSAKTHLIGIEYIVSERLFESLSSEEQKLWHSHDYEIQTGLLMTPRVPELVAKPELQNIAKTYGKFWCTWQTDRGDKLPLGAPALMMSPQDVNIGKIKPGLLKKRDDEYGISTESLKTSRAEIVGLERKNPMADYWVHHGKGFAVDIIETDMKKCAPFP

SEQ ID NO: 20806 - DNA, 1438 bp, Zea mays subsp. mays
  misc_feature (1)..(1438): Ceres Seq. ID no. 15179955
ataagttcactctctcaccatgttcttctgacgatgctctcatcatcatcgtccttgatctattctcatctcattcaccacttcagttgtatttgaatcatctcattcaccacttcagttgtatttgaaagtcagtttcaaactcctgagatctatttgtttccccaagaaaacagcttgttttcaactcccgtcgtgtctgaagcctctagtacttgttctttccttttctgtcagctacagtttccttattgggagtttgtgtcacgactcacgacgaccttatagatcgtttgatcggaacctagaaatatatcaaaatgggtaaaaccgccgggaacagagactgggctcagatctacgctatatacggtattgaacaatggcagacgctcgtcttccttctcttccatgccttcgtcttctccctcctctccgtcctcttcctcatctacttcgaccagatttgcttcttcctcgactccttcttcctctccggcgccgccagactagccgcagggttcaccggcgcagtcaccgctctttccgccgtgtgcctcctcttcgccgccgctaatttcctctactccgacgttccgctccagtacaagatggctcagcgcatggtcagctccgtcggcgactggtcgtgcgtcaaaacggctctcgatctcggctgcggacgcggcattctcctcaatgccgtcgctactcagctcaagaaaaccggtagctccggtcgggtcgtcgggttagaccggtccaaacgcaccactctctcaactctccgcaccgccaaactcgaaggtgtgcaagagtacgtgacttgtcgggaaggagacgtgaggacgttaccgtttggggataactacttcgacgtggtggtctcgtcggtgtttgtgcacactgtggggaaagagcacggtcagaagtcggtggaggctgcggcggagaggatgagggtgttaggggagatagtgagagtagttaagcctggaggcttgtgcgtggtgtgggatctcttacacgtgcctgagtacgtgcggagactccaggagttaaagatggaggatatccgagtctctgagcgagtcacggcgtttatggctgcaagccacatcgtgtcgttccgtaaacctagcgaactcgtcgccggaccacgtgaagtccggctcgattggagatgctgacgtggatttttaaaacggcagtgtcggttggttatattatcaaacggcacgtagtacaagtcgggaggttggaaacgatgattgtgattatactgtattattttagttacgaatattaaaacttagaaatttaaatactggggaggcgaagcggaaccagattagcttgttaatggccgcgttttgatctttgtatttatttatacaaacaatactattaatataatcagatctttattatggtgctg

SEQ ID NO: 20807 - protein, 289 aa, Zea mays subsp. mays
  peptide (1)..(289): Ceres Seq. ID no. 15179956
  misc_feature (1)..(288): NCBI GI NO: 18400797 NR Description: expressed protein [Arabidopsis thaliana]
  misc_feature (1)..(289): NCBI GI NO: 15239632 NR Description: expressed protein [Arabidopsis thaliana]
  misc_feature (64)..(273): NCBI GI NO: 22971588 NR Description: hypothetical protein [Chloroflexus aurantiacus]
MGKTAGNRDWAQIYAIYGIEQWQTLVFLLFHAFVFSLLSVLFLIYFDQICFFLDSFFLSGAARLAAGFTGAVTALSAVCLLFAAANFLYSDVPLQYKMAQRMVSSVGDWSCVKTALDLGCGRGILLNAVATQLKKTGSSGRVVGLDRSKRTTLSTLRTAKLEGVQEYVTCREGDVRTLPFGDNYFDVVVSSVFVHTVGKEHGQKSVEAAAERMRVLGEIVRVVKPGGLCVVWDLLHVPEYVRRLQELKMEDIRVSERVTAFMAASHIVSFRKPSELVAGPREVRLDWRC

SEQ ID NO: 20808 - protein, 192 aa, Zea mays subsp. mays
  peptide (1)..(192): Ceres Seq. ID no. 15179957
  misc_feature (1)..(191): NCBI GI NO: 18400797 NR Description: expressed protein [Arabidopsis thaliana]
  misc_feature (1)..(192): NCBI GI NO: 15239632 NR Description: expressed protein [Arabidopsis thaliana]
  misc_feature (1)..(176): NCBI GI NO: 22971588 NR Description: hypothetical protein [Chloroflexus aurantiacus]
MAQRMVSSVGDWSCVKTALDLGCGRGILLNAVATQLKKTGSSGRVVGLDRSKRTTLSTLRTAKLEGVQEYVTCREGDVRTLPFGDNYFDVVVSSVFVHTVGKEHGQKSVEAAAERMRVLGEIVRVVKPGGLCVVWDLLHVPEYVRRLQELKMEDIRVSERVTAFMAASHIVSFRKPSELVAGPREVRLDWRC

SEQ ID NO: 20809 - protein, 188 aa, Zea mays subsp. mays
  peptide (1)..(188): Ceres Seq. ID no. 15179958
  misc_feature (1)..(187): NCBI GI NO: 18400797 NR Description: expressed protein [Arabidopsis thaliana]
  misc_feature (1)..(188): NCBI GI NO: 15239632 NR Description: expressed protein [Arabidopsis thaliana]
  misc_feature (1)..(172): NCBI GI NO: 22971588 NR Description: hypothetical protein [Chloroflexus aurantiacus]
MVSSVGDWSCVKTALDLGCGRGILLNAVATQLKKTGSSGRVVGLDRSKRTTLSTLRTAKLEGVQEYVTCREGDVRTLPFGDNYFDVVVSSVFVHTVGKEHGQKSVEAAAERMRVLGEIVRVVKPGGLCVVWDLLHVPEYVRRLQELKMEDIRVSERVTAFMAASHIVSFRKPSELVAGPREVRLDWRC

SEQ ID NO: 20810 - DNA, 892 bp, Zea mays subsp. mays
  misc_feature (1)..(892): Ceres Seq. ID no. 15179952
gaaaaatctctactcgtttccggaagaagatgactggagttgatgatgacaaggagttcaaagaggaaaccgtgattctcagcgacgacgacagtgaagtggaagaagttaaagacggaggagaagaaggctccgacgaggaagaagaagaagaagtcgatggaagtgaaggtgacgatgatgaggaagatgaagacgacgacgaggtccaggttttgcagtccctaggtgggcctccggtacagtcggctgaagacgaagatgaggaaggagaagaagacggaaacggagacgatgatgatgatgatgacgatgacgacgacgatgacgacgacgaggacgacgaagatggtgaagatgaggaggatcttgggactgattacctagtgaggccaattggtcgggctgaagatgaagaggatgcgagtgatttcgagcctgaagagaatggtgtggaggaagacatcgatgaaggtgaagatgacgacgagaatgataactcgggtgcgggaaaatctgaggctcctcccaagaggaagagaggagctgctgaggaagaggaagaggaggatagtgatgatgaagatgatgcaagacctccgaagaggtagttttcgaggaatttgacaacaacagcatggttcaaacaaacagatagagagcgttatggcttttttttttaaaaaagaaaatttggagtcgtgagatttgaatcattggttggggttcatgtaagtttattatggagcaagacttagtagtttaagttgagtaggggcttttttttttttttctttctcattttatgcaaatgttgtttctttttctagtgagtcaataaccaatgtttctggaacgatttgctgtctaatgctatttctctatcagttac

SEQ ID NO: 20811 - protein, 202 aa, Zea mays subsp. mays
  peptide (1)..(202): Ceres Seq. ID no. 15179953
  misc_feature (34)..(196): Pfam Name: Pfam Description:  Chromadorea ALT protein
  misc_feature (10)..(202): NCBI GI NO: 18401985 NR Description: expressed protein [Arabidopsis thaliana]
  misc_feature (15)..(196): NCBI GI NO: 34894890 NR Description: B1140D12.10
  misc_feature (64)..(202): NCBI GI NO: 30684391 NR Description: expressed protein [Arabidopsis thaliana]
  misc_feature (64)..(202): NCBI GI NO: 28393370 NR Description: unknown protein [Arabidopsis thaliana]
  misc_feature (14)..(196): NCBI GI NO: 35210494 NR Description: aspartic acid-rich protein aspolin2
  misc_feature (14)..(196): NCBI GI NO: 35210494 NR Description: aspartic acid-rich protein aspolin2
  misc_feature (16)..(196): NCBI GI NO: 35210492 NR Description: aspartic acid-rich protein aspolin1
  misc_feature (16)..(196): NCBI GI NO: 35210494 NR Description: aspartic acid-rich protein aspolin2
  misc_feature (14)..(196): NCBI GI NO: 35210494 NR Description: aspartic acid-rich protein aspolin2
  misc_feature (14)..(196): NCBI GI NO: 35210492 NR Description: aspartic acid-rich protein aspolin1
KISTRFRKKMTGVDDDKEFKEETVILSDDDSEVEEVKDGGEEGSDEEEEEEVDGSEGDDDEEDEDDDEVQVLQSLGGPPVQSAEDEDEEGEEDGNGDDDDDDDDDDDDDDDEDDEDGEDEEDLGTDYLVRPIGRAEDEEDASDFEPEENGVEEDIDEGEDDDENDNSGAGKSEAPPKRKRGAAEEEEEEDSDDEDDARPPKR

SEQ ID NO: 20812 - protein, 193 aa, Zea mays subsp. mays
  peptide (1)..(193): Ceres Seq. ID no. 15179954
  misc_feature (25)..(187): Pfam Name: Pfam Description:  Chromadorea ALT protein
  misc_feature (1)..(193): NCBI GI NO: 18401985 NR Description: expressed protein [Arabidopsis thaliana]
  misc_feature (6)..(187): NCBI GI NO: 34894890 NR Description: B1140D12.10
  misc_feature (55)..(193): NCBI GI NO: 30684391 NR Description: expressed protein [Arabidopsis thaliana]
  misc_feature (55)..(193): NCBI GI NO: 28393370 NR Description: unknown protein [Arabidopsis thaliana]
  misc_feature (5)..(187): NCBI GI NO: 35210494 NR Description: aspartic acid-rich protein aspolin2
  misc_feature (5)..(187): NCBI GI NO: 35210494 NR Description: aspartic acid-rich protein aspolin2
  misc_feature (7)..(187): NCBI GI NO: 35210492 NR Description: aspartic acid-rich protein aspolin1
  misc_feature (7)..(187): NCBI GI NO: 35210494 NR Description: aspartic acid-rich protein aspolin2
  misc_feature (5)..(187): NCBI GI NO: 35210494 NR Description: aspartic acid-rich protein aspolin2
  misc_feature (5)..(187): NCBI GI NO: 35210492 NR Description: aspartic acid-rich protein aspolin1
MTGVDDDKEFKEETVILSDDDSEVEEVKDGGEEGSDEEEEEEVDGSEGDDDEEDEDDDEVQVLQSLGGPPVQSAEDEDEEGEEDGNGDDDDDDDDDDDDDDDEDDEDGEDEEDLGTDYLVRPIGRAEDEEDASDFEPEENGVEEDIDEGEDDDENDNSGAGKSEAPPKRKRGAAEEEEEEDSDDEDDARPPKR

SEQ ID NO: 20813 - DNA, 666 bp, Zea mays subsp. mays
  misc_feature (1)..(666): Ceres Seq. ID no. 15175146
gcatgtgagttgctaattactactctcttcttctattattaactttcttcctcttcttcttcttcgcttccctctccagcatcgccatggcagctgctccgcctcttactctcctcatcgctctctctcttctcttcatttcactccagagatctgaatctctccccgagaatccatccatgattcttctaggcgacggattcgactggccgatctctcacggcgacgcattagacatcgacggaggagaaagctttgaagatgcggaggaggaagatgtcgcggatcgacggtcattgtactggaagaggaggagatactacatctcttacggcgcattgtcggcgaacagagtcccgtgtcctcccagatctggaagatcgtactacactcacaactgcttcagagctagaggtcaggtgcatccctacagtcgaggctgctcctccatcactcggtgccggagatagaagaaaccacgggggcattctcgtaattttccaatcacggactctgtttgtagttctcgttcgatttcgatgtgttgtgtagtaaaccgtgattagttacgtttgtttaaattaattaagcccgcggtattattattattcgagtgatatctatatgtattcaactttgtggtaattgttatttattttgtcggtg

SEQ ID NO: 20814 - protein, 127 aa, Zea mays subsp. mays
  peptide (1)..(127): Ceres Seq. ID no. 15175147
  misc_feature (56)..(127): Pfam Name: RALF Pfam Description: Rapid ALkalinization Factor
  misc_feature (3)..(127): NCBI GI NO: 15240191 NR Description: expressed protein [Arabidopsis thaliana]
  misc_feature (3)..(127): NCBI GI NO: 21593826 NR Description: unknown [Arabidopsis thaliana]
  misc_feature (46)..(127): NCBI GI NO: 18401177 NR Description: expressed protein [Arabidopsis thaliana]
  misc_feature (31)..(126): NCBI GI NO: 16566316 NR Description: RALF precursor [Nicotiana tabacum]
  misc_feature (58)..(127): NCBI GI NO: 18397246 NR Description: expressed protein [Arabidopsis thaliana]
  misc_feature (58)..(127): NCBI GI NO: 18414528 NR Description: expressed protein [Arabidopsis thaliana]
  misc_feature (53)..(126): NCBI GI NO: 34915062 NR Description: P0025H06.15
  misc_feature (52)..(126): NCBI GI NO: 28628203 NR Description: rapid alkalinization factor 1 precursor
  misc_feature (58)..(126): NCBI GI NO: 28628205 NR Description: rapid alkalinization factor 2 precursor
MAAAPPLTLLIALSLLFISLQRSESLPENPSMILLGDGFDWPISHGDALDIDGGESFEDAEEEDVADRRSLYWKRRRYYISYGALSANRVPCPPRSGRSYYTHNCFRARGQVHPYSRGCSSITRCRR

SEQ ID NO: 20815 - protein, 96 aa, Zea mays subsp. mays
  peptide (1)..(96): Ceres Seq. ID no. 15175148
  misc_feature (25)..(96): Pfam Name: RALF Pfam Description: Rapid ALkalinization Factor
  misc_feature (1)..(96): NCBI GI NO: 15240191 NR Description: expressed protein [Arabidopsis thaliana]
  misc_feature (1)..(96): NCBI GI NO: 21593826 NR Description: unknown [Arabidopsis thaliana]
  misc_feature (15)..(96): NCBI GI NO: 18401177 NR Description: expressed protein [Arabidopsis thaliana]
  misc_feature (1)..(95): NCBI GI NO: 16566316 NR Description: RALF precursor [Nicotiana tabacum]
  misc_feature (27)..(96): NCBI GI NO: 18397246 NR Description: expressed protein [Arabidopsis thaliana]
  misc_feature (27)..(96): NCBI GI NO: 18414528 NR Description: expressed protein [Arabidopsis thaliana]
  misc_feature (22)..(95): NCBI GI NO: 34915062 NR Description: P0025H06.15
  misc_feature (21)..(95): NCBI GI NO: 28628203 NR Description: rapid alkalinization factor 1 precursor
  misc_feature (27)..(95): NCBI GI NO: 28628205 NR Description: rapid alkalinization factor 2 precursor
MILLGDGFDWPISHGDALDIDGGESFEDAEEEDVADRRSLYWKRRRYYISYGALSANRVPCPPRSGRSYYTHNCFRARGQVHPYSRGCSSITRCRR

SEQ ID NO: 20816 - protein, 96 aa, Zea mays subsp. mays
  peptide (1)..(96): Ceres Seq. ID no. 15175149
MRRRKMSRIDGHCTGRGGDTTSLTAHCRRTESRVLPDLEDRTTLTTASELEVRCIPTVEAAPPSLGAGDRRNHGGILVIFQSRTLFVVLVRFRCVV

SEQ ID NO: 20817 - DNA, 723 bp, Zea mays subsp. mays
  misc_feature (1)..(723): Ceres Seq. ID no. 15179206
atattcttctccttccgagtggtcgttagatcagatctcttcgtgttttacatttccaatggcgtcctcctgtgttgctaatctttctctgtcaggtgtgtctcaatctcattatgtcaaggcaaatggaatgtctaccgcaaagctcaactcgatttgtaaaacctctgcattgagtatccagaagagatcaaaccggagtcgcaagttttcagtttctgcagagtatgggagtaggagaggaagtggtggtggtgatttcgtagctggttttcttcttggtggtgctttgtttggtgctgcagcctatatctttgctccacaaatacgaagatcgataatgagtgaagaagatgagtatggtttcaagaagccagatcaaccaagttactacgatgaaggtttagagaaaacaagggagaccttgaacgagaaaatcggacagcttaactcagctattgacaatgtctcttcgcgtttaagaggtcgagcaaagaagacttcttccccggtcgaaactgatccagaagttgaagctactacttgagaaagaacacaaaatactttgcttcttctctgtttttttttttttccattcgtaattgatctgttgtgcttcttcttcttatctgttgctgctgtgcttcagttagaactcgtgcaaagtggaaaaatatacagtcttttggttttagtgaattttaatttggtttaactcaattc

SEQ ID NO: 20818 - protein, 181 aa, Zea mays subsp. mays
  peptide (1)..(181): Ceres Seq. ID no. 15179207
  misc_feature (22)..(181): NCBI GI NO: 22326856 NR Description: protein; similar to unknown protein (gb|AAF26969
  misc_feature (22)..(181): NCBI GI NO: 17065406 NR Description: Unknown protein [Arabidopsis thaliana]
  misc_feature (32)..(181): NCBI GI NO: 10176975 NR Description: protein; similar to unknown protein
  misc_feature (20)..(180): NCBI GI NO: 15233017 NR Description: expressed protein [Arabidopsis thaliana]
  misc_feature (20)..(180): NCBI GI NO: 18400762 NR Description: expressed protein [Arabidopsis thaliana]
  misc_feature (22)..(76): NCBI GI NO: 11357804 NR Description: hypothetical protein F5E19_10 - Arabidopsisthaliana
YSSPSEWSLDQISSCFTFPMASSCVANLSLSGVSQSHYVKANGMSTAKLNSICKTSALSIQKRSNRSRKFSVSAEYGSRRGSGGGDFVAGFLLGGALFGAAAYIFAPQIRRSIMSEEDEYGFKKPDQPSYYDEGLEKTRETLNEKIGQLNSAIDNVSSRLRGRAKKTSSPVETDPEVEATT

SEQ ID NO: 20819 - protein, 162 aa, Zea mays subsp. mays
  peptide (1)..(162): Ceres Seq. ID no. 15179208
  misc_feature (3)..(162): NCBI GI NO: 22326856 NR Description: protein; similar to unknown protein (gb|AAF26969
  misc_feature (3)..(162): NCBI GI NO: 17065406 NR Description: Unknown protein [Arabidopsis thaliana]
  misc_feature (13)..(162): NCBI GI NO: 10176975 NR Description: protein; similar to unknown protein
  misc_feature (1)..(161): NCBI GI NO: 15233017 NR Description: expressed protein [Arabidopsis thaliana]
  misc_feature (1)..(161): NCBI GI NO: 18400762 NR Description: expressed protein [Arabidopsis thaliana]
  misc_feature (3)..(57): NCBI GI NO: 11357804 NR Description: hypothetical protein F5E19_10 - Arabidopsisthaliana
MASSCVANLSLSGVSQSHYVKANGMSTAKLNSICKTSALSIQKRSNRSRKFSVSAEYGSRRGSGGGDFVAGFLLGGALFGAAAYIFAPQIRRSIMSEEDEYGFKKPDQPSYYDEGLEKTRETLNEKIGQLNSAIDNVSSRLRGRAKKTSSPVETDPEVEATT

SEQ ID NO: 20820 - protein, 138 aa, Zea mays subsp. mays
  peptide (1)..(138): Ceres Seq. ID no. 15179209
  misc_feature (1)..(138): NCBI GI NO: 22326856 NR Description: protein; similar to unknown protein (gb|AAF26969
  misc_feature (1)..(138): NCBI GI NO: 17065406 NR Description: Unknown protein [Arabidopsis thaliana]
  misc_feature (1)..(138): NCBI GI NO: 10176975 NR Description: protein; similar to unknown protein
  misc_feature (1)..(137): NCBI GI NO: 15233017 NR Description: expressed protein [Arabidopsis thaliana]
  misc_feature (1)..(137): NCBI GI NO: 18400762 NR Description: expressed protein [Arabidopsis thaliana]
  misc_feature (1)..(33): NCBI GI NO: 11357804 NR Description: hypothetical protein F5E19_10 - Arabidopsisthaliana
MSTAKLNSICKTSALSIQKRSNRSRKFSVSAEYGSRRGSGGGDFVAGFLLGGALFGAAAYIFAPQIRRSIMSEEDEYGFKKPDQPSYYDEGLEKTRETLNEKIGQLNSAIDNVSSRLRGRAKKTSSPVETDPEVEATT

SEQ ID NO: 20821 - DNA, 872 bp, Zea mays subsp. mays
  misc_feature (1)..(872): Ceres Seq. ID no. 15179153
aatcggaaaattctagagcatcgagagtttcttcaatggcgaatctccccaccgttctcgttaccggcgctagtggcaaaacaggtcagattgtgtacaagaagctgaaggagaggtcagacaagtttgtggcgaaggggttagtgagaactcctcaagggaaagaggagattggaggagaagatgatgtgttcattggtgatataagggatgctgatagcattacccctgcgattcaagggatcgatgcgcttgtgattctcactagcgctgtgcccaagatgaaacctgggtttgatcccactaaaggtggaagacctgagttcattttcgatgatggacaataccctgaacaggttgattggattggccagaagaaccaaatagatgctgccaaggctgctggtgttaagcatattgtcttggttgggtccatgggtggaacaaatcctgatcatcctctcaacaaactgggaaatgggaacatactgatttggaagaggaaagctgaacagtaccttgctgattctggtactccttacacaataatcagagctggaggacttctagacaaagaaggaggtgcacgagagctcctagttggcaaagacgatgagcttcttcaaacagacaccaaaaccgtccccagggctgatgttgctgaagtctgcattcaggcattgctgttcgaggaagctaagaataaagcatttgatctcggttcaaaaccagagggaaccagttctcccaccaatgacttcaaggctctcttctctcaagtcatcgctcgtttttagatcttctatctctattgcaactgaataatttgtgttgtaatgtaccaaaccttttaaaataaaatctccgggtcc

SEQ ID NO: 20822 - protein, 264 aa, Zea mays subsp. mays
  peptide (1)..(264): Ceres Seq. ID no. 15179154
  misc_feature (117)..(248): Pfam Name: Pfam Description:  Isoflavone reductase
  misc_feature (12)..(264): NCBI GI NO: 18413869 NR Description: expressed protein [Arabidopsis thaliana]
  misc_feature (12)..(259): NCBI GI NO: 11358410 NR Description: hypothetical protein T7H20
  misc_feature (11)..(264): NCBI GI NO: 34897418 NR Description: unknown protein
  misc_feature (2)..(264): NCBI GI NO: 18404496 NR Description: expressed protein [Arabidopsis thaliana]
  misc_feature (9)..(264): NCBI GI NO: 14719331 NR Description: putative 3-beta hydroxysteroiddehydrogenase/isomerase protein
  misc_feature (2)..(264): NCBI GI NO: 7485430 NR Description: hypothetical protein At2g37660
  misc_feature (103)..(260): NCBI GI NO: 16330694 NR Description: hypothetical protein [Synechocystis sp. PCC 6803]
  misc_feature (103)..(260): NCBI GI NO: 23130188 NR Description: hypothetical protein [Nostoc punctiforme]
  misc_feature (103)..(259): NCBI GI NO: 17230243 NR Description: hypothetical protein [Nostoc sp. PCC 7120]
  misc_feature (117)..(250): NCBI GI NO: 37523053 NR Description: hypothetical protein gll3484
SENSRASRVSSMANLPTVLVTGASGKTGQIVYKKLKERSDKFVAKGLVRTPQGKEEIGGEDDVFIGDIRDADSITPAIQGIDALVILTSAVPKMKPGFDPTKGGRPEFIFDDGQYPEQVDWIGQKNQIDAAKAAGVKHIVLVGSMGGTNPDHPLNKLGNGNILIWKRKAEQYLADSGTPYTIIRAGGLLDKEGGARELLVGKDDELLQTDTKTVPRADVAEVCIQALLFEEAKNKAFDLGSKPEGTSSPTNDFKALFSQVIARF

SEQ ID NO: 20823 - protein, 253 aa, Zea mays subsp. mays; identical to SEQ ID NO: 7044
  peptide (1)..(253): Ceres Seq. ID no. 15179155
  misc_feature (106)..(237): Pfam Name: Pfam Description:  Isoflavone reductase
  misc_feature (1)..(253): NCBI GI NO: 18413869 NR Description: expressed protein [Arabidopsis thaliana]
  misc_feature (1)..(248): NCBI GI NO: 11358410 NR Description: hypothetical protein T7H20
  misc_feature (1)..(253): NCBI GI NO: 34897418 NR Description: unknown protein
  misc_feature (1)..(253): NCBI GI NO: 18404496 NR Description: expressed protein [Arabidopsis thaliana]
  misc_feature (1)..(253): NCBI GI NO: 14719331 NR Description: putative 3-beta hydroxysteroiddehydrogenase/isomerase protein
  misc_feature (1)..(253): NCBI GI NO: 7485430 NR Description: hypothetical protein At2g37660
  misc_feature (92)..(249): NCBI GI NO: 16330694 NR Description: hypothetical protein [Synechocystis sp. PCC 6803]
  misc_feature (92)..(249): NCBI GI NO: 23130188 NR Description: hypothetical protein [Nostoc punctiforme]
  misc_feature (92)..(248): NCBI GI NO: 17230243 NR Description: hypothetical protein [Nostoc sp. PCC 7120]
  misc_feature (106)..(239): NCBI GI NO: 37523053 NR Description: hypothetical protein gll3484

SEQ ID NO: 20824 - protein, 171 aa, Zea mays subsp. mays; identical to SEQ ID NO: 7045
  peptide (1)..(171): Ceres Seq. ID no. 15179156
  misc_feature (24)..(155): Pfam Name: Pfam Description:  Isoflavone reductase
  misc_feature (1)..(171): NCBI GI NO: 18413869 NR Description: expressed protein [Arabidopsis thaliana]
  misc_feature (1)..(166): NCBI GI NO: 11358410 NR Description: hypothetical protein T7H20
  misc_feature (1)..(171): NCBI GI NO: 34897418 NR Description: unknown protein
  misc_feature (1)..(171): NCBI GI NO: 18404496 NR Description: expressed protein [Arabidopsis thaliana]
  misc_feature (1)..(171): NCBI GI NO: 14719331 NR Description: putative 3-beta hydroxysteroiddehydrogenase/isomerase protein
  misc_feature (1)..(171): NCBI GI NO: 7485430 NR Description: hypothetical protein At2g37660
  misc_feature (10)..(167): NCBI GI NO: 16330694 NR Description: hypothetical protein [Synechocystis sp. PCC 6803]
  misc_feature (10)..(167): NCBI GI NO: 23130188 NR Description: hypothetical protein [Nostoc punctiforme]
  misc_feature (10)..(166): NCBI GI NO: 17230243 NR Description: hypothetical protein [Nostoc sp. PCC 7120]
  misc_feature (24)..(157): NCBI GI NO: 37523053 NR Description: hypothetical protein gll3484

SEQ ID NO: 20825 - DNA, 1853 bp, Zea mays subsp. mays
  misc_feature (1)..(1853): Ceres Seq. ID no. 15180063
ctgtggtatccgtatctcccccttttactcatctaggaaatggctctccggcgagtatccgccaccgtaatcctcttcctctacttactattttccgctcactctctcgattccaaacaccacaagatcgaaggaccgatcaagaccatagtcgttgtagtcatggagaatcgctccttcgaccacatcctcggctggctcaaaccaacccgacccgaaatcgacggattaaccgggaaagagtcaaaccccctcaacgcctccgatccaaactccaaaaagatctacgtctcgaacgacgccgttttcgtcgacatggatcctggccattccttccaagccatccgagagcagatattcgggtccaacgacacctccggcgacccgaaaatgaacggattcgcgcaggaggcggagagcatggagccagggatggccaagaacgtgatgtccgggttcaaacccgaggtcctgcccgtttacaccgagctagcaaacgagttcgggatattcgaccggtggttcgcgtcggttccgacttccactcagccaaaccggttctacgtccactcggccacctcccacggatgctccagcaacgtgaagaaggatctcatcagaggcttccctcagaagacgattttcgattctctagaagagacggggctcagcttcgggatctattaccagaacatccccgccaccttcttcttcaagtctctccgcaggcttaaacacttggtgaagtttcacagctacgcgctcaagttcaagctccacgcgaagctcgggaagcttccgaactattcggtgatcgagcagaggtatttcgatattgatctgttcccggcgaatgacgatcacccgtcgcatgacgtggcggcggggcagaagtttgttaaggaagtgtacgagacgttaaggagtagtccgcagtgggatgagatggctttgattattacttatgatgagcacggcgggttttatgatcatgtgcccacgccggttaagggtgtgccgaaccctgatgggattattggaccggatccgttttatttcgggttcgaccggttgggtgttcgggttcctactttcattatctctccttggattgagaagggcactgtgatacatgaacctgatggtcctacaccaacttcacagtatgagcattcttctataccagcaacagtgaagaaactttttaaccttaagtctcatttccttaccaagagagatgcgtgggctggtacatttgagaagtacttccgtgtccgagactctcctcgccaagattgtccagagaaactagcagaagttgaacgatcactaaggccatggggagcaaaagaagactcaaagctttcagagttccaggtggagctgatccagctcgcttctcaactcgttggagaccatctcctaaactcatatccagacattgggaaaaacatgacagtacgtgaaggcaacaaatacgcagaggatgctgttcagaagtttttagaagctggcaaggctgccctggaagcaggagcggacgagagcactatagtcactatgaggccgtctctgacgaccaggaccagtcccagtgaaggtatcaacaagtatactggaagctattgaaaaatctataaataaaggaatgaaatgatatgtaaatacatgtggctacatctatgttcccactttacttagatacgttctatgatgtggaaaaaaggtatatacttatgtatgttatgtaatggatcaaaagacatggtaacgttatgttgctcctgacctccatctccttagtaggaataagatggagagttcttgtaatactaatacatatatacttatcc

SEQ ID NO: 20826 - protein, 529 aa, Zea mays subsp. mays
  peptide (1)..(529): Ceres Seq. ID no. 15180064
  misc_feature (34)..(409): Pfam Name: Pfam Description:  Phosphoesterase family
  misc_feature (1)..(529): NCBI GI NO: 21703147 NR Description: At1g07230/F10K1_4 [Arabidopsis thaliana]
  misc_feature (1)..(529): NCBI GI NO: 15222342 NR Description: phosphoesterase family [Arabidopsis thaliana]
  misc_feature (11)..(523): NCBI GI NO: 34897344 NR Description: putative phospholipase [Oryza sativa]
  misc_feature (27)..(515): NCBI GI NO: 15225806 NR Description: phosphoesterase family [Arabidopsis thaliana]
  misc_feature (33)..(519): NCBI GI NO: 20161866 NR Description: B1139B11.7
  misc_feature (12)..(515): NCBI GI NO: 30693062 NR Description: phosphoesterase family [Arabidopsis thaliana]
  misc_feature (33)..(524): NCBI GI NO: 15228577 NR Description: phosphoesterase family [Arabidopsis thaliana]
  misc_feature (33)..(524): NCBI GI NO: 17529016 NR Description: unknown protein [Arabidopsis thaliana]
  misc_feature (33)..(506): NCBI GI NO: 18396577 NR Description: phosphoesterase family [Arabidopsis thaliana]
  misc_feature (11)..(495): NCBI GI NO: 34894016 NR Description: P0672D08.18
MALRRVSATVILFLYLLFSAHSLDSKHHKIEGPIKTIVVVVMENRSFDHILGWLKPTRPEIDGLTGKESNPLNASDPNSKKIYVSNDAVFVDMDPGHSFQAIREQIFGSNDTSGDPKMNGFAQEAESMEPGMAKNVMSGFKPEVLPVYTELANEFGIFDRWFASVPTSTQPNRFYVHSATSHGCSSNVKKDLIRGFPQKTIFDSLEETGLSFGIYYQNIPATFFFKSLRRLKHLVKFHSYALKFKLHAKLGKLPNYSVIEQRYFDIDLFPANDDHPSHDVAAGQKFVKEVYETLRSSPQWDEMALIITYDEHGGFYDHVPTPVKGVPNPDGIIGPDPFYFGFDRLGVRVPTFIISPWIEKGTVIHEPDGPTPTSQYEHSSIPATVKKLFNLKSHFLTKRDAWAGTFEKYFRVRDSPRQDCPEKLAEVERSLRPWGAKEDSKLSEFQVELIQLASQLVGDHLLNSYPDIGKNMTVREGNKYAEDAVQKFLEAGKAALEAGADESTIVTMRPSLTTRTSPSEGINKYTGSY

SEQ ID NO: 20827 - protein, 488 aa, Zea mays subsp. mays
  peptide (1)..(488): Ceres Seq. ID no. 15180065
  misc_feature (1)..(368): Pfam Name: Pfam Description:  Phosphoesterase family
  misc_feature (1)..(488): NCBI GI NO: 21703147 NR Description: At1g07230/F10K1_4 [Arabidopsis thaliana]
  misc_feature (1)..(488): NCBI GI NO: 15222342 NR Description: phosphoesterase family [Arabidopsis thaliana]
  misc_feature (1)..(482): NCBI GI NO: 34897344 NR Description: putative phospholipase [Oryza sativa]
  misc_feature (1)..(474): NCBI GI NO: 15225806 NR Description: phosphoesterase family [Arabidopsis thaliana]
  misc_feature (1)..(478): NCBI GI NO: 20161866 NR Description: B1139B11.7
  misc_feature (1)..(474): NCBI GI NO: 30693062 NR Description: phosphoesterase family [Arabidopsis thaliana]
  misc_feature (1)..(483): NCBI GI NO: 15228577 NR Description: phosphoesterase family [Arabidopsis thaliana]
  misc_feature (1)..(483): NCBI GI NO: 17529016 NR Description: unknown protein [Arabidopsis thaliana]
  misc_feature (1)..(465): NCBI GI NO: 18396577 NR Description: phosphoesterase family [Arabidopsis thaliana]
  misc_feature (1)..(454): NCBI GI NO: 34894016 NR Description: P0672D08.18
MENRSFDHILGWLKPTRPEIDGLTGKESNPLNASDPNSKKIYVSNDAVFVDMDPGHSFQAIREQIFGSNDTSGDPKMNGFAQEAESMEPGMAKNVMSGFKPEVLPVYTELANEFGIFDRWFASVPTSTQPNRFYVHSATSHGCSSNVKKDLIRGFPQKTIFDSLEETGLSFGIYYQNIPATFFFKSLRRLKHLVKFHSYALKFKLHAKLGKLPNYSVIEQRYFDIDLFPANDDHPSHDVAAGQKFVKEVYETLRSSPQWDEMALIITYDEHGGFYDHVPTPVKGVPNPDGIIGPDPFYFGFDRLGVRVPTFIISPWIEKGTVIHEPDGPTPTSQYEHSSIPATVKKLFNLKSHFLTKRDAWAGTFEKYFRVRDSPRQDCPEKLAEVERSLRPWGAKEDSKLSEFQVELIQLASQLVGDHLLNSYPDIGKNMTVREGNKYAEDAVQKFLEAGKAALEAGADESTIVTMRPSLTTRTSPSEGINKYTGSY

SEQ ID NO: 20828 - protein, 437 aa, Zea mays subsp. mays
  peptide (1)..(437): Ceres Seq. ID no. 15180066
  misc_feature (1)..(317): Pfam Name: Pfam Description:  Phosphoesterase family
  misc_feature (1)..(437): NCBI GI NO: 21703147 NR Description: At1g07230/F10K1_4 [Arabidopsis thaliana]
  misc_feature (1)..(437): NCBI GI NO: 15222342 NR Description: phosphoesterase family [Arabidopsis thaliana]
  misc_feature (1)..(431): NCBI GI NO: 34897344 NR Description: putative phospholipase [Oryza sativa]
  misc_feature (1)..(423): NCBI GI NO: 15225806 NR Description: phosphoesterase family [Arabidopsis thaliana]
  misc_feature (1)..(427): NCBI GI NO: 20161866 NR Description: B1139B11.7
  misc_feature (1)..(423): NCBI GI NO: 30693062 NR Description: phosphoesterase family [Arabidopsis thaliana]
  misc_feature (1)..(432): NCBI GI NO: 15228577 NR Description: phosphoesterase family [Arabidopsis thaliana]
  misc_feature (1)..(432): NCBI GI NO: 17529016 NR Description: unknown protein [Arabidopsis thaliana]
  misc_feature (1)..(414): NCBI GI NO: 18396577 NR Description: phosphoesterase family [Arabidopsis thaliana]
  misc_feature (1)..(403): NCBI GI NO: 34894016 NR Description: P0672D08.18
MDPGHSFQAIREQIFGSNDTSGDPKMNGFAQEAESMEPGMAKNVMSGFKPEVLPVYTELANEFGIFDRWFASVPTSTQPNRFYVHSATSHGCSSNVKKDLIRGFPQKTIFDSLEETGLSFGIYYQNIPATFFFKSLRRLKHLVKFHSYALKFKLHAKLGKLPNYSVIEQRYFDIDLFPANDDHPSHDVAAGQKFVKEVYETLRSSPQWDEMALIITYDEHGGFYDHVPTPVKGVPNPDGIIGPDPFYFGFDRLGVRVPTFIISPWIEKGTVIHEPDGPTPTSQYEHSSIPATVKKLFNLKSHFLTKRDAWAGTFEKYFRVRDSPRQDCPEKLAEVERSLRPWGAKEDSKLSEFQVELIQLASQLVGDHLLNSYPDIGKNMTVREGNKYAEDAVQKFLEAGKAALEAGADESTIVTMRPSLTTRTSPSEGINKYTGSY

SEQ ID NO: 20829 - DNA, 1181 bp, Zea mays subsp. mays
  misc_feature (1)..(1181): Ceres Seq. ID no. 15179157
aaaattaaattaaaaaacaaaaacctctctgttctccccaaaaatggcacacactcaccgtcttgccgtccttctcatcctcctctccgccaccatcggcttctcctccgccgcgttggtcgaagagcagcctctggtgcttaagtaccacaacggcattctcttgaaaggaaacgtcactctcaacctcgtctggtacgggaagttcacctcaatccaacggtcaatcatcgtcgacttcatccgctctctcagctcctccgccgtcccatcaaaaggtccatccgtggcctcgtggtggaagacgacggagaagtacaaaggcggctcgtcgaagatcgtcgtcggtaaacagctcctcctcgagaactaccctctcggaaaatcgttaaagagtccttacctcagagctctctcggggaagctcaacggaggtggtgttcggtcgataaccgtcgttttaacggcgaaggacgtcgccgttgaaggattctgcatgaaccggtgcgggactcacggcgcgaaagcacgttccgttaacagcggagcttacgtctgggtgggaaactctgaaacgcagtgtgctggctactgcgcgtggccgtttcatcagccgatgtacggacctcagtctccgccgttaatcgcgcctaacggcgacgtcggagtcgacggaatgatcataaaccttgcgacgctactggttaacaccgtcacgaatccgtttaaaagcggttactttaacggcgggaatcaagaagccgtctcggtatgtaccgggatgttcgggtccggttcctacccgggttacgcgggtcgggtccttgtagacaagactaccggggcgagttacaacgccttgggactcgccgggaggaaatatcttttgccagcgatgtgggacccgcagacttcgaagtgtaagactttggtttgactttagacggtctagaaggagacacgtggcaagagatcaatggagatggagagttgaagcttatcggagccaaagaaagttgttgtagatatctatcttgtctgattgtacggaggagtttagggagggaagtggatgtgtttcttttgtcgttttgtgtgtcgtgtacattcgatcctggagatatgtgaaggatgggccatatatctaatttaatgccaataaataaaatcgatttgtagct

SEQ ID NO: 20830 - protein, 297 aa, Zea mays subsp. mays
  peptide (1)..(297): Ceres Seq. ID no. 15179158
  misc_feature (33)..(297): Pfam Name: Pfam Description:  Phosphate-induced protein 1 conserved region
  misc_feature (1)..(297): NCBI GI NO: 15237656 NR Description: phi-1-related protein [Arabidopsis thaliana]
  misc_feature (1)..(297): NCBI GI NO: 15242420 NR Description: expressed protein [Arabidopsis thaliana]
  misc_feature (8)..(297): NCBI GI NO: 31074969 NR Description: erg-1 [Solanum tuberosum]
  misc_feature (1)..(297): NCBI GI NO: 3759184 NR Description: phi-1 [Nicotiana tabacum]
  misc_feature (34)..(296): NCBI GI NO: 15219504 NR Description: phosphate-induced (phi-1) protein -related
  misc_feature (6)..(297): NCBI GI NO: 15236667 NR Description: phi-1 phosphate-induced protein -related
  misc_feature (6)..(297): NCBI GI NO: 21593043 NR Description: putative phi-1-like phosphate-induced protein
  misc_feature (34)..(231): NCBI GI NO: 11762144 NR Description: At1g35140 [Arabidopsis thaliana]
  misc_feature (129)..(296): NCBI GI NO: 13194680 NR Description: phosphate-induced protein 1-like protein
  misc_feature (33)..(293): NCBI GI NO: 25408357 NR Description: hypothetical protein At2g35150
MAHTHRLAVLLILLSATIGFSSAALVEEQPLVLKYHNGILLKGNVTLNLVWYGKFTSIQRSIIVDFIRSLSSSAVPSKGPSVASWWKTTEKYKGGSSKIVVGKQLLLENYPLGKSLKSPYLRALSGKLNGGGVRSITVVLTAKDVAVEGFCMNRCGTHGAKARSVNSGAYVWVGNSETQCAGYCAWPFHQPMYGPQSPPLIAPNGDVGVDGMIINLATLLVNTVTNPFKSGYFNGGNQEAVSVCTGMFGSGSYPGYAGRVLVDKTTGASYNALGLAGRKYLLPAMWDPQTSKCKTLV

SEQ ID NO: 20831 - DNA, 660 bp, Zea mays subsp. mays
  misc_feature (1)..(660): Ceres Seq. ID no. 15173998
attctcctctgcctctttcctcccggctcgcaaaaccctagtttcgaatctttaaccacaacagaaatggctttctgcaaaagtctcggtggtctactcagacaaggtgtggtttctcagaccggaaatattccggttacgtctgtgctcggttctctccggtacatgtctaccaagcttttcgttggaggtctgtcatggggaactgatgaccagtccttgagggaggcttttgcaaactttggtgaagtggtcgatgctaaagtcattgttgatagagaaacaggaaggtcaagaggttttggatttgtcaactttactgatgagaccgctgctaatactgccatttcagagatggatggaaaggatctgaatggacggagcattcgggtgaatgttgctaacgaaagaccaagtactccccggtatggcggaggtggtggctacggtggtggtggtggctacggtggtggtggctacggtggaggtagctatggagcaggtggtggtgatggtggcggttactaaacagagaagagtttcttgtgaaaagatttgatggtttttgtttagttgggtttctttgattgaatcttgtgttacaacttgaacctcgttagccattcatcgttttttcgattaacgtcttggattgatggt

SEQ ID NO: 20832 - protein, 175 aa, Zea mays subsp. mays
  peptide (1)..(175): Ceres Seq. ID no. 15173999
  misc_feature (60)..(131): Pfam Name: a.k.a. RRM, RBD, or RNP domain Pfam Description: RNA recognition motif.
  misc_feature (23)..(174): NCBI GI NO: 15236359 NR Description: glycine-rich RNA-binding protein (AtGRP2)
  misc_feature (23)..(175): NCBI GI NO: 2826811 NR Description: AtGRP2 [Arabidopsis thaliana]
  misc_feature (23)..(174): NCBI GI NO: 30682622 NR Description: glycine-rich RNA-binding protein (AtGRP2)
  misc_feature (43)..(174): NCBI GI NO: 322514 NR Description: glycine-rich RNA-binding protein
  misc_feature (23)..(160): NCBI GI NO: 15229525 NR Description: RNA-binding protein, putative
  misc_feature (23)..(160): NCBI GI NO: 21553972 NR Description: glycine-rich RNA binding protein, putative
  misc_feature (23)..(170): NCBI GI NO: 7439994 NR Description: glycine-rich RNA-binding protein - garden pea
  misc_feature (23)..(161): NCBI GI NO: 7439995 NR Description: RNA binding protein 3 - wood tobacco
  misc_feature (23)..(174): NCBI GI NO: 15239505 NR Description: RNA-binding protein, putative
  misc_feature (23)..(172): NCBI GI NO: 1084415 NR Description: RNA-binding protein - wood tobacco
ILLCLFPPGSQNPSFESLTTTEMAFCKSLGGLLRQGVVSQTGNIPVTSVLGSLRYMSTKLFVGGLSWGTDDQSLREAFANFGEVVDAKVIVDRETGRSRGFGFVNFTDETAANTAISEMDGKDLNGRSIRVNVANERPSTPRYGGGGGYGGGGGYGGGGYGGGSYGAGGGDGGGY

SEQ ID NO: 20833 - protein, 153 aa, Zea mays subsp. mays
  peptide (1)..(153): Ceres Seq. ID no. 15174000
  misc_feature (38)..(109): Pfam Name: a.k.a. RRM, RBD, or RNP domain Pfam Description: RNA recognition motif.
  misc_feature (1)..(152): NCBI GI NO: 15236359 NR Description: glycine-rich RNA-binding protein (AtGRP2)
  misc_feature (1)..(153): NCBI GI NO: 2826811 NR Description: AtGRP2 [Arabidopsis thaliana]
  misc_feature (1)..(152): NCBI GI NO: 30682622 NR Description: glycine-rich RNA-binding protein (AtGRP2)
  misc_feature (21)..(152): NCBI GI NO: 322514 NR Description: glycine-rich RNA-binding protein
  misc_feature (1)..(138): NCBI GI NO: 15229525 NR Description: RNA-binding protein, putative
  misc_feature (1)..(138): NCBI GI NO: 21553972 NR Description: glycine-rich RNA binding protein, putative
  misc_feature (1)..(148): NCBI GI NO: 7439994 NR Description: glycine-rich RNA-binding protein - garden pea
  misc_feature (1)..(139): NCBI GI NO: 7439995 NR Description: RNA binding protein 3 - wood tobacco
  misc_feature (1)..(152): NCBI GI NO: 15239505 NR Description: RNA-binding protein, putative
  misc_feature (1)..(150): NCBI GI NO: 1084415 NR Description: RNA-binding protein - wood tobacco
MAFCKSLGGLLRQGVVSQTGNIPVTSVLGSLRYMSTKLFVGGLSWGTDDQSLREAFANFGEVVDAKVIVDRETGRSRGFGFVNFTDETAANTAISEMDGKDLNGRSIRVNVANERPSTPRYGGGGGYGGGGGYGGGGYGGGSYGAGGGDGGGY

SEQ ID NO: 20834 - protein, 120 aa, Zea mays subsp. mays
  peptide (1)..(120): Ceres Seq. ID no. 15174001
  misc_feature (5)..(76): Pfam Name: a.k.a. RRM, RBD, or RNP domain Pfam Description: RNA recognition motif.
  misc_feature (1)..(119): NCBI GI NO: 15236359 NR Description: glycine-rich RNA-binding protein (AtGRP2)
  misc_feature (1)..(120): NCBI GI NO: 2826811 NR Description: AtGRP2 [Arabidopsis thaliana]
  misc_feature (1)..(119): NCBI GI NO: 30682622 NR Description: glycine-rich RNA-binding protein (AtGRP2)
  misc_feature (1)..(119): NCBI GI NO: 322514 NR Description: glycine-rich RNA-binding protein
  misc_feature (1)..(105): NCBI GI NO: 15229525 NR Description: RNA-binding protein, putative
  misc_feature (1)..(105): NCBI GI NO: 21553972 NR Description: glycine-rich RNA binding protein, putative
  misc_feature (1)..(115): NCBI GI NO: 7439994 NR Description: glycine-rich RNA-binding protein - garden pea
  misc_feature (1)..(106): NCBI GI NO: 7439995 NR Description: RNA binding protein 3 - wood tobacco
  misc_feature (1)..(119): NCBI GI NO: 15239505 NR Description: RNA-binding protein, putative
  misc_feature (1)..(117): NCBI GI NO: 1084415 NR Description: RNA-binding protein - wood tobacco
MSTKLFVGGLSWGTDDQSLREAFANFGEVVDAKVIVDRETGRSRGFGFVNFTDETAANTAISEMDGKDLNGRSIRVNVANERPSTPRYGGGGGYGGGGGYGGGGYGGGSYGAGGGDGGGY

SEQ ID NO: 20835 - DNA, 737 bp, Zea mays subsp. mays
  misc_feature (1)..(737): Ceres Seq. ID no. 15173990
acaacaaacaatacatcaattctgccagataacgttttgagattttctctaaagctaaaagtcaatttaaaggtatttcttgttaagatcgaaaactctgttttgcagtttttgagtttttgaatcaaagatggggaggttgtttgtggttcatcttgaagggaagatctatagctgcaaacactgcaagactcatcttgctttatatgaagacatcatctccaagtcttttcactgtaagcatggaaaagcttatcttttcaacaaagtttccaatgttacaattggagaaacagaagacagaatgatgatgacaggaaaacatacagtggctgacattttctgtgtctcatgtggatcaatagttggttggagatatgagactgctcatgagaagagccagaagtacaaagaaggaaagtcagttcttgaaagatttaagatatcgggtcctgatggaagcaactactgggtgagtagccatggaaggcatataggtggaagtgatgcagatgattcttgaagtcctctctctatccttatgatttggcatccattgtaaatgtaaattcttcaacctcaactccaacttgcttttataagaccaacaaaagagctttattctattgcgctcaatattatctgaaaatccctcagtaaataaactctgattctgtgtaatgatcatgcttcatcaaaacctatgcttcttattcgtattgctataattataaact

SEQ ID NO: 20836 - protein, 130 aa, Zea mays subsp. mays
  peptide (1)..(130): Ceres Seq. ID no. 15173991
  misc_feature (1)..(108): Pfam Name: Pfam Description:  Yippee putative zinc-binding protein
  misc_feature (1)..(130): NCBI GI NO: 15225631 NR Description: expressed protein [Arabidopsis thaliana]
  misc_feature (1)..(129): NCBI GI NO: 27923880 NR Description: Yippee-like protein
  misc_feature (1)..(129): NCBI GI NO: 28273361 NR Description: putative zinc binding protein
  misc_feature (1)..(130): NCBI GI NO: 18399156 NR Description: expressed protein [Arabidopsis thaliana]
  misc_feature (1)..(130): NCBI GI NO: 21617953 NR Description: yippee-like protein [Arabidopsis thaliana]
  misc_feature (1)..(116): NCBI GI NO: 15228759 NR Description: Yippee-related protein [Arabidopsis thaliana]
  misc_feature (1)..(103): NCBI GI NO: 15232001 NR Description: Yippee-related protein [Arabidopsis thaliana]
  misc_feature (1)..(130): NCBI GI NO: 15238881 NR Description: zinc-binding protein-related
  misc_feature (1)..(101): NCBI GI NO: 32402994 NR Description: hypothetical protein [Neurospora crassa]
  misc_feature (32)..(103): NCBI GI NO: 27923900 NR Description: Yippee-like protein At3g08995
MGRLFVVHLEGKIYSCKHCKTHLALYEDIISKSFHCKHGKAYLFNKVSNVTIGETEDRMMMTGKHTVADIFCVSCGSIVGWRYETAHEKSQKYKEGKSVLERFKISGPDGSNYWVSSHGRHIGGSDADDS

SEQ ID NO: 20837 - protein, 72 aa, Zea mays subsp. mays
  peptide (1)..(72): Ceres Seq. ID no. 15173992
  misc_feature (1)..(72): NCBI GI NO: 15225631 NR Description: expressed protein [Arabidopsis thaliana]
  misc_feature (1)..(71): NCBI GI NO: 27923880 NR Description: Yippee-like protein
  misc_feature (1)..(71): NCBI GI NO: 28273361 NR Description: putative zinc binding protein
  misc_feature (1)..(72): NCBI GI NO: 18399156 NR Description: expressed protein [Arabidopsis thaliana]
  misc_feature (1)..(72): NCBI GI NO: 21617953 NR Description: yippee-like protein [Arabidopsis thaliana]
  misc_feature (1)..(58): NCBI GI NO: 15228759 NR Description: Yippee-related protein [Arabidopsis thaliana]
  misc_feature (1)..(45): NCBI GI NO: 15232001 NR Description: Yippee-related protein [Arabidopsis thaliana]
  misc_feature (1)..(72): NCBI GI NO: 15238881 NR Description: zinc-binding protein-related
  misc_feature (1)..(43): NCBI GI NO: 32402994 NR Description: hypothetical protein [Neurospora crassa]
  misc_feature (1)..(45): NCBI GI NO: 27923900 NR Description: Yippee-like protein At3g08995
MMMTGKHTVADIFCVSCGSIVGWRYETAHEKSQKYKEGKSVLERFKISGPDGSNYWVSSHGRHIGGSDADDS

SEQ ID NO: 20838 - protein, 71 aa, Zea mays subsp. mays
  peptide (1)..(71): Ceres Seq. ID no. 15173993
  misc_feature (1)..(71): NCBI GI NO: 15225631 NR Description: expressed protein [Arabidopsis thaliana]
  misc_feature (1)..(70): NCBI GI NO: 27923880 NR Description: Yippee-like protein
  misc_feature (1)..(70): NCBI GI NO: 28273361 NR Description: putative zinc binding protein
  misc_feature (1)..(71): NCBI GI NO: 18399156 NR Description: expressed protein [Arabidopsis thaliana]
  misc_feature (1)..(71): NCBI GI NO: 21617953 NR Description: yippee-like protein [Arabidopsis thaliana]
  misc_feature (1)..(57): NCBI GI NO: 15228759 NR Description: Yippee-related protein [Arabidopsis thaliana]
  misc_feature (1)..(44): NCBI GI NO: 15232001 NR Description: Yippee-related protein [Arabidopsis thaliana]
  misc_feature (1)..(71): NCBI GI NO: 15238881 NR Description: zinc-binding protein-related
  misc_feature (1)..(42): NCBI GI NO: 32402994 NR Description: hypothetical protein [Neurospora crassa]
  misc_feature (1)..(44): NCBI GI NO: 27923900 NR Description: Yippee-like protein At3g08995
MMTGKHTVADIFCVSCGSIVGWRYETAHEKSQKYKEGKSVLERFKISGPDGSNYWVSSHGRHIGGSDADDS

SEQ ID NO: 20839 - DNA, 889 bp, Zea mays subsp. mays
  misc_feature (1)..(889): Ceres Seq. ID no. 15179044
aacagtgtcagagccgaaacaaacgtagcaaaaaaaaaaaacatagaaaatgtctgtcttcttacgcggaggaatcgccggaggatttcatctccgtagtcgtgactcctcagccgtcatcacgaaacgacgaatctcatccgttggagccgtaacaggacgaagcgtcaatccagcatcagccattgaacaacgtgccacatggttacctggtctcgaacctcctccctacctcgacggaaagttagctggagattacgggtttgacccgctcggtttaggagaggatccgaaaagtttgaaatggtatgttcaagcagagcttgtccacgctcgtttcgccatgctcggtgttgccggaatactcttcaccgacctacttcgtaccacagggattagcaacttgcctgtttggtacgaagccggagcaacgaaatttgattttgccagcacaaagactctcattgttgtacagtttctactcatggggtttgctgagaccaaaaggtatatggacttcgtctcaccaggatctcaagccgcagaaggaacattctttggacttgaagcagcactcgaagggctcgagcccggatatcctggagggccgctcttgaatccgctaggccttgctaaggatatcaagagcgctcacgactggaagcttaaggagatcaagaatggtcgtctagcgatgatggcgatgctagggttcttcgttcaagcctcagtgactcacactggtcctatcgataacctcgtcgagcatctctctaatccatggcataagaccatcattcaaaccctcttcacctctgcttcttagttttacatttcacatagcaaattcaatatactgctggagaagtgtatcaattacctttgtttc

SEQ ID NO: 20840 - protein, 258 aa, Zea mays subsp. mays
  peptide (1)..(258): Ceres Seq. ID no. 15179045
  misc_feature (58)..(227): Pfam Name: Pfam Description:  Chlorophyll A-B binding protein
  misc_feature (1)..(258): NCBI GI NO: 15220077 NR Description: light-harvesting chlorophyll a/b binding protein
  misc_feature (1)..(258): NCBI GI NO: 21593722 NR Description: light-harvesting complex protein
  misc_feature (1)..(258): NCBI GI NO: 25299023 NR Description: chlorophyll a/b-binding protein Lhca5
  misc_feature (22)..(246): NCBI GI NO: 40714521 NR Description: light-harvesting chlorophyll-a/b protein ofphotosystem I
  misc_feature (22)..(246): NCBI GI NO: 27542569 NR Description: light-harvesting complex I protein
  misc_feature (24)..(246): NCBI GI NO: 40714515 NR Description: light-harvesting chlorophyll-a/b protein ofphotosystem I
  misc_feature (21)..(253): NCBI GI NO: 322392 NR Description: chlorophyll a/b-binding protein type 4
  misc_feature (22)..(246): NCBI GI NO: 5902596 NR Description: light harvesting complex a protein
  misc_feature (21)..(253): NCBI GI NO: 322393 NR Description: chlorophyll a/b-binding protein type 4
  misc_feature (36)..(253): NCBI GI NO: 100196 NR Description: chlorophyll a/b-binding protein (cab-11) - tomato
MSVFLRGGIAGGFHLRSRDSSAVITKRRISSVGAVTGRSVNPASAIEQRATWLPGLEPPPYLDGKLAGDYGFDPLGLGEDPKSLKWYVQAELVHARFAMLGVAGILFTDLLRTTGISNLPVWYEAGATKFDFASTKTLIVVQFLLMGFAETKRYMDFVSPGSQAAEGTFFGLEAALEGLEPGYPGGPLLNPLGLAKDIKSAHDWKLKEIKNGRLAMMAMLGFFVQASVTHTGPIDNLVEHLSNPWHKTIIQTLFTSAS

SEQ ID NO: 20841 - protein, 160 aa, Zea mays subsp. mays
  peptide (1)..(160): Ceres Seq. ID no. 15179046
  misc_feature (1)..(129): Pfam Name: Pfam Description:  Chlorophyll A-B binding protein
  misc_feature (1)..(160): NCBI GI NO: 15220077 NR Description: light-harvesting chlorophyll a/b binding protein
  misc_feature (1)..(160): NCBI GI NO: 21593722 NR Description: light-harvesting complex protein
  misc_feature (1)..(160): NCBI GI NO: 25299023 NR Description: chlorophyll a/b-binding protein Lhca5
  misc_feature (1)..(148): NCBI GI NO: 40714521 NR Description: light-harvesting chlorophyll-a/b protein ofphotosystem I
  misc_feature (1)..(148): NCBI GI NO: 27542569 NR Description: light-harvesting complex I protein
  misc_feature (1)..(148): NCBI GI NO: 40714515 NR Description: light-harvesting chlorophyll-a/b protein ofphotosystem I
  misc_feature (1)..(155): NCBI GI NO: 322392 NR Description: chlorophyll a/b-binding protein type 4
  misc_feature (1)..(148): NCBI GI NO: 5902596 NR Description: light harvesting complex a protein
  misc_feature (1)..(155): NCBI GI NO: 322393 NR Description: chlorophyll a/b-binding protein type 4
  misc_feature (1)..(155): NCBI GI NO: 100196 NR Description: chlorophyll a/b-binding protein (cab-11) - tomato
MLGVAGILFTDLLRTTGISNLPVWYEAGATKFDFASTKTLIVVQFLLMGFAETKRYMDFVSPGSQAAEGTFFGLEAALEGLEPGYPGGPLLNPLGLAKDIKSAHDWKLKEIKNGRLAMMAMLGFFVQASVTHTGPIDNLVEHLSNPWHKTIIQTLFTSAS

SEQ ID NO: 20842 - DNA, 1001 bp, Zea mays subsp. mays
  misc_feature (1)..(1001): Ceres Seq. ID no. 15179047
acacatcaatctcgaagtgcgttttctcttgaatctgcgttacaaagcaatcaccacctctcagcgacgaagatcagcaacatccatggcggtaagatcagtaaaagttggcaatctctcctcaggagcaaaggagcatgatattaaagagttcttctctttctccggtgaagttgaaagcattgacatccaaagtaacgagcatagtgcttatgtgacattcaaagaccctcaaggagcagagaccgctgtgctcttatcaggtgcaagtattgccgatcagtccgtcgtcattgagatggctcctaactacactccacctgctgcccctcatgctgaaacacagagcggtggcgttgcagaatcagttgtccaaaaggcagaagatgttgtgagcaccatgttagcaaagggtttcatcctcggaaaagacgcggtcggcaaagcaaaagcttttgacgagaaactcggttttacttcaaccgcaaccgcaggcgttgcttccatagaccaaaaaatcggcctgagccaaaaaatcacagctggtacaagcttggtgaccgagaagatcaaaggggtggaccaaagcttccaagtcacagagaggaccaagtctgcctttgcgacagcggaacagacggtgagcagcgcgggaaccgccgtgatgaaaaaccgctttgtgttaacgggtgtgagctgggccgcaggagcgttcaacagagttgctaaagctgctggagaggttggacagaagacaaaggaaaaggttgaagctgagcaaccaccacaaccgtcgcagtcagagcagaaaccaccagaagggtattttccgcttcactgaaaaagctgcgtttttatatttcttttactcgttggtttccttacataaaaaaatgggaatttgtttttttttttttttttttttggatgtaacatagaacctatgtttggatcttctctattactagtttgggttttttttataagatattgtgttcact

SEQ ID NO: 20843 - protein, 279 aa, Zea mays subsp. mays
  peptide (1)..(279): Ceres Seq. ID no. 15179048
  misc_feature (34)..(98): Pfam Name: a.k.a. RRM, RBD, or RNP domain Pfam Description: RNA recognition motif.
  misc_feature (31)..(279): NCBI GI NO: 15237419 NR Description: RNA recognition motif (RRM)-containing protein
  misc_feature (31)..(279): NCBI GI NO: 21592997 NR Description: unknown [Arabidopsis thaliana]
  misc_feature (31)..(279): NCBI GI NO: 16648740 NR Description: AT5g16840/F5E19_180 [Arabidopsis thaliana]
  misc_feature (29)..(256): NCBI GI NO: 18414951 NR Description: RNA recognition motif (RRM)-containing protein
  misc_feature (29)..(256): NCBI GI NO: 30695063 NR Description: RNA recognition motif (RRM)-containing protein
  misc_feature (33)..(256): NCBI GI NO: 8809670 NR Description: gene_id:MSD23
  misc_feature (33)..(272): NCBI GI NO: 38347069 NR Description: OSJNBa0006A01.10
  misc_feature (31)..(279): NCBI GI NO: 38344181 NR Description: OSJNBa0053K19.20
  misc_feature (70)..(256): NCBI GI NO: 7485085 NR Description: hypothetical protein - Arabidopsis thaliana
  misc_feature (26)..(264): NCBI GI NO: 30697598 NR Description: RNA recognition motif (RRM)-containing protein
HINLEVRFLLNLRYKAITTSQRRRSATSMAVRSVKVGNLSSGAKEHDIKEFFSFSGEVESIDIQSNEHSAYVTFKDPQGAETAVLLSGASIADQSVVIEMAPNYTPPAAPHAETQSGGVAESVVQKAEDVVSTMLAKGFILGKDAVGKAKAFDEKLGFTSTATAGVASIDQKIGLSQKITAGTSLVTEKIKGVDQSFQVTERTKSAFATAEQTVSSAGTAVMKNRFVLTGVSWAAGAFNRVAKAAGEVGQKTKEKVEAEQPPQPSQSEQKPPEGYFPLH

SEQ ID NO: 20844 - protein, 251 aa, Zea mays subsp. mays
  peptide (1)..(251): Ceres Seq. ID no. 15179049
  misc_feature (6)..(70): Pfam Name: a.k.a. RRM, RBD, or RNP domain Pfam Description: RNA recognition motif.
  misc_feature (3)..(251): NCBI GI NO: 15237419 NR Description: RNA recognition motif (RRM)-containing protein
  misc_feature (3)..(251): NCBI GI NO: 21592997 NR Description: unknown [Arabidopsis thaliana]
  misc_feature (3)..(251): NCBI GI NO: 16648740 NR Description: AT5g16840/F5E19_180 [Arabidopsis thaliana]
  misc_feature (1)..(228): NCBI GI NO: 18414951 NR Description: RNA recognition motif (RRM)-containing protein
  misc_feature (1)..(228): NCBI GI NO: 30695063 NR Description: RNA recognition motif (RRM)-containing protein
  misc_feature (5)..(228): NCBI GI NO: 8809670 NR Description: gene_id:MSD23
  misc_feature (5)..(244): NCBI GI NO: 38347069 NR Description: OSJNBa0006A01.10
  misc_feature (3)..(251): NCBI GI NO: 38344181 NR Description: OSJNBa0053K19.20
  misc_feature (42)..(228): NCBI GI NO: 7485085 NR Description: hypothetical protein - Arabidopsis thaliana
  misc_feature (1)..(236): NCBI GI NO: 30697598 NR Description: RNA recognition motif (RRM)-containing protein
MAVRSVKVGNLSSGAKEHDIKEFFSFSGEVESIDIQSNEHSAYVTFKDPQGAETAVLLSGASIADQSVVIEMAPNYTPPAAPHAETQSGGVAESVVQKAEDVVSTMLAKGFILGKDAVGKAKAFDEKLGFTSTATAGVASIDQKIGLSQKITAGTSLVTEKIKGVDQSFQVTERTKSAFATAEQTVSSAGTAVMKNRFVLTGVSWAAGAFNRVAKAAGEVGQKTKEKVEAEQPPQPSQSEQKPPEGYFPLH

SEQ ID NO: 20845 - protein, 180 aa, Zea mays subsp. mays
  peptide (1)..(180): Ceres Seq. ID no. 15179050
  misc_feature (1)..(180): NCBI GI NO: 15237419 NR Description: RNA recognition motif (RRM)-containing protein
  misc_feature (1)..(180): NCBI GI NO: 21592997 NR Description: unknown [Arabidopsis thaliana]
  misc_feature (1)..(180): NCBI GI NO: 16648740 NR Description: AT5g16840/F5E19_180 [Arabidopsis thaliana]
  misc_feature (1)..(157): NCBI GI NO: 18414951 NR Description: RNA recognition motif (RRM)-containing protein
  misc_feature (1)..(157): NCBI GI NO: 30695063 NR Description: RNA recognition motif (RRM)-containing protein
  misc_feature (1)..(157): NCBI GI NO: 8809670 NR Description: gene_id:MSD23
  misc_feature (1)..(173): NCBI GI NO: 38347069 NR Description: OSJNBa0006A01.10
  misc_feature (1)..(180): NCBI GI NO: 38344181 NR Description: OSJNBa0053K19.20
  misc_feature (1)..(157): NCBI GI NO: 7485085 NR Description: hypothetical protein - Arabidopsis thaliana
  misc_feature (1)..(165): NCBI GI NO: 30697598 NR Description: RNA recognition motif (RRM)-containing protein
MAPNYTPPAAPHAETQSGGVAESVVQKAEDVVSTMLAKGFILGKDAVGKAKAFDEKLGFTSTATAGVASIDQKIGLSQKITAGTSLVTEKIKGVDQSFQVTERTKSAFATAEQTVSSAGTAVMKNRFVLTGVSWAAGAFNRVAKAAGEVGQKTKEKVEAEQPPQPSQSEQKPPEGYFPLH

SEQ ID NO: 20846 - DNA, 542 bp, Zea mays subsp. mays
  misc_feature (1)..(542): Ceres Seq. ID no. 15173986
atcgaaccttgaacacctcctctctatagccggagacttcactcagagaaactcaagagaagagttagaagcaatggagggaggagaagaagctggagcggagataatggttgattcaaaggacttacagcaacaaagcaaagctttggacaagcttaccgatcgcgtcgaggatcgccagctcgattctaatcgtgttcaatcggctatggcttcgattgctgcttctagggaggctgatctaaatgccaagagattgagggagaaggaactggcttctgttaagatcaatgccgcagatgttgagctcattgtcaacgaactcgagctggagaagaatgtggtggagagaactctaagggagcacaaaggcgatgccgttgctgctactagggaattgctttcacgttatcctctatgaagggaccagttccagccttactacttgcagtttcttttgtgtgaggtttgagagcaagtatccgaatatttaactcaagttcgaagttttagtcttcttatcaatttaaatcgggttggcc

SEQ ID NO: 20847 - protein, 139 aa, Zea mays subsp. mays
  peptide (1)..(139): Ceres Seq. ID no. 15173987
  misc_feature (25)..(139): NCBI GI NO: 18397632 NR Description: expressed protein [Arabidopsis thaliana]
  misc_feature (7)..(134): NCBI GI NO: 31249767 NR Description: unknown protein
  misc_feature (14)..(129): NCBI GI NO: 3329429 NR Description: huntingtin interacting protein HYPK [Homo sapiens]
  misc_feature (14)..(129): NCBI GI NO: 7020527 NR Description: unnamed protein product [Homo sapiens]
  misc_feature (14)..(129): NCBI GI NO: 34856780 NR Description: similar to RIKEN cDNA 2310003F16
  misc_feature (14)..(129): NCBI GI NO: 27734984 NR Description: Huntingtin interacting protein K [Homo sapiens]
  misc_feature (14)..(129): NCBI GI NO: 27229055 NR Description: RIKEN cDNA 2310003F16 [Mus musculus]
  misc_feature (14)..(129): NCBI GI NO: 6841494 NR Description: HSPC136 [Homo sapiens]
  misc_feature (17)..(135): NCBI GI NO: 21358275 NR Description: CG9922-PA [Drosophila melanogaster]
  misc_feature (14)..(127): NCBI GI NO: 34866616 NR Description: similar to RIKEN cDNA 2310003F16
SNLEHLLSIAGDFTQRNSREELEAMEGGEEAGAEIMVDSKDLQQQSKALDKLTDRVEDRQLDSNRVQSAMASIAASREADLNAKRLREKELASVKINAADVELIVNELELEKNVVERTLREHKGDAVAATRELLSRYPL

SEQ ID NO: 20848 - protein, 115 aa, Zea mays subsp. mays
  peptide (1)..(115): Ceres Seq. ID no. 15173988
  misc_feature (1)..(115): NCBI GI NO: 18397632 NR Description: expressed protein [Arabidopsis thaliana]
  misc_feature (1)..(110): NCBI GI NO: 31249767 NR Description: unknown protein
  misc_feature (1)..(105): NCBI GI NO: 3329429 NR Description: huntingtin interacting protein HYPK [Homo sapiens]
  misc_feature (1)..(105): NCBI GI NO: 27229055 NR Description: RIKEN cDNA 2310003F16 [Mus musculus]
  misc_feature (1)..(105): NCBI GI NO: 34856780 NR Description: similar to RIKEN cDNA 2310003F16
  misc_feature (1)..(105): NCBI GI NO: 27734984 NR Description: Huntingtin interacting protein K [Homo sapiens]
  misc_feature (1)..(105): NCBI GI NO: 7020527 NR Description: unnamed protein product [Homo sapiens]
  misc_feature (1)..(105): NCBI GI NO: 6841494 NR Description: HSPC136 [Homo sapiens]
  misc_feature (1)..(111): NCBI GI NO: 21358275 NR Description: CG9922-PA [Drosophila melanogaster]
  misc_feature (1)..(103): NCBI GI NO: 34866616 NR Description: similar to RIKEN cDNA 2310003F16
MEGGEEAGAEIMVDSKDLQQQSKALDKLTDRVEDRQLDSNRVQSAMASIAASREADLNAKRLREKELASVKINAADVELIVNELELEKNVVERTLREHKGDAVAATRELLSRYPL

SEQ ID NO: 20849 - protein, 104 aa, Zea mays subsp. mays
  peptide (1)..(104): Ceres Seq. ID no. 15173989
  misc_feature (1)..(104): NCBI GI NO: 18397632 NR Description: expressed protein [Arabidopsis thaliana]
  misc_feature (1)..(99): NCBI GI NO: 31249767 NR Description: unknown protein
  misc_feature (1)..(94): NCBI GI NO: 3329429 NR Description: huntingtin interacting protein HYPK [Homo sapiens]
  misc_feature (1)..(94): NCBI GI NO: 27229055 NR Description: RIKEN cDNA 2310003F16 [Mus musculus]
  misc_feature (1)..(94): NCBI GI NO: 34856780 NR Description: similar to RIKEN cDNA 2310003F16
  misc_feature (1)..(94): NCBI GI NO: 27734984 NR Description: Huntingtin interacting protein K [Homo sapiens]
  misc_feature (1)..(94): NCBI GI NO: 7020527 NR Description: unnamed protein product [Homo sapiens]
  misc_feature (1)..(94): NCBI GI NO: 6841494 NR Description: HSPC136 [Homo sapiens]
  misc_feature (1)..(100): NCBI GI NO: 21358275 NR Description: CG9922-PA [Drosophila melanogaster]
  misc_feature (1)..(92): NCBI GI NO: 34866616 NR Description: similar to RIKEN cDNA 2310003F16
MVDSKDLQQQSKALDKLTDRVEDRQLDSNRVQSAMASIAASREADLNAKRLREKELASVKINAADVELIVNELELEKNVVERTLREHKGDAVAATRELLSRYPL

SEQ ID NO: 20850 - DNA, 575 bp, Zea mays subsp. mays
  misc_feature (1)..(575): Ceres Seq. ID no. 15173983
atcacaatctcaaacctcaaaccctaaaaaaataaaaaagagctacgtagaaagagacagagagaagaatgggtcgccaaaacgttattgtagtttttggcctcgtgttcttggccgtccttggcctcgccgcagctgcctcctttccgtctccttcagcgtcaccttccaaagctccatctacttccacacctgaggttgaatctccagtgtccgaggacaccattggaaccaccgacgacgatgtagctgcttctcctggtgatgatgacgtagctgtggctggtcctctaggaagtgactcgtcctacggtagcaatggaccttcaggctctgccgattctgctgacagcggcgcggcggctcttggagtttctgcggtcgttgcgggtgttacatccatcgtcggttctttcttgtttttctgaggcgtgtattttcatgagaatatcatttttgagtaaagactatttatatatatggatattgtgatgatcatgttgtaatttgtttctccttggttatgagaaccgatgtccttgaaataagctgaaaataaaactttccttagcaat

SEQ ID NO: 20851 - protein, 119 aa, Zea mays subsp. mays
  peptide (1)..(119): Ceres Seq. ID no. 15173984
  misc_feature (1)..(119): NCBI GI NO: 1168619 NR Description: ANTHER-SPECIFIC PROTEIN BCP1
  misc_feature (1)..(118): NCBI GI NO: 486757 NR Description: anther-specific protein
  misc_feature (1)..(117): NCBI GI NO: 21592730 NR Description: putative agp1 [Arabidopsis thaliana]
  misc_feature (1)..(117): NCBI GI NO: 25355278 NR Description: protein F21J9.18 [imported] - Arabidopsis thaliana
  misc_feature (1)..(109): NCBI GI NO: 15221772 NR Description: agp1 -related [Arabidopsis thaliana]
  misc_feature (1)..(113): NCBI GI NO: 780177 NR Description: agp1 [Arabidopsis thaliana]
  misc_feature (1)..(119): NCBI GI NO: 18404806 NR Description: expressed protein [Arabidopsis thaliana]
  misc_feature (1)..(119): NCBI GI NO: 21536506 NR Description: unknown [Arabidopsis thaliana]
MGRQNVIVVFGLVFLAVLGLAAAASFPSPSASPSKAPSTSTPEVESPVSEDTIGTTDDDVAASPGDDDVAVAGPLGSDSSYGSNGPSGSADSADSGAAALGVSAVVAGVTSIVGSFLFF

SEQ ID NO: 20852 - protein, 64 aa, Zea mays subsp. mays; identical to SEQ ID NO: 11364
  peptide (1)..(64): Ceres Seq. ID no. 15173985

SEQ ID NO: 20853 - DNA, 1187 bp, Zea mays subsp. mays
  misc_feature (1)..(1187): Ceres Seq. ID no. 15179072
aaatatataagagattagtgtagcacggttctgccagtgccatccgcgccctcagccgaggatctccattctcctccccacgcagaatccaccgcgaggtctccgccgccctaaccgcgcccttccatccatggttgcagtggtgtcgtgctccccagatctaccacgggcgcgtgcccggatctggcccgacgaacagcggtggagctcgcgcggtgttccattcatggattgggatctcaagatgtcggtctcctaggacctccgcgacttcccccgcgacagcgtcgggcattgccgccgcagctgccgcgccttccctcgcgacggcgccgagccgagcggagtgctccgtcgacctcaagctcggcaggacgacaccaccacgaaggagccggtggctgcaaccgcagcgccgtccgccagcccgatgggcggcgtcgggcattgccgccgcagctgccgagccttcccccgcgacggtgctgagccgggcggagtgctccgtcgacctcaagctcggcgggctaggcccaggagcagcccccggccccggggacctgcgacctgtacaagggccgctgggtgtacgacgagtcccgcgcgccgctgtacaaggagtccgactgcagcttcctcacggagcaggtcacctgtatgcgcaacggccgacgcgacgacgactaccagaagtggcgctggcagcccgacggctgcgatctccccagttcggctgcttcaaggtgctcggaaaggggatgctgttgtccaaccccatcattgttagggccaagctcatctccaagatcatcgagaagaggatcaatgttactggaggcactgtcttgctgaccgccacatagggcactgaaagagtcattcctagagactctacggaaggacacaacggagatggagcagcctgcttgagaagaggcggcggaggagaaggaagcgctcaacctagactcgtggtcgtcgaccagcatgcgccttgacgtcctcttttttgattcatttatttgattttttgaacaaaattgcccttgtctttgtccttcctcccttttttcattttcttaatgccctcatgtaaaatataaggcatgtgttgttcaaatctttcttttaaaactacatgtatttcgtgtgttctatgatgatatatacagaaactggtcttcttg

SEQ ID NO: 20854 - protein, 118 aa, Zea mays subsp. mays
  peptide (1)..(118): Ceres Seq. ID no. 15179073
MGGVGHCRRSCRAFPRDGAEPGGVLRRPQARRARPRSSPRPRGPATCTRAAGCTTSPARRCTRSPTAASSRSRSPVCATADATTTTRSGAGSPTAAISPVRLLQGARKGDAVVQPHHC

SEQ ID NO: 20855 - protein, 64 aa, Zea mays subsp. mays
  peptide (1)..(64): Ceres Seq. ID no. 15179074
  misc_feature (1)..(33): NCBI GI NO: 34898234 NR Description: P0034A04.28
  misc_feature (1)..(33): NCBI GI NO: 34907966 NR Description: P0446G04.14
  misc_feature (1)..(29): NCBI GI NO: 28876029 NR Description: hypothetical protein
  misc_feature (1)..(33): NCBI GI NO: 15228789 NR Description: expressed protein [Arabidopsis thaliana]
  misc_feature (1)..(33): NCBI GI NO: 26452343 NR Description: unknown protein [Arabidopsis thaliana]
  misc_feature (1)..(23): NCBI GI NO: 25366731 NR Description: hypothetical protein At2g40150
  misc_feature (1)..(23): NCBI GI NO: 18405283 NR Description: expressed protein [Arabidopsis thaliana]
  misc_feature (1)..(28): NCBI GI NO: 15228429 NR Description: expressed protein [Arabidopsis thaliana]
  misc_feature (1)..(23): NCBI GI NO: 18405285 NR Description: expressed protein [Arabidopsis thaliana]
  misc_feature (1)..(23): NCBI GI NO: 30350857 NR Description: hypothetical protein At2g30900
MRNGRRDDDYQKWRWQPDGCDLPSSAASRCSERGCCCPTPSLLGPSSSPRSSRRGSMLLEALSC

SEQ ID NO: 20856 - DNA, 760 bp, Zea mays subsp. mays
  misc_feature (1)..(760): Ceres Seq. ID no. 15176693
ataacataagataacgcatagagaaaaccaagaagaaaagaagatgtcgtggcaaacttacgttgatgagcatttgatgtgtgatgtcggagacggccagggtcatcaccttactgccgccgcaatcgttggtcatgacggtagcgtttgggctcagagcgctaactttccccagttcaaggcacaagagttcactggtattatgaaagatttcgatgaaccgggtcacttagcccccacagggttatttctagcaggagccaagtacatggtcatccaaggcgagcctggcgctgtaatccgtggcaagaagggagctggaggcataaccataaagaaaactggacaatcatgtgtctttgggatatacgaagagcccgtgacaccaggacagtgcaatatggtcgtcgagaggttgggtgattacctcctcgaacaggatctctaagcccccatctcctcaaacctactacaatgttccaccttccacatttttttatgcaaacttaatatatatgatttgatttctgggttctttctaagaaggtgaagcctaatttagagtctgattcttaaaaatgtaaggttttcctttttctttttcttgatttcatcagatttattttattttgcttttgttaaccatgttaaataatttgtctatttgttattctctcttgacttttgacgaattgcattttatgtctattgcatatagtgttgacatattaagaaaataatatatggtttgacaacaact

SEQ ID NO: 20857 - protein, 134 aa, Zea mays subsp. mays
  peptide (1)..(134): Ceres Seq. ID no. 15176694
  misc_feature (2)..(129): Pfam Name: Pfam Description:  Profilin
  misc_feature (1)..(134): NCBI GI NO: 15233536 NR Description: profilin 3 [Arabidopsis thaliana]
  misc_feature (1)..(134): NCBI GI NO: 14423854 NR Description: Profilin
  misc_feature (1)..(134): NCBI GI NO: 28393116 NR Description: putative profilin 3 [Arabidopsis thaliana]
  misc_feature (1)..(134): NCBI GI NO: 15224839 NR Description: profilin 4 [Arabidopsis thaliana]
  misc_feature (1)..(134): NCBI GI NO: 3914446 NR Description: Profilin (Pollen allergen Mer a 1)
  misc_feature (1)..(134): NCBI GI NO: 1942360 NR Description: Birch Pollen Profilin
  misc_feature (1)..(134): NCBI GI NO: 3914432 NR Description: PROFILIN 2/4 (POLLEN ALLERGEN PHL P 11) (PHL P XI)
  misc_feature (1)..(134): NCBI GI NO: 464471 NR Description: PROFILIN 1 (POLLEN ALLERGEN PHL P 11) (PHL P XI)
  misc_feature (1)..(132): NCBI GI NO: 2499814 NR Description: Profilin 1
  misc_feature (1)..(132): NCBI GI NO: 6469497 NR Description: profilin [Nicotiana tabacum]
MSWQTYVDEHLMCDVGDGQGHHLTAAAIVGHDGSVWAQSANFPQFKAQEFTGIMKDFDEPGHLAPTGLFLAGAKYMVIQGEPGAVIRGKKGAGGITIKKTGQSCVFGIYEEPVTPGQCNMVVERLGDYLLEQDL

SEQ ID NO: 20858 - protein, 123 aa, Zea mays subsp. mays
  peptide (1)..(123): Ceres Seq. ID no. 15176695
  misc_feature (1)..(118): Pfam Name: Pfam Description:  Profilin
  misc_feature (1)..(123): NCBI GI NO: 15233536 NR Description: profilin 3 [Arabidopsis thaliana]
  misc_feature (1)..(123): NCBI GI NO: 14423854 NR Description: Profilin
  misc_feature (1)..(123): NCBI GI NO: 28393116 NR Description: putative profilin 3 [Arabidopsis thaliana]
  misc_feature (1)..(123): NCBI GI NO: 15224839 NR Description: profilin 4 [Arabidopsis thaliana]
  misc_feature (1)..(123): NCBI GI NO: 3914446 NR Description: Profilin (Pollen allergen Mer a 1)
  misc_feature (1)..(123): NCBI GI NO: 1942360 NR Description: Birch Pollen Profilin
  misc_feature (1)..(123): NCBI GI NO: 3914432 NR Description: PROFILIN 2/4 (POLLEN ALLERGEN PHL P 11) (PHL P XI)
  misc_feature (1)..(123): NCBI GI NO: 464471 NR Description: PROFILIN 1 (POLLEN ALLERGEN PHL P 11) (PHL P XI)
  misc_feature (1)..(121): NCBI GI NO: 2499814 NR Description: Profilin 1
  misc_feature (1)..(121): NCBI GI NO: 6469497 NR Description: profilin [Nicotiana tabacum]
MCDVGDGQGHHLTAAAIVGHDGSVWAQSANFPQFKAQEFTGIMKDFDEPGHLAPTGLFLAGAKYMVIQGEPGAVIRGKKGAGGITIKKTGQSCVFGIYEEPVTPGQCNMVVERLGDYLLEQDL

SEQ ID NO: 20859 - protein, 81 aa, Zea mays subsp. mays
  peptide (1)..(81): Ceres Seq. ID no. 15176696
  misc_feature (1)..(76): Pfam Name: Pfam Description:  Profilin
  misc_feature (1)..(81): NCBI GI NO: 15233536 NR Description: profilin 3 [Arabidopsis thaliana]
  misc_feature (1)..(81): NCBI GI NO: 14423854 NR Description: Profilin
  misc_feature (1)..(81): NCBI GI NO: 28393116 NR Description: putative profilin 3 [Arabidopsis thaliana]
  misc_feature (1)..(81): NCBI GI NO: 15224839 NR Description: profilin 4 [Arabidopsis thaliana]
  misc_feature (1)..(81): NCBI GI NO: 3914446 NR Description: Profilin (Pollen allergen Mer a 1)
  misc_feature (1)..(81): NCBI GI NO: 1942360 NR Description: Birch Pollen Profilin
  misc_feature (1)..(81): NCBI GI NO: 3914432 NR Description: PROFILIN 2/4 (POLLEN ALLERGEN PHL P 11) (PHL P XI)
  misc_feature (1)..(81): NCBI GI NO: 464471 NR Description: PROFILIN 1 (POLLEN ALLERGEN PHL P 11) (PHL P XI)
  misc_feature (1)..(79): NCBI GI NO: 2499814 NR Description: Profilin 1
  misc_feature (1)..(79): NCBI GI NO: 6469497 NR Description: profilin [Nicotiana tabacum]
MKDFDEPGHLAPTGLFLAGAKYMVIQGEPGAVIRGKKGAGGITIKKTGQSCVFGIYEEPVTPGQCNMVVERLGDYLLEQDL

SEQ ID NO: 20860 - DNA, 1001 bp, Zea mays subsp. mays
  misc_feature (1)..(1001): Ceres Seq. ID no. 15177514
attcatccgatccctcgcttcgcttgctcatcgtttgccgtttcagaatcgaggggaatgaaccaaatcgagaacatggcgacgcagaaagctattgtgctatggaacatcagcagctgcccgattccagatggtcatgatcctcttatggtggttcagagaatacaagcggcggtggagaagtccggctacgtccgccgcaacggtgagatctcgatcactgccattggcgacaaactaacagaggtccctggcgaagacgtcatgaggaggctctcttccatcggaatcgctcttaaaaacggggacgaatatcaaatggatttgtataattgggccgacgagaacgctcctccgggtactatgatgctcatagacggtcatgagcaactgggatggttagcagaaacactttccgagtttgaagatatgggattcagaattcttcttgcatatcctcaccgtgacccagcagccacaccctttccgtgtaaacagtgggattgggctgccttgttctcagatgaacaggagacgacaacaacaagccttgttgttaattccagtgttaaatctccctggttctgtgaagtatgctttgttgctgccccaaaccttgaagatttcaccacccatctcaagtctgtaaaacatgcatatggtgagtgggacaggcacgctagtaaaaacaatgtggatcgtactgaccctgctaacctgccgtttggtctatcaaatgagttggacttgctgcttaatcaagacatggttagacgtcagatgttaacgtcagggcgcaggcgcgggccgctcggccctcttaggcctcgactcacattcaacctaacccattccaagtattgaaggaacatttgaagaagaagctggagtgtgaaggagaagaagcgaggacttttatgtaataaataaaattacttactactgtgttatctattgttaaacatcgcaattcagttttttatatttgccatttccaaagt

SEQ ID NO: 20861 - protein, 287 aa, Zea mays subsp. mays
  peptide (1)..(287): Ceres Seq. ID no. 15177515
  misc_feature (25)..(255): NCBI GI NO: 9294534 NR Description: gb|AAC80583
  misc_feature (37)..(282): NCBI GI NO: 15231195 NR Description: hypothetical protein [Arabidopsis thaliana]
  misc_feature (27)..(222): NCBI GI NO: 15229336 NR Description: hypothetical protein [Arabidopsis thaliana]
  misc_feature (27)..(172): NCBI GI NO: 15229336 NR Description: hypothetical protein [Arabidopsis thaliana]
  misc_feature (25)..(176): NCBI GI NO: 9759464 NR Description: emb|CAB71880
  misc_feature (23)..(206): NCBI GI NO: 7459375 NR Description: hypothetical protein F9F13
  misc_feature (27)..(176): NCBI GI NO: 33146722 NR Description: unknown protein
  misc_feature (23)..(206): NCBI GI NO: 15028393 NR Description: unknown protein [Arabidopsis thaliana]
  misc_feature (23)..(206): NCBI GI NO: 18415509 NR Description: expressed protein [Arabidopsis thaliana]
  misc_feature (24)..(166): NCBI GI NO: 15233032 NR Description: hypothetical protein [Arabidopsis thaliana]
IHPIPRFACSSFAVSESRGMNQIENMATQKAIVLWNISSCPIPDGHDPLMVVQRIQAAVEKSGYVRRNGEISITAIGDKLTEVPGEDVMRRLSSIGIALKNGDEYQMDLYNWADENAPPGTMMLIDGHEQLGWLAETLSEFEDMGFRILLAYPHRDPAATPFPCKQWDWAALFSDEQETTTTSLVVNSSVKSPWFCEVCFVAAPNLEDFTTHLKSVKHAYGEWDRHASKNNVDRTDPANLPFGLSNELDLLLNQDMVRRQMLTSGRRRGPLGPLRPRLTFNLTHSKY

SEQ ID NO: 20862 - protein, 268 aa, Zea mays subsp. mays
  peptide (1)..(268): Ceres Seq. ID no. 15177516
  misc_feature (6)..(236): NCBI GI NO: 9294534 NR Description: gb|AAC80583
  misc_feature (18)..(263): NCBI GI NO: 15231195 NR Description: hypothetical protein [Arabidopsis thaliana]
  misc_feature (8)..(203): NCBI GI NO: 15229336 NR Description: hypothetical protein [Arabidopsis thaliana]
  misc_feature (8)..(153): NCBI GI NO: 15229336 NR Description: hypothetical protein [Arabidopsis thaliana]
  misc_feature (6)..(157): NCBI GI NO: 9759464 NR Description: emb|CAB71880
  misc_feature (4)..(187): NCBI GI NO: 7459375 NR Description: hypothetical protein F9F13
  misc_feature (8)..(157): NCBI GI NO: 33146722 NR Description: unknown protein
  misc_feature (4)..(187): NCBI GI NO: 15028393 NR Description: unknown protein [Arabidopsis thaliana]
  misc_feature (4)..(187): NCBI GI NO: 18415509 NR Description: expressed protein [Arabidopsis thaliana]
  misc_feature (5)..(147): NCBI GI NO: 15233032 NR Description: hypothetical protein [Arabidopsis thaliana]
MNQIENMATQKAIVLWNISSCPIPDGHDPLMVVQRIQAAVEKSGYVRRNGEISITAIGDKLTEVPGEDVMRRLSSIGIALKNGDEYQMDLYNWADENAPPGTMMLIDGHEQLGWLAETLSEFEDMGFRILLAYPHRDPAATPFPCKQWDWAALFSDEQETTTTSLVVNSSVKSPWFCEVCFVAAPNLEDFTTHLKSVKHAYGEWDRHASKNNVDRTDPANLPFGLSNELDLLLNQDMVRRQMLTSGRRRGPLGPLRPRLTFNLTHSKY

SEQ ID NO: 20863 - protein, 262 aa, Zea mays subsp. mays
  peptide (1)..(262): Ceres Seq. ID no. 15177517
  misc_feature (1)..(230): NCBI GI NO: 9294534 NR Description: gb|AAC80583
  misc_feature (12)..(257): NCBI GI NO: 15231195 NR Description: hypothetical protein [Arabidopsis thaliana]
  misc_feature (2)..(197): NCBI GI NO: 15229336 NR Description: hypothetical protein [Arabidopsis thaliana]
  misc_feature (2)..(147): NCBI GI NO: 15229336 NR Description: hypothetical protein [Arabidopsis thaliana]
  misc_feature (1)..(151): NCBI GI NO: 9759464 NR Description: emb|CAB71880
  misc_feature (1)..(181): NCBI GI NO: 7459375 NR Description: hypothetical protein F9F13
  misc_feature (2)..(151): NCBI GI NO: 33146722 NR Description: unknown protein
  misc_feature (1)..(181): NCBI GI NO: 15028393 NR Description: unknown protein [Arabidopsis thaliana]
  misc_feature (1)..(181): NCBI GI NO: 18415509 NR Description: expressed protein [Arabidopsis thaliana]
  misc_feature (1)..(141): NCBI GI NO: 15233032 NR Description: hypothetical protein [Arabidopsis thaliana]
MATQKAIVLWNISSCPIPDGHDPLMVVQRIQAAVEKSGYVRRNGEISITAIGDKLTEVPGEDVMRRLSSIGIALKNGDEYQMDLYNWADENAPPGTMMLIDGHEQLGWLAETLSEFEDMGFRILLAYPHRDPAATPFPCKQWDWAALFSDEQETTTTSLVVNSSVKSPWFCEVCFVAAPNLEDFTTHLKSVKHAYGEWDRHASKNNVDRTDPANLPFGLSNELDLLLNQDMVRRQMLTSGRRRGPLGPLRPRLTFNLTHSKY

SEQ ID NO: 20864 - DNA, 847 bp, Zea mays subsp. mays
  misc_feature (1)..(847): Ceres Seq. ID no. 15174311
aaatcgctctctctctctttctctgcaatggtgtctcttcagcaaactatgctctctctgcagtccaaacttcctccatcatctttccacatcgggggatctcttcctatgcgaaagacagccttaccacttcgaatcagaggcggaaacgcggcgggagcgagaatgtcagccacggcggcgggaagctacgcgatggctctcgcggacgtcgcgaagaggaacgatactctcgaattgacgagcgcagacgtcgagaagctcgagaaggtcttctccgatccgcaggtgctcaacttcttcgcgaatccaaccgtcgagctcgagaagaagcgtctcgtgatcgacgagatcgtgaaatcgtcctctctccagagccacacctccaatttcctcaacatcctggtcgacgcgaatcgtatcaacatagtgaccgacatcgtgaaggagttcgagattgtgtacaacaagataacggacacgcagttggcggaggttagatcggtggtgaagctggagccgccgcagcttgctcagatcgccaaacaggttcagaagctgaccggggcgaagaacgtcagggtgaagacggttcttgatccgagccttgtcgctgggtttacgattaggtacggtgattctgggtcgaagcttattgatatgagtgtgaagaagcagcttgaggatatcgctgctcagctagaactcggcgagattcagttagctgcatgagaaaattgtattattgacaacagcttctttttacttgtgcaagttaattctttctctcttcttttctccatcaatcatctccatataatatacttatataaataattctcgagtt

SEQ ID NO: 20865 - protein, 243 aa, Zea mays subsp. mays
  peptide (1)..(243): Ceres Seq. ID no. 15174312
  misc_feature (60)..(234): Pfam Name: OSCP Pfam Description: ATP synthase delta
  misc_feature (2)..(242): NCBI GI NO: 18491181 NR Description: putative H+-transporting ATP synthase
  misc_feature (10)..(242): NCBI GI NO: 15233985 NR Description: H+-transporting ATP synthase-related protein
  misc_feature (10)..(242): NCBI GI NO: 416681 NR Description: ATP synthase delta chain, chloroplast precursor
  misc_feature (35)..(242): NCBI GI NO: 399082 NR Description: ATP synthase delta chain, chloroplast precursor
  misc_feature (110)..(243): NCBI GI NO: 1480014 NR Description: putative delta subunit of ATP synthase
  misc_feature (1)..(242): NCBI GI NO: 114584 NR Description: ATP synthase delta chain, chloroplast precursor
  misc_feature (1)..(242): NCBI GI NO: 170098 NR Description: ATP synthase delta subunit precursor
  misc_feature (60)..(241): NCBI GI NO: 1084479 NR Description: H+-transporting two-sector ATPase (EC 3
  misc_feature (35)..(241): NCBI GI NO: 1168587 NR Description: ATP synthase delta chain, chloroplast precursor
  misc_feature (41)..(234): NCBI GI NO: 5902612 NR Description: ATP synthase-delta chain
KSLSLSFSAMVSLQQTMLSLQSKLPPSSFHIGGSLPMRKTALPLRIRGGNAAGARMSATAAGSYAMALADVAKRNDTLELTSADVEKLEKVFSDPQVLNFFANPTVELEKKRLVIDEIVKSSSLQSHTSNFLNILVDANRINIVTDIVKEFEIVYNKITDTQLAEVRSVVKLEPPQLAQIAKQVQKLTGAKNVRVKTVLDPSLVAGFTIRYGDSGSKLIDMSVKKQLEDIAAQLELGEIQLAA

SEQ ID NO: 20866 - protein, 234 aa, Zea mays subsp. mays
  peptide (1)..(234): Ceres Seq. ID no. 15174313
  misc_feature (51)..(225): Pfam Name: OSCP Pfam Description: ATP synthase delta
  misc_feature (1)..(233): NCBI GI NO: 18491181 NR Description: putative H+-transporting ATP synthase
  misc_feature (1)..(233): NCBI GI NO: 15233985 NR Description: H+-transporting ATP synthase-related protein
  misc_feature (1)..(233): NCBI GI NO: 416681 NR Description: ATP synthase delta chain, chloroplast precursor
  misc_feature (26)..(233): NCBI GI NO: 399082 NR Description: ATP synthase delta chain, chloroplast precursor
  misc_feature (101)..(234): NCBI GI NO: 1480014 NR Description: putative delta subunit of ATP synthase
  misc_feature (1)..(233): NCBI GI NO: 114584 NR Description: ATP synthase delta chain, chloroplast precursor
  misc_feature (1)..(233): NCBI GI NO: 170098 NR Description: ATP synthase delta subunit precursor
  misc_feature (51)..(232): NCBI GI NO: 1084479 NR Description: H+-transporting two-sector ATPase (EC 3
  misc_feature (26)..(232): NCBI GI NO: 1168587 NR Description: ATP synthase delta chain, chloroplast precursor
  misc_feature (32)..(225): NCBI GI NO: 5902612 NR Description: ATP synthase-delta chain
MVSLQQTMLSLQSKLPPSSFHIGGSLPMRKTALPLRIRGGNAAGARMSATAAGSYAMALADVAKRNDTLELTSADVEKLEKVFSDPQVLNFFANPTVELEKKRLVIDEIVKSSSLQSHTSNFLNILVDANRINIVTDIVKEFEIVYNKITDTQLAEVRSVVKLEPPQLAQIAKQVQKLTGAKNVRVKTVLDPSLVAGFTIRYGDSGSKLIDMSVKKQLEDIAAQLELGEIQLAA

SEQ ID NO: 20867 - protein, 227 aa, Zea mays subsp. mays
  peptide (1)..(227): Ceres Seq. ID no. 15174314
  misc_feature (44)..(218): Pfam Name: OSCP Pfam Description: ATP synthase delta
  misc_feature (1)..(226): NCBI GI NO: 18491181 NR Description: putative H+-transporting ATP synthase
  misc_feature (1)..(226): NCBI GI NO: 15233985 NR Description: H+-transporting ATP synthase-related protein
  misc_feature (1)..(226): NCBI GI NO: 416681 NR Description: ATP synthase delta chain, chloroplast precursor
  misc_feature (19)..(226): NCBI GI NO: 399082 NR Description: ATP synthase delta chain, chloroplast precursor
  misc_feature (94)..(227): NCBI GI NO: 1480014 NR Description: putative delta subunit of ATP synthase
  misc_feature (1)..(226): NCBI GI NO: 114584 NR Description: ATP synthase delta chain, chloroplast precursor
  misc_feature (1)..(226): NCBI GI NO: 170098 NR Description: ATP synthase delta subunit precursor
  misc_feature (44)..(225): NCBI GI NO: 1084479 NR Description: H+-transporting two-sector ATPase (EC 3
  misc_feature (19)..(225): NCBI GI NO: 1168587 NR Description: ATP synthase delta chain, chloroplast precursor
  misc_feature (25)..(218): NCBI GI NO: 5902612 NR Description: ATP synthase-delta chain
MLSLQSKLPPSSFHIGGSLPMRKTALPLRIRGGNAAGARMSATAAGSYAMALADVAKRNDTLELTSADVEKLEKVFSDPQVLNFFANPTVELEKKRLVIDEIVKSSSLQSHTSNFLNILVDANRINIVTDIVKEFEIVYNKITDTQLAEVRSVVKLEPPQLAQIAKQVQKLTGAKNVRVKTVLDPSLVAGFTIRYGDSGSKLIDMSVKKQLEDIAAQLELGEIQLAA

SEQ ID NO: 20868 - DNA, 1161 bp, Zea mays subsp. mays
  misc_feature (1)..(1161): Ceres Seq. ID no. 15178801
acagaaaccgcaagagagcaaaacttaaaagagaagaagaagaagaagcaacgtgaggaggtagccgaagaagaataatcaaaatacactcaaatgcttgcatttgtcatcttattttgagaaaacatataattctccaaccttccggctttcgaaccactattcgtttggttctcgtcgcttggtcaagagaatgaatccgtttaacctagcctccacaatctcacctcctcctgttgctaatcatctctcggcgaagcgaaagagaggccgtccacgtaaagatgcaaccatgactcgacaaaaaagatctccagggagtccaaaggaggatgttaatctggttggtaagacggtgtctggtgtggtcgaaagatcttgcgaggcggggttcatcatcaatgttaaggtgaaagacagtgacacgagactgcgaggttttgtgttctcacgggggaaagtcgttcctgtgactccagaaaacgacgtggctcctcatgtcaaaatgatcgtaagagaagagatcaagaatcagactgaatatcgtgatcaatcttgtcctcctaacgatcagacaatgaaagatgctgtcactgacttggagactgaatgtgctagagctttgattctactgccacatggaataaatggagaggaccccaaggaagttatggaagaaagagaagctgctgctactcgtttggtggaattttctcaaactccagaaacgaccatagtgactcctcaacagaaccttgtcttggcacggaaagagaccaacgagcatcagaattctcctggtgaggctcgtgggtttgatctaatggcggaggaaccggttcatccggtaaaggaagtaccgcaggagcttcagctagaacttgggaacaagacaatatggaggggagacaacaacaaaaatggcaccgcaatggagatagatcctgaaagctctgtgcctaggaatggctttatagagaagttgttaaaaggaaaggaaaaggtcgactgttagtgcagtagtttaaaacctctttctattcggttgttttatatttcagactctccaatatatttctgctctcttttgttttcagtactttgtattttcagacttcagtgtttgtactttgttgtaaaaccatttcttcttctggttat

SEQ ID NO: 20869 - protein, 273 aa, Zea mays subsp. mays
  peptide (1)..(273): Ceres Seq. ID no. 15178802
  misc_feature (1)..(245): NCBI GI NO: 15234633 NR Description: MATE efflux protein family [Arabidopsis thaliana]
  misc_feature (125)..(271): NCBI GI NO: 15237296 NR Description: expressed protein [Arabidopsis thaliana]
  misc_feature (16)..(135): NCBI GI NO: 15237296 NR Description: expressed protein [Arabidopsis thaliana]
  misc_feature (15)..(108): NCBI GI NO: 18423689 NR Description: expressed protein [Arabidopsis thaliana]
  misc_feature (15)..(108): NCBI GI NO: 9758273 NR Description: gene_id:MBG8
MNPFNLASTISPPPVANHLSAKRKRGRPRKDATMTRQKRSPGSPKEDVNLVGKTVSGVVERSCEAGFIINVKVKDSDTRLRGFVFSRGKVVPVTPENDVAPHVKMIVREEIKNQTEYRDQSCPPNDQTMKDAVTDLETECARALILLPHGINGEDPKEVMEEREAAATRLVEFSQTPETTIVTPQQNLVLARKETNEHQNSPGEARGFDLMAEEPVHPVKEVPQELQLELGNKTIWRGDNNKNGTAMEIDPESSVPRNGFIEKLLKGKEKVDC

SEQ ID NO: 20870 - protein, 240 aa, Zea mays subsp. mays
  peptide (1)..(240): Ceres Seq. ID no. 15178803
  misc_feature (1)..(212): NCBI GI NO: 15234633 NR Description: MATE efflux protein family [Arabidopsis thaliana]
  misc_feature (92)..(238): NCBI GI NO: 15237296 NR Description: expressed protein [Arabidopsis thaliana]
  misc_feature (1)..(102): NCBI GI NO: 15237296 NR Description: expressed protein [Arabidopsis thaliana]
  misc_feature (1)..(75): NCBI GI NO: 18423689 NR Description: expressed protein [Arabidopsis thaliana]
  misc_feature (1)..(75): NCBI GI NO: 9758273 NR Description: gene_id:MBG8
MTRQKRSPGSPKEDVNLVGKTVSGVVERSCEAGFIINVKVKDSDTRLRGFVFSRGKVVPVTPENDVAPHVKMIVREEIKNQTEYRDQSCPPNDQTMKDAVTDLETECARALILLPHGINGEDPKEVMEEREAAATRLVEFSQTPETTIVTPQQNLVLARKETNEHQNSPGEARGFDLMAEEPVHPVKEVPQELQLELGNKTIWRGDNNKNGTAMEIDPESSVPRNGFIEKLLKGKEKVDC

SEQ ID NO: 20871 - protein, 169 aa, Zea mays subsp. mays
  peptide (1)..(169): Ceres Seq. ID no. 15178804
  misc_feature (1)..(141): NCBI GI NO: 15234633 NR Description: MATE efflux protein family [Arabidopsis thaliana]
  misc_feature (21)..(167): NCBI GI NO: 15237296 NR Description: expressed protein [Arabidopsis thaliana]
  misc_feature (1)..(31): NCBI GI NO: 15237296 NR Description: expressed protein [Arabidopsis thaliana]
MIVREEIKNQTEYRDQSCPPNDQTMKDAVTDLETECARALILLPHGINGEDPKEVMEEREAAATRLVEFSQTPETTIVTPQQNLVLARKETNEHQNSPGEARGFDLMAEEPVHPVKEVPQELQLELGNKTIWRGDNNKNGTAMEIDPESSVPRNGFIEKLLKGKEKVDC

SEQ ID NO: 20872 - DNA, 1102 bp, Zea mays subsp. mays
  misc_feature (1)..(1102): Ceres Seq. ID no. 15176185
acgcttgaactcgttattaattagacccaaaatgttaagagtaaccggaagtctctcagcggtatcatctccggcggcggtaactttctccgccgcactgagactctccgttgcccacactctcgctttctcatctcctcctccacatccccgctgcctctccacgttctctcgttcacttatcggcagacgcatctcttcgctccgaccacgcgttccttcaatgtacccgattaggctctctggcttctcggctctcaaagcgagagcttcgtttagcagtagtgggagtagtagtccaagcagagagattctggtgcagcatgtgcttgttaaggagggtgattctgagctctttgctgaactccagaagcgaatcttggatggagaggatatgagtgatcttgcagctgagtactcgatttgtccatccaagaaggatggtggtatacttggatgggtgaaattgggtcaaatggtaccagagtttgaggaagctgcgtttaaagcagagccgaatcatgtggtcaggtgtaaaacccaatttggctggcacttattgcaagttctatctgagagggaacctgtgaaagacatccaggtggaggagctgcattccaaaatgcaagatccagttttcatggaagaggctcagttaattgatgtcagagaacctgacgagatagccacagcatccttgccaggatttaaagtgttcccgctccgccaattcggaacatgggcaccagacatcacttcaaagctgaaccctgagaaggatacattcgtcctgtgtaaggttggtggcaggtcgatgcaggttgcgaactggctgcagtctcagggcttcaagagtgtgtacaatgtggctggtggaatacaagcctattccctcaaggttgacccatcaattcctacttactgacactgccacatcagagagttctagatcatcccatgcaatttactctctttattaaaaagatttttctatcgttaatccaaataattgccaatcgtattcggggaattcatttttaacagtaagtgcctgttttcgataaaattcaaatcacataaaaactgacgcgtaatgagagat

SEQ ID NO: 20873 - protein, 307 aa, Zea mays subsp. mays
  peptide (1)..(307): Ceres Seq. ID no. 15176186
  misc_feature (204)..(299): Pfam Name: Pfam Description:  Rhodanese-like domain
  misc_feature (11)..(307): NCBI GI NO: 18419898 NR Description: peptidyl-prolyl cis-trans isomerase - like protein
  misc_feature (11)..(307): NCBI GI NO: 21554407 NR Description: peptidyl-prolyl cis-trans isomerase-like protein
  misc_feature (89)..(307): NCBI GI NO: 25456107 NR Description: probable peptidylprolyl isomerase (EC 5.2.1.8)
  misc_feature (194)..(307): NCBI GI NO: 17231535 NR Description: hypothetical protein [Nostoc sp. PCC 7120]
  misc_feature (196)..(307): NCBI GI NO: 23127749 NR Description: hypothetical protein [Nostoc punctiforme]
  misc_feature (191)..(307): NCBI GI NO: 23039944 NR Description: hypothetical protein
  misc_feature (199)..(307): NCBI GI NO: 22297588 NR Description: ORF_ID:tll0044~hypothetical protein
  misc_feature (195)..(307): NCBI GI NO: 16331613 NR Description: hypothetical protein [Synechocystis sp. PCC 6803]
  misc_feature (195)..(307): NCBI GI NO: 37523718 NR Description: hypothetical protein gll4149
  misc_feature (103)..(197): NCBI GI NO: 15893571 NR Description: Peptidil-prolyl cis-trans isomerase
RLNSLLIRPKMLRVTGSLSAVSSPAAVTFSAALRLSVAHTLAFSSPPPHPRCLSTFSRSLIGRRISSLRPRVPSMYPIRLSGFSALKARASFSSSGSSSPSREILVQHVLVKEGDSELFAELQKRILDGEDMSDLAAEYSICPSKKDGGILGWVKLGQMVPEFEEAAFKAEPNHVVRCKTQFGWHLLQVLSEREPVKDIQVEELHSKMQDPVFMEEAQLIDVREPDEIATASLPGFKVFPLRQFGTWAPDITSKLNPEKDTFVLCKVGGRSMQVANWLQSQGFKSVYNVAGGIQAYSLKVDPSIPTY

SEQ ID NO: 20874 - protein, 297 aa, Zea mays subsp. mays
  peptide (1)..(297): Ceres Seq. ID no. 15176187
  misc_feature (194)..(289): Pfam Name: Pfam Description:  Rhodanese-like domain
  misc_feature (1)..(297): NCBI GI NO: 18419898 NR Description: peptidyl-prolyl cis-trans isomerase - like protein
  misc_feature (1)..(297): NCBI GI NO: 21554407 NR Description: peptidyl-prolyl cis-trans isomerase-like protein
  misc_feature (79)..(297): NCBI GI NO: 25456107 NR Description: probable peptidylprolyl isomerase (EC 5.2.1.8)
  misc_feature (184)..(297): NCBI GI NO: 17231535 NR Description: hypothetical protein [Nostoc sp. PCC 7120]
  misc_feature (186)..(297): NCBI GI NO: 23127749 NR Description: hypothetical protein [Nostoc punctiforme]
  misc_feature (181)..(297): NCBI GI NO: 23039944 NR Description: hypothetical protein
  misc_feature (189)..(297): NCBI GI NO: 22297588 NR Description: ORF_ID:tll0044~hypothetical protein
  misc_feature (185)..(297): NCBI GI NO: 16331613 NR Description: hypothetical protein [Synechocystis sp. PCC 6803]
  misc_feature (185)..(297): NCBI GI NO: 37523718 NR Description: hypothetical protein gll4149
  misc_feature (93)..(187): NCBI GI NO: 15893571 NR Description: Peptidil-prolyl cis-trans isomerase
MLRVTGSLSAVSSPAAVTFSAALRLSVAHTLAFSSPPPHPRCLSTFSRSLIGRRISSLRPRVPSMYPIRLSGFSALKARASFSSSGSSSPSREILVQHVLVKEGDSELFAELQKRILDGEDMSDLAAEYSICPSKKDGGILGWVKLGQMVPEFEEAAFKAEPNHVVRCKTQFGWHLLQVLSEREPVKDIQVEELHSKMQDPVFMEEAQLIDVREPDEIATASLPGFKVFPLRQFGTWAPDITSKLNPEKDTFVLCKVGGRSMQVANWLQSQGFKSVYNVAGGIQAYSLKVDPSIPTY

SEQ ID NO: 20875 - protein, 233 aa, Zea mays subsp. mays
  peptide (1)..(233): Ceres Seq. ID no. 15176188
  misc_feature (130)..(225): Pfam Name: Pfam Description:  Rhodanese-like domain
  misc_feature (1)..(233): NCBI GI NO: 18419898 NR Description: peptidyl-prolyl cis-trans isomerase - like protein
  misc_feature (1)..(233): NCBI GI NO: 21554407 NR Description: peptidyl-prolyl cis-trans isomerase-like protein
  misc_feature (15)..(233): NCBI GI NO: 25456107 NR Description: probable peptidylprolyl isomerase (EC 5.2.1.8)
  misc_feature (120)..(233): NCBI GI NO: 17231535 NR Description: hypothetical protein [Nostoc sp. PCC 7120]
  misc_feature (122)..(233): NCBI GI NO: 23127749 NR Description: hypothetical protein [Nostoc punctiforme]
  misc_feature (117)..(233): NCBI GI NO: 23039944 NR Description: hypothetical protein
  misc_feature (125)..(233): NCBI GI NO: 22297588 NR Description: ORF_ID:tll0044~hypothetical protein
  misc_feature (121)..(233): NCBI GI NO: 16331613 NR Description: hypothetical protein [Synechocystis sp. PCC 6803]
  misc_feature (121)..(233): NCBI GI NO: 37523718 NR Description: hypothetical protein gll4149
  misc_feature (29)..(123): NCBI GI NO: 15893571 NR Description: Peptidil-prolyl cis-trans isomerase
MYPIRLSGFSALKARASFSSSGSSSPSREILVQHVLVKEGDSELFAELQKRILDGEDMSDLAAEYSICPSKKDGGILGWVKLGQMVPEFEEAAFKAEPNHVVRCKTQFGWHLLQVLSEREPVKDIQVEELHSKMQDPVFMEEAQLIDVREPDEIATASLPGFKVFPLRQFGTWAPDITSKLNPEKDTFVLCKVGGRSMQVANWLQSQGFKSVYNVAGGIQAYSLKVDPSIPTY

SEQ ID NO: 20876 - DNA, 956 bp, Zea mays subsp. mays
  misc_feature (1)..(956): Ceres Seq. ID no. 15178854
atttatcatcattcatcaaacctcatcattatcaaaatattcaaacctaaccccaaactcaaaccatgtcttcttccaactgtccgtcaccgttacccaccgtcacgaaacttcaagttgattccgttacttttccaccgtccgtcatctcaccggcttcctccaaccctctcttcctcggtggcgcaggtgtgcgaggtttggatatccaaggaaaattcgtgatcttcaccgtcatcggagtttacctagatcctgtctccgtcccgtcactctccgttaagtggaaaggtaaaacgacagaggagttaacggaatccgtccctttcttccgtgaaatcgtcacaggctcgtttgagaaattcatcaaagtgacgatgaagctgccgttaacgggacaacaatattcagagaaagtaacggagaactgtgtggcgatatggaaatcgttagggatttacacagactctgaggctaaagctgtggagagatttttggaagtcttcaaagacgaaacgttccctcctggtgcatccatcctcttcgctctcgcctctaaaggctctcttacggttgcgttttcgaaagatgatagcattcctgaaacgggaaaagcggtgatcgaaaataagttgttggcagaggcagttcttgaatcgatcattggaaagaacggtgtgtctcctggggctaggttgagtgttgccgagagattagctcagctgatgaatagtgacaaggtcgaagaagatgcaacaaagactgatcaagaggaagctaacaatctccccctaggagataaactggccaaagagaactgatggaatgggagttttttcttggttttttagtgctttatgtttctatatctaataacgttctgtttagttcccattgtatgttttaaatctgtttctgttcgtaagacttattaaataatcacatggagttggttc

SEQ ID NO: 20877 - protein, 251 aa, Zea mays subsp. mays
  peptide (1)..(251): Ceres Seq. ID no. 15178855
  misc_feature (11)..(221): Pfam Name: Pfam Description:  Chalcone-flavanone isomerase
  misc_feature (1)..(251): NCBI GI NO: 5921725 NR Description: CHALCONE--FLAVONONE ISOMERASE (CHALCONE ISOMERASE)
  misc_feature (7)..(251): NCBI GI NO: 18203239 NR Description: Chalcone--flavonone isomerase (Chalcone isomerase)
  misc_feature (1)..(251): NCBI GI NO: 320138 NR Description: chalcone isomerase (EC 5
  misc_feature (1)..(251): NCBI GI NO: 8670955 NR Description: chalcone flavanone isomerase
  misc_feature (1)..(251): NCBI GI NO: 15233190 NR Description: chalcone-flavanone isomerase
  misc_feature (1)..(251): NCBI GI NO: 8670918 NR Description: chalcone flavanone isomerase
  misc_feature (39)..(209): NCBI GI NO: 28804474 NR Description: chalcone flavanone isomerase [Raphanus sativus]
  misc_feature (12)..(240): NCBI GI NO: 5921722 NR Description: Chalcone--flavonone isomerase (Chalcone isomerase)
  misc_feature (8)..(228): NCBI GI NO: 1705761 NR Description: CHALCONE--FLAVONONE ISOMERASE (CHALCONE ISOMERASE)
  misc_feature (8)..(227): NCBI GI NO: 4126399 NR Description: chalcone isomerase [Citrus sinensis]
MSSSNCPSPLPTVTKLQVDSVTFPPSVISPASSNPLFLGGAGVRGLDIQGKFVIFTVIGVYLDPVSVPSLSVKWKGKTTEELTESVPFFREIVTGSFEKFIKVTMKLPLTGQQYSEKVTENCVAIWKSLGIYTDSEAKAVERFLEVFKDETFPPGASILFALASKGSLTVAFSKDDSIPETGKAVIENKLLAEAVLESIIGKNGVSPGARLSVAERLAQLMNSDKVEEDATKTDQEEANNLPLGDKLAKEN

SEQ ID NO: 20878 - protein, 147 aa, Zea mays subsp. mays
  peptide (1)..(147): Ceres Seq. ID no. 15178856
  misc_feature (1)..(117): Pfam Name: Pfam Description:  Chalcone-flavanone isomerase
  misc_feature (1)..(147): NCBI GI NO: 5921725 NR Description: CHALCONE--FLAVONONE ISOMERASE (CHALCONE ISOMERASE)
  misc_feature (1)..(147): NCBI GI NO: 18203239 NR Description: Chalcone--flavonone isomerase (Chalcone isomerase)
  misc_feature (1)..(147): NCBI GI NO: 320138 NR Description: chalcone isomerase (EC 5
  misc_feature (1)..(147): NCBI GI NO: 8670955 NR Description: chalcone flavanone isomerase
  misc_feature (1)..(147): NCBI GI NO: 15233190 NR Description: chalcone-flavanone isomerase
  misc_feature (1)..(147): NCBI GI NO: 8670918 NR Description: chalcone flavanone isomerase
  misc_feature (1)..(105): NCBI GI NO: 28804474 NR Description: chalcone flavanone isomerase [Raphanus sativus]
  misc_feature (1)..(136): NCBI GI NO: 5921722 NR Description: Chalcone--flavonone isomerase (Chalcone isomerase)
  misc_feature (1)..(124): NCBI GI NO: 1705761 NR Description: CHALCONE--FLAVONONE ISOMERASE (CHALCONE ISOMERASE)
  misc_feature (1)..(123): NCBI GI NO: 4126399 NR Description: chalcone isomerase [Citrus sinensis]
MKLPLTGQQYSEKVTENCVAIWKSLGIYTDSEAKAVERFLEVFKDETFPPGASILFALASKGSLTVAFSKDDSIPETGKAVIENKLLAEAVLESIIGKNGVSPGARLSVAERLAQLMNSDKVEEDATKTDQEEANNLPLGDKLAKEN

SEQ ID NO: 20879 - DNA, 1608 bp, Zea mays subsp. mays
  misc_feature (1)..(1608): Ceres Seq. ID no. 15177892
atatcaatagttcagttcgtctttctaaaacaggagaagaaagtgtttggcgatgaaaaagcacgcactttggctactatgcgttctggtgttaccggcgatagcctggggcaggaatcctgagaagaaggcaacgacttcgtccgggaggaaggaagatgacctggtaaccggtttgcctggccaaccaccggttaacttcagacattacgccggctacgtcaatctcgggccacgacagaagcaaaaggcgcttttctactggttcttcgaagcccaacgaaactcctcaggtcgtcctcttgtcctctggctcaacggaggacctggttgttcatcgatagcctatggagctgcacaagagctaggccctttccttgttcgcgccggcggtgacaaccttaccttcaataagttctcttggaacaaagaggccaatatgttgttcttggaagcaccggttggggttgggttctcgtataccaataactcaatggatcttcataagcttggagatcaagttagtgcagaggattctcttgctttcttgatcaactggttcatgaaatttcctgagtaccgatccaacgagttttacatcgccggagagagttacgccggtcactatgttccacaacttgcgaatgccatttacgacaggaacaagaaggttacaagaggctcgcacatcaatcttaagggtttcatgattggtaacgcggtgatcaatgaggaaacagacatggcaggactagtggactacgcatggagccacgctatagtatctgacgagatccacagcaacatccatggcatgtgccgttttgaggaagagcaaaagagcaaccagaccgtagaatgtaacgacaatttcaaagctttcatggaagcttacagcgatatcgatatatacagcatctatacgcccgtttgcctctcctcttcgtcttcttctccaagaaaacctaaactcatcgtgtctcctcgtctcctaacttcacacgacttgtgggatagcttaccggccgggtatgatccatgcactgaaggttatgccgaaaactattttaaccggaaagatgtgcagcttgcacttcatgcgaacgttacaaaccttccttatccgtattctccttgcagtggggtaataaaaagatggaatgatgctcctcccaccgtgattcccatcatccagaagcttttggcaggcggcctccgcatctggatctatagtggagatacggatgggagagttccagtaacatctacacgttatagcataaagaagatgagacctaaggtggtgtcaccgtggaggtcatggttccacaagagtcaagtagctggatgggttgaaacttacgccggaggattaacctttgccaccgtgagaggagccggtcatcaggttccggtctttgctccagcccaatctctttccttattctctcacttcctttcttccacccctttgccttcaaagcgtttctgatcattaccgccaccaaatcatgccaagttgttgttatgttttgaaactgtcgtttggtacacttatgtacccaattgatataatgagtttcaaatgattaataaaatattttaaac

SEQ ID NO: 20880 - protein, 479 aa, Zea mays subsp. mays
  peptide (1)..(479): Ceres Seq. ID no. 15177893
  misc_feature (43)..(471): Pfam Name: Pfam Description:  Serine carboxypeptidase
  misc_feature (1)..(479): NCBI GI NO: 15241571 NR Description: serine carboxypeptidase II -related
  misc_feature (27)..(418): NCBI GI NO: 38344436 NR Description: OSJNBa0038O10.8
  misc_feature (37)..(479): NCBI GI NO: 10177810 NR Description: serine carboxypeptidase II-like protein
  misc_feature (35)..(291): NCBI GI NO: 15220282 NR Description: serine carboxypeptidase -related
  misc_feature (317)..(478): NCBI GI NO: 15220282 NR Description: serine carboxypeptidase -related
  misc_feature (27)..(311): NCBI GI NO: 11967861 NR Description: putative serine carboxypeptidase [Pisum sativum]
  misc_feature (328)..(478): NCBI GI NO: 11967861 NR Description: putative serine carboxypeptidase [Pisum sativum]
  misc_feature (27)..(475): NCBI GI NO: 13877871 NR Description: putative serine carboxypeptidase II
  misc_feature (27)..(475): NCBI GI NO: 15234795 NR Description: serine carboxypeptidase -related
  misc_feature (1)..(479): NCBI GI NO: 37536528 NR Description: putative serine carboxypeptidase
MKKHALWLLCVLVLPAIAWGRNPEKKATTSSGRKEDDLVTGLPGQPPVNFRHYAGYVNLGPRQKQKALFYWFFEAQRNSSGRPLVLWLNGGPGCSSIAYGAAQELGPFLVRAGGDNLTFNKFSWNKEANMLFLEAPVGVGFSYTNNSMDLHKLGDQVSAEDSLAFLINWFMKFPEYRSNEFYIAGESYAGHYVPQLANAIYDRNKKVTRGSHINLKGFMIGNAVINEETDMAGLVDYAWSHAIVSDEIHSNIHGMCRFEEEQKSNQTVECNDNFKAFMEAYSDIDIYSIYTPVCLSSSSSSPRKPKLIVSPRLLTSHDLWDSLPAGYDPCTEGYAENYFNRKDVQLALHANVTNLPYPYSPCSGVIKRWNDAPPTVIPIIQKLLAGGLRIWIYSGDTDGRVPVTSTRYSIKKMRPKVVSPWRSWFHKSQVAGWVETYAGGLTFATVRGAGHQVPVFAPAQSLSLFSHFLSSTPLPSKRF

SEQ ID NO: 20881 - protein, 350 aa, Zea mays subsp. mays
  peptide (1)..(350): Ceres Seq. ID no. 15177894
  misc_feature (1)..(342): Pfam Name: Pfam Description:  Serine carboxypeptidase
  misc_feature (1)..(350): NCBI GI NO: 15241571 NR Description: serine carboxypeptidase II -related
  misc_feature (1)..(289): NCBI GI NO: 38344436 NR Description: OSJNBa0038O10.8
  misc_feature (1)..(350): NCBI GI NO: 10177810 NR Description: serine carboxypeptidase II-like protein
  misc_feature (1)..(162): NCBI GI NO: 15220282 NR Description: serine carboxypeptidase -related
  misc_feature (188)..(349): NCBI GI NO: 15220282 NR Description: serine carboxypeptidase -related
  misc_feature (1)..(182): NCBI GI NO: 11967861 NR Description: putative serine carboxypeptidase [Pisum sativum]
  misc_feature (199)..(349): NCBI GI NO: 11967861 NR Description: putative serine carboxypeptidase [Pisum sativum]
  misc_feature (1)..(346): NCBI GI NO: 13877871 NR Description: putative serine carboxypeptidase II
  misc_feature (1)..(346): NCBI GI NO: 15234795 NR Description: serine carboxypeptidase -related
  misc_feature (1)..(350): NCBI GI NO: 37536528 NR Description: putative serine carboxypeptidase
MLFLEAPVGVGFSYTNNSMDLHKLGDQVSAEDSLAFLINWFMKFPEYRSNEFYIAGESYAGHYVPQLANAIYDRNKKVTRGSHINLKGFMIGNAVINEETDMAGLVDYAWSHAIVSDEIHSNIHGMCRFEEEQKSNQTVECNDNFKAFMEAYSDIDIYSIYTPVCLSSSSSSPRKPKLIVSPRLLTSHDLWDSLPAGYDPCTEGYAENYFNRKDVQLALHANVTNLPYPYSPCSGVIKRWNDAPPTVIPIIQKLLAGGLRIWIYSGDTDGRVPVTSTRYSIKKMRPKVVSPWRSWFHKSQVAGWVETYAGGLTFATVRGAGHQVPVFAPAQSLSLFSHFLSSTPLPSKRF

SEQ ID NO: 20882 - protein, 332 aa, Zea mays subsp. mays
  peptide (1)..(332): Ceres Seq. ID no. 15177895
  misc_feature (1)..(324): Pfam Name: Pfam Description:  Serine carboxypeptidase
  misc_feature (1)..(332): NCBI GI NO: 15241571 NR Description: serine carboxypeptidase II -related
  misc_feature (1)..(271): NCBI GI NO: 38344436 NR Description: OSJNBa0038O10.8
  misc_feature (1)..(332): NCBI GI NO: 10177810 NR Description: serine carboxypeptidase II-like protein
  misc_feature (1)..(144): NCBI GI NO: 15220282 NR Description: serine carboxypeptidase -related
  misc_feature (170)..(331): NCBI GI NO: 15220282 NR Description: serine carboxypeptidase -related
  misc_feature (1)..(164): NCBI GI NO: 11967861 NR Description: putative serine carboxypeptidase [Pisum sativum]
  misc_feature (181)..(331): NCBI GI NO: 11967861 NR Description: putative serine carboxypeptidase [Pisum sativum]
  misc_feature (1)..(328): NCBI GI NO: 13877871 NR Description: putative serine carboxypeptidase II
  misc_feature (1)..(328): NCBI GI NO: 15234795 NR Description: serine carboxypeptidase -related
  misc_feature (1)..(332): NCBI GI NO: 37536528 NR Description: putative serine carboxypeptidase
MDLHKLGDQVSAEDSLAFLINWFMKFPEYRSNEFYIAGESYAGHYVPQLANAIYDRNKKVTRGSHINLKGFMIGNAVINEETDMAGLVDYAWSHAIVSDEIHSNIHGMCRFEEEQKSNQTVECNDNFKAFMEAYSDIDIYSIYTPVCLSSSSSSPRKPKLIVSPRLLTSHDLWDSLPAGYDPCTEGYAENYFNRKDVQLALHANVTNLPYPYSPCSGVIKRWNDAPPTVIPIIQKLLAGGLRIWIYSGDTDGRVPVTSTRYSIKKMRPKVVSPWRSWFHKSQVAGWVETYAGGLTFATVRGAGHQVPVFAPAQSLSLFSHFLSSTPLPSKRF

SEQ ID NO: 20883 - DNA, 1210 bp, Zea mays subsp. mays
  misc_feature (1)..(1210): Ceres Seq. ID no. 15179510
agtcatttgtcattatctgtctctctccactgagattcaacacgttatcagcactttgctctccaccgagcggttaccgtcgacagcaatgtccatgcatccgtgcatccggcgtctgtcggacgaaaagcgattcaaagacaagttcatggagacgctgcttaggtatggctacagaggctagtacatgtctaatggctggacgctggacaacaacccgacaccactggaaggagatgatctcgctggagtctggcagtctggccacaaggagttgatctctactcagcaacagttgcaccacagcatctgtatcgtcggaggccgggactgcgtggccatggcgccgcccaacgactccgagccatgcacgcaccaccggctgcccgcggacgagctgcagccgccgccgccggctacgtgctgcggcgccgctttggacgaccgggcgccggcggcggcatgggcgtcgtcgccgtccgagcctgaccaggtggcggcggcgcctgctgctcaggaggcggagaagaagcagaacagcgcgacgacgacggaggccgaagcagcagcgggaagcggcgccgggcgggagctggtggcggcgcggcggccggcggcggcggcggaggagagcgcgcgggagcggctgaagcggcatcgcaccgaaatggcggggcgggtgcggatcccggagatgtggggccaggagcggctgctcaaggactgggtcgactgcgccgtcttcgaccgcccgctcgccgccaccgcggggctgctcaccgcccgcgacgcgcttgtcgccgagtgcgccgccgcgcgccggccggccgtctcgcacggctccgcggggcgcccgctacgggtgcacaacggctgctcgtgagcactgcacacgtcatcggctacgacgactacgatcgagcgacgagcgagcccgctcgccgcatgcagttgagaagtgtgcctttcaacaactctattatttatttcgatccttcattgcgtagtactagtacgttctcggactatggatttggtcgatgatgtgatgatgatacacaccacgattggagtaattaatactactcatgcttcattagtactggtggttgtaattaatgtagttgatcaccattttaagcatgcatgtctcaaaacaatcttgtttattattttttcagctaatatataagctagagtgttcttgctt

SEQ ID NO: 20884 - protein, 231 aa, Zea mays subsp. mays
  peptide (1)..(231): Ceres Seq. ID no. 15179511
  misc_feature (90)..(213): NCBI GI NO: 38346335 NR Description: OSJNBa0073L04.6
  misc_feature (84)..(230): NCBI GI NO: 18409685 NR Description: expressed protein [Arabidopsis thaliana]
  misc_feature (149)..(230): NCBI GI NO: 15229972 NR Description: expressed protein [Arabidopsis thaliana]
MSNGWTLDNNPTPLEGDDLAGVWQSGHKELISTQQQLHHSICIVGGRDCVAMAPPNDSEPCTHHRLPADELQPPPPATCCGAALDDRAPAAAWASSPSEPDQVAAAPAAQEAEKKQNSATTTEAEAAAGSGAGRELVAARRPAAAAEESARERLKRHRTEMAGRVRIPEMWGQERLLKDWVDCAVFDRPLAATAGLLTARDALVAECAAARRPAVSHGSAGRPLRVHNGCS

SEQ ID NO: 20885 - protein, 180 aa, Zea mays subsp. mays
  peptide (1)..(180): Ceres Seq. ID no. 15179512
  misc_feature (39)..(162): NCBI GI NO: 38346335 NR Description: OSJNBa0073L04.6
  misc_feature (33)..(179): NCBI GI NO: 18409685 NR Description: expressed protein [Arabidopsis thaliana]
  misc_feature (98)..(179): NCBI GI NO: 15229972 NR Description: expressed protein [Arabidopsis thaliana]
MAPPNDSEPCTHHRLPADELQPPPPATCCGAALDDRAPAAAWASSPSEPDQVAAAPAAQEAEKKQNSATTTEAEAAAGSGAGRELVAARRPAAAAEESARERLKRHRTEMAGRVRIPEMWGQERLLKDWVDCAVFDRPLAATAGLLTARDALVAECAAARRPAVSHGSAGRPLRVHNGCS

SEQ ID NO: 20886 - DNA, 1065 bp, Zea mays subsp. mays
  misc_feature (1)..(1065): Ceres Seq. ID no. 15177896
tctcgatctcggttatcgatcgacgactgaaccggagacgtcgtcacgggacgatctaatcgccggtaaactcaaatcaaatcgaatctccggcgatctgatcgcaatgagtaacagcgagcttctcaacgtggagcctctcgatcttcaattcccttttgaactgaggaagcagatctcatgctctctttacttgaccaacaagacggacaatcatgtagctttcaaggttaagacaacgaatccgaaaaagtattgcgtaaggcctaacactggagttgttcttccaaggtccacttgtgaagttctcgtgaccatgcaagctcaaaaggaagctccttcggatatgcagtgcaaggacaagtttctgcttcaaggtgtgattgctagtcctggtgtcacggccaaggaagtcactcctgagatgtttagcaaagaggctgggcatttagttgaggagactaagctgagagttacgtatgttgctccaccacaaccaccatcaccggttcacgaaggttctgaagagggttcttctccacgggcttctgtttctgataacggaggacaggcttctgagttttcttctcagagatttatagcagcggacaaggttgaacctcaaggaaacacatctgaggcaagggctctcatcacaaagctaaccgaggaaaaacagtctgccattcaactaaacaacaaacttcaaagagaactggaccagttgagacgtgacagtaagagaggccaaagtggtatgcctttgatgtacgttcttctggtcggactaatcggtctaattctgggatacattatgaagagcacataaccacctgagttcttcgtgccacacaggaaagaagaacaaaggaaacagactatttctcttatctttgtatttgacaatttcacctgaaaggtgtctctagatgattgatttgtagtgaaaatgtcaataactcattttgctttgtttttatttaaactttttattttacttttggtaccaataacatggtccgcttttttttttttattgatctcaatcttatctcagagtttagc

SEQ ID NO: 20887 - protein, 275 aa, Zea mays subsp. mays
  peptide (1)..(275): Ceres Seq. ID no. 15177897
  misc_feature (15)..(275): NCBI GI NO: 18411661 NR Description: VAMP
  misc_feature (36)..(275): NCBI GI NO: 21554053 NR Description: putative VAMP-associated protein
  misc_feature (15)..(275): NCBI GI NO: 11288305 NR Description: hypothetical protein T4C21
  misc_feature (36)..(275): NCBI GI NO: 15225415 NR Description: VAMP
  misc_feature (36)..(275): NCBI GI NO: 11288307 NR Description: 27k vesicle-associated membrane protein-associatedprotein
  misc_feature (36)..(272): NCBI GI NO: 18411240 NR Description: VAMP
  misc_feature (36)..(272): NCBI GI NO: 21592874 NR Description: putative proline-rich protein
  misc_feature (32)..(194): NCBI GI NO: 15223792 NR Description: VAMP
  misc_feature (32)..(194): NCBI GI NO: 25405451 NR Description: hypothetical protein F11M15.13
  misc_feature (36)..(239): NCBI GI NO: 7486542 NR Description: hypothetical protein F6N15
LDLGYRSTTEPETSSRDDLIAGKLKSNRISGDLIAMSNSELLNVEPLDLQFPFELRKQISCSLYLTNKTDNHVAFKVKTTNPKKYCVRPNTGVVLPRSTCEVLVTMQAQKEAPSDMQCKDKFLLQGVIASPGVTAKEVTPEMFSKEAGHLVEETKLRVTYVAPPQPPSPVHEGSEEGSSPRASVSDNGGQASEFSSQRFIAADKVEPQGNTSEARALITKLTEEKQSAIQLNNKLQRELDQLRRDSKRGQSGMPLMYVLLVGLIGLILGYIMKST

SEQ ID NO: 20888 - protein, 240 aa, Zea mays subsp. mays
  peptide (1)..(240): Ceres Seq. ID no. 15177898
  misc_feature (1)..(240): NCBI GI NO: 18411661 NR Description: VAMP
  misc_feature (1)..(240): NCBI GI NO: 21554053 NR Description: putative VAMP-associated protein
  misc_feature (1)..(240): NCBI GI NO: 11288305 NR Description: hypothetical protein T4C21
  misc_feature (1)..(240): NCBI GI NO: 15225415 NR Description: VAMP
  misc_feature (1)..(240): NCBI GI NO: 11288307 NR Description: 27k vesicle-associated membrane protein-associatedprotein
  misc_feature (1)..(237): NCBI GI NO: 18411240 NR Description: VAMP
  misc_feature (1)..(237): NCBI GI NO: 21592874 NR Description: putative proline-rich protein
  misc_feature (1)..(159): NCBI GI NO: 15223792 NR Description: VAMP
  misc_feature (1)..(159): NCBI GI NO: 25405451 NR Description: hypothetical protein F11M15.13
  misc_feature (1)..(204): NCBI GI NO: 7486542 NR Description: hypothetical protein F6N15
MSNSELLNVEPLDLQFPFELRKQISCSLYLTNKTDNHVAFKVKTTNPKKYCVRPNTGVVLPRSTCEVLVTMQAQKEAPSDMQCKDKFLLQGVIASPGVTAKEVTPEMFSKEAGHLVEETKLRVTYVAPPQPPSPVHEGSEEGSSPRASVSDNGGQASEFSSQRFIAADKVEPQGNTSEARALITKLTEEKQSAIQLNNKLQRELDQLRRDSKRGQSGMPLMYVLLVGLIGLILGYIMKST

SEQ ID NO: 20889 - protein, 170 aa, Zea mays subsp. mays
  peptide (1)..(170): Ceres Seq. ID no. 15177899
  misc_feature (1)..(170): NCBI GI NO: 18411661 NR Description: VAMP
  misc_feature (1)..(170): NCBI GI NO: 21554053 NR Description: putative VAMP-associated protein
  misc_feature (1)..(170): NCBI GI NO: 11288305 NR Description: hypothetical protein T4C21
  misc_feature (1)..(170): NCBI GI NO: 15225415 NR Description: VAMP
  misc_feature (1)..(170): NCBI GI NO: 11288307 NR Description: 27k vesicle-associated membrane protein-associatedprotein
  misc_feature (1)..(167): NCBI GI NO: 18411240 NR Description: VAMP
  misc_feature (1)..(167): NCBI GI NO: 21592874 NR Description: putative proline-rich protein
  misc_feature (1)..(89): NCBI GI NO: 15223792 NR Description: VAMP
  misc_feature (1)..(89): NCBI GI NO: 25405451 NR Description: hypothetical protein F11M15.13
  misc_feature (1)..(134): NCBI GI NO: 7486542 NR Description: hypothetical protein F6N15
MQAQKEAPSDMQCKDKFLLQGVIASPGVTAKEVTPEMFSKEAGHLVEETKLRVTYVAPPQPPSPVHEGSEEGSSPRASVSDNGGQASEFSSQRFIAADKVEPQGNTSEARALITKLTEEKQSAIQLNNKLQRELDQLRRDSKRGQSGMPLMYVLLVGLIGLILGYIMKST

SEQ ID NO: 20890 - DNA, 1081 bp, Zea mays subsp. mays
  misc_feature (1)..(1081): Ceres Seq. ID no. 15179026
atacttttttctaaggcgcctgaaaccatatagtatatacaatacatgatttgtgccgttgacctttcccccgtgtgtaaatgggcatatttcctgagtttggtggctggatcagtcagaacactcaacagcctaaaaaatctgaaaaagtgaaatccaagcctgtgagagagacaaaaactcacgatgagagagatgagacgaaggagcaattaaaactgtggagagatgcaaataagaaggaacaatatcatgaaccttctcctacggtgaaggtgcatacggaccataatattgatagcttttccagtataaaaatggaatttacattaggattgccacctcaagcagcttacgacgttttaactaatcaagacaacaaaacatactccagagaaatcaatggccgcccacttctgaaagccatatcaagaaaagttacatcagagagaggtatagggaataggccgatcctggaggttgataaagagttgtcatggaacttccttttcttttcaggaactatcccaatacgtctaaatgtcctcgaaaacccaaaagaactttcgacatataactggaaaaggagaaaaggaatggactacatggaaacgttcgaggtcaactatacagtagagccaatgtatgtcgatgcagaacgcttgtgcaagcacaagaagccgaagagtagagaagaatacagaaaatgtagtggtggaaaaggattgattgcgtccaaggttaaagttgaccagaattttaggccttcttttccttggaatctgccactgctgtcttcctactttcgccggttcactgttgagaccactaagaaagtggcggaagattttcaaacgcgggctggcgatatccgacatcggttgtaacgtctgagtcttgcgcaagggcgggggtgaaagcgacgaacaaattttcttagacatgatattaattatgttatatcgattatttgcatcggtaaaataagaaattttacaaccctgaaaaggcagaaaacagatgcaatatactatatggcttaatatacggtagattttcaataaactattccctctgttcc

SEQ ID NO: 20891 - protein, 268 aa, Zea mays subsp. mays
  peptide (1)..(268): Ceres Seq. ID no. 15179027
  misc_feature (145)..(248): Pfam Name: Pfam Description:  Domain of unknown function DUF220
  misc_feature (1)..(265): NCBI GI NO: 15220781 NR Description: OBP32pep protein -related [Arabidopsis thaliana]
  misc_feature (1)..(165): NCBI GI NO: 8778586 NR Description: F28C11.14 [Arabidopsis thaliana]
  misc_feature (174)..(265): NCBI GI NO: 8778586 NR Description: F28C11.14 [Arabidopsis thaliana]
  misc_feature (1)..(158): NCBI GI NO: 25373400 NR Description: hypothetical protein F5O8.7
  misc_feature (183)..(265): NCBI GI NO: 25373400 NR Description: hypothetical protein F5O8.7
  misc_feature (1)..(265): NCBI GI NO: 25373395 NR Description: hypothetical protein F5O8
  misc_feature (1)..(265): NCBI GI NO: 15220802 NR Description: OBP32pep protein -related [Arabidopsis thaliana]
  misc_feature (112)..(268): NCBI GI NO: 8778583 NR Description: F28C11.19 [Arabidopsis thaliana]
  misc_feature (1)..(117): NCBI GI NO: 8778583 NR Description: F28C11.19 [Arabidopsis thaliana]
  misc_feature (1)..(266): NCBI GI NO: 15220799 NR Description: OBP32pep protein -related [Arabidopsis thaliana]
MGIFPEFGGWISQNTQQPKKSEKVKSKPVRETKTHDERDETKEQLKLWRDANKKEQYHEPSPTVKVHTDHNIDSFSSIKMEFTLGLPPQAAYDVLTNQDNKTYSREINGRPLLKAISRKVTSERGIGNRPILEVDKELSWNFLFFSGTIPIRLNVLENPKELSTYNWKRRKGMDYMETFEVNYTVEPMYVDAERLCKHKKPKSREEYRKCSGGKGLIASKVKVDQNFRPSFPWNLPLLSSYFRRFTVETTKKVAEDFQTRAGDIRHRL

SEQ ID NO: 20892 - protein, 189 aa, Zea mays subsp. mays
  peptide (1)..(189): Ceres Seq. ID no. 15179028
  misc_feature (66)..(169): Pfam Name: Pfam Description:  Domain of unknown function DUF220
  misc_feature (1)..(186): NCBI GI NO: 15220781 NR Description: OBP32pep protein -related [Arabidopsis thaliana]
  misc_feature (1)..(86): NCBI GI NO: 8778586 NR Description: F28C11.14 [Arabidopsis thaliana]
  misc_feature (95)..(186): NCBI GI NO: 8778586 NR Description: F28C11.14 [Arabidopsis thaliana]
  misc_feature (1)..(79): NCBI GI NO: 25373400 NR Description: hypothetical protein F5O8.7
  misc_feature (104)..(186): NCBI GI NO: 25373400 NR Description: hypothetical protein F5O8.7
  misc_feature (1)..(186): NCBI GI NO: 25373395 NR Description: hypothetical protein F5O8
  misc_feature (1)..(186): NCBI GI NO: 15220802 NR Description: OBP32pep protein -related [Arabidopsis thaliana]
  misc_feature (33)..(189): NCBI GI NO: 8778583 NR Description: F28C11.19 [Arabidopsis thaliana]
  misc_feature (1)..(38): NCBI GI NO: 8778583 NR Description: F28C11.19 [Arabidopsis thaliana]
  misc_feature (1)..(187): NCBI GI NO: 15220799 NR Description: OBP32pep protein -related [Arabidopsis thaliana]
MEFTLGLPPQAAYDVLTNQDNKTYSREINGRPLLKAISRKVTSERGIGNRPILEVDKELSWNFLFFSGTIPIRLNVLENPKELSTYNWKRRKGMDYMETFEVNYTVEPMYVDAERLCKHKKPKSREEYRKCSGGKGLIASKVKVDQNFRPSFPWNLPLLSSYFRRFTVETTKKVAEDFQTRAGDIRHRL

SEQ ID NO: 20893 - DNA, 2153 bp, Zea mays subsp. mays
  misc_feature (1)..(2153): Ceres Seq. ID no. 15178310
gtccttcttccttctctcacacactccactccacgtccccctccttcaaatcctttcaacacccaagcacaaggagagagaagccgccgccgccgccatggacaatattgaggtgaggaggaggaagaagaaagggagaagcagcggacgccgccaggggggacgggtacaggcggtcctgcgcgccggcctcgtcgccatggccttcgccctcctctgcctctgctcctccacgccctccgccattgccctcaccccagacggcgaggcgttgctggagctcaagctggccttcaacgccaccgtgcagcggctcaccagctggcgtcccagcgaccccaacccctgcggctgggagggcatctcctgctccgtccctgacctcagggtccaatccataaacctcccattcatgcagctcgggggcatcatttcgcccagcatcgggaggctcgacaagctgcagagactagctctgcaccagaacagcttgcacggcccaatccctgcagagatcaagaactgcaccgagctcagggcaatttacctgagagccaactacctgcaaggaggcatcccttcagagattggcgagctcgtgcacctcaccatcttggacctgtcaagcaatctgctgaggggcacaataccggcctcgatcggaagcctcactcacctgcgctttctgaacctgtctactaacttcttctccggagagatcccaaatgctggtgtcctcggaaccttcaaaagcagctcgttcgttggaaatctggagctctgtggcctgtccatccagaaagcttgccgtggaaccctcggctttcctgctgtgttgccacattccgatccgctctcttcggctggtgtttctccaatcaataacaacaagacgtcacactttctcaatggcgtcgtgatcggctcgatgtcaaccttggctcttgccttggtagccgtacttgggttcctatggatctgcttgctgtccattaagagtagcattggtggaaactatgtaaagatggacaaacagactgttcctgatggtgcaaagcttgtgacataccagtggaaccttccatattcatcaagcgagattattagaaggttggagctgcttgatgaagaggacgtggtcggttgtgggggctttggcacggtgtacaggatggtgatggatgatggcacgtcgtttgccgtcaagaggattgacctcagccgcgaaagtcgcgacaggaccttcgagaaggagcttgagattctgggcagcatcaggcacataaaccttgtcaatctgcgaggctactgccggctccccacagcgaagctactcgtatatgatttcgttgagctgggcagcttggattgctaccttcatggagatgaacaagaggagcagccattgaactggaacgcgcggatgaaaatcgcgcttggctcggctcgaggcctggcatatctgcaccacgattgctcgcccgggatcgtgcatagggacatcaaagccagtaacatcctgctggatagaagcttggagcctcgtgtctccgattttggcctcgcgaggctgcttgtagacagtgctgcccacgttaccaccgtcgtcgcgggcacctttggatacctagcaccagagtacttgcaaaacgggcatgctactgagaaatcagacgtgtatagctttggagtgcttatgctggagctagtgaccggaaagaggccgaccgattcttgcttcatcaagaagggactgaacattgttggctggctcaacaccctaactggggagcaccggctggaggatatcatcgatgagcgatgcggcgatgtggaggtggaagccgtggaagccatcctggacatcgcagccatgtgcaccgacgcagacccggggcagcggccatcgatgagcgctgtcctcaagatgctggaggaggagatcttgtccccctgcatgagcgagctgtgctacgagcagcacctggagctctgagctgaggaggaagatggtgctggctgcgtgcgtgaagcgtcatggatgagactgaagttttgtactgtagatacaacgatgatgagtgtaggtgatgtactgatgttttgtgtgctcttagggccaatgaagaacagtaagcagcagttcgtgagtg

SEQ ID NO: 20894 - protein, 664 aa, Zea mays subsp. mays
  peptide (1)..(664): Ceres Seq. ID no. 15178311
  misc_feature (63)..(651): NCBI GI NO: 30697726 NR Description: leucine rich repeat protein family
  misc_feature (88)..(651): NCBI GI NO: 10177448 NR Description: receptor-like protein kinase
  misc_feature (157)..(655): NCBI GI NO: 25403114 NR Description: probable protein kinase
  misc_feature (157)..(655): NCBI GI NO: 30692520 NR Description: leucine-rich repeat transmembrane protein kinase
  misc_feature (157)..(655): NCBI GI NO: 15227455 NR Description: leucine-rich repeat transmembrane protein kinase
  misc_feature (69)..(664): NCBI GI NO: 40253600 NR Description: putative somatic embryogenesis receptor kinase 1
  misc_feature (59)..(664): NCBI GI NO: 21740899 NR Description: OSJNBa0036B21.13
  misc_feature (79)..(664): NCBI GI NO: 13897310 NR Description: SERK2 protein [Zea mays]
  misc_feature (82)..(650): NCBI GI NO: 13897308 NR Description: SERK1 protein [Zea mays]
  misc_feature (69)..(664): NCBI GI NO: 38679443 NR Description: benzothiadiazole-induced somatic embryogenesisreceptor kinase 1
SFFLLSHTPLHVPLLQILSTPKHKEREAAAAAMDNIEVRRRKKKGRSSGRRQGGRVQAVLRAGLVAMAFALLCLCSSTPSAIALTPDGEALLELKLAFNATVQRLTSWRPSDPNPCGWEGISCSVPDLRVQSINLPFMQLGGIISPSIGRLDKLQRLALHQNSLHGPIPAEIKNCTELRAIYLRANYLQGGIPSEIGELVHLTILDLSSNLLRGTIPASIGSLTHLRFLNLSTNFFSGEIPNAGVLGTFKSSSFVGNLELCGLSIQKACRGTLGFPAVLPHSDPLSSAGVSPINNNKTSHFLNGVVIGSMSTLALALVAVLGFLWICLLSIKSSIGGNYVKMDKQTVPDGAKLVTYQWNLPYSSSEIIRRLELLDEEDVVGCGGFGTVYRMVMDDGTSFAVKRIDLSRESRDRTFEKELEILGSIRHINLVNLRGYCRLPTAKLLVYDFVELGSLDCYLHGDEQEEQPLNWNARMKIALGSARGLAYLHHDCSPGIVHRDIKASNILLDRSLEPRVSDFGLARLLVDSAAHVTTVVAGTFGYLAPEYLQNGHATEKSDVYSFGVLMLELVTGKRPTDSCFIKKGLNIVGWLNTLTGEHRLEDIIDERCGDVEVEAVEAILDIAAMCTDADPGQRPSMSAVLKMLEEEILSPCMSELCYEQHLEL

SEQ ID NO: 20895 - protein, 632 aa, Zea mays subsp. mays
  peptide (1)..(632): Ceres Seq. ID no. 15178312
  misc_feature (31)..(619): NCBI GI NO: 30697726 NR Description: leucine rich repeat protein family
  misc_feature (56)..(619): NCBI GI NO: 10177448 NR Description: receptor-like protein kinase
  misc_feature (125)..(623): NCBI GI NO: 25403114 NR Description: probable protein kinase
  misc_feature (125)..(623): NCBI GI NO: 30692520 NR Description: leucine-rich repeat transmembrane protein kinase
  misc_feature (125)..(623): NCBI GI NO: 15227455 NR Description: leucine-rich repeat transmembrane protein kinase
  misc_feature (37)..(632): NCBI GI NO: 40253600 NR Description: putative somatic embryogenesis receptor kinase 1
  misc_feature (27)..(632): NCBI GI NO: 21740899 NR Description: OSJNBa0036B21.13
  misc_feature (47)..(632): NCBI GI NO: 13897310 NR Description: SERK2 protein [Zea mays]
  misc_feature (50)..(618): NCBI GI NO: 13897308 NR Description: SERK1 protein [Zea mays]
  misc_feature (37)..(632): NCBI GI NO: 38679443 NR Description: benzothiadiazole-induced somatic embryogenesisreceptor kinase 1
MDNIEVRRRKKKGRSSGRRQGGRVQAVLRAGLVAMAFALLCLCSSTPSAIALTPDGEALLELKLAFNATVQRLTSWRPSDPNPCGWEGISCSVPDLRVQSINLPFMQLGGIISPSIGRLDKLQRLALHQNSLHGPIPAEIKNCTELRAIYLRANYLQGGIPSEIGELVHLTILDLSSNLLRGTIPASIGSLTHLRFLNLSTNFFSGEIPNAGVLGTFKSSSFVGNLELCGLSIQKACRGTLGFPAVLPHSDPLSSAGVSPINNNKTSHFLNGVVIGSMSTLALALVAVLGFLWICLLSIKSSIGGNYVKMDKQTVPDGAKLVTYQWNLPYSSSEIIRRLELLDEEDVVGCGGFGTVYRMVMDDGTSFAVKRIDLSRESRDRTFEKELEILGSIRHINLVNLRGYCRLPTAKLLVYDFVELGSLDCYLHGDEQEEQPLNWNARMKIALGSARGLAYLHHDCSPGIVHRDIKASNILLDRSLEPRVSDFGLARLLVDSAAHVTTVVAGTFGYLAPEYLQNGHATEKSDVYSFGVLMLELVTGKRPTDSCFIKKGLNIVGWLNTLTGEHRLEDIIDERCGDVEVEAVEAILDIAAMCTDADPGQRPSMSAVLKMLEEEILSPCMSELCYEQHLEL

SEQ ID NO: 20896 - protein, 598 aa, Zea mays subsp. mays
  peptide (1)..(598): Ceres Seq. ID no. 15178313
  misc_feature (1)..(585): NCBI GI NO: 30697726 NR Description: leucine rich repeat protein family
  misc_feature (22)..(585): NCBI GI NO: 10177448 NR Description: receptor-like protein kinase
  misc_feature (91)..(589): NCBI GI NO: 25403114 NR Description: probable protein kinase
  misc_feature (91)..(589): NCBI GI NO: 30692520 NR Description: leucine-rich repeat transmembrane protein kinase
  misc_feature (91)..(589): NCBI GI NO: 15227455 NR Description: leucine-rich repeat transmembrane protein kinase
  misc_feature (3)..(598): NCBI GI NO: 40253600 NR Description: putative somatic embryogenesis receptor kinase 1
  misc_feature (1)..(598): NCBI GI NO: 21740899 NR Description: OSJNBa0036B21.13
  misc_feature (13)..(598): NCBI GI NO: 13897310 NR Description: SERK2 protein [Zea mays]
  misc_feature (16)..(584): NCBI GI NO: 13897308 NR Description: SERK1 protein [Zea mays]
  misc_feature (3)..(598): NCBI GI NO: 38679443 NR Description: benzothiadiazole-induced somatic embryogenesisreceptor kinase 1
MAFALLCLCSSTPSAIALTPDGEALLELKLAFNATVQRLTSWRPSDPNPCGWEGISCSVPDLRVQSINLPFMQLGGIISPSIGRLDKLQRLALHQNSLHGPIPAEIKNCTELRAIYLRANYLQGGIPSEIGELVHLTILDLSSNLLRGTIPASIGSLTHLRFLNLSTNFFSGEIPNAGVLGTFKSSSFVGNLELCGLSIQKACRGTLGFPAVLPHSDPLSSAGVSPINNNKTSHFLNGVVIGSMSTLALALVAVLGFLWICLLSIKSSIGGNYVKMDKQTVPDGAKLVTYQWNLPYSSSEIIRRLELLDEEDVVGCGGFGTVYRMVMDDGTSFAVKRIDLSRESRDRTFEKELEILGSIRHINLVNLRGYCRLPTAKLLVYDFVELGSLDCYLHGDEQEEQPLNWNARMKIALGSARGLAYLHHDCSPGIVHRDIKASNILLDRSLEPRVSDFGLARLLVDSAAHVTTVVAGTFGYLAPEYLQNGHATEKSDVYSFGVLMLELVTGKRPTDSCFIKKGLNIVGWLNTLTGEHRLEDIIDERCGDVEVEAVEAILDIAAMCTDADPGQRPSMSAVLKMLEEEILSPCMSELCYEQHLEL

SEQ ID NO: 20897 - DNA, 1490 bp, Zea mays subsp. mays
  misc_feature (1)..(1490): Ceres Seq. ID no. 15180075
gaaaaaaggacccttctttttcttggcactcccagcggaaggaacggtggcgtttctccgttgtacgaagtggcgccatctgcaccggtcggcttgagcggtggctttcctcgtcagttgctcttcccgaacgacgccagcaccgcccgtggcatctgcgtctctgccttctccaaccgccagcaccgctccccgatccaggaccaagaagcgtgtgaggagctttcagctgccacccggtgccaccatgctccggcatctccagcgatccctccgtgccattcactacttacccatcatcggacgtgatgccgcctgcaaccccattcccctccaccggtcctgggattcacatatagagcatgccaccagagatttctctacttccacaagacttacaggacatccaatatatcagcagaatgagttagaaccaactacgcctgtgaaggatactgacataataattgaccgcatacgaaagagcacacggaaattggaggaaggccctgttggaaaaaatctgtcttcagcggagaaaaggaaatttcttgtcaacactctccttagccttgaagattcaagagaagctgtttatggcacccttgatgcctgggttgcctttgagcaggattttcctttggcttcactaaagcaagcactttcagttcttgagaaggaggaacagtggcatagaattgtccaggtgatcaaatggatgctgagcaaagggcaaggaaatacaatgagaacatatgagctattggcatgtgcactcgagaaggataatagagctgaggaagcacatagaatctggcagaataaagtgggccacgatctgcattcggttccttggcgtttctgccgtcttatgttggctatctactaccgaaacaataggctagacaggctcgtgaagctcttcaaagaactcgaagcttgtggccgtaaacctccaagcaaagacattgtgcggaaagtcgaagatgcgtacgaaacgcttggattactagaagataaaaaggtgttgcttgataaatacaaggatttatacaacaaaccgtctcgggacgatcggaagaaaggctccaaatccaaaaagatcgagtctgataaaccatctgatggtgacagtaaggaaagcaagatggaaacatctgagaaccttgaagaccgctgtttccctgtggatgcaaaaccagatgcctctgcttaggctcatcactgaaccaccgacgtcgccataagatttggccaaaacccggtgctgtcagcattagcgattggcgtgctctcagtacacgtttgctcccctaaccagttagtgttttttctttctctctagacatgttacaagggcatttgtatttgctgttttgcactgacatcatttttgccaagaccctaagcggtataatactgtgcgacggctatgtataatactgtgcgacgttcattactggcagcaatatacacaccccttgttcgac

SEQ ID NO: 20898 - protein, 322 aa, Zea mays subsp. mays
  peptide (1)..(322): Ceres Seq. ID no. 15180076
  misc_feature (89)..(309): NCBI GI NO: 18390413 NR Description: expressed protein [Arabidopsis thaliana]
  misc_feature (89)..(309): NCBI GI NO: 30678929 NR Description: expressed protein [Arabidopsis thaliana]
  misc_feature (106)..(309): NCBI GI NO: 25406795 NR Description: hypothetical protein
  misc_feature (79)..(269): NCBI GI NO: 18415213 NR Description: pentatricopeptide (PPR) repeat-containing protein
  misc_feature (79)..(285): NCBI GI NO: 7485419 NR Description: hypothetical protein F13C5
  misc_feature (76)..(322): NCBI GI NO: 34909686 NR Description: B1131G08.1
  misc_feature (95)..(269): NCBI GI NO: 34393638 NR Description: pentatricopeptide
  misc_feature (91)..(309): NCBI GI NO: 18415645 NR Description: pentatricopeptide (PPR) repeat-containing protein
  misc_feature (102)..(309): NCBI GI NO: 7486589 NR Description: hypothetical protein F7J7
MLRHLQRSLRAIHYLPIIGRDAACNPIPLHRSWDSHIEHATRDFSTSTRLTGHPIYQQNELEPTTPVKDTDIIIDRIRKSTRKLEEGPVGKNLSSAEKRKFLVNTLLSLEDSREAVYGTLDAWVAFEQDFPLASLKQALSVLEKEEQWHRIVQVIKWMLSKGQGNTMRTYELLACALEKDNRAEEAHRIWQNKVGHDLHSVPWRFCRLMLAIYYRNNRLDRLVKLFKELEACGRKPPSKDIVRKVEDAYETLGLLEDKKVLLDKYKDLYNKPSRDDRKKGSKSKKIESDKPSDGDSKESKMETSENLEDRCFPVDAKPDASA

SEQ ID NO: 20899 - protein, 165 aa, Zea mays subsp. mays
  peptide (1)..(165): Ceres Seq. ID no. 15180077
  misc_feature (1)..(152): NCBI GI NO: 18390413 NR Description: expressed protein [Arabidopsis thaliana]
  misc_feature (1)..(152): NCBI GI NO: 30678929 NR Description: expressed protein [Arabidopsis thaliana]
  misc_feature (1)..(152): NCBI GI NO: 25406795 NR Description: hypothetical protein
  misc_feature (1)..(112): NCBI GI NO: 18415213 NR Description: pentatricopeptide (PPR) repeat-containing protein
  misc_feature (1)..(128): NCBI GI NO: 7485419 NR Description: hypothetical protein F13C5
  misc_feature (1)..(165): NCBI GI NO: 34909686 NR Description: B1131G08.1
  misc_feature (1)..(112): NCBI GI NO: 34393638 NR Description: pentatricopeptide
  misc_feature (1)..(152): NCBI GI NO: 18415645 NR Description: pentatricopeptide (PPR) repeat-containing protein
  misc_feature (1)..(152): NCBI GI NO: 7486589 NR Description: hypothetical protein F7J7
MLSKGQGNTMRTYELLACALEKDNRAEEAHRIWQNKVGHDLHSVPWRFCRLMLAIYYRNNRLDRLVKLFKELEACGRKPPSKDIVRKVEDAYETLGLLEDKKVLLDKYKDLYNKPSRDDRKKGSKSKKIESDKPSDGDSKESKMETSENLEDRCFPVDAKPDASA

SEQ ID NO: 20900 - DNA, 2478 bp, Zea mays subsp. mays
  misc_feature (1)..(2478): Ceres Seq. ID no. 15177678
aaaacttgccctcttctctgcttgaaccgcggagcaagaccgctcttgttctcttctctgcttgaactgcggagaaagaccgaatccgaagggacgttgggactttctggctgggaagactacataccatttctctaattcgggcgtggtttgtgctgggagggaaggaatccatggggctgcagctcgatccgcgctgagagttgaaggaaccggccttgttgtgtgctccacccaatcgaggaaaaggggcaaggattgctgctttgttgtctttggatccgttacgccattggggattcaaccatcagcagggcgaagtgacggttctgcaccacttttccccttatcctaattcgattttatttgaacactggatgtgattataatctcggttgctgttctgtgcggctctatctgagggtttcctccgtcctggatcgggaaggaaggcgcccttggatttccgtctccatggcgcccgccttgtaacccacggagtctaacttttaaatttagtgtaaatattagtggtagcagctgttaaggaagccccggtctccttagtagccaccgtgtgaatatgtcgtcagctggtgtgatcgtcttggggccagtcccaaaagaccctgctttcctgcctatctgcttcaacggcagccggtcgccacactgctcgtctgggtcacagctgcaggattccattcttattttccttgctgtgcctggtatgtcacccatgcccatgagcgtgctggaatctgagtccattgcctccgtgaagctgcgcatccagcggttcaaaggctttgtggcgacgaagcagcggcttgtgctggatgggcatgaactggcaagaaataactgcccagtcaaggattatgggctggctgagggaaatgttcttcatcttgttattcgactgtctgatctccgtgtgatcaatattgagactgcaactggaaagaagtttcagtttcaggtggatcagagccgcaatgttaagtttcttaagaacaagcttgcagcagagggtgatgaggatattggtaatcttcaggatcacaagcttgaatatgatggcgaggagcttgaggaccaccagctgatagctgatattagcaagagggatgatgctgtaattcatttgttcatcctcaaaccagcaaaagtactgacacagcaagttgatagagatactttggttacagttctcaatccacaggagaaaggcaacctgcaaaatgaacctcgctcaatgaactccacaaaatcagttgaggttaggcctgctcctgttgaaccaatagttagccaaaatgtgaagctgtcacctgaattgattaagatgataaatttaaccacagttggactggagaaagggcacctgcctgtgatgtcagctgaaggttcaggaggtgtatatttcatgcgagatgcaacaggtcagaagaatattgctgtgtttaagcctattgatgaggaacccatggccaaaaacaacccaaggggtcttcctttgtccactgatggcgaggggatgaagaggggaacaattgtagggggaggtgcattcagggaggttgcagcttatattctcgaccatccagttagtgatagtaaatctggtcacagttttgggttttctggtgtgcctcccaccacattggtccgaacctcgcatagggggaagaacttcaagattggttcactgcagatgttcatggacaacaatggaagcactgaagatatgggtcctcgaccttttcctgtcaaggaggttcataaaatagcagtactagatattaggttagctaatgctgatcgtcatgctgggaatattctagtgtgcaaggagagagaaggtggcaactacaagctgattccaattgatcatggttactgcttgccagagaagtttgaagattgtacatttgagtggctctactggccccaagcccgtgagccattcaatgatgaaaccattgaatacatcaaatcactcgatgctgaagaagacatcaagcttctcaagatccatgggtgggagctgcctccacggtgtgctcgtgtcctgcgcatcagcacaatgcttttgaagaaaggtgcatctcgtggcttcacgccctatgacatagggcgcatactatgcagggaaactgtgaatagggactctgagattgaggtcatcattcaggaagcagaggatgctgttctcccatggtccagtgaaaacatgttcttagaaactttatctgaaatcatggaccgtcacctccacaaggaatgagtttagaaattcagaataacttatctagttgctccagctgtatccggtttgttgtaagtattgtagacaaggggtgtcaagggactaatgatttcatttgtttgtatcctctcaaatgatttcacttggttgtaattgctcgagtactttgcttatgcacattttgtgaataatatatttgtttggct

SEQ ID NO: 20901 - protein, 568 aa, Zea mays subsp. mays
  peptide (1)..(568): Ceres Seq. ID no. 15177679
  misc_feature (276)..(525): Pfam Name: Pfam Description:  Phosphatidylinositol 3- and 4-kinase
  misc_feature (1)..(568): NCBI GI NO: 18407090 NR Description: ubiquitin family [Arabidopsis thaliana]
  misc_feature (34)..(565): NCBI GI NO: 15237921 NR Description: ubiquitin family [Arabidopsis thaliana]
  misc_feature (1)..(567): NCBI GI NO: 34904388 NR Description: unnamed protein product
  misc_feature (277)..(565): NCBI GI NO: 6633833 NR Description: F1N19.4 [Arabidopsis thaliana]
  misc_feature (1)..(234): NCBI GI NO: 6633833 NR Description: F1N19.4 [Arabidopsis thaliana]
  misc_feature (283)..(565): NCBI GI NO: 15217655 NR Description: phosphatidylinositol 3- and 4-kinase family
  misc_feature (255)..(562): NCBI GI NO: 32488384 NR Description: OSJNBa0043A12.14
  misc_feature (235)..(544): NCBI GI NO: 18395629 NR Description: phosphatidylinositol 3- and 4-kinase family
  misc_feature (235)..(544): NCBI GI NO: 25363315 NR Description: hypothetical protein At2g03890
  misc_feature (235)..(541): NCBI GI NO: 18394020 NR Description: phosphatidylinositol 3- and 4-kinase family
MSSAGVIVLGPVPKDPAFLPICFNGSRSPHCSSGSQLQDSILIFLAVPGMSPMPMSVLESESIASVKLRIQRFKGFVATKQRLVLDGHELARNNCPVKDYGLAEGNVLHLVIRLSDLRVINIETATGKKFQFQVDQSRNVKFLKNKLAAEGDEDIGNLQDHKLEYDGEELEDHQLIADISKRDDAVIHLFILKPAKVLTQQVDRDTLVTVLNPQEKGNLQNEPRSMNSTKSVEVRPAPVEPIVSQNVKLSPELIKMINLTTVGLEKGHLPVMSAEGSGGVYFMRDATGQKNIAVFKPIDEEPMAKNNPRGLPLSTDGEGMKRGTIVGGGAFREVAAYILDHPVSDSKSGHSFGFSGVPPTTLVRTSHRGKNFKIGSLQMFMDNNGSTEDMGPRPFPVKEVHKIAVLDIRLANADRHAGNILVCKEREGGNYKLIPIDHGYCLPEKFEDCTFEWLYWPQAREPFNDETIEYIKSLDAEEDIKLLKIHGWELPPRCARVLRISTMLLKKGASRGFTPYDIGRILCRETVNRDSEIEVIIQEAEDAVLPWSSENMFLETLSEIMDRHLHKE

SEQ ID NO: 20902 - protein, 519 aa, Zea mays subsp. mays
  peptide (1)..(519): Ceres Seq. ID no. 15177680
  misc_feature (227)..(476): Pfam Name: Pfam Description:  Phosphatidylinositol 3- and 4-kinase
  misc_feature (1)..(519): NCBI GI NO: 18407090 NR Description: ubiquitin family [Arabidopsis thaliana]
  misc_feature (1)..(516): NCBI GI NO: 15237921 NR Description: ubiquitin family [Arabidopsis thaliana]
  misc_feature (1)..(518): NCBI GI NO: 34904388 NR Description: unnamed protein product
  misc_feature (228)..(516): NCBI GI NO: 6633833 NR Description: F1N19.4 [Arabidopsis thaliana]
  misc_feature (1)..(185): NCBI GI NO: 6633833 NR Description: F1N19.4 [Arabidopsis thaliana]
  misc_feature (234)..(516): NCBI GI NO: 15217655 NR Description: phosphatidylinositol 3- and 4-kinase family
  misc_feature (206)..(513): NCBI GI NO: 32488384 NR Description: OSJNBa0043A12.14
  misc_feature (186)..(495): NCBI GI NO: 18395629 NR Description: phosphatidylinositol 3- and 4-kinase family
  misc_feature (186)..(495): NCBI GI NO: 25363315 NR Description: hypothetical protein At2g03890
  misc_feature (186)..(492): NCBI GI NO: 18394020 NR Description: phosphatidylinositol 3- and 4-kinase family
MSPMPMSVLESESIASVKLRIQRFKGFVATKQRLVLDGHELARNNCPVKDYGLAEGNVLHLVIRLSDLRVINIETATGKKFQFQVDQSRNVKFLKNKLAAEGDEDIGNLQDHKLEYDGEELEDHQLIADISKRDDAVIHLFILKPAKVLTQQVDRDTLVTVLNPQEKGNLQNEPRSMNSTKSVEVRPAPVEPIVSQNVKLSPELIKMINLTTVGLEKGHLPVMSAEGSGGVYFMRDATGQKNIAVFKPIDEEPMAKNNPRGLPLSTDGEGMKRGTIVGGGAFREVAAYILDHPVSDSKSGHSFGFSGVPPTTLVRTSHRGKNFKIGSLQMFMDNNGSTEDMGPRPFPVKEVHKIAVLDIRLANADRHAGNILVCKEREGGNYKLIPIDHGYCLPEKFEDCTFEWLYWPQAREPFNDETIEYIKSLDAEEDIKLLKIHGWELPPRCARVLRISTMLLKKGASRGFTPYDIGRILCRETVNRDSEIEVIIQEAEDAVLPWSSENMFLETLSEIMDRHLHKE

SEQ ID NO: 20903 - protein, 516 aa, Zea mays subsp. mays
  peptide (1)..(516): Ceres Seq. ID no. 15177681
  misc_feature (224)..(473): Pfam Name: Pfam Description:  Phosphatidylinositol 3- and 4-kinase
  misc_feature (1)..(516): NCBI GI NO: 18407090 NR Description: ubiquitin family [Arabidopsis thaliana]
  misc_feature (1)..(513): NCBI GI NO: 15237921 NR Description: ubiquitin family [Arabidopsis thaliana]
  misc_feature (1)..(515): NCBI GI NO: 34904388 NR Description: unnamed protein product
  misc_feature (225)..(513): NCBI GI NO: 6633833 NR Description: F1N19.4 [Arabidopsis thaliana]
  misc_feature (1)..(182): NCBI GI NO: 6633833 NR Description: F1N19.4 [Arabidopsis thaliana]
  misc_feature (231)..(513): NCBI GI NO: 15217655 NR Description: phosphatidylinositol 3- and 4-kinase family
  misc_feature (203)..(510): NCBI GI NO: 32488384 NR Description: OSJNBa0043A12.14
  misc_feature (183)..(492): NCBI GI NO: 18395629 NR Description: phosphatidylinositol 3- and 4-kinase family
  misc_feature (183)..(492): NCBI GI NO: 25363315 NR Description: hypothetical protein At2g03890
  misc_feature (183)..(489): NCBI GI NO: 18394020 NR Description: phosphatidylinositol 3- and 4-kinase family
MPMSVLESESIASVKLRIQRFKGFVATKQRLVLDGHELARNNCPVKDYGLAEGNVLHLVIRLSDLRVINIETATGKKFQFQVDQSRNVKFLKNKLAAEGDEDIGNLQDHKLEYDGEELEDHQLIADISKRDDAVIHLFILKPAKVLTQQVDRDTLVTVLNPQEKGNLQNEPRSMNSTKSVEVRPAPVEPIVSQNVKLSPELIKMINLTTVGLEKGHLPVMSAEGSGGVYFMRDATGQKNIAVFKPIDEEPMAKNNPRGLPLSTDGEGMKRGTIVGGGAFREVAAYILDHPVSDSKSGHSFGFSGVPPTTLVRTSHRGKNFKIGSLQMFMDNNGSTEDMGPRPFPVKEVHKIAVLDIRLANADRHAGNILVCKEREGGNYKLIPIDHGYCLPEKFEDCTFEWLYWPQAREPFNDETIEYIKSLDAEEDIKLLKIHGWELPPRCARVLRISTMLLKKGASRGFTPYDIGRILCRETVNRDSEIEVIIQEAEDAVLPWSSENMFLETLSEIMDRHLHKE

SEQ ID NO: 20904 - DNA, 752 bp, Zea mays subsp. mays
  misc_feature (1)..(752): Ceres Seq. ID no. 15179225
aacatcgaaccatggagaaatcaactagaaccctaatgatcataaccatcgtgataacctccatgttggtagggtttggaagctcagatctggatcaagacagagaagagtgtacggaccagttgatagcactctcaccatgtctcccatacgtgggaggaaacgcaaaggctccaacaaaagattgttgtggtggttttgatcaggttataacaaagagtgagaagtgtgtttgcatattggtcaaagacaaagatgatcctaatcttggcctcaagtttaacgcaacactagctgctcatatccccaccctttgtcatattacagctcctaacatcaccaagtgtatttcgcttctgcatttatctccaaactcgacactggctaaagagtttgagagtttaggaaggattgaatatgaaggaaagaccaactccacatctccttcacataatgttaaagatgggactggaggaggaaaagctgaacaagtgaagagtactggagagaagaagagttggttggctgttgagcttttaatatttgctctcttctctcatcttctcttcattatcccttctttcacatcttcctcctttatttaatgttacgttcttctgctttaatttatgttatatagttacatctaaatttatatatgcatgtgcatgcatatgatttatgcatgtaagtgagtgcaaacttgtaatgggtattgagattttaataacgaaagcgtagcttttaatctt

SEQ ID NO: 20905 - protein, 200 aa, Zea mays subsp. mays
  peptide (1)..(200): Ceres Seq. ID no. 15179226
  misc_feature (37)..(115): Pfam Name: Pfam Description:  Protease inhibitor/seed storage/LTP family
  misc_feature (4)..(189): NCBI GI NO: 18405294 NR Description: protease inhibitor/seed storage/lipid transfer
  misc_feature (21)..(189): NCBI GI NO: 21537387 NR Description: unknown [Arabidopsis thaliana]
  misc_feature (4)..(191): NCBI GI NO: 15224863 NR Description: lipid transfer protein - related
  misc_feature (14)..(191): NCBI GI NO: 15224862 NR Description: lipid transfer protein family
  misc_feature (11)..(177): NCBI GI NO: 34394084 NR Description: lipid transfer protein-like
  misc_feature (11)..(154): NCBI GI NO: 15231070 NR Description: protease inhibitor/seed storage/lipid transfer
  misc_feature (11)..(154): NCBI GI NO: 21555220 NR Description: unknown [Arabidopsis thaliana]
  misc_feature (16)..(194): NCBI GI NO: 21592774 NR Description: unknown [Arabidopsis thaliana]
  misc_feature (16)..(194): NCBI GI NO: 18407534 NR Description: protease inhibitor/seed storage/lipid transfer
  misc_feature (12)..(115): NCBI GI NO: 18403453 NR Description: protease inhibitor/seed storage/lipid transfer
HRTMEKSTRTLMIITIVITSMLVGFGSSDLDQDREECTDQLIALSPCLPYVGGNAKAPTKDCCGGFDQVITKSEKCVCILVKDKDDPNLGLKFNATLAAHIPTLCHITAPNITKCISLLHLSPNSTLAKEFESLGRIEYEGKTNSTSPSHNVKDGTGGGKAEQVKSTGEKKSWLAVELLIFALFSHLLFIIPSFTSSSFI

SEQ ID NO: 20906 - protein, 197 aa, Zea mays subsp. mays
  peptide (1)..(197): Ceres Seq. ID no. 15179227
  misc_feature (34)..(112): Pfam Name: Pfam Description:  Protease inhibitor/seed storage/LTP family
  misc_feature (1)..(186): NCBI GI NO: 18405294 NR Description: protease inhibitor/seed storage/lipid transfer
  misc_feature (18)..(186): NCBI GI NO: 21537387 NR Description: unknown [Arabidopsis thaliana]
  misc_feature (1)..(188): NCBI GI NO: 15224863 NR Description: lipid transfer protein - related
  misc_feature (11)..(188): NCBI GI NO: 15224862 NR Description: lipid transfer protein family
  misc_feature (8)..(174): NCBI GI NO: 34394084 NR Description: lipid transfer protein-like
  misc_feature (8)..(151): NCBI GI NO: 15231070 NR Description: protease inhibitor/seed storage/lipid transfer
  misc_feature (8)..(151): NCBI GI NO: 21555220 NR Description: unknown [Arabidopsis thaliana]
  misc_feature (13)..(191): NCBI GI NO: 21592774 NR Description: unknown [Arabidopsis thaliana]
  misc_feature (13)..(191): NCBI GI NO: 18407534 NR Description: protease inhibitor/seed storage/lipid transfer
  misc_feature (9)..(112): NCBI GI NO: 18403453 NR Description: protease inhibitor/seed storage/lipid transfer
MEKSTRTLMIITIVITSMLVGFGSSDLDQDREECTDQLIALSPCLPYVGGNAKAPTKDCCGGFDQVITKSEKCVCILVKDKDDPNLGLKFNATLAAHIPTLCHITAPNITKCISLLHLSPNSTLAKEFESLGRIEYEGKTNSTSPSHNVKDGTGGGKAEQVKSTGEKKSWLAVELLIFALFSHLLFIIPSFTSSSFI

SEQ ID NO: 20907 - protein, 189 aa, Zea mays subsp. mays
  peptide (1)..(189): Ceres Seq. ID no. 15179228
  misc_feature (26)..(104): Pfam Name: Pfam Description:  Protease inhibitor/seed storage/LTP family
  misc_feature (1)..(178): NCBI GI NO: 18405294 NR Description: protease inhibitor/seed storage/lipid transfer
  misc_feature (10)..(178): NCBI GI NO: 21537387 NR Description: unknown [Arabidopsis thaliana]
  misc_feature (1)..(180): NCBI GI NO: 15224863 NR Description: lipid transfer protein - related
  misc_feature (3)..(180): NCBI GI NO: 15224862 NR Description: lipid transfer protein family
  misc_feature (1)..(166): NCBI GI NO: 34394084 NR Description: lipid transfer protein-like
  misc_feature (1)..(143): NCBI GI NO: 15231070 NR Description: protease inhibitor/seed storage/lipid transfer
  misc_feature (1)..(143): NCBI GI NO: 21555220 NR Description: unknown [Arabidopsis thaliana]
  misc_feature (5)..(183): NCBI GI NO: 21592774 NR Description: unknown [Arabidopsis thaliana]
  misc_feature (5)..(183): NCBI GI NO: 18407534 NR Description: protease inhibitor/seed storage/lipid transfer
  misc_feature (1)..(104): NCBI GI NO: 18403453 NR Description: protease inhibitor/seed storage/lipid transfer
MIITIVITSMLVGFGSSDLDQDREECTDQLIALSPCLPYVGGNAKAPTKDCCGGFDQVITKSEKCVCILVKDKDDPNLGLKFNATLAAHIPTLCHITAPNITKCISLLHLSPNSTLAKEFESLGRIEYEGKTNSTSPSHNVKDGTGGGKAEQVKSTGEKKSWLAVELLIFALFSHLLFIIPSFTSSSFI

SEQ ID NO: 20908 - DNA, 960 bp, Zea mays subsp. mays
  misc_feature (1)..(960): Ceres Seq. ID no. 15179139
atgaaagcatcctattaaaaaaaagaagctcgtctctatctcttcaccacttcaactttaaaaaaaaaaacaaaacaaaaccagtttcctctttgtatcagacaggcatgtctatgatcatggcttcctctgctgctgctgcatcgatctctcttgtaaggaatctctctcgccatcatcaaacccctcttttggattactctagttccttccataataacctaaggatctcatccaacggtccagctttgtccacacgatcaagatccaccacctcctcctccatcttcagaaccatgtgcagcagcagcagcgagaactctagacccactaagatccaagaactcaacgtgtacgagttcaacgaaggcgaccgacacagccccgcggttctaaaactcggcaagaacccacaacagctttgcatcggcgacctcgtccctttcactaacaaactctacaccggagacctcaagaaacgcgtcgggatcaccgcaggtctctgcgttttgatccagcacgttcctgagaagaaaggcgaacgcttcgaagcttcttacagcttctacttcggagactacggtcacatttccgttcagggaccttacctgacttacgaggacacgcttctcgccatcaccggtggcaccggcgtcttcgaaggagcttacggacaggtcaagcttcatcagcttgtgtatccgaccaagctgttctacactttttacttgaaaggtgttgtcgctgatttgcctgtggagctcaccggaaaacatgttgagccgtcgaaggatgtgaagccggcggcggaagctcaggctactcagctcggggccactatcctaaactttaccgaataagtaatcattgtgtcgttgagctttctctttctcttggatcttaatgggtctgtttaatgggcctaaataatgggctttaaaataatgagccgcttttcgt

SEQ ID NO: 20909 - protein, 285 aa, Zea mays subsp. mays
  peptide (1)..(285): Ceres Seq. ID no. 15179140
  misc_feature (107)..(284): Pfam Name: Pfam Description:  Allene oxide cyclase
  misc_feature (38)..(284): NCBI GI NO: 15222241 NR Description: allene oxide cyclase family [Arabidopsis thaliana]
  misc_feature (40)..(284): NCBI GI NO: 18404658 NR Description: allene oxide cyclase family [Arabidopsis thaliana]
  misc_feature (109)..(284): NCBI GI NO: 25518012 NR Description: T6J4.4 protein - Arabidopsis thaliana
  misc_feature (40)..(284): NCBI GI NO: 18404656 NR Description: allene oxide cyclase family [Arabidopsis thaliana]
  misc_feature (40)..(284): NCBI GI NO: 15230874 NR Description: allene oxide cyclase family [Arabidopsis thaliana]
  misc_feature (43)..(284): NCBI GI NO: 15320414 NR Description: ERD12 protein [Arabidopsis thaliana]
  misc_feature (40)..(284): NCBI GI NO: 40644132 NR Description: allene oxide cyclase [Medicago truncatula]
  misc_feature (38)..(284): NCBI GI NO: 40644130 NR Description: allene oxide cyclase [Nicotiana tabacum]
  misc_feature (73)..(285): NCBI GI NO: 16416376 NR Description: mangrin [Bruguiera sexangula]
  misc_feature (36)..(284): NCBI GI NO: 8977961 NR Description: allene oxide cyclase [Lycopersicon esculentum]
ESILLKKRSSSLSLHHFNFKKKNKTKPVSSLYQTGMSMIMASSAAAASISLVRNLSRHHQTPLLDYSSSFHNNLRISSNGPALSTRSRSTTSSSIFRTMCSSSSENSRPTKIQELNVYEFNEGDRHSPAVLKLGKNPQQLCIGDLVPFTNKLYTGDLKKRVGITAGLCVLIQHVPEKKGERFEASYSFYFGDYGHISVQGPYLTYEDTLLAITGGTGVFEGAYGQVKLHQLVYPTKLFYTFYLKGVVADLPVELTGKHVEPSKDVKPAAEAQATQLGATILNFTE

SEQ ID NO: 20910 - protein, 250 aa, Zea mays subsp. mays
  peptide (1)..(250): Ceres Seq. ID no. 15179141
  misc_feature (72)..(249): Pfam Name: Pfam Description:  Allene oxide cyclase
  misc_feature (3)..(249): NCBI GI NO: 15222241 NR Description: allene oxide cyclase family [Arabidopsis thaliana]
  misc_feature (5)..(249): NCBI GI NO: 18404658 NR Description: allene oxide cyclase family [Arabidopsis thaliana]
  misc_feature (74)..(249): NCBI GI NO: 25518012 NR Description: T6J4.4 protein - Arabidopsis thaliana
  misc_feature (5)..(249): NCBI GI NO: 18404656 NR Description: allene oxide cyclase family [Arabidopsis thaliana]
  misc_feature (5)..(249): NCBI GI NO: 15230874 NR Description: allene oxide cyclase family [Arabidopsis thaliana]
  misc_feature (8)..(249): NCBI GI NO: 15320414 NR Description: ERD12 protein [Arabidopsis thaliana]
  misc_feature (5)..(249): NCBI GI NO: 40644132 NR Description: allene oxide cyclase [Medicago truncatula]
  misc_feature (3)..(249): NCBI GI NO: 40644130 NR Description: allene oxide cyclase [Nicotiana tabacum]
  misc_feature (38)..(250): NCBI GI NO: 16416376 NR Description: mangrin [Bruguiera sexangula]
  misc_feature (1)..(249): NCBI GI NO: 8977961 NR Description: allene oxide cyclase [Lycopersicon esculentum]
MSMIMASSAAAASISLVRNLSRHHQTPLLDYSSSFHNNLRISSNGPALSTRSRSTTSSSIFRTMCSSSSENSRPTKIQELNVYEFNEGDRHSPAVLKLGKNPQQLCIGDLVPFTNKLYTGDLKKRVGITAGLCVLIQHVPEKKGERFEASYSFYFGDYGHISVQGPYLTYEDTLLAITGGTGVFEGAYGQVKLHQLVYPTKLFYTFYLKGVVADLPVELTGKHVEPSKDVKPAAEAQATQLGATILNFTE

SEQ ID NO: 20911 - protein, 248 aa, Zea mays subsp. mays
  peptide (1)..(248): Ceres Seq. ID no. 15179142
  misc_feature (70)..(247): Pfam Name: Pfam Description:  Allene oxide cyclase
  misc_feature (1)..(247): NCBI GI NO: 15222241 NR Description: allene oxide cyclase family [Arabidopsis thaliana]
  misc_feature (3)..(247): NCBI GI NO: 18404658 NR Description: allene oxide cyclase family [Arabidopsis thaliana]
  misc_feature (72)..(247): NCBI GI NO: 25518012 NR Description: T6J4.4 protein - Arabidopsis thaliana
  misc_feature (3)..(247): NCBI GI NO: 18404656 NR Description: allene oxide cyclase family [Arabidopsis thaliana]
  misc_feature (3)..(247): NCBI GI NO: 15230874 NR Description: allene oxide cyclase family [Arabidopsis thaliana]
  misc_feature (6)..(247): NCBI GI NO: 15320414 NR Description: ERD12 protein [Arabidopsis thaliana]
  misc_feature (3)..(247): NCBI GI NO: 40644132 NR Description: allene oxide cyclase [Medicago truncatula]
  misc_feature (1)..(247): NCBI GI NO: 40644130 NR Description: allene oxide cyclase [Nicotiana tabacum]
  misc_feature (36)..(248): NCBI GI NO: 16416376 NR Description: mangrin [Bruguiera sexangula]
  misc_feature (1)..(247): NCBI GI NO: 8977961 NR Description: allene oxide cyclase [Lycopersicon esculentum]
MIMASSAAAASISLVRNLSRHHQTPLLDYSSSFHNNLRISSNGPALSTRSRSTTSSSIFRTMCSSSSENSRPTKIQELNVYEFNEGDRHSPAVLKLGKNPQQLCIGDLVPFTNKLYTGDLKKRVGITAGLCVLIQHVPEKKGERFEASYSFYFGDYGHISVQGPYLTYEDTLLAITGGTGVFEGAYGQVKLHQLVYPTKLFYTFYLKGVVADLPVELTGKHVEPSKDVKPAAEAQATQLGATILNFTE

SEQ ID NO: 20912 - DNA, 809 bp, Zea mays subsp. mays
  misc_feature (1)..(809): Ceres Seq. ID no. 15179187
aagccccctttgcgagacaagagaagagaaacaagcagccatggtgtgcatcaggcgagcgacggttgacgatctgctggcgatgcaagcctgcaatctcatgtgtcttcccgagaactaccagatgaagtactacctctaccacatcctctcctggcctcagcttctctacgttgccgaggactacaacggccgcatcgtcggctatgtcctcgccaagatggacgaggagagtaacgagtgccacggccacatcacttccctcgctgttcttcgtactcatcggaagcttggtctcgccactaagctcatgaccgccgctcagtctgccatggaacaggtttatgaggcagagtatgtttcgctgcacgtgaggagaagtaaccgagcagcgtttcatctgtacacggagacgttaggctacaagattcacgatgtggaagcgaagtattacgctgatggagaggatgcctatgacatgcggaagtattttaagggtaagcaaaaccatcaacagagccacggtcatcatcatcatcatcatcatggaggtgggtgttgttccggtgatgcagtagatacaactccagccgaagatgctatagcaacgacgtcgaagtgagactgagttgtattggtgtgtgtttgctggctagctctagtagtgctgctcactattttccattcatatgattttgagtgtcaaaacacatttggtaaaccactcttgtgcttgagtgtttctccattggtcttctttttggttgtacttgatatttattagccagtcttttttttttctatgtatc

SEQ ID NO: 20913 - protein, 206 aa, Zea mays subsp. mays
  peptide (1)..(206): Ceres Seq. ID no. 15179188
  misc_feature (58)..(142): Pfam Name: GNAT Pfam Description: Acetyltransferase
  misc_feature (14)..(204): NCBI GI NO: 15240705 NR Description: N-acetyltransferase, putative
  misc_feature (14)..(191): NCBI GI NO: 38344807 NR Description: OSJNBa0043L09.27
  misc_feature (14)..(195): NCBI GI NO: 14550116 NR Description: silencing group B protein [Zea mays]
  misc_feature (4)..(162): NCBI GI NO: 39645307 NR Description: Unknown (protein for IMAGE:3922934) [Homo sapiens]
  misc_feature (4)..(162): NCBI GI NO: 33871453 NR Description: MGC10646 protein [Homo sapiens]
  misc_feature (17)..(162): NCBI GI NO: 30519923 NR Description: DNA segment
  misc_feature (17)..(162): NCBI GI NO: 28422354 NR Description: Similar to N-acetyltransferase ARD1 homolog (S
  misc_feature (17)..(162): NCBI GI NO: 37539684 NR Description: hypothetical protein MGC10646 [Homo sapiens]
  misc_feature (17)..(162): NCBI GI NO: 9845236 NR Description: N-acetyltransferase ARD1 [Mus musculus]
  misc_feature (17)..(162): NCBI GI NO: 34881754 NR Description: similar to ARD-1 N-acetyltransferase homologue
SPLCETREEKQAAMVCIRRATVDDLLAMQACNLMCLPENYQMKYYLYHILSWPQLLYVAEDYNGRIVGYVLAKMDEESNECHGHITSLAVLRTHRKLGLATKLMTAAQSAMEQVYEAEYVSLHVRRSNRAAFHLYTETLGYKIHDVEAKYYADGEDAYDMRKYFKGKQNHQQSHGHHHHHHHGGGCCSGDAVDTTPAEDAIATTSK

SEQ ID NO: 20914 - protein, 193 aa, Zea mays subsp. mays
  peptide (1)..(193): Ceres Seq. ID no. 15179189
  misc_feature (45)..(129): Pfam Name: GNAT Pfam Description: Acetyltransferase
  misc_feature (1)..(191): NCBI GI NO: 15240705 NR Description: N-acetyltransferase, putative
  misc_feature (1)..(178): NCBI GI NO: 38344807 NR Description: OSJNBa0043L09.27
  misc_feature (1)..(182): NCBI GI NO: 14550116 NR Description: silencing group B protein [Zea mays]
  misc_feature (1)..(149): NCBI GI NO: 39645307 NR Description: Unknown (protein for IMAGE:3922934) [Homo sapiens]
  misc_feature (1)..(149): NCBI GI NO: 33871453 NR Description: MGC10646 protein [Homo sapiens]
  misc_feature (4)..(149): NCBI GI NO: 30519923 NR Description: DNA segment
  misc_feature (4)..(149): NCBI GI NO: 28422354 NR Description: Similar to N-acetyltransferase ARD1 homolog (S
  misc_feature (4)..(149): NCBI GI NO: 37539684 NR Description: hypothetical protein MGC10646 [Homo sapiens]
  misc_feature (4)..(149): NCBI GI NO: 9845236 NR Description: N-acetyltransferase ARD1 [Mus musculus]
  misc_feature (4)..(149): NCBI GI NO: 20071196 NR Description: Ard1 protein [Mus musculus]
MVCIRRATVDDLLAMQACNLMCLPENYQMKYYLYHILSWPQLLYVAEDYNGRIVGYVLAKMDEESNECHGHITSLAVLRTHRKLGLATKLMTAAQSAMEQVYEAEYVSLHVRRSNRAAFHLYTETLGYKIHDVEAKYYADGEDAYDMRKYFKGKQNHQQSHGHHHHHHHGGGCCSGDAVDTTPAEDAIATTSK

SEQ ID NO: 20915 - protein, 179 aa, Zea mays subsp. mays
  peptide (1)..(179): Ceres Seq. ID no. 15179190
  misc_feature (31)..(115): Pfam Name: GNAT Pfam Description: Acetyltransferase
  misc_feature (1)..(177): NCBI GI NO: 15240705 NR Description: N-acetyltransferase, putative
  misc_feature (1)..(164): NCBI GI NO: 38344807 NR Description: OSJNBa0043L09.27
  misc_feature (1)..(168): NCBI GI NO: 14550116 NR Description: silencing group B protein [Zea mays]
  misc_feature (1)..(135): NCBI GI NO: 39645307 NR Description: Unknown (protein for IMAGE:3922934) [Homo sapiens]
  misc_feature (1)..(135): NCBI GI NO: 33871453 NR Description: MGC10646 protein [Homo sapiens]
  misc_feature (1)..(135): NCBI GI NO: 30519923 NR Description: DNA segment
  misc_feature (1)..(135): NCBI GI NO: 28422354 NR Description: Similar to N-acetyltransferase ARD1 homolog (S
  misc_feature (1)..(135): NCBI GI NO: 37539684 NR Description: hypothetical protein MGC10646 [Homo sapiens]
  misc_feature (1)..(135): NCBI GI NO: 9845236 NR Description: N-acetyltransferase ARD1 [Mus musculus]
  misc_feature (1)..(135): NCBI GI NO: 20071196 NR Description: Ard1 protein [Mus musculus]
MQACNLMCLPENYQMKYYLYHILSWPQLLYVAEDYNGRIVGYVLAKMDEESNECHGHITSLAVLRTHRKLGLATKLMTAAQSAMEQVYEAEYVSLHVRRSNRAAFHLYTETLGYKIHDVEAKYYADGEDAYDMRKYFKGKQNHQQSHGHHHHHHHGGGCCSGDAVDTTPAEDAIATTSK

SEQ ID NO: 20916 - DNA, 1180 bp, Zea mays subsp. mays
  misc_feature (1)..(1180): Ceres Seq. ID no. 15179217
atcagtttccaatctgaaaaaaaaaaaacaaaacttctagggtttgcgatttggattcttaatttctctcccatcctcgattaagcataaaacatgccgcaaagacactcgaagaacaacaacgatctcgcgtacttcacgtacgacgagaagaagaagttagggtatggaacccagagggagagattggggaaagactcgatcaagcccttcgatgcttgttccctctgcttgaaacccttcatcgatcccatgtgttgccacaagggtcatgtcttctgcagagagtgtatcctcgaatgcttcctcgcgcagaagaaagacatccagaggaggcttgctgcccatgcttctcaaaagaatcaagataaggacgaagaagaagagaggctaatgttacaaaaggctagagagctcgacgagtttgatcagcaaaaccatggtgctttgcctcgatacagtgacaagagccaaagccaggacaagaatggttttcatggggcgaacagtgtgaaggcgacttcttttgaagaggaagctcttaggacaatgaaagccttctggcttccatcggctacaccaggagcttcggttagagttgaagctccggaaactcatacggtctgtccagagggcaaagagaagctcaagcttaaaaacctctttgctatccgtttcacggaagataacagcgaagaggaagaggagaaggcgaaatcgtcatcaacaagctcttatgacaaaacctacatttgcccgagctgcaaagtcactctgactaacaccatgtctcttgtggcacttagctcatgcggacatgttttctgcaagaagtgtggtgaaaagtttatgcccgtggacaaagtctgtcttgtgtgtgacaaaccttgcaaggacaggaacttggttgggttgaagaaaggaggcactggttttgctgagcacgacgatcatcttgaggctaaagagtacaagcatttgggtagtggctctggtttagggatggtgcggatgggtaagacatgatgattgtggacagcgcatcagatgtttgtgttaaaattgtatacaactaagagactgttttctctatttggcttttggttcttgttcttttcatccgatcttatttgcacttctactaccccaataccatgagtctttcaaagaagtttccatg

SEQ ID NO: 20917 - protein, 310 aa, Zea mays subsp. mays
  peptide (1)..(310): Ceres Seq. ID no. 15179218
  misc_feature (1)..(310): NCBI GI NO: 18407260 NR Description: expressed protein [Arabidopsis thaliana]
  misc_feature (1)..(310): NCBI GI NO: 26449463 NR Description: unknown protein [Arabidopsis thaliana]
  misc_feature (4)..(294): NCBI GI NO: 31213459 NR Description: ENSANGP00000021661 [Anopheles gambiae]
  misc_feature (4)..(292): NCBI GI NO: 24643007 NR Description: CG6179-PA [Drosophila melanogaster]
  misc_feature (4)..(292): NCBI GI NO: 38174118 NR Description: Unknown (protein for MGC:75989)
  misc_feature (4)..(292): NCBI GI NO: 7705716 NR Description: eNOS interacting protein; CGI-25 protein
  misc_feature (4)..(291): NCBI GI NO: 27731403 NR Description: similar to RIKEN cDNA 2310061K06
  misc_feature (4)..(291): NCBI GI NO: 13384956 NR Description: RIKEN cDNA 2310061K06 [Mus musculus]
  misc_feature (4)..(292): NCBI GI NO: 15030017 NR Description: Similar to eNOS interacting protein [Homo sapiens]
  misc_feature (137)..(280): NCBI GI NO: 32414767 NR Description: hypothetical protein [Neurospora crassa]
MPQRHSKNNNDLAYFTYDEKKKLGYGTQRERLGKDSIKPFDACSLCLKPFIDPMCCHKGHVFCRECILECFLAQKKDIQRRLAAHASQKNQDKDEEEERLMLQKARELDEFDQQNHGALPRYSDKSQSQDKNGFHGANSVKATSFEEEALRTMKAFWLPSATPGASVRVEAPETHTVCPEGKEKLKLKNLFAIRFTEDNSEEEEEKAKSSSTSSYDKTYICPSCKVTLTNTMSLVALSSCGHVFCKKCGEKFMPVDKVCLVCDKPCKDRNLVGLKKGGTGFAEHDDHLEAKEYKHLGSGSGLGMVRMGKT

SEQ ID NO: 20918 - protein, 257 aa, Zea mays subsp. mays
  peptide (1)..(257): Ceres Seq. ID no. 15179219
  misc_feature (1)..(257): NCBI GI NO: 18407260 NR Description: expressed protein [Arabidopsis thaliana]
  misc_feature (1)..(257): NCBI GI NO: 26449463 NR Description: unknown protein [Arabidopsis thaliana]
  misc_feature (1)..(241): NCBI GI NO: 31213459 NR Description: ENSANGP00000021661 [Anopheles gambiae]
  misc_feature (1)..(239): NCBI GI NO: 24643007 NR Description: CG6179-PA [Drosophila melanogaster]
  misc_feature (1)..(239): NCBI GI NO: 38174118 NR Description: Unknown (protein for MGC:75989)
  misc_feature (1)..(239): NCBI GI NO: 7705716 NR Description: eNOS interacting protein; CGI-25 protein
  misc_feature (1)..(238): NCBI GI NO: 27731403 NR Description: similar to RIKEN cDNA 2310061K06
  misc_feature (1)..(238): NCBI GI NO: 13384956 NR Description: RIKEN cDNA 2310061K06 [Mus musculus]
  misc_feature (1)..(239): NCBI GI NO: 15030017 NR Description: Similar to eNOS interacting protein [Homo sapiens]
  misc_feature (84)..(227): NCBI GI NO: 32414767 NR Description: hypothetical protein [Neurospora crassa]
MCCHKGHVFCRECILECFLAQKKDIQRRLAAHASQKNQDKDEEEERLMLQKARELDEFDQQNHGALPRYSDKSQSQDKNGFHGANSVKATSFEEEALRTMKAFWLPSATPGASVRVEAPETHTVCPEGKEKLKLKNLFAIRFTEDNSEEEEEKAKSSSTSSYDKTYICPSCKVTLTNTMSLVALSSCGHVFCKKCGEKFMPVDKVCLVCDKPCKDRNLVGLKKGGTGFAEHDDHLEAKEYKHLGSGSGLGMVRMGKT

SEQ ID NO: 20919 - protein, 210 aa, Zea mays subsp. mays
  peptide (1)..(210): Ceres Seq. ID no. 15179220
  misc_feature (1)..(210): NCBI GI NO: 18407260 NR Description: expressed protein [Arabidopsis thaliana]
  misc_feature (1)..(210): NCBI GI NO: 26449463 NR Description: unknown protein [Arabidopsis thaliana]
  misc_feature (1)..(194): NCBI GI NO: 31213459 NR Description: ENSANGP00000021661 [Anopheles gambiae]
  misc_feature (1)..(192): NCBI GI NO: 24643007 NR Description: CG6179-PA [Drosophila melanogaster]
  misc_feature (1)..(192): NCBI GI NO: 38174118 NR Description: Unknown (protein for MGC:75989)
  misc_feature (1)..(192): NCBI GI NO: 7705716 NR Description: eNOS interacting protein; CGI-25 protein
  misc_feature (1)..(191): NCBI GI NO: 27731403 NR Description: similar to RIKEN cDNA 2310061K06
  misc_feature (1)..(191): NCBI GI NO: 13384956 NR Description: RIKEN cDNA 2310061K06 [Mus musculus]
  misc_feature (1)..(192): NCBI GI NO: 15030017 NR Description: Similar to eNOS interacting protein [Homo sapiens]
  misc_feature (37)..(180): NCBI GI NO: 32414767 NR Description: hypothetical protein [Neurospora crassa]
MLQKARELDEFDQQNHGALPRYSDKSQSQDKNGFHGANSVKATSFEEEALRTMKAFWLPSATPGASVRVEAPETHTVCPEGKEKLKLKNLFAIRFTEDNSEEEEEKAKSSSTSSYDKTYICPSCKVTLTNTMSLVALSSCGHVFCKKCGEKFMPVDKVCLVCDKPCKDRNLVGLKKGGTGFAEHDDHLEAKEYKHLGSGSGLGMVRMGKT

SEQ ID NO: 20920 - DNA, 1006 bp, Zea mays subsp. mays
  misc_feature (1)..(1006): Ceres Seq. ID no. 15179213
aaagcttttcagatcttaatagaagaagaacctaaacttctctcgatccgacaaaaagatgacttttactattccgatcgataacggagattccgtgaagaccgcagaagctgattcacaaagaacactgtacccatatgttactgggacttctattgtcgcaatcaagtacaaggatggggttttaatggcttccgacatgggaggttcatatggatccaccttaaggtacaagaacattgagagaatgaaggctattggtaagcattctcttctcggtgccagcggagaaatcagtgactttcaggagattcttcgttatcttgatgagcttgttttgaatgataacatgtgggatgatggtaactctttggggccgaaagaggtgcacaactatctgacccgagtgatgtacaaccgtcgcaacaagtttaaccctctctggaacactctcgtccttggaggtgtcaaaaatggggaaagttaccttggcatggtgtcaatgattggtgttagtttcgaggacaatcatgttgccaccggatttggaaaccacctcgctaggcctattcttcgtgatgagtggcatgcagacctgagttttgaagatggtgtcaagctccttgagaaatgtatgcgtgtgcttctgtaccgtgacagatctgccattaacaagcttcagatagcgaagatcacagaagaaggcgtgacggtttctcagccatactcgttgaagacattctgggaattcaaggcgttcaacaatccgactgctggtgctgaaggctcctggtaagaagcctaatcaaccacatactgcctggagatctttcaagaacgcttcctttttttatgttatttcgtgtgatgttaaattactatgtactctagtggttttcctagcaacaattgtggttatttcatgaaatttcggagttagatcgataaaaatttatggatatttcttaatatctttggactaaactaatctcaaaattttcttcgt

SEQ ID NO: 20921 - protein, 245 aa, Zea mays subsp. mays
  peptide (1)..(245): Ceres Seq. ID no. 15179214
  misc_feature (27)..(212): Pfam Name: Pfam Description:  Proteasome A-type and B-type
  misc_feature (2)..(245): NCBI GI NO: 15223537 NR Description: 20S proteasome beta subunit G1 (PBG1)
  misc_feature (2)..(245): NCBI GI NO: 25290071 NR Description: C 3
  misc_feature (1)..(245): NCBI GI NO: 8671512 NR Description: beta 7 subunit of 20S proteasome
  misc_feature (49)..(177): NCBI GI NO: 14594935 NR Description: putative beta7 proteasome subunit
  misc_feature (125)..(245): NCBI GI NO: 2511598 NR Description: multicatalytic endopeptidase complex
  misc_feature (21)..(230): NCBI GI NO: 3915809 NR Description: Proteasome subunit beta type 4 precursor
  misc_feature (21)..(230): NCBI GI NO: 33417170 NR Description: Unknown (protein for MGC:69145) [Xenopus laevis]
  misc_feature (28)..(230): NCBI GI NO: 104166 NR Description: C 3
  misc_feature (21)..(229): NCBI GI NO: 28828772 NR Description: similar to Arabidopsis thaliana (Mouse-ear cress)
  misc_feature (17)..(230): NCBI GI NO: 14198355 NR Description: Psmb4 protein [Mus musculus]
MTFTIPIDNGDSVKTAEADSQRTLYPYVTGTSIVAIKYKDGVLMASDMGGSYGSTLRYKNIERMKAIGKHSLLGASGEISDFQEILRYLDELVLNDNMWDDGNSLGPKEVHNYLTRVMYNRRNKFNPLWNTLVLGGVKNGESYLGMVSMIGVSFEDNHVATGFGNHLARPILRDEWHADLSFEDGVKLLEKCMRVLLYRDRSAINKLQIAKITEEGVTVSQPYSLKTFWEFKAFNNPTAGAEGSW

SEQ ID NO: 20922 - protein, 202 aa, Zea mays subsp. mays
  peptide (1)..(202): Ceres Seq. ID no. 15179215
  misc_feature (1)..(169): Pfam Name: Pfam Description:  Proteasome A-type and B-type
  misc_feature (1)..(202): NCBI GI NO: 15223537 NR Description: 20S proteasome beta subunit G1 (PBG1)
  misc_feature (1)..(202): NCBI GI NO: 25290071 NR Description: C 3
  misc_feature (1)..(202): NCBI GI NO: 8671512 NR Description: beta 7 subunit of 20S proteasome
  misc_feature (6)..(134): NCBI GI NO: 14594935 NR Description: putative beta7 proteasome subunit
  misc_feature (82)..(202): NCBI GI NO: 2511598 NR Description: multicatalytic endopeptidase complex
  misc_feature (1)..(187): NCBI GI NO: 3915809 NR Description: Proteasome subunit beta type 4 precursor
  misc_feature (1)..(187): NCBI GI NO: 33417170 NR Description: Unknown (protein for MGC:69145) [Xenopus laevis]
  misc_feature (1)..(187): NCBI GI NO: 104166 NR Description: C 3
  misc_feature (1)..(186): NCBI GI NO: 28828772 NR Description: similar to Arabidopsis thaliana (Mouse-ear cress)
  misc_feature (1)..(187): NCBI GI NO: 14198355 NR Description: Psmb4 protein [Mus musculus]
MASDMGGSYGSTLRYKNIERMKAIGKHSLLGASGEISDFQEILRYLDELVLNDNMWDDGNSLGPKEVHNYLTRVMYNRRNKFNPLWNTLVLGGVKNGESYLGMVSMIGVSFEDNHVATGFGNHLARPILRDEWHADLSFEDGVKLLEKCMRVLLYRDRSAINKLQIAKITEEGVTVSQPYSLKTFWEFKAFNNPTAGAEGSW

SEQ ID NO: 20923 - protein, 198 aa, Zea mays subsp. mays
  peptide (1)..(198): Ceres Seq. ID no. 15179216
  misc_feature (1)..(165): Pfam Name: Pfam Description:  Proteasome A-type and B-type
  misc_feature (1)..(198): NCBI GI NO: 15223537 NR Description: 20S proteasome beta subunit G1 (PBG1)
  misc_feature (1)..(198): NCBI GI NO: 25290071 NR Description: C 3
  misc_feature (1)..(198): NCBI GI NO: 8671512 NR Description: beta 7 subunit of 20S proteasome
  misc_feature (2)..(130): NCBI GI NO: 14594935 NR Description: putative beta7 proteasome subunit
  misc_feature (78)..(198): NCBI GI NO: 2511598 NR Description: multicatalytic endopeptidase complex
  misc_feature (1)..(183): NCBI GI NO: 3915809 NR Description: Proteasome subunit beta type 4 precursor
  misc_feature (1)..(183): NCBI GI NO: 33417170 NR Description: Unknown (protein for MGC:69145) [Xenopus laevis]
  misc_feature (1)..(183): NCBI GI NO: 104166 NR Description: C 3
  misc_feature (1)..(182): NCBI GI NO: 28828772 NR Description: similar to Arabidopsis thaliana (Mouse-ear cress)
  misc_feature (1)..(183): NCBI GI NO: 14198355 NR Description: Psmb4 protein [Mus musculus]
MGGSYGSTLRYKNIERMKAIGKHSLLGASGEISDFQEILRYLDELVLNDNMWDDGNSLGPKEVHNYLTRVMYNRRNKFNPLWNTLVLGGVKNGESYLGMVSMIGVSFEDNHVATGFGNHLARPILRDEWHADLSFEDGVKLLEKCMRVLLYRDRSAINKLQIAKITEEGVTVSQPYSLKTFWEFKAFNNPTAGAEGSW

SEQ ID NO: 20924 - DNA, 1725 bp, Zea mays subsp. mays
  misc_feature (1)..(1725): Ceres Seq. ID no. 15179412
actaacctaaccagctgcatctcctctctctcctaactcctaagctctcagccgtcgccgtcgccgtcgccgtcgctctcctctctgtccctctccacgccgctctcctctctcctccgagccgcagctccctctccccagcgcgccgccactgtaccggcatctgggccaattcgccccactaggagggaaacaaactgctgcacagcttcccggggactggatctccattggccacagcacccagtggctctggtactccgtgtacgcaaccttcttccattaagaattggtcatcatggcgtgggagctcattgaagtcccgggcaacttgaatccttctctcaaagactcttcagttgatgtggtggccgccaagattgatcccaagttagccaatactctcattaggcagttaagccaggtgtgccctttggagaatctgaggcatgtaaagcgtgtacgtcgacgtactgaatgtggtggaaaatctgagttatcaataatcctatgtgtttctactgggtctgaaacttgtaacatacagttctctgaagatctacagaagatagtggatacttatcagctgagtcctttcaccgcaaaagttgccaggtgttgtgctacatcaaaagaggagtgggaggaacagtgcaaactttggccaacatcttaccatcctgcacatgaccttggtattgtccgtggatttcaagaggaggaattaccatcaatatttaattgcatgaaggctgctattcagttatcaaaggcaggcaatgctgcaatcattgttgatccatcaagcatgcaaatagttgcaaaggccactgaccatacacacaagcatgatactcctgaagaagggaacacattttctgaagcgaatgcagatgttacctgctcttggaatgcatcgactgatgatgacaacaatctgtcacttccaggatcctttcttcctaaactcaacagtttgaacatggaaatcccatgtataaatccttggggatggatgaaaaaaaggacttgtgagcagaagccatcgccatgcgatggctgttctgcatggcatcctctgagacatgctcccatggctgccattgaaaatgctgctgtgagggacagaacgatgtttccttcttcgatttcaataaccaagccagattcagatggcagtcccgagaactgctgcgacaatgaaccagcaaaaaggctgaagacggatacaaaagataatgagaaaccggcatctgaatcatctggtggcgacctgtttgaaaccagcagaccatatctctgcacagggtttgatatctaccttgtttgggaaccatgcacaatgtgtgcgatggcgcttgtgcatcataggttcaagcgcgtgttctacgccttccccaatcctgtggccggagcactcggtggagtctacaggttgcatggggagaggagtctaaaccatcactataatgtgtttagggtttcagtacctgaggcgtacttgaatgggttgaactgttattcgaaggaatgctgatccaacacctttccgtttttatttagaaaaaaagaggatccaacactgtgttccttttttatttttggcacaagggcttcatattaggcctagacttgcccatctgtattattaaatgttttggtaacaaatgtgtttatggatgtaaacgttggtgctattttttattagtttacttaaatttaatg

SEQ ID NO: 20925 - protein, 412 aa, Zea mays subsp. mays
  peptide (1)..(412): Ceres Seq. ID no. 15179413
  misc_feature (300)..(364): Pfam Name: Pfam Description:  Cytidine and deoxycytidylate deaminase zinc-binding region
  misc_feature (100)..(399): NCBI GI NO: 9759207 NR Description: gene_id:MXC17.5~unknown protein
  misc_feature (2)..(104): NCBI GI NO: 9759207 NR Description: gene_id:MXC17.5~unknown protein
  misc_feature (100)..(399): NCBI GI NO: 30689567 NR Description: expressed protein [Arabidopsis thaliana]
  misc_feature (2)..(104): NCBI GI NO: 30689567 NR Description: expressed protein [Arabidopsis thaliana]
  misc_feature (3)..(179): NCBI GI NO: 22204386 NR Description: SI:dZ72B14.5 (novel protein) [Danio rerio]
  misc_feature (328)..(394): NCBI GI NO: 22204386 NR Description: SI:dZ72B14.5 (novel protein) [Danio rerio]
  misc_feature (3)..(179): NCBI GI NO: 22204218 NR Description: SI:dZ211O13.3 (novel protein) [Danio rerio]
  misc_feature (328)..(394): NCBI GI NO: 22204218 NR Description: SI:dZ211O13.3 (novel protein) [Danio rerio]
  misc_feature (3)..(179): NCBI GI NO: 19923945 NR Description: hypothetical protein BC011824 [Homo sapiens]
  misc_feature (325)..(394): NCBI GI NO: 19923945 NR Description: hypothetical protein BC011824 [Homo sapiens]
MAWELIEVPGNLNPSLKDSSVDVVAAKIDPKLANTLIRQLSQVCPLENLRHVKRVRRRTECGGKSELSIILCVSTGSETCNIQFSEDLQKIVDTYQLSPFTAKVARCCATSKEEWEEQCKLWPTSYHPAHDLGIVRGFQEEELPSIFNCMKAAIQLSKAGNAAIIVDPSSMQIVAKATDHTHKHDTPEEGNTFSEANADVTCSWNASTDDDNNLSLPGSFLPKLNSLNMEIPCINPWGWMKKRTCEQKPSPCDGCSAWHPLRHAPMAAIENAAVRDRTMFPSSISITKPDSDGSPENCCDNEPAKRLKTDTKDNEKPASESSGGDLFETSRPYLCTGFDIYLVWEPCTMCAMALVHHRFKRVFYAFPNPVAGALGGVYRLHGERSLNHHYNVFRVSVPEAYLNGLNCYSKEC

SEQ ID NO: 20926 - protein, 263 aa, Zea mays subsp. mays
  peptide (1)..(263): Ceres Seq. ID no. 15179414
  misc_feature (151)..(215): Pfam Name: Pfam Description:  Cytidine and deoxycytidylate deaminase zinc-binding region
  misc_feature (1)..(250): NCBI GI NO: 9759207 NR Description: gene_id:MXC17.5~unknown protein
  misc_feature (1)..(250): NCBI GI NO: 30689567 NR Description: expressed protein [Arabidopsis thaliana]
  misc_feature (1)..(30): NCBI GI NO: 22204386 NR Description: SI:dZ72B14.5 (novel protein) [Danio rerio]
  misc_feature (179)..(245): NCBI GI NO: 22204386 NR Description: SI:dZ72B14.5 (novel protein) [Danio rerio]
  misc_feature (1)..(30): NCBI GI NO: 22204218 NR Description: SI:dZ211O13.3 (novel protein) [Danio rerio]
  misc_feature (179)..(245): NCBI GI NO: 22204218 NR Description: SI:dZ211O13.3 (novel protein) [Danio rerio]
  misc_feature (1)..(30): NCBI GI NO: 19923945 NR Description: hypothetical protein BC011824 [Homo sapiens]
  misc_feature (176)..(245): NCBI GI NO: 19923945 NR Description: hypothetical protein BC011824 [Homo sapiens]
  misc_feature (149)..(246): NCBI GI NO: 31199497 NR Description: ENSANGP00000021467 [Anopheles gambiae]
  misc_feature (151)..(250): NCBI GI NO: 19922544 NR Description: CG10927-PA [Drosophila melanogaster]
MKAAIQLSKAGNAAIIVDPSSMQIVAKATDHTHKHDTPEEGNTFSEANADVTCSWNASTDDDNNLSLPGSFLPKLNSLNMEIPCINPWGWMKKRTCEQKPSPCDGCSAWHPLRHAPMAAIENAAVRDRTMFPSSISITKPDSDGSPENCCDNEPAKRLKTDTKDNEKPASESSGGDLFETSRPYLCTGFDIYLVWEPCTMCAMALVHHRFKRVFYAFPNPVAGALGGVYRLHGERSLNHHYNVFRVSVPEAYLNGLNCYSKEC

SEQ ID NO: 20927 - protein, 242 aa, Zea mays subsp. mays
  peptide (1)..(242): Ceres Seq. ID no. 15179415
  misc_feature (130)..(194): Pfam Name: Pfam Description:  Cytidine and deoxycytidylate deaminase zinc-binding region
  misc_feature (1)..(229): NCBI GI NO: 9759207 NR Description: gene_id:MXC17.5~unknown protein
  misc_feature (1)..(229): NCBI GI NO: 30689567 NR Description: expressed protein [Arabidopsis thaliana]
  misc_feature (158)..(224): NCBI GI NO: 22204386 NR Description: SI:dZ72B14.5 (novel protein) [Danio rerio]
  misc_feature (158)..(224): NCBI GI NO: 22204218 NR Description: SI:dZ211O13.3 (novel protein) [Danio rerio]
  misc_feature (155)..(224): NCBI GI NO: 19923945 NR Description: hypothetical protein BC011824 [Homo sapiens]
  misc_feature (128)..(225): NCBI GI NO: 31199497 NR Description: ENSANGP00000021467 [Anopheles gambiae]
  misc_feature (130)..(229): NCBI GI NO: 19922544 NR Description: CG10927-PA [Drosophila melanogaster]
  misc_feature (89)..(224): NCBI GI NO: 23508743 NR Description: hypothetical protein [Plasmodium falciparum 3D7]
  misc_feature (163)..(225): NCBI GI NO: 25144639 NR Description: nitrogen fixation protein like (3M326)
  misc_feature (159)..(238): NCBI GI NO: 39584760 NR Description: Hypothetical protein CBG13218
MQIVAKATDHTHKHDTPEEGNTFSEANADVTCSWNASTDDDNNLSLPGSFLPKLNSLNMEIPCINPWGWMKKRTCEQKPSPCDGCSAWHPLRHAPMAAIENAAVRDRTMFPSSISITKPDSDGSPENCCDNEPAKRLKTDTKDNEKPASESSGGDLFETSRPYLCTGFDIYLVWEPCTMCAMALVHHRFKRVFYAFPNPVAGALGGVYRLHGERSLNHHYNVFRVSVPEAYLNGLNCYSKEC

SEQ ID NO: 20928 - DNA, 808 bp, Zea mays subsp. mays
  misc_feature (1)..(808): Ceres Seq. ID no. 15178388
acaatttcccaattctaattttgttttctctcacacacacactccttccaatctccaactaaatactattcttcaatttgaagcgtgtctgtagttggttgaagcactgtggtattgttctggttttggtctccgaggtttgtatcggaatccgatgtattatgcaaaagaagctgcgcatgtcgaccccattttcgtagcacatggctgccgctgataacaccaacccaaaggattattacaaagtgctggaggttgaatatgatgcaaccgatgaaaatatcaaattaaattaccgaagactcgcgttgaaatggcatcctgacaagcacggaggtgatagtgctgttactgcaaaatttcaagagattattgaagcttacaatgtattaagtgatcctgccaagcgtttggactatgatttaactgggatatgtgagattgaaaaatatagcttgcaggaatatcttgccagatttaaaagcatgattcttacctgcaatggacttggtatcaatcagacagacagatggtcacaacaattgattgaaaattttgagtccctagataaataaggcatctaaatctcaattttggccagtggagagtgatgaataaggacatctaagcgtgtctttttcctttaacatgctcttaaattccaccccactcgatttcaatgagatttgaaacctccataattgaccatgcaacctggtctgattgaatcatacatactgtaacattatgctactccaatgtgtacgtttagaatgatctgttgtgataaacctttaagtccttgtac

SEQ ID NO: 20929 - protein, 123 aa, Zea mays subsp. mays
  peptide (1)..(123): Ceres Seq. ID no. 15178389
  misc_feature (11)..(76): Pfam Name: Pfam Description:  DnaJ domain
  misc_feature (5)..(116): NCBI GI NO: 15237385 NR Description: DnaJ protein family [Arabidopsis thaliana]
  misc_feature (10)..(104): NCBI GI NO: 18403358 NR Description: DnaJ protein family [Arabidopsis thaliana]
  misc_feature (10)..(104): NCBI GI NO: 21555025 NR Description: unknown [Arabidopsis thaliana]
  misc_feature (11)..(76): NCBI GI NO: 34905276 NR Description: putative heat shock protein
  misc_feature (11)..(76): NCBI GI NO: 40253343 NR Description: putative DnaJ, heat shock protein hsp40
  misc_feature (6)..(76): NCBI GI NO: 16331768 NR Description: DnaJ protein [Synechocystis sp. PCC 6803]
  misc_feature (10)..(76): NCBI GI NO: 144832 NR Description: dnaJ
  misc_feature (11)..(76): NCBI GI NO: 15231987 NR Description: DnaJ protein family [Arabidopsis thaliana]
  misc_feature (11)..(76): NCBI GI NO: 21618097 NR Description: putative heat shock protein [Arabidopsis thaliana]
  misc_feature (10)..(76): NCBI GI NO: 16082112 NR Description: heat shock protein DnaJ related protein
MAAADNTNPKDYYKVLEVEYDATDENIKLNYRRLALKWHPDKHGGDSAVTAKFQEIIEAYNVLSDPAKRLDYDLTGICEIEKYSLQEYLARFKSMILTCNGLGINQTDRWSQQLIENFESLDK

SEQ ID NO: 20930 - DNA, 860 bp, Zea mays subsp. mays
  misc_feature (1)..(860): Ceres Seq. ID no. 15179231
aaaagcgtaacatttctcttaattacaaagacacctctaagaatacttctcacaatcacgagactgagatgtcggatgaaatacctccgaaagggatcctcaagagcgaagctctgagacagtacatcttggagacctcagcatatccaagagagcatgagctgctcaaggagcttcggaaagtaacagaagagaaatttgggaacttaatcgaaatggtgattccagtggatgagggcatttttctatcgatgcttttaaagatcataaacgctaagaacactcttgagctcggtgttttcactggttactctcttctcaccacggcccttgctttgcctgaagatggtcgcattactgcaattgatattgacaaggaagcctatgaagtgggattagagtttatgaagaaagcaggtgttgatcacaagatcaatttcatctattgcgatggtatggaggtcttagacaaattggttaacgacaaccaggagtttgatttcatatttgctgatgctgacaagccaaactacctcaacttccttgagagatttctgaaattggtgaaggttggaggaatcattgcattcgacaacaccttgtggtttagttttgtggttgaggaagaagagagcgttcctgagtttatgagggaatcaagagcggctcttatagaatttaataagaaattggctttggatcctcgagtggaaatctctcagatctccgttggagatggtgtcactctatgcagacgccttgtgtgagcaaaagactatttaaatatatatattttttttttgataatcgactatttaaatattaagaccaaagttaggaataaaactgttagatgctcc

SEQ ID NO: 20931 - protein, 254 aa, Zea mays subsp. mays
  peptide (1)..(254): Ceres Seq. ID no. 15179232
  misc_feature (43)..(253): Pfam Name: Pfam Description:  O-methyltransferase
  misc_feature (23)..(254): NCBI GI NO: 30580369 NR Description: Putative caffeoyl-CoA O-methyltransferase At1g67980
  misc_feature (43)..(254): NCBI GI NO: 18408911 NR Description: caffeoyl-CoA 3-O-methyltransferase, putative
  misc_feature (43)..(254): NCBI GI NO: 682728 NR Description: S-adenosyl-L-methionine: trans-caffeoyl-Coenzyme A3-O-methyltransferase
  misc_feature (23)..(254): NCBI GI NO: 30580370 NR Description: Putative caffeoyl-CoA O-methyltransferase At1g67990
  misc_feature (23)..(254): NCBI GI NO: 18408913 NR Description: caffeoyl-CoA 3-O-methyltransferase, putative
  misc_feature (23)..(253): NCBI GI NO: 3023432 NR Description: Caffeoyl-CoA O-methyltransferase
  misc_feature (71)..(254): NCBI GI NO: 15221807 NR Description: caffeoyl-CoA 3-O-methyltransferase, putative
  misc_feature (20)..(253): NCBI GI NO: 30580341 NR Description: Caffeoyl-CoA O-methyltransferase
  misc_feature (26)..(253): NCBI GI NO: 37720881 NR Description: O-methyltransferase
  misc_feature (18)..(253): NCBI GI NO: 3023437 NR Description: Caffeoyl-CoA O-methyltransferase
KRNISLNYKDTSKNTSHNHETEMSDEIPPKGILKSEALRQYILETSAYPREHELLKELRKVTEEKFGNLIEMVIPVDEGIFLSMLLKIINAKNTLELGVFTGYSLLTTALALPEDGRITAIDIDKEAYEVGLEFMKKAGVDHKINFIYCDGMEVLDKLVNDNQEFDFIFADADKPNYLNFLERFLKLVKVGGIIAFDNTLWFSFVVEEEESVPEFMRESRAALIEFNKKLALDPRVEISQISVGDGVTLCRRLV

SEQ ID NO: 20932 - protein, 232 aa, Zea mays subsp. mays
  peptide (1)..(232): Ceres Seq. ID no. 15179233
  misc_feature (21)..(231): Pfam Name: Pfam Description:  O-methyltransferase
  misc_feature (1)..(232): NCBI GI NO: 30580369 NR Description: Putative caffeoyl-CoA O-methyltransferase At1g67980
  misc_feature (21)..(232): NCBI GI NO: 18408911 NR Description: caffeoyl-CoA 3-O-methyltransferase, putative
  misc_feature (21)..(232): NCBI GI NO: 682728 NR Description: S-adenosyl-L-methionine: trans-caffeoyl-Coenzyme A3-O-methyltransferase
  misc_feature (1)..(232): NCBI GI NO: 30580370 NR Description: Putative caffeoyl-CoA O-methyltransferase At1g67990
  misc_feature (1)..(232): NCBI GI NO: 18408913 NR Description: caffeoyl-CoA 3-O-methyltransferase, putative
  misc_feature (1)..(231): NCBI GI NO: 3023432 NR Description: Caffeoyl-CoA O-methyltransferase
  misc_feature (49)..(232): NCBI GI NO: 15221807 NR Description: caffeoyl-CoA 3-O-methyltransferase, putative
  misc_feature (1)..(231): NCBI GI NO: 30580341 NR Description: Caffeoyl-CoA O-methyltransferase
  misc_feature (4)..(231): NCBI GI NO: 37720881 NR Description: O-methyltransferase
  misc_feature (1)..(231): NCBI GI NO: 3023437 NR Description: Caffeoyl-CoA O-methyltransferase
MSDEIPPKGILKSEALRQYILETSAYPREHELLKELRKVTEEKFGNLIEMVIPVDEGIFLSMLLKIINAKNTLELGVFTGYSLLTTALALPEDGRITAIDIDKEAYEVGLEFMKKAGVDHKINFIYCDGMEVLDKLVNDNQEFDFIFADADKPNYLNFLERFLKLVKVGGIIAFDNTLWFSFVVEEEESVPEFMRESRAALIEFNKKLALDPRVEISQISVGDGVTLCRRLV

SEQ ID NO: 20933 - protein, 183 aa, Zea mays subsp. mays
  peptide (1)..(183): Ceres Seq. ID no. 15179234
  misc_feature (1)..(182): Pfam Name: Pfam Description:  O-methyltransferase
  misc_feature (1)..(183): NCBI GI NO: 30580369 NR Description: Putative caffeoyl-CoA O-methyltransferase At1g67980
  misc_feature (1)..(183): NCBI GI NO: 18408911 NR Description: caffeoyl-CoA 3-O-methyltransferase, putative
  misc_feature (1)..(183): NCBI GI NO: 682728 NR Description: S-adenosyl-L-methionine: trans-caffeoyl-Coenzyme A3-O-methyltransferase
  misc_feature (1)..(183): NCBI GI NO: 30580370 NR Description: Putative caffeoyl-CoA O-methyltransferase At1g67990
  misc_feature (1)..(183): NCBI GI NO: 18408913 NR Description: caffeoyl-CoA 3-O-methyltransferase, putative
  misc_feature (1)..(182): NCBI GI NO: 3023432 NR Description: Caffeoyl-CoA O-methyltransferase
  misc_feature (1)..(183): NCBI GI NO: 15221807 NR Description: caffeoyl-CoA 3-O-methyltransferase, putative
  misc_feature (1)..(182): NCBI GI NO: 30580341 NR Description: Caffeoyl-CoA O-methyltransferase
  misc_feature (1)..(182): NCBI GI NO: 37720881 NR Description: O-methyltransferase
  misc_feature (1)..(182): NCBI GI NO: 3023437 NR Description: Caffeoyl-CoA O-methyltransferase
MVIPVDEGIFLSMLLKIINAKNTLELGVFTGYSLLTTALALPEDGRITAIDIDKEAYEVGLEFMKKAGVDHKINFIYCDGMEVLDKLVNDNQEFDFIFADADKPNYLNFLERFLKLVKVGGIIAFDNTLWFSFVVEEEESVPEFMRESRAALIEFNKKLALDPRVEISQISVGDGVTLCRRLV

SEQ ID NO: 20934 - DNA, 1142 bp, Zea mays subsp. mays
  misc_feature (1)..(1142): Ceres Seq. ID no. 15179235
cttatgtttatgtcttcttcttctctccatctccttccaaagtctctctctctctctatcgcctttctctctctctctctctccacttccgaccacatcgggtctcagaaacccattgatgcggacctcgatctttctccactagctacagatctacacccttacacaaaccgtatatacatacacactttgtatctctctgtaaaatctatggccgccgtctcctctaaccctcgcaccgtcgaagagatcttcaaggattacaccgctcgtcgctccgccctcctccgtgctctaactaaagatgttgatgatttctactctcaatgcgatccggagaaggagaatttgtgtttgtatggacatccgaatgagtcgtgggaagtgaatctaccggcggaggaagttcctcctgagcttccggagcctgcgcttggtattaatttcgctagagatggtatgcagaggaaggattggctctcgcttgttgctgttcatagtgattgttggttgctctctgtttctttctactttggtgctcgccttaaccgcaacgagaggaagcggttgttcagtctgatcaacgatctcccaactctcttcgatgtagtgactggtaggaaacccatcaaagacaacaagccaagctcagattctggaagcaaatccagaaacggcactaagagatcaatagaagggcagacaaagagtccaacaccaagaccgatggaagagagctacgaggacgaggaagaagaagaagacgagcacggagacactctctgcggtatctgtggaggcaattatacgcaagatgagttctggatttgctgtgatgtttgtgaacgttggtaccatggaaaatgcgtgaagatcacccctgccaaagcagacagcatcaagcagtataaatgccctccttgctgtgcaaagaaaggaagacagtgattatgatcatcatcatcatcatcatctcccagagagactggttctcatgtcttaatattaatcatcctttttcttgtttcattaaccttttaatttcaaagcatacaaaaactctctctttagatcaccggaaagggattccaagaagttgagagagtgtagcaactgtttgagtatttttattcatataagag

SEQ ID NO: 20935 - protein, 315 aa, Zea mays subsp. mays
  peptide (1)..(315): Ceres Seq. ID no. 15179236
  misc_feature (261)..(311): Pfam Name: Pfam Description:  PHD-finger
  misc_feature (72)..(315): NCBI GI NO: 15229696 NR Description: nucleic acid binding protein -related
  misc_feature (71)..(315): NCBI GI NO: 15239180 NR Description: nucleic acid binding protein-related
  misc_feature (71)..(315): NCBI GI NO: 34900462 NR Description: putative nucleic acid binding protein
  misc_feature (77)..(314): NCBI GI NO: 15229157 NR Description: nucleic acid binding protein-related
  misc_feature (72)..(315): NCBI GI NO: 28876028 NR Description: putative PHD-finger domain containing protein
  misc_feature (72)..(315): NCBI GI NO: 29124114 NR Description: putative PHD-type zinc finger protein
  misc_feature (77)..(314): NCBI GI NO: 15239624 NR Description: nucleic acid binding protein - like
  misc_feature (77)..(314): NCBI GI NO: 30687843 NR Description: zinc finger protein - like [Arabidopsis thaliana]
  misc_feature (78)..(312): NCBI GI NO: 15223786 NR Description: nucleic acid binding protein (alfin-1) -related
  misc_feature (77)..(285): NCBI GI NO: 14192880 NR Description: Putative nucleic acid binding protein
LMFMSSSSLHLLPKSLSLSIAFLSLSLSTSDHIGSQKPIDADLDLSPLATDLHPYTNRIYIHTLYLSVKSMAAVSSNPRTVEEIFKDYTARRSALLRALTKDVDDFYSQCDPEKENLCLYGHPNESWEVNLPAEEVPPELPEPALGINFARDGMQRKDWLSLVAVHSDCWLLSVSFYFGARLNRNERKRLFSLINDLPTLFDVVTGRKPIKDNKPSSDSGSKSRNGTKRSIEGQTKSPTPRPMEESYEDEEEEEDEHGDTLCGICGGNYTQDEFWICCDVCERWYHGKCVKITPAKADSIKQYKCPPCCAKKGRQ

SEQ ID NO: 20936 - protein, 314 aa, Zea mays subsp. mays
  peptide (1)..(314): Ceres Seq. ID no. 15179237
  misc_feature (260)..(310): Pfam Name: Pfam Description:  PHD-finger
  misc_feature (71)..(314): NCBI GI NO: 15229696 NR Description: nucleic acid binding protein -related
  misc_feature (70)..(314): NCBI GI NO: 15239180 NR Description: nucleic acid binding protein-related
  misc_feature (70)..(314): NCBI GI NO: 34900462 NR Description: putative nucleic acid binding protein
  misc_feature (76)..(313): NCBI GI NO: 15229157 NR Description: nucleic acid binding protein-related
  misc_feature (71)..(314): NCBI GI NO: 28876028 NR Description: putative PHD-finger domain containing protein
  misc_feature (71)..(314): NCBI GI NO: 29124114 NR Description: putative PHD-type zinc finger protein
  misc_feature (76)..(313): NCBI GI NO: 15239624 NR Description: nucleic acid binding protein - like
  misc_feature (76)..(313): NCBI GI NO: 30687843 NR Description: zinc finger protein - like [Arabidopsis thaliana]
  misc_feature (77)..(311): NCBI GI NO: 15223786 NR Description: nucleic acid binding protein (alfin-1) -related
  misc_feature (76)..(284): NCBI GI NO: 14192880 NR Description: Putative nucleic acid binding protein
MFMSSSSLHLLPKSLSLSIAFLSLSLSTSDHIGSQKPIDADLDLSPLATDLHPYTNRIYIHTLYLSVKSMAAVSSNPRTVEEIFKDYTARRSALLRALTKDVDDFYSQCDPEKENLCLYGHPNESWEVNLPAEEVPPELPEPALGINFARDGMQRKDWLSLVAVHSDCWLLSVSFYFGARLNRNERKRLFSLINDLPTLFDVVTGRKPIKDNKPSSDSGSKSRNGTKRSIEGQTKSPTPRPMEESYEDEEEEEDEHGDTLCGICGGNYTQDEFWICCDVCERWYHGKCVKITPAKADSIKQYKCPPCCAKKGRQ

SEQ ID NO: 20937 - protein, 312 aa, Zea mays subsp. mays
  peptide (1)..(312): Ceres Seq. ID no. 15179238
  misc_feature (258)..(308): Pfam Name: Pfam Description:  PHD-finger
  misc_feature (69)..(312): NCBI GI NO: 15229696 NR Description: nucleic acid binding protein -related
  misc_feature (68)..(312): NCBI GI NO: 15239180 NR Description: nucleic acid binding protein-related
  misc_feature (68)..(312): NCBI GI NO: 34900462 NR Description: putative nucleic acid binding protein
  misc_feature (74)..(311): NCBI GI NO: 15229157 NR Description: nucleic acid binding protein-related
  misc_feature (69)..(312): NCBI GI NO: 28876028 NR Description: putative PHD-finger domain containing protein
  misc_feature (69)..(312): NCBI GI NO: 29124114 NR Description: putative PHD-type zinc finger protein
  misc_feature (74)..(311): NCBI GI NO: 15239624 NR Description: nucleic acid binding protein - like
  misc_feature (74)..(311): NCBI GI NO: 30687843 NR Description: zinc finger protein - like [Arabidopsis thaliana]
  misc_feature (75)..(309): NCBI GI NO: 15223786 NR Description: nucleic acid binding protein (alfin-1) -related
  misc_feature (74)..(282): NCBI GI NO: 14192880 NR Description: Putative nucleic acid binding protein
MSSSSLHLLPKSLSLSIAFLSLSLSTSDHIGSQKPIDADLDLSPLATDLHPYTNRIYIHTLYLSVKSMAAVSSNPRTVEEIFKDYTARRSALLRALTKDVDDFYSQCDPEKENLCLYGHPNESWEVNLPAEEVPPELPEPALGINFARDGMQRKDWLSLVAVHSDCWLLSVSFYFGARLNRNERKRLFSLINDLPTLFDVVTGRKPIKDNKPSSDSGSKSRNGTKRSIEGQTKSPTPRPMEESYEDEEEEEDEHGDTLCGICGGNYTQDEFWICCDVCERWYHGKCVKITPAKADSIKQYKCPPCCAKKGRQ

SEQ ID NO: 20938 - DNA, 1013 bp, Zea mays subsp. mays
  misc_feature (1)..(1013): Ceres Seq. ID no. 15179183
aaagccaacacatctctactgtctccggcgagatctcaatttttgatccttcacggtggcgtcgacgtccgggcaacaacaagctctctcgagaagaaagccttcgccaccatctccatctcctccttcctctgcttcgcctctacgtgctcctcctccttcagcgaggaaacctatccccgaattccccttttatcagcagaactggttcatcgctcttctcttcgtgatggctatgggattcttctccctcgctctcttcctcttcctcagcgtcgattcagattccggctacacgtctgcctccgccgccgccgcttcgggtaaagaaggcgtcgagattacgtatggaagtgcgatgaagctgatgcacgagaagacaaaggttcgactgcattctcacgatgtgccctatggatccggcagtgggcagcagtcagtcactggctttcctggcgtcgttgattccaacagctactggattgttaaacctgtgcctgggacaacagcaaagcaaggtgatgccgtcatgagtggagctaccattagattgcagcacatgaagacccggaaatggctccacagtcacttgcatgcatctcctatatcaggcaacttagaggttagctgttttggagatgattcaaattccgatactggggatcactggaagcttataatcgaagggagcgggaagacatggaaacaagaccaaagagtccgacttcaacacatagacactagtggctacctccatagccatgacaaaaagtaccagcgtatagccggtggtcagcaagaggtgtgtggaatcagggaaaagcgggcagataatgtttggttggcagcagaaggagtctaccttcccgttgatgagagtagcagcagcaagtaaggtgaagagttgtgttaacttatctctgaggagtctttgaatctcatcttttactttctaaactcataaacaagaaaatacatatattttgctgatcttcgattgtcggtctaacttt

SEQ ID NO: 20939 - protein, 221 aa, Zea mays subsp. mays
  peptide (1)..(221): Ceres Seq. ID no. 15179184
  misc_feature (97)..(152): Pfam Name: Pfam Description:  MIR domain
  misc_feature (1)..(218): NCBI GI NO: 18400721 NR Description: expressed protein [Arabidopsis thaliana]
  misc_feature (1)..(218): NCBI GI NO: 21593658 NR Description: unknown [Arabidopsis thaliana]
  misc_feature (47)..(218): NCBI GI NO: 25412278 NR Description: hypothetical protein At2g25110
  misc_feature (24)..(220): NCBI GI NO: 24644197 NR Description: CG11999-PA [Drosophila melanogaster]
  misc_feature (1)..(221): NCBI GI NO: 31241809 NR Description: ENSANGP00000013320 [Anopheles gambiae]
  misc_feature (38)..(220): NCBI GI NO: 29840881 NR Description: similar to GenBank Accession Number AE003603CG11999 gene product in Drosop hila melanogaster
  misc_feature (26)..(216): NCBI GI NO: 14141195 NR Description: stromal cell-derived factor 2 precursor
  misc_feature (26)..(216): NCBI GI NO: 30584855 NR Description: Homo sapiens stromal cell-derived factor 2
  misc_feature (26)..(216): NCBI GI NO: 38571762 NR Description: Unknown (protein for IMAGE:5693309) [Mus musculus]
  misc_feature (26)..(216): NCBI GI NO: 2137796 NR Description: stromal cell-derived factor 2 - mouse
MAMGFFSLALFLFLSVDSDSGYTSASAAAASGKEGVEITYGSAMKLMHEKTKVRLHSHDVPYGSGSGQQSVTGFPGVVDSNSYWIVKPVPGTTAKQGDAVMSGATIRLQHMKTRKWLHSHLHASPISGNLEVSCFGDDSNSDTGDHWKLIIEGSGKTWKQDQRVRLQHIDTSGYLHSHDKKYQRIAGGQQEVCGIREKRADNVWLAAEGVYLPVDESSSSK

SEQ ID NO: 20940 - protein, 219 aa, Zea mays subsp. mays
  peptide (1)..(219): Ceres Seq. ID no. 15179185
  misc_feature (95)..(150): Pfam Name: Pfam Description:  MIR domain
  misc_feature (1)..(216): NCBI GI NO: 18400721 NR Description: expressed protein [Arabidopsis thaliana]
  misc_feature (1)..(216): NCBI GI NO: 21593658 NR Description: unknown [Arabidopsis thaliana]
  misc_feature (45)..(216): NCBI GI NO: 25412278 NR Description: hypothetical protein At2g25110
  misc_feature (22)..(218): NCBI GI NO: 24644197 NR Description: CG11999-PA [Drosophila melanogaster]
  misc_feature (1)..(219): NCBI GI NO: 31241809 NR Description: ENSANGP00000013320 [Anopheles gambiae]
  misc_feature (36)..(218): NCBI GI NO: 29840881 NR Description: similar to GenBank Accession Number AE003603CG11999 gene product in Drosop hila melanogaster
  misc_feature (24)..(214): NCBI GI NO: 14141195 NR Description: stromal cell-derived factor 2 precursor
  misc_feature (24)..(214): NCBI GI NO: 30584855 NR Description: Homo sapiens stromal cell-derived factor 2
  misc_feature (24)..(214): NCBI GI NO: 38571762 NR Description: Unknown (protein for IMAGE:5693309) [Mus musculus]
  misc_feature (24)..(214): NCBI GI NO: 2137796 NR Description: stromal cell-derived factor 2 - mouse
MGFFSLALFLFLSVDSDSGYTSASAAAASGKEGVEITYGSAMKLMHEKTKVRLHSHDVPYGSGSGQQSVTGFPGVVDSNSYWIVKPVPGTTAKQGDAVMSGATIRLQHMKTRKWLHSHLHASPISGNLEVSCFGDDSNSDTGDHWKLIIEGSGKTWKQDQRVRLQHIDTSGYLHSHDKKYQRIAGGQQEVCGIREKRADNVWLAAEGVYLPVDESSSSK

SEQ ID NO: 20941 - protein, 178 aa, Zea mays subsp. mays
  peptide (1)..(178): Ceres Seq. ID no. 15179186
  misc_feature (54)..(109): Pfam Name: Pfam Description:  MIR domain
  misc_feature (1)..(175): NCBI GI NO: 18400721 NR Description: expressed protein [Arabidopsis thaliana]
  misc_feature (1)..(175): NCBI GI NO: 21593658 NR Description: unknown [Arabidopsis thaliana]
  misc_feature (4)..(175): NCBI GI NO: 25412278 NR Description: hypothetical protein At2g25110
  misc_feature (1)..(177): NCBI GI NO: 24644197 NR Description: CG11999-PA [Drosophila melanogaster]
  misc_feature (1)..(178): NCBI GI NO: 31241809 NR Description: ENSANGP00000013320 [Anopheles gambiae]
  misc_feature (1)..(177): NCBI GI NO: 29840881 NR Description: similar to GenBank Accession Number AE003603CG11999 gene product in Drosop hila melanogaster
  misc_feature (1)..(173): NCBI GI NO: 14141195 NR Description: stromal cell-derived factor 2 precursor
  misc_feature (1)..(173): NCBI GI NO: 30584855 NR Description: Homo sapiens stromal cell-derived factor 2
  misc_feature (1)..(173): NCBI GI NO: 38571762 NR Description: Unknown (protein for IMAGE:5693309) [Mus musculus]
  misc_feature (1)..(173): NCBI GI NO: 2137796 NR Description: stromal cell-derived factor 2 - mouse
MKLMHEKTKVRLHSHDVPYGSGSGQQSVTGFPGVVDSNSYWIVKPVPGTTAKQGDAVMSGATIRLQHMKTRKWLHSHLHASPISGNLEVSCFGDDSNSDTGDHWKLIIEGSGKTWKQDQRVRLQHIDTSGYLHSHDKKYQRIAGGQQEVCGIREKRADNVWLAAEGVYLPVDESSSSK

SEQ ID NO: 20942 - DNA, 924 bp, Zea mays subsp. mays
  misc_feature (1)..(924): Ceres Seq. ID no. 15178887
gcgttatccaaacacacacttctcagtcctttcttggcgatagaaatggcttctcaatcttttactttggcgaatctaaggatctcccaaatcgattccttctacagtcagaaaccatcttctccaatacacttcttctccactagaaatccagtaaaatccctgaacctgacgaatccatggatggccggtgattcttctctctctctcgattcttccgcctccgtcttgcgaactaactcgacaacgcgcagaaagatcccaatcgccgtcgttgccagcttacccaccgcgaatccagaatctgcggtttctgatgcgaaaaagccaaaatggtcgtggagaggaatcaaatcatttgcaatgggagagctcgaagctaggaagctcaagtatcccaacaccggtactgaatcacttctcatgggtatcttgattgaaggaactagttttacttccaagtttttgagggcgcataagataacgctttacaaagttcgtgaagaaacaatcaagttactagggaaagcagatttgtattccttcagccctgaacatcctcctttaacccacgatgctcaaagagctcttgactctgctgtcaatcagaatctcaaagcaggtggtgctggggaaataatgccagcccatatattgctgggagtctggtctgaagttgaatctccaggtcataagatactggcaactcttggtttcactgatgaaaaagctaaagagttagagtcctttgcctctgaatctggatttctagatgaatagtgtcttgttacatttatcatcctccatttatgccatcttaattttcatactaaagcctccaaatttgtggttgcagtctgcaatgatgttcttatcggttcatcatactgattcttaattttcacttctttgcttttgcctaac

SEQ ID NO: 20943 - protein, 259 aa, Zea mays subsp. mays
  peptide (1)..(259): Ceres Seq. ID no. 15178888
  misc_feature (123)..(175): Pfam Name: Pfam Description:  Clp amino terminal domain
  misc_feature (17)..(259): NCBI GI NO: 21592785 NR Description: unknown [Arabidopsis thaliana]
  misc_feature (17)..(259): NCBI GI NO: 18413740 NR Description: expressed protein [Arabidopsis thaliana]
  misc_feature (17)..(259): NCBI GI NO: 7485569 NR Description: hypothetical protein F16J13
  misc_feature (16)..(253): NCBI GI NO: 18416540 NR Description: expressed protein [Arabidopsis thaliana]
  misc_feature (16)..(252): NCBI GI NO: 7487579 NR Description: hypothetical protein T30C3
  misc_feature (111)..(245): NCBI GI NO: 23039549 NR Description: hypothetical protein
  misc_feature (75)..(238): NCBI GI NO: 399213 NR Description: ATP-dependent clp protease ATP-binding subunit clpAhomolog CD4B
  misc_feature (75)..(238): NCBI GI NO: 1168972 NR Description: ATP-dependent clp protease ATP-binding subunit clpAhomolog
  misc_feature (48)..(238): NCBI GI NO: 25289891 NR Description: endopeptidase Clp (EC 3
  misc_feature (62)..(238): NCBI GI NO: 461753 NR Description: ATP-dependent clp protease ATP-binding subunit clpAhomolog
ALSKHTLLSPFLAIEMASQSFTLANLRISQIDSFYSQKPSSPIHFFSTRNPVKSLNLTNPWMAGDSSLSLDSSASVLRTNSTTRRKIPIAVVASLPTANPESAVSDAKKPKWSWRGIKSFAMGELEARKLKYPNTGTESLLMGILIEGTSFTSKFLRAHKITLYKVREETIKLLGKADLYSFSPEHPPLTHDAQRALDSAVNQNLKAGGAGEIMPAHILLGVWSEVESPGHKILATLGFTDEKAKELESFASESGFLDE

SEQ ID NO: 20944 - protein, 244 aa, Zea mays subsp. mays
  peptide (1)..(244): Ceres Seq. ID no. 15178889
  misc_feature (108)..(160): Pfam Name: Pfam Description:  Clp amino terminal domain
  misc_feature (2)..(244): NCBI GI NO: 21592785 NR Description: unknown [Arabidopsis thaliana]
  misc_feature (2)..(244): NCBI GI NO: 18413740 NR Description: expressed protein [Arabidopsis thaliana]
  misc_feature (2)..(244): NCBI GI NO: 7485569 NR Description: hypothetical protein F16J13
  misc_feature (1)..(238): NCBI GI NO: 18416540 NR Description: expressed protein [Arabidopsis thaliana]
  misc_feature (1)..(237): NCBI GI NO: 7487579 NR Description: hypothetical protein T30C3
  misc_feature (96)..(230): NCBI GI NO: 23039549 NR Description: hypothetical protein
  misc_feature (60)..(223): NCBI GI NO: 399213 NR Description: ATP-dependent clp protease ATP-binding subunit clpAhomolog CD4B
  misc_feature (60)..(223): NCBI GI NO: 1168972 NR Description: ATP-dependent clp protease ATP-binding subunit clpAhomolog
  misc_feature (33)..(223): NCBI GI NO: 25289891 NR Description: endopeptidase Clp (EC 3
  misc_feature (47)..(223): NCBI GI NO: 461753 NR Description: ATP-dependent clp protease ATP-binding subunit clpAhomolog
MASQSFTLANLRISQIDSFYSQKPSSPIHFFSTRNPVKSLNLTNPWMAGDSSLSLDSSASVLRTNSTTRRKIPIAVVASLPTANPESAVSDAKKPKWSWRGIKSFAMGELEARKLKYPNTGTESLLMGILIEGTSFTSKFLRAHKITLYKVREETIKLLGKADLYSFSPEHPPLTHDAQRALDSAVNQNLKAGGAGEIMPAHILLGVWSEVESPGHKILATLGFTDEKAKELESFASESGFLDE

SEQ ID NO: 20945 - protein, 198 aa, Zea mays subsp. mays
  peptide (1)..(198): Ceres Seq. ID no. 15178890
  misc_feature (62)..(114): Pfam Name: Pfam Description:  Clp amino terminal domain
  misc_feature (1)..(198): NCBI GI NO: 21592785 NR Description: unknown [Arabidopsis thaliana]
  misc_feature (1)..(198): NCBI GI NO: 18413740 NR Description: expressed protein [Arabidopsis thaliana]
  misc_feature (1)..(198): NCBI GI NO: 7485569 NR Description: hypothetical protein F16J13
  misc_feature (1)..(192): NCBI GI NO: 18416540 NR Description: expressed protein [Arabidopsis thaliana]
  misc_feature (1)..(191): NCBI GI NO: 7487579 NR Description: hypothetical protein T30C3
  misc_feature (50)..(184): NCBI GI NO: 23039549 NR Description: hypothetical protein
  misc_feature (14)..(177): NCBI GI NO: 399213 NR Description: ATP-dependent clp protease ATP-binding subunit clpAhomolog CD4B
  misc_feature (14)..(177): NCBI GI NO: 1168972 NR Description: ATP-dependent clp protease ATP-binding subunit clpAhomolog
  misc_feature (1)..(177): NCBI GI NO: 25289891 NR Description: endopeptidase Clp (EC 3
  misc_feature (1)..(177): NCBI GI NO: 461753 NR Description: ATP-dependent clp protease ATP-binding subunit clpAhomolog
MAGDSSLSLDSSASVLRTNSTTRRKIPIAVVASLPTANPESAVSDAKKPKWSWRGIKSFAMGELEARKLKYPNTGTESLLMGILIEGTSFTSKFLRAHKITLYKVREETIKLLGKADLYSFSPEHPPLTHDAQRALDSAVNQNLKAGGAGEIMPAHILLGVWSEVESPGHKILATLGFTDEKAKELESFASESGFLDE

SEQ ID NO: 20946 - DNA, 975 bp, Zea mays subsp. mays
  misc_feature (1)..(975): Ceres Seq. ID no. 15178920
aatatcaactcatcacatttattttctcactctttcttttttattcatctctctctagctaaaattatataactctcgaacttgtggatatctaaataaataatattaaaatggagaaaataggaggaataagtagtggaggtacgggatcatcaggagaagcagaagtgcgaaaaggaccgtggacgatggaagaagatcttattcttatcaattatatcgccaaccacggcgatggcgtttggaactctctcgccaaatctgcaggtctaaaacgcaccggaaaaagttgccgccttcggtggctcaactatctccgccctgacgtacgacgtggaaacatcacgccggaggaacaacttaccatcatggaacttcatgctaagtggggaaacaggtggtccaaaatcgctaaacaccttccaggaagaaccgacaatgagataaagaatttctggaggacaagaatccaaaaatacatcaaacaaaccgatgtgacagcaacaacgacgtcctccgttggatctcatcacagctcagaaattaacgatcaagttgcaagtacgtcgaaccataatgtcttttgtacacaagatcaagcgatggagacatattctcctacaactacgtcctatcaacataccaatatggatttcaactatggtaacttctctgcggctgcggcaactgtgactgcgactacaacggcagattattcaattccaatgactgttgatgatcaaaacggtgaaaactattggggcatggatgatatttggtcatcaatgcatttactcaatggtaattgattagtcaaaatggatcagaaatatggaatattaatttgagatttgtgatttttaggagtactgtaattagtacatgacatgtatatggtttttgcctcgctgcttagaggtttggggatataatttatatgtaatattaatgatctaaatccttgatatatatttg

SEQ ID NO: 20947 - protein, 232 aa, Zea mays subsp. mays
  peptide (1)..(232): Ceres Seq. ID no. 15178921
  misc_feature (22)..(69): Pfam Name: Pfam Description:  Myb-like DNA-binding domain
  misc_feature (1)..(232): NCBI GI NO: 30688935 NR Description: myb family transcription factor (ATMYB3)
  misc_feature (1)..(232): NCBI GI NO: 2280528 NR Description: ATMYB3 [Arabidopsis thaliana]
  misc_feature (8)..(232): NCBI GI NO: 21554734 NR Description: putative transcription factor MYB24
  misc_feature (8)..(232): NCBI GI NO: 15242669 NR Description: myb family transcription factor
  misc_feature (86)..(232): NCBI GI NO: 11358682 NR Description: probable transcription factor MYB21
  misc_feature (14)..(232): NCBI GI NO: 7438338 NR Description: Myb26 protein - garden pea
  misc_feature (14)..(182): NCBI GI NO: 40643882 NR Description: MYB8 protein [Gerbera hybrid cv. 'Terra Regina']
  misc_feature (14)..(182): NCBI GI NO: 82311 NR Description: myb-related protein 340 - garden snapdragon
  misc_feature (14)..(152): NCBI GI NO: 82306 NR Description: myb-related protein 305 - garden snapdragon
  misc_feature (13)..(143): NCBI GI NO: 13537530 NR Description: LhMyb [Lilium hybrid division I]
MEKIGGISSGGTGSSGEAEVRKGPWTMEEDLILINYIANHGDGVWNSLAKSAGLKRTGKSCRLRWLNYLRPDVRRGNITPEEQLTIMELHAKWGNRWSKIAKHLPGRTDNEIKNFWRTRIQKYIKQTDVTATTTSSVGSHHSSEINDQVASTSNHNVFCTQDQAMETYSPTTTSYQHTNMDFNYGNFSAAAATVTATTTADYSIPMTVDDQNGENYWGMDDIWSSMHLLNGN

SEQ ID NO: 20948 - protein, 206 aa, Zea mays subsp. mays
  peptide (1)..(206): Ceres Seq. ID no. 15178922
  misc_feature (1)..(43): Pfam Name: Pfam Description:  Myb-like DNA-binding domain
  misc_feature (1)..(206): NCBI GI NO: 30688935 NR Description: myb family transcription factor (ATMYB3)
  misc_feature (1)..(206): NCBI GI NO: 2280528 NR Description: ATMYB3 [Arabidopsis thaliana]
  misc_feature (1)..(206): NCBI GI NO: 21554734 NR Description: putative transcription factor MYB24
  misc_feature (1)..(206): NCBI GI NO: 15242669 NR Description: myb family transcription factor
  misc_feature (60)..(206): NCBI GI NO: 11358682 NR Description: probable transcription factor MYB21
  misc_feature (1)..(206): NCBI GI NO: 7438338 NR Description: Myb26 protein - garden pea
  misc_feature (1)..(156): NCBI GI NO: 40643882 NR Description: MYB8 protein [Gerbera hybrid cv. 'Terra Regina']
  misc_feature (1)..(156): NCBI GI NO: 82311 NR Description: myb-related protein 340 - garden snapdragon
  misc_feature (1)..(126): NCBI GI NO: 82306 NR Description: myb-related protein 305 - garden snapdragon
  misc_feature (1)..(117): NCBI GI NO: 13537530 NR Description: LhMyb [Lilium hybrid division I]
MEEDLILINYIANHGDGVWNSLAKSAGLKRTGKSCRLRWLNYLRPDVRRGNITPEEQLTIMELHAKWGNRWSKIAKHLPGRTDNEIKNFWRTRIQKYIKQTDVTATTTSSVGSHHSSEINDQVASTSNHNVFCTQDQAMETYSPTTTSYQHTNMDFNYGNFSAAAATVTATTTADYSIPMTVDDQNGENYWGMDDIWSSMHLLNGN

SEQ ID NO: 20949 - protein, 146 aa, Zea mays subsp. mays
  peptide (1)..(146): Ceres Seq. ID no. 15178923
  misc_feature (1)..(146): NCBI GI NO: 30688935 NR Description: myb family transcription factor (ATMYB3)
  misc_feature (1)..(146): NCBI GI NO: 2280528 NR Description: ATMYB3 [Arabidopsis thaliana]
  misc_feature (1)..(146): NCBI GI NO: 21554734 NR Description: putative transcription factor MYB24
  misc_feature (1)..(146): NCBI GI NO: 15242669 NR Description: myb family transcription factor
  misc_feature (1)..(146): NCBI GI NO: 11358682 NR Description: probable transcription factor MYB21
  misc_feature (1)..(146): NCBI GI NO: 7438338 NR Description: Myb26 protein - garden pea
  misc_feature (1)..(96): NCBI GI NO: 40643882 NR Description: MYB8 protein [Gerbera hybrid cv. 'Terra Regina']
  misc_feature (1)..(96): NCBI GI NO: 82311 NR Description: myb-related protein 340 - garden snapdragon
  misc_feature (1)..(66): NCBI GI NO: 82306 NR Description: myb-related protein 305 - garden snapdragon
  misc_feature (1)..(57): NCBI GI NO: 13537530 NR Description: LhMyb [Lilium hybrid division I]
MELHAKWGNRWSKIAKHLPGRTDNEIKNFWRTRIQKYIKQTDVTATTTSSVGSHHSSEINDQVASTSNHNVFCTQDQAMETYSPTTTSYQHTNMDFNYGNFSAAAATVTATTTADYSIPMTVDDQNGENYWGMDDIWSSMHLLNGN

SEQ ID NO: 20950 - DNA, 1283 bp, Zea mays subsp. mays
  misc_feature (1)..(1283): Ceres Seq. ID no. 15178832
aaataatgaaaaggggttaatagtctgcgtggatcttcagccgtttcagacacaatacccagaattttcgagctgaaaaattttgttcttctgcgttcccatcgagtttatcctctactctgtgtgcccctttgaatattcatacgacgacgcgtgattttggttttgaatagatagattagaagcaaggattggctatggaggatgcaaacgcgattaggtattggtgtcacatgtgctctcgatccgtgaatccagtcatcgaaggcgacgtaatcaactgcaacttctgccaaagcggattcgtcgaagaaatggacgaaactccagaacaggccaccaatgatcaccctcatcaagcttctgagtctctctgggctcccatcttgctcgggatgatgaacgatcatgatcagcatcagagagcctctgtcgaaaacgaagatgacaacaatgatgacgacgatgatgatggtcagattaacgatggagagttcgatttggaacggcacctggaagagatcatgaggagaaggaggagacactctgccgcgatcctcgatcttctccaagggatccgagccgggttatcggttgaatccgaaaacaaccaggataataacaatcaagataacgagcttgttgtcttgatcaactcctttaaccagaggataaggatccaagactccgtcgacgctagtgccgttccttctggatctttaggcgactattttatcggacctgggttcgagatgttgcttcagcgtttagctgagaatgatcccaacaacaggtacgggacgcctcccgcgacgaaggaagctgttgagtcgttggagacggttatggtggaggaaagtttggtgcagtgtactgtgtgtttggatgattttgagattggggttgaggcgaaagagatgccgtgtaagcataagtttcacagcgagtgtttgttgccgtggcttgagcttcatagctcgtgtcctgtgtgtagatatttgcttcctacgggggatgatgatggggaagctaagactgatggggagacgtcgagtaatgtttctatggagaacaatggaacatcggtggactcgagttcgaacaatccgtcggttaatgattgagggttagagtgtgaggggtcggtttggtgaagggtttgtgattagttggatgttactttggctgcagtacatagttttctcaggttttgttgaaagttggattttcaagttgttttttttgtttgacttttttttttctgattgtttcgagttttgatt

SEQ ID NO: 20951 - protein, 308 aa, Zea mays subsp. mays
  peptide (1)..(308): Ceres Seq. ID no. 15178833
  misc_feature (225)..(265): Pfam Name: RING finger Pfam Description: Zinc finger, C3HC4 type
  misc_feature (1)..(307): NCBI GI NO: 15231238 NR Description: expressed protein [Arabidopsis thaliana]
  misc_feature (1)..(307): NCBI GI NO: 38454178 NR Description: At3g13430 [Arabidopsis thaliana]
  misc_feature (1)..(303): NCBI GI NO: 18405411 NR Description: expressed protein [Arabidopsis thaliana]
  misc_feature (69)..(302): NCBI GI NO: 15241188 NR Description: expressed protein [Arabidopsis thaliana]
  misc_feature (58)..(308): NCBI GI NO: 7486783 NR Description: hypothetical protein M3E9
  misc_feature (58)..(308): NCBI GI NO: 22328949 NR Description: expressed protein [Arabidopsis thaliana]
  misc_feature (90)..(304): NCBI GI NO: 32129334 NR Description: unknown protein
  misc_feature (173)..(286): NCBI GI NO: 11994207 NR Description: gene_id:MPN9.20~unknown protein
  misc_feature (173)..(286): NCBI GI NO: 15231003 NR Description: expressed protein [Arabidopsis thaliana]
  misc_feature (1)..(280): NCBI GI NO: 34903272 NR Description: unnamed protein product
MEDANAIRYWCHMCSRSVNPVIEGDVINCNFCQSGFVEEMDETPEQATNDHPHQASESLWAPILLGMMNDHDQHQRASVENEDDNNDDDDDDGQINDGEFDLERHLEEIMRRRRRHSAAILDLLQGIRAGLSVESENNQDNNNQDNELVVLINSFNQRIRIQDSVDASAVPSGSLGDYFIGPGFEMLLQRLAENDPNNRYGTPPATKEAVESLETVMVEESLVQCTVCLDDFEIGVEAKEMPCKHKFHSECLLPWLELHSSCPVCRYLLPTGDDDGEAKTDGETSSNVSMENNGTSVDSSSNNPSVND

SEQ ID NO: 20952 - protein, 296 aa, Zea mays subsp. mays
  peptide (1)..(296): Ceres Seq. ID no. 15178834
  misc_feature (213)..(253): Pfam Name: RING finger Pfam Description: Zinc finger, C3HC4 type
  misc_feature (1)..(295): NCBI GI NO: 15231238 NR Description: expressed protein [Arabidopsis thaliana]
  misc_feature (1)..(295): NCBI GI NO: 38454178 NR Description: At3g13430 [Arabidopsis thaliana]
  misc_feature (1)..(291): NCBI GI NO: 18405411 NR Description: expressed protein [Arabidopsis thaliana]
  misc_feature (57)..(290): NCBI GI NO: 15241188 NR Description: expressed protein [Arabidopsis thaliana]
  misc_feature (46)..(296): NCBI GI NO: 7486783 NR Description: hypothetical protein M3E9
  misc_feature (46)..(296): NCBI GI NO: 22328949 NR Description: expressed protein [Arabidopsis thaliana]
  misc_feature (78)..(292): NCBI GI NO: 32129334 NR Description: unknown protein
  misc_feature (161)..(274): NCBI GI NO: 11994207 NR Description: gene_id:MPN9.20~unknown protein
  misc_feature (161)..(274): NCBI GI NO: 15231003 NR Description: expressed protein [Arabidopsis thaliana]
  misc_feature (1)..(268): NCBI GI NO: 34903272 NR Description: unnamed protein product
MCSRSVNPVIEGDVINCNFCQSGFVEEMDETPEQATNDHPHQASESLWAPILLGMMNDHDQHQRASVENEDDNNDDDDDDGQINDGEFDLERHLEEIMRRRRRHSAAILDLLQGIRAGLSVESENNQDNNNQDNELVVLINSFNQRIRIQDSVDASAVPSGSLGDYFIGPGFEMLLQRLAENDPNNRYGTPPATKEAVESLETVMVEESLVQCTVCLDDFEIGVEAKEMPCKHKFHSECLLPWLELHSSCPVCRYLLPTGDDDGEAKTDGETSSNVSMENNGTSVDSSSNNPSVND

SEQ ID NO: 20953 - protein, 269 aa, Zea mays subsp. mays
  peptide (1)..(269): Ceres Seq. ID no. 15178835
  misc_feature (186)..(226): Pfam Name: RING finger Pfam Description: Zinc finger, C3HC4 type
  misc_feature (1)..(268): NCBI GI NO: 15231238 NR Description: expressed protein [Arabidopsis thaliana]
  misc_feature (1)..(268): NCBI GI NO: 38454178 NR Description: At3g13430 [Arabidopsis thaliana]
  misc_feature (1)..(264): NCBI GI NO: 18405411 NR Description: expressed protein [Arabidopsis thaliana]
  misc_feature (30)..(263): NCBI GI NO: 15241188 NR Description: expressed protein [Arabidopsis thaliana]
  misc_feature (19)..(269): NCBI GI NO: 7486783 NR Description: hypothetical protein M3E9
  misc_feature (19)..(269): NCBI GI NO: 22328949 NR Description: expressed protein [Arabidopsis thaliana]
  misc_feature (51)..(265): NCBI GI NO: 32129334 NR Description: unknown protein
  misc_feature (134)..(247): NCBI GI NO: 11994207 NR Description: gene_id:MPN9.20~unknown protein
  misc_feature (134)..(247): NCBI GI NO: 15231003 NR Description: expressed protein [Arabidopsis thaliana]
  misc_feature (1)..(241): NCBI GI NO: 34903272 NR Description: unnamed protein product
MDETPEQATNDHPHQASESLWAPILLGMMNDHDQHQRASVENEDDNNDDDDDDGQINDGEFDLERHLEEIMRRRRRHSAAILDLLQGIRAGLSVESENNQDNNNQDNELVVLINSFNQRIRIQDSVDASAVPSGSLGDYFIGPGFEMLLQRLAENDPNNRYGTPPATKEAVESLETVMVEESLVQCTVCLDDFEIGVEAKEMPCKHKFHSECLLPWLELHSSCPVCRYLLPTGDDDGEAKTDGETSSNVSMENNGTSVDSSSNNPSVND

SEQ ID NO: 20954 - DNA, 924 bp, Zea mays subsp. mays
  misc_feature (1)..(924): Ceres Seq. ID no. 15178873
ttgcttctccttccgacacaatggctacgttcctcacacctcttgtttcaatcaaacctacagtcttttcattcccgtcccaatccgtcacctctccacacagacaaaccaatgtactctcactcaaaccgtttccttctcccgcgggagcacagagctccagggtgagattcattccccacgcggtggagactgaagaaaaacccgcttcagaccctaacgcagagtcctcaaggcgtgtctacatcggaaacatacccagaactgtggataacgaacagctctcaaaactcgtcgaagaacacggcgccgctgaaaatgttcaggtgatgtatgataagtattcaggaagaagccgtaggtttggattcgctacaatgaaatcagttgaagatgccaatgctgtgattgacaagttaaatggcactaccattgaagggcgtgaggtgaaggttaacatcacggagaaacctatagcgtcatcatcgtctcctgatttgtcattgcttcagtctgaggattcggcgtttgtagatagtccttataaagtgtatgtagggaatctggcaaagactgttactaaacagatgcttgagaatttgttttctgagaaagggaaagtagtcagtgccaaggtttcaagagtgcctggaacttccaaatcctctgggtttgggtttgtgacattttctacagaagaggatgttgaagctgccattttggctctaaacaactctttgttggaaggacagaagattcgggtgaataaggcatagtgtgagaaagaagaggagtccttgtgccatcacaagaacgtgaaaagaatctctttttgtaatgcaaacatgtagagcttagtatcatcatctttgtatctttgtatcctttctaagatgaaaaaatgaaagcatttctttctgatcg

SEQ ID NO: 20955 - protein, 257 aa, Zea mays subsp. mays
  peptide (1)..(257): Ceres Seq. ID no. 15178874
  misc_feature (183)..(254): Pfam Name: a.k.a. RRM, RBD, or RNP domain Pfam Description: RNA recognition motif.
  misc_feature (7)..(257): NCBI GI NO: 30693595 NR Description: RNA recognition motif (RRM)-containing protein
  misc_feature (7)..(254): NCBI GI NO: 11357772 NR Description: hypothetical protein F4F15
  misc_feature (26)..(257): NCBI GI NO: 7578881 NR Description: plastid-specific ribosomal protein 2 precursor
  misc_feature (1)..(163): NCBI GI NO: 12230585 NR Description: 29 kDa ribonucleoprotein B, chloroplast precursor
  misc_feature (177)..(257): NCBI GI NO: 12230585 NR Description: 29 kDa ribonucleoprotein B, chloroplast precursor
  misc_feature (65)..(257): NCBI GI NO: 15231200 NR Description: 33 kDa ribonucleoprotein, chloroplast
  misc_feature (65)..(257): NCBI GI NO: 17064758 NR Description: ubiquitin / ribosomal protein CEP52
  misc_feature (8)..(257): NCBI GI NO: 34913270 NR Description: putative ribonucleoprotein
  misc_feature (65)..(257): NCBI GI NO: 681912 NR Description: cp33 [Arabidopsis thaliana]
  misc_feature (9)..(163): NCBI GI NO: 1350821 NR Description: 31 kDa ribonucleoprotein, chloroplast precursor
ASPSDTMATFLTPLVSIKPTVFSFPSQSVTSPHRQTNVLSLKPFPSPAGAQSSRVRFIPHAVETEEKPASDPNAESSRRVYIGNIPRTVDNEQLSKLVEEHGAAENVQVMYDKYSGRSRRFGFATMKSVEDANAVIDKLNGTTIEGREVKVNITEKPIASSSSPDLSLLQSEDSAFVDSPYKVYVGNLAKTVTKQMLENLFSEKGKVVSAKVSRVPGTSKSSGFGFVTFSTEEDVEAAILALNNSLLEGQKIRVNKA

SEQ ID NO: 20956 - protein, 251 aa, Zea mays subsp. mays
  peptide (1)..(251): Ceres Seq. ID no. 15178875
  misc_feature (177)..(248): Pfam Name: a.k.a. RRM, RBD, or RNP domain Pfam Description: RNA recognition motif.
  misc_feature (1)..(251): NCBI GI NO: 30693595 NR Description: RNA recognition motif (RRM)-containing protein
  misc_feature (1)..(248): NCBI GI NO: 11357772 NR Description: hypothetical protein F4F15
  misc_feature (20)..(251): NCBI GI NO: 7578881 NR Description: plastid-specific ribosomal protein 2 precursor
  misc_feature (1)..(157): NCBI GI NO: 12230585 NR Description: 29 kDa ribonucleoprotein B, chloroplast precursor
  misc_feature (171)..(251): NCBI GI NO: 12230585 NR Description: 29 kDa ribonucleoprotein B, chloroplast precursor
  misc_feature (59)..(251): NCBI GI NO: 15231200 NR Description: 33 kDa ribonucleoprotein, chloroplast
  misc_feature (59)..(251): NCBI GI NO: 17064758 NR Description: ubiquitin / ribosomal protein CEP52
  misc_feature (2)..(251): NCBI GI NO: 34913270 NR Description: putative ribonucleoprotein
  misc_feature (59)..(251): NCBI GI NO: 681912 NR Description: cp33 [Arabidopsis thaliana]
  misc_feature (3)..(157): NCBI GI NO: 1350821 NR Description: 31 kDa ribonucleoprotein, chloroplast precursor
MATFLTPLVSIKPTVFSFPSQSVTSPHRQTNVLSLKPFPSPAGAQSSRVRFIPHAVETEEKPASDPNAESSRRVYIGNIPRTVDNEQLSKLVEEHGAAENVQVMYDKYSGRSRRFGFATMKSVEDANAVIDKLNGTTIEGREVKVNITEKPIASSSSPDLSLLQSEDSAFVDSPYKVYVGNLAKTVTKQMLENLFSEKGKVVSAKVSRVPGTSKSSGFGFVTFSTEEDVEAAILALNNSLLEGQKIRVNKA

SEQ ID NO: 20957 - protein, 148 aa, Zea mays subsp. mays
  peptide (1)..(148): Ceres Seq. ID no. 15178876
  misc_feature (74)..(145): Pfam Name: a.k.a. RRM, RBD, or RNP domain Pfam Description: RNA recognition motif.
  misc_feature (1)..(148): NCBI GI NO: 30693595 NR Description: RNA recognition motif (RRM)-containing protein
  misc_feature (1)..(145): NCBI GI NO: 11357772 NR Description: hypothetical protein F4F15
  misc_feature (1)..(148): NCBI GI NO: 7578881 NR Description: plastid-specific ribosomal protein 2 precursor
  misc_feature (1)..(54): NCBI GI NO: 12230585 NR Description: 29 kDa ribonucleoprotein B, chloroplast precursor
  misc_feature (68)..(148): NCBI GI NO: 12230585 NR Description: 29 kDa ribonucleoprotein B, chloroplast precursor
  misc_feature (1)..(148): NCBI GI NO: 15231200 NR Description: 33 kDa ribonucleoprotein, chloroplast
  misc_feature (1)..(148): NCBI GI NO: 17064758 NR Description: ubiquitin / ribosomal protein CEP52
  misc_feature (1)..(148): NCBI GI NO: 34913270 NR Description: putative ribonucleoprotein
  misc_feature (1)..(148): NCBI GI NO: 681912 NR Description: cp33 [Arabidopsis thaliana]
  misc_feature (1)..(54): NCBI GI NO: 1350821 NR Description: 31 kDa ribonucleoprotein, chloroplast precursor
MYDKYSGRSRRFGFATMKSVEDANAVIDKLNGTTIEGREVKVNITEKPIASSSSPDLSLLQSEDSAFVDSPYKVYVGNLAKTVTKQMLENLFSEKGKVVSAKVSRVPGTSKSSGFGFVTFSTEEDVEAAILALNNSLLEGQKIRVNKA

SEQ ID NO: 20958 - DNA, 1159 bp, Zea mays subsp. mays
  misc_feature (1)..(1159): Ceres Seq. ID no. 15179499
attatttgttcttggcttcgaagcagctctttcctctcgacttgtatctgttctccccaaaccccttccgattcgatcaaccctcgtcgtcttccagacttttcgattttggaagaatgagtcaggcaggagtagatgttccagcgaagggtgggttcagcttcgatctgtgtaagaggaatgatatgcttatccaaaagggtcttaaagctccctcctttttgaagaccggtactaccatcgtcggtttgatcttcaaggatggtgtgatactaggcgctgatacacgagcaacggagggacctatcgttgctgataagaactgtgagaagattcactacatggcacctaacatttattgctgtggtgctggtaccgctgctgacactgaagctgtaactgatatggtcagctcgcagttgaggttgcatcgttaccagactggccgagactctcgggttatcactgctttgacccttctcaaaaaacatcttttcagctatcaaggtcatgtctctgctgctcttgtccttggtggagtcgatatcaccgggcctcatctgcataccatatacccacacggttcaactgacacactaccatttgctacaatgggttctggttctcttgctgctatgtccgtctttgaggcaaagtacaaagaaggtctaactagggatgaaggaatcaagctggtcgctgaagccatatgctcgggaatattcaacgacctgggtagtggtagcaacgtggacatctgcgtgatcacaaaggggcacaaggaatatctcaggaactacatggaaccaaacccaagaacctatgtcagcagcaaaggttattcattcaccaagaaaaccgaggttcttcgcacgaaaatcaccccattgatggagcgagttgagattacagaagtgggtgaagctatggaagaatgaatgaatctctctcaagtctctttgcttttgtattcatctttaccaagatcttataacattgtgtgcgttagacatattagtcttgtctttctttaccaatgttgttgaaggattatccaaaatcttttcttaccaatcttaaggatttcaatgctattagacttcgaaatttctttgttcggaatcttatgaaacgaattttctaaaagttattctctcct

SEQ ID NO: 20959 - protein, 311 aa, Zea mays subsp. mays
  peptide (1)..(311): Ceres Seq. ID no. 15179500
  misc_feature (74)..(255): Pfam Name: Pfam Description:  Proteasome A-type and B-type
  misc_feature (39)..(311): NCBI GI NO: 18405364 NR Description: 20S proteasome beta subunit B (PBB1)
  misc_feature (39)..(311): NCBI GI NO: 15237451 NR Description: 20S proteasome beta subunit B (PBB2)
  misc_feature (39)..(311): NCBI GI NO: 2511578 NR Description: multicatalytic endopeptidase
  misc_feature (39)..(311): NCBI GI NO: 20260224 NR Description: 20S proteasome beta subunit PBB2
  misc_feature (39)..(311): NCBI GI NO: 21593337 NR Description: 20S proteasome beta subunit PBB2
  misc_feature (39)..(286): NCBI GI NO: 30688785 NR Description: 20S proteasome beta subunit B (PBB1)
  misc_feature (42)..(311): NCBI GI NO: 8671504 NR Description: beta 2 subunit of 20S proteasome
  misc_feature (95)..(311): NCBI GI NO: 2511576 NR Description: multicatalytic endopeptidase
  misc_feature (45)..(301): NCBI GI NO: 24664391 NR Description: Proteasome beta2 subunit CG3329-PA
  misc_feature (44)..(239): NCBI GI NO: 14594921 NR Description: putative beta proteasome subunit
YLFLASKQLFPLDLYLFSPNPFRFDQPSSSSRLFDFGRMSQAGVDVPAKGGFSFDLCKRNDMLIQKGLKAPSFLKTGTTIVGLIFKDGVILGADTRATEGPIVADKNCEKIHYMAPNIYCCGAGTAADTEAVTDMVSSQLRLHRYQTGRDSRVITALTLLKKHLFSYQGHVSAALVLGGVDITGPHLHTIYPHGSTDTLPFATMGSGSLAAMSVFEAKYKEGLTRDEGIKLVAEAICSGIFNDLGSGSNVDICVITKGHKEYLRNYMEPNPRTYVSSKGYSFTKKTEVLRTKITPLMERVEITEVGEAMEE

SEQ ID NO: 20960 - protein, 273 aa, Zea mays subsp. mays
  peptide (1)..(273): Ceres Seq. ID no. 15179501
  misc_feature (36)..(217): Pfam Name: Pfam Description:  Proteasome A-type and B-type
  misc_feature (1)..(273): NCBI GI NO: 18405364 NR Description: 20S proteasome beta subunit B (PBB1)
  misc_feature (1)..(273): NCBI GI NO: 15237451 NR Description: 20S proteasome beta subunit B (PBB2)
  misc_feature (1)..(273): NCBI GI NO: 2511578 NR Description: multicatalytic endopeptidase
  misc_feature (1)..(273): NCBI GI NO: 20260224 NR Description: 20S proteasome beta subunit PBB2
  misc_feature (1)..(273): NCBI GI NO: 21593337 NR Description: 20S proteasome beta subunit PBB2
  misc_feature (1)..(248): NCBI GI NO: 30688785 NR Description: 20S proteasome beta subunit B (PBB1)
  misc_feature (4)..(273): NCBI GI NO: 8671504 NR Description: beta 2 subunit of 20S proteasome
  misc_feature (57)..(273): NCBI GI NO: 2511576 NR Description: multicatalytic endopeptidase
  misc_feature (7)..(263): NCBI GI NO: 24664391 NR Description: Proteasome beta2 subunit CG3329-PA
  misc_feature (6)..(201): NCBI GI NO: 14594921 NR Description: putative beta proteasome subunit
MSQAGVDVPAKGGFSFDLCKRNDMLIQKGLKAPSFLKTGTTIVGLIFKDGVILGADTRATEGPIVADKNCEKIHYMAPNIYCCGAGTAADTEAVTDMVSSQLRLHRYQTGRDSRVITALTLLKKHLFSYQGHVSAALVLGGVDITGPHLHTIYPHGSTDTLPFATMGSGSLAAMSVFEAKYKEGLTRDEGIKLVAEAICSGIFNDLGSGSNVDICVITKGHKEYLRNYMEPNPRTYVSSKGYSFTKKTEVLRTKITPLMERVEITEVGEAMEE

SEQ ID NO: 20961 - protein, 250 aa, Zea mays subsp. mays
  peptide (1)..(250): Ceres Seq. ID no. 15179502
  misc_feature (13)..(194): Pfam Name: Pfam Description:  Proteasome A-type and B-type
  misc_feature (1)..(250): NCBI GI NO: 18405364 NR Description: 20S proteasome beta subunit B (PBB1)
  misc_feature (1)..(250): NCBI GI NO: 15237451 NR Description: 20S proteasome beta subunit B (PBB2)
  misc_feature (1)..(250): NCBI GI NO: 2511578 NR Description: multicatalytic endopeptidase
  misc_feature (1)..(250): NCBI GI NO: 20260224 NR Description: 20S proteasome beta subunit PBB2
  misc_feature (1)..(250): NCBI GI NO: 21593337 NR Description: 20S proteasome beta subunit PBB2
  misc_feature (1)..(225): NCBI GI NO: 30688785 NR Description: 20S proteasome beta subunit B (PBB1)
  misc_feature (1)..(250): NCBI GI NO: 8671504 NR Description: beta 2 subunit of 20S proteasome
  misc_feature (34)..(250): NCBI GI NO: 2511576 NR Description: multicatalytic endopeptidase
  misc_feature (1)..(240): NCBI GI NO: 24664391 NR Description: Proteasome beta2 subunit CG3329-PA
  misc_feature (1)..(178): NCBI GI NO: 14594921 NR Description: putative beta proteasome subunit
MLIQKGLKAPSFLKTGTTIVGLIFKDGVILGADTRATEGPIVADKNCEKIHYMAPNIYCCGAGTAADTEAVTDMVSSQLRLHRYQTGRDSRVITALTLLKKHLFSYQGHVSAALVLGGVDITGPHLHTIYPHGSTDTLPFATMGSGSLAAMSVFEAKYKEGLTRDEGIKLVAEAICSGIFNDLGSGSNVDICVITKGHKEYLRNYMEPNPRTYVSSKGYSFTKKTEVLRTKITPLMERVEITEVGEAMEE

SEQ ID NO: 20962 - DNA, 830 bp, Zea mays subsp. mays
  misc_feature (1)..(830): Ceres Seq. ID no. 15178424
agattgttcctacacacgccatttgcattcttctctctcttcagctactaaccaacgaatctctctctctctctaaaacaatggctcaggaagacgtcgctgctgctgctgctgctgctaacggtgctaccacggcggtggagaagtccgttacgttcacggcgtacaagcctcagctgattgtggaagcacagaaggtcggtgacgctgttgcgttctacaaggctgtgtttggcgccgtggagactggacgctctctctaccccaagcgtaaggctgaccaagagctccctcacctcgtctcttccgagctcgagctcgccggaacaaccgtagtcgtttctgacgtatccgttaactctggccctgatgcgaagacggggactatgcctgcgatcctcgaaaccgatgacgtggaagctgccgttgcgaaggccgttgcggctggagctgtcaaggaggaggaggaggaggaggtctcggagggtggagtcaaggggaaagtgacggatccgttcgggttcacgtggatctttgttgctccggcgaagaagagtgagaaggaaggaaacaaagaggtctaactgttaaccgtcggatctgatcatttcgtcggtttctgaacgaactttttaatattattatcctatgctttttattagtttgtcttttgtggaatctccggtatgagtaaaccggattgattaggctaaaatgacttttgttcttcaccaccttttgacataaacttggtgaaagaaataacaaaaatatcggatgttaatgtgattatgcttattagtggcttaactattttccattcgtatctc

SEQ ID NO: 20963 - protein, 193 aa, Zea mays subsp. mays
  peptide (1)..(193): Ceres Seq. ID no. 15178425
  misc_feature (51)..(177): Pfam Name: Pfam Description:  Glyoxalase/Bleomycin resistance protein/Dioxygenasesuperfamily
  misc_feature (27)..(193): NCBI GI NO: 18422918 NR Description: expressed protein [Arabidopsis thaliana]
  misc_feature (27)..(186): NCBI GI NO: 28565534 NR Description: early tobacco anther 1 [Nicotiana tabacum]
  misc_feature (38)..(188): NCBI GI NO: 37520521 NR Description: hypothetical protein glr0952
IVPTHAICILLSLQLLTNESLSLSKTMAQEDVAAAAAAANGATTAVEKSVTFTAYKPQLIVEAQKVGDAVAFYKAVFGAVETGRSLYPKRKADQELPHLVSSELELAGTTVVVSDVSVNSGPDAKTGTMPAILETDDVEAAVAKAVAAGAVKEEEEEEVSEGGVKGKVTDPFGFTWIFVAPAKKSEKEGNKEV

SEQ ID NO: 20964 - protein, 167 aa, Zea mays subsp. mays; identical to SEQ ID NO: 11108
  peptide (1)..(167): Ceres Seq. ID no. 15178426
  misc_feature (25)..(151): Pfam Name: Pfam Description:  Glyoxalase/Bleomycin resistance protein/Dioxygenasesuperfamily
  misc_feature (1)..(167): NCBI GI NO: 18422918 NR Description: expressed protein [Arabidopsis thaliana]
  misc_feature (1)..(160): NCBI GI NO: 28565534 NR Description: early tobacco anther 1 [Nicotiana tabacum]
  misc_feature (12)..(162): NCBI GI NO: 37520521 NR Description: hypothetical protein glr0952

SEQ ID NO: 20965 - DNA, 2148 bp, Zea mays subsp. mays
  misc_feature (1)..(2148): Ceres Seq. ID no. 15179416
agagttcttgtagtcttctcggcctcccgctaaccgccatccaccacaccgagccccaaggcccccaactcccgagccctcggacctccatccctgttcccatggctgtgcctccccggtgggcgaacctcgacatcgacctggtgacggaaatcatgaaccgcgccccgtgcgtaatcgaccgcgcgcgaatggccgccgtctgccaggcgtggctcgaggctgtcgcgcgggcagagcctctgacatttcagctcccgtcgctcctcctcccgcccgcggacgtgactggcgtctactgctacctcagcggcttccgcgaccacaacatgtttcccgggccccgctacttcggctcgtacgacggcggctggttcttcctcgcctacggccagactcgcgggcaccggctgttcaacatccgcaccggagaatcctacgagctacccgacgggctcgcggatatcttcactaacgatatccacagcatggtcgtcctcgccgccaccctctcgttcccgcctcatcacccgggatgcgccgccgcgggcatcgtcacctaccagccggacctcgacgcgccgcgccaacgccacttcgcgttctggcgcccaggggataggatggccgtctgcgacgttgtgcccgccgtgccaattgagccgggtttggaaccggaggacgtcgtgtactaccgggactccttccatttcctcacacaaggtgggcatatcctcgtgtgcagtccgatctttgatggtgaggggcatatcccaggagcgcttttagagttaatgcgcttccaggaagcgtggtgcactgacgagcagttcgtccgcgctcgctacctcgtggtatcccgcggggagctgctggtggtcgtcaggctcgctgcccaccatcacgcgccgacttcgtcgttcaaagtattccgggtgattctaaagtctaagacctgccggttcgaggaggttgcattgtgtggccggatgctgttcttggggcgaggatgctccaggtcatacgaggtgagtcagtacccggggttcaaggacagcatcttcttcttggacgataggagcttctacgacgacgccgagatgatgttcggcggagtcaatgagaggcagtattcttgcaacgacatcggtaggtggtcgccggaagggctgctgccttcccacgtcgaattctacttcccggagcgggttccttcttacaactctcctccagcttggcttctcccttgagatattaactgaaaatgtatgcactgtttggttcgcatatttgaaccaaacggcacccagatgtgttctgtttgttgcgtctagcattccaactattctgtactttgtgctactctatgtgaaatgtgcagaaaagttggaatgccagacgccacttcacagatcaatgcttatgtgcaaagtgctaaggtggatggtgtcatcactgatttccctgggactgctcacagatacaaactgaactcctgcacgagcatgggaaagaacatgccactattcatgcagcctccgcaaccaggtggcctcctttcaaccattctcccagatgcacagccaccagcagcagcgccaatgccgctcttgacggacgctgacgtcgcagaaccagccctacctccggtcagcaacaccaccacgactgcatcgccttcgcatgccgccctcagaatgcgaacccatgtcttgagcatcaccacattgctgatgctatgtgcttccctcctcatctgaagatagtcctgctcaacatcatacgcggcgtggcgcattagagctgaggattttcacattgagctgctaatagcaattctttccaccacctttatgtagctattttttttcttgttctgtctggtgttttggaggatggatggatgttcagcttgatacctcaacggtggcacttgagcgtgctgccagctgtctctaggtacattttggtacatacgtgtggtgatacattgtccatgtcaccgtttctactgccaacctgcctgtggagggcaaaatattccctacaaacatacagtttagggtctgtcttggatacacctcaatcctatcagggtgttctatgattcggtaaggctgtctccaatagatctgtatattgttatac

SEQ ID NO: 20966 - protein, 415 aa, Zea mays subsp. mays
  peptide (1)..(415): Ceres Seq. ID no. 15179417
  misc_feature (40)..(81): Pfam Name: Pfam Description:  F-box domain
  misc_feature (179)..(415): NCBI GI NO: 34909978 NR Description: P0490D09.13
  misc_feature (34)..(128): NCBI GI NO: 34909978 NR Description: P0490D09.13
  misc_feature (2)..(193): NCBI GI NO: 34894448 NR Description: OSJNBa0025P13.19
  misc_feature (224)..(415): NCBI GI NO: 34894448 NR Description: OSJNBa0025P13.19
  misc_feature (116)..(340): NCBI GI NO: 34909986 NR Description: P0490D09.17
  misc_feature (325)..(414): NCBI GI NO: 34909986 NR Description: P0490D09.17
  misc_feature (34)..(415): NCBI GI NO: 34911048 NR Description: P0007F06.19
  misc_feature (165)..(415): NCBI GI NO: 34909984 NR Description: P0490D09.16
  misc_feature (34)..(150): NCBI GI NO: 34909986 NR Description: P0490D09.17
  misc_feature (34)..(253): NCBI GI NO: 34909984 NR Description: P0490D09.16
SSCSLLGLPLTAIHHTEPQGPQLPSPRTSIPVPMAVPPRWANLDIDLVTEIMNRAPCVIDRARMAAVCQAWLEAVARAEPLTFQLPSLLLPPADVTGVYCYLSGFRDHNMFPGPRYFGSYDGGWFFLAYGQTRGHRLFNIRTGESYELPDGLADIFTNDIHSMVVLAATLSFPPHHPGCAAAGIVTYQPDLDAPRQRHFAFWRPGDRMAVCDVVPAVPIEPGLEPEDVVYYRDSFHFLTQGGHILVCSPIFDGEGHIPGALLELMRFQEAWCTDEQFVRARYLVVSRGELLVVVRLAAHHHAPTSSFKVFRVILKSKTCRFEEVALCGRMLFLGRGCSRSYEVSQYPGFKDSIFFLDDRSFYDDAEMMFGGVNERQYSCNDIGRWSPEGLLPSHVEFYFPERVPSYNSPPAWLLP

SEQ ID NO: 20967 - protein, 382 aa, Zea mays subsp. mays
  peptide (1)..(382): Ceres Seq. ID no. 15179418
  misc_feature (7)..(48): Pfam Name: Pfam Description:  F-box domain
  misc_feature (146)..(382): NCBI GI NO: 34909978 NR Description: P0490D09.13
  misc_feature (1)..(95): NCBI GI NO: 34909978 NR Description: P0490D09.13
  misc_feature (1)..(160): NCBI GI NO: 34894448 NR Description: OSJNBa0025P13.19
  misc_feature (191)..(382): NCBI GI NO: 34894448 NR Description: OSJNBa0025P13.19
  misc_feature (83)..(307): NCBI GI NO: 34909986 NR Description: P0490D09.17
  misc_feature (292)..(381): NCBI GI NO: 34909986 NR Description: P0490D09.17
  misc_feature (1)..(382): NCBI GI NO: 34911048 NR Description: P0007F06.19
  misc_feature (132)..(382): NCBI GI NO: 34909984 NR Description: P0490D09.16
  misc_feature (1)..(117): NCBI GI NO: 34909986 NR Description: P0490D09.17
  misc_feature (1)..(220): NCBI GI NO: 34909984 NR Description: P0490D09.16
MAVPPRWANLDIDLVTEIMNRAPCVIDRARMAAVCQAWLEAVARAEPLTFQLPSLLLPPADVTGVYCYLSGFRDHNMFPGPRYFGSYDGGWFFLAYGQTRGHRLFNIRTGESYELPDGLADIFTNDIHSMVVLAATLSFPPHHPGCAAAGIVTYQPDLDAPRQRHFAFWRPGDRMAVCDVVPAVPIEPGLEPEDVVYYRDSFHFLTQGGHILVCSPIFDGEGHIPGALLELMRFQEAWCTDEQFVRARYLVVSRGELLVVVRLAAHHHAPTSSFKVFRVILKSKTCRFEEVALCGRMLFLGRGCSRSYEVSQYPGFKDSIFFLDDRSFYDDAEMMFGGVNERQYSCNDIGRWSPEGLLPSHVEFYFPERVPSYNSPPAWLLP

SEQ ID NO: 20968 - protein, 364 aa, Zea mays subsp. mays
  peptide (1)..(364): Ceres Seq. ID no. 15179419
  misc_feature (128)..(364): NCBI GI NO: 34909978 NR Description: P0490D09.13
  misc_feature (1)..(77): NCBI GI NO: 34909978 NR Description: P0490D09.13
  misc_feature (1)..(142): NCBI GI NO: 34894448 NR Description: OSJNBa0025P13.19
  misc_feature (173)..(364): NCBI GI NO: 34894448 NR Description: OSJNBa0025P13.19
  misc_feature (65)..(289): NCBI GI NO: 34909986 NR Description: P0490D09.17
  misc_feature (274)..(363): NCBI GI NO: 34909986 NR Description: P0490D09.17
  misc_feature (1)..(364): NCBI GI NO: 34911048 NR Description: P0007F06.19
  misc_feature (114)..(364): NCBI GI NO: 34909984 NR Description: P0490D09.16
  misc_feature (1)..(99): NCBI GI NO: 34909986 NR Description: P0490D09.17
  misc_feature (1)..(202): NCBI GI NO: 34909984 NR Description: P0490D09.16
MNRAPCVIDRARMAAVCQAWLEAVARAEPLTFQLPSLLLPPADVTGVYCYLSGFRDHNMFPGPRYFGSYDGGWFFLAYGQTRGHRLFNIRTGESYELPDGLADIFTNDIHSMVVLAATLSFPPHHPGCAAAGIVTYQPDLDAPRQRHFAFWRPGDRMAVCDVVPAVPIEPGLEPEDVVYYRDSFHFLTQGGHILVCSPIFDGEGHIPGALLELMRFQEAWCTDEQFVRARYLVVSRGELLVVVRLAAHHHAPTSSFKVFRVILKSKTCRFEEVALCGRMLFLGRGCSRSYEVSQYPGFKDSIFFLDDRSFYDDAEMMFGGVNERQYSCNDIGRWSPEGLLPSHVEFYFPERVPSYNSPPAWLLP

SEQ ID NO: 20969 - DNA, 1322 bp, Zea mays subsp. mays
  misc_feature (1)..(1322): Ceres Seq. ID no. 15179420
acaagacagcagaggcactagttatcacatccaccataacatgaccatggctaccgcctcagcttcgctagctctcatgttcgcctgcagccttctccttgcaggcacggcgttcagtgatgataccatagccatacccttgttggagcggttcaaagcctggcaggctgaatacaaccgcacctatgcgaccccagaggaattccagcaacgcttcatgatctacagcgagaacgtccggttcatcaagaccatgaaccagctgtcgaccgggagctcatatgagctcggtgagaaccagttcaccgacctcaccgaggaggagttcaaggacacatatcttatgaagctcgacgagcagccccctgcagctgaggccatgggaccgaccgtcggcaccatgagcacagcaggcatgtccaacggcaacaacaccggcgaggctcccaacagtgtggactggaggaccaagggagcagtgacgcgggtcaaggaccagcaacaatgtggctcttgctgggcgtttgcaacggtggcgtccatcgaaggtgtgcaccagataaagacaggtcgtctggtgtcgctgtcggagcaagagatcgtggactgcgaccgtgggggcaacgacaacggctgtcgtggcggttcccctagatccgccatggagtgggtcacccgcaacggcggcctgaccacggagtcggactacccgtacgtgggcagccagagacaatgcatgagcggcaagcttggtcaccacgcggccaggatccgtggctaccaggcggtgcagcgcaataacgaggccgagctggagcgcgccgtggcggaacggccggtcgccgtgttcatcgacgcgagcagggccttccagttctacaagagcggggtcttctcgggcccctgcgacaccaccaccgtcaatcacgtcgtcacggtggtcgggtacggatcaaccggcagcgacagcggcggacgcaagtactggatcgtcaagaactcgtggggtcagggatggggagagaatggctacgtgcggatggcgaggcgtgtcagggctcgggagggcatgtgcgccatcgccatagagccctactacccggtgatgtgatctctccgtactagttaccggctgcctcctgatcctaaacaagctagtatgcttggagaatgatgcatgcatatgatgcatggaattaaataaactacaactcaacgagacggtgtgtgtgctgcgctgcgctatgccgatcgatgttatcgtttgtttgctaatgtaacatctaatctaaagtcttaaaaggcgctcggttttgaggctg

SEQ ID NO: 20970 - protein, 369 aa, Zea mays subsp. mays
  peptide (1)..(369): Ceres Seq. ID no. 15179421
  misc_feature (149)..(367): Pfam Name: Pfam Description:  Papain family cysteine protease
  misc_feature (22)..(367): NCBI GI NO: 13491750 NR Description: cysteine protease [Ipomoea batatas]
  misc_feature (16)..(367): NCBI GI NO: 24285904 NR Description: cysteine proteinase precursor [Ipomoea batatas]
  misc_feature (20)..(367): NCBI GI NO: 34329348 NR Description: putative cysteine proteinase [Medicago truncatula]
  misc_feature (22)..(367): NCBI GI NO: 37780045 NR Description: cysteine protease 5 [Trifolium repens]
  misc_feature (22)..(367): NCBI GI NO: 37780051 NR Description: cysteine protease 12 [Trifolium repens]
  misc_feature (26)..(369): NCBI GI NO: 7435828 NR Description: fruit bromelain (EC 3
  misc_feature (22)..(368): NCBI GI NO: 10336513 NR Description: cysteine proteinase [Astragalus sinicus]
  misc_feature (14)..(367): NCBI GI NO: 38345008 NR Description: OSJNBa0052O21.11
  misc_feature (47)..(367): NCBI GI NO: 40806498 NR Description: putative cysteine protease 1 [Iris hollandica]
  misc_feature (46)..(369): NCBI GI NO: 7489849 NR Description: fruit bromelain (EC 3
QDSRGTSYHIHHNMTMATASASLALMFACSLLLAGTAFSDDTIAIPLLERFKAWQAEYNRTYATPEEFQQRFMIYSENVRFIKTMNQLSTGSSYELGENQFTDLTEEEFKDTYLMKLDEQPPAAEAMGPTVGTMSTAGMSNGNNTGEAPNSVDWRTKGAVTRVKDQQQCGSCWAFATVASIEGVHQIKTGRLVSLSEQEIVDCDRGGNDNGCRGGSPRSAMEWVTRNGGLTTESDYPYVGSQRQCMSGKLGHHAARIRGYQAVQRNNEAELERAVAERPVAVFIDASRAFQFYKSGVFSGPCDTTTVNHVVTVVGYGSTGSDSGGRKYWIVKNSWGQGWGENGYVRMARRVRAREGMCAIAIEPYYPVM

SEQ ID NO: 20971 - protein, 356 aa, Zea mays subsp. mays
  peptide (1)..(356): Ceres Seq. ID no. 15179422
  misc_feature (136)..(354): Pfam Name: Pfam Description:  Papain family cysteine protease
  misc_feature (9)..(354): NCBI GI NO: 13491750 NR Description: cysteine protease [Ipomoea batatas]
  misc_feature (3)..(354): NCBI GI NO: 24285904 NR Description: cysteine proteinase precursor [Ipomoea batatas]
  misc_feature (7)..(354): NCBI GI NO: 34329348 NR Description: putative cysteine proteinase [Medicago truncatula]
  misc_feature (9)..(354): NCBI GI NO: 37780045 NR Description: cysteine protease 5 [Trifolium repens]
  misc_feature (9)..(354): NCBI GI NO: 37780051 NR Description: cysteine protease 12 [Trifolium repens]
  misc_feature (13)..(356): NCBI GI NO: 7435828 NR Description: fruit bromelain (EC 3
  misc_feature (9)..(355): NCBI GI NO: 10336513 NR Description: cysteine proteinase [Astragalus sinicus]
  misc_feature (1)..(354): NCBI GI NO: 38345008 NR Description: OSJNBa0052O21.11
  misc_feature (34)..(354): NCBI GI NO: 40806498 NR Description: putative cysteine protease 1 [Iris hollandica]
  misc_feature (33)..(356): NCBI GI NO: 7489849 NR Description: fruit bromelain (EC 3
MTMATASASLALMFACSLLLAGTAFSDDTIAIPLLERFKAWQAEYNRTYATPEEFQQRFMIYSENVRFIKTMNQLSTGSSYELGENQFTDLTEEEFKDTYLMKLDEQPPAAEAMGPTVGTMSTAGMSNGNNTGEAPNSVDWRTKGAVTRVKDQQQCGSCWAFATVASIEGVHQIKTGRLVSLSEQEIVDCDRGGNDNGCRGGSPRSAMEWVTRNGGLTTESDYPYVGSQRQCMSGKLGHHAARIRGYQAVQRNNEAELERAVAERPVAVFIDASRAFQFYKSGVFSGPCDTTTVNHVVTVVGYGSTGSDSGGRKYWIVKNSWGQGWGENGYVRMARRVRAREGMCAIAIEPYYPVM

SEQ ID NO: 20972 - protein, 354 aa, Zea mays subsp. mays
  peptide (1)..(354): Ceres Seq. ID no. 15179423
  misc_feature (134)..(352): Pfam Name: Pfam Description:  Papain family cysteine protease
  misc_feature (7)..(352): NCBI GI NO: 13491750 NR Description: cysteine protease [Ipomoea batatas]
  misc_feature (1)..(352): NCBI GI NO: 24285904 NR Description: cysteine proteinase precursor [Ipomoea batatas]
  misc_feature (5)..(352): NCBI GI NO: 34329348 NR Description: putative cysteine proteinase [Medicago truncatula]
  misc_feature (7)..(352): NCBI GI NO: 37780045 NR Description: cysteine protease 5 [Trifolium repens]
  misc_feature (7)..(352): NCBI GI NO: 37780051 NR Description: cysteine protease 12 [Trifolium repens]
  misc_feature (11)..(354): NCBI GI NO: 7435828 NR Description: fruit bromelain (EC 3
  misc_feature (7)..(353): NCBI GI NO: 10336513 NR Description: cysteine proteinase [Astragalus sinicus]
  misc_feature (1)..(352): NCBI GI NO: 38345008 NR Description: OSJNBa0052O21.11
  misc_feature (32)..(352): NCBI GI NO: 40806498 NR Description: putative cysteine protease 1 [Iris hollandica]
  misc_feature (31)..(354): NCBI GI NO: 7489849 NR Description: fruit bromelain (EC 3
MATASASLALMFACSLLLAGTAFSDDTIAIPLLERFKAWQAEYNRTYATPEEFQQRFMIYSENVRFIKTMNQLSTGSSYELGENQFTDLTEEEFKDTYLMKLDEQPPAAEAMGPTVGTMSTAGMSNGNNTGEAPNSVDWRTKGAVTRVKDQQQCGSCWAFATVASIEGVHQIKTGRLVSLSEQEIVDCDRGGNDNGCRGGSPRSAMEWVTRNGGLTTESDYPYVGSQRQCMSGKLGHHAARIRGYQAVQRNNEAELERAVAERPVAVFIDASRAFQFYKSGVFSGPCDTTTVNHVVTVVGYGSTGSDSGGRKYWIVKNSWGQGWGENGYVRMARRVRAREGMCAIAIEPYYPVM

SEQ ID NO: 20973 - DNA, 1931 bp, Zea mays subsp. mays
  misc_feature (1)..(1931): Ceres Seq. ID no. 15176035
cccaagggtcggctaggtctaggtggtctccaagctttccgcctttccacgccaccattctccccacccgcgcgcctcagcaatccccatccagcatcgccgtttcgccgcggcaccgacacctcgccggccatgggcgcgtcctcctcgactggcaacccgtccccagaggcgcacgagcagcgggagcaggagactctcgcctccgccgccctctccctcccgctcctccgcgccgccttctcccgctccgccgccaacgcgctgccggatgccctcgcgccgccgcccgcctcctttcgtctgcccggatccccggcgccgccgccgccgcacttccacggcatcctcggggggctcggccccgccatcgcctcccaattcttcggccacggagctgccgcggtgacggacgggggcgccgggtgggtccagttcctcagggggttcaaccgctgctgcgcgcgcgtgacggcctcccgctcgctcgcactgctcctccgcgtgtacgctgccgcctgcgccggcgcgggggcaccctgcggcgtccagctccagccggacgagggcggtggtgacgaggatgggaaggtcgtgggggagctcgcgccggaggagatcgcagtgttcctctgggtgtgctgggtcatggcgtggagcgcttcggcctcgagggtggtcagtgacggaggagataaatcggagcccgtcacggtgctcctcccggacgtgacgcacctggtgctgtcggcgctcgtctcggcgggcgtcgtcacggatgatgcaggcgtttggggctgggacgtctccagcggtgggaagggggtgaaggtccaggagttcatgtcgtgggtgctgtccacgcctttcggccttgggaactgcctctcgcggtatgtgcgggacaaattccggtccctggctgctgactctgtggaggagagctctgtttcaactgttagcacaacctttgacacttctgatgtttatctgctaacacgggggagagcatgggcaattgccctcagcctaagaaacaagttgagtgaaaagctgctgtcagcttctgttattggaatggacacagaagacctcctttataggtcatctgttcatggaaaaggactgagccggttctggtcttgtgttgaggggtacaaagggccaatgctgattctactttcagcattctcaaaaggtggtggtgagaatgttgattctgatcgaagatgggtgattggtgtattgaccgaggagggatttgagaacaaagataccttttatggtagctctgggttcctttgtgccgcacatccaatattccgcatgctaccaccatctggcaaggaaaagaacttcatgtactgccacctacatcctcagataagagcttatgaagcgaatccaaagcccgttggcttagcatttggtggaacaattggaaatgagaggatctttcttgatgaagacttctcgggagttttagtacgacaccatgctgttgataaaacttatcaacatggctctctcatccccaatcagggttatttgcctgttgaggcttcagtgcttgatgttgaggtatgggggctgggtggagaagcaacgaaacgacagcagaatatgtacaagaagagggaggacatcttctcagagcagcgaagaaaggttgatctcaaaacttttgctagctgggaagactctccagagaagatgatgatggacatgatgtcggacccaaacacggttcgacgggaagaccggtgattttggtttgcagcctccggggatgtacagacgacagcgtttgttgcacataggagtattttgcttgcgcatttggctgggtcacacgctttatttaggttgaagtactaaaagaagatttgtacagaacgtaattcccaataaatgaaatggagattctggac

SEQ ID NO: 20974 - protein, 588 aa, Zea mays subsp. mays
  peptide (1)..(588): Ceres Seq. ID no. 15176036
  misc_feature (45)..(588): NCBI GI NO: 38346079 NR Description: OSJNBa0084K01.19
  misc_feature (45)..(588): NCBI GI NO: 27450531 NR Description: hypothetical protein [Prunus persica]
  misc_feature (45)..(588): NCBI GI NO: 15241814 NR Description: expressed protein [Arabidopsis thaliana]
  misc_feature (45)..(588): NCBI GI NO: 15010732 NR Description: AT5g39590/MIJ24_60 [Arabidopsis thaliana]
PKGRLGLGGLQAFRLSTPPFSPPARLSNPHPASPFRRGTDTSPAMGASSSTGNPSPEAHEQREQETLASAALSLPLLRAAFSRSAANALPDALAPPPASFRLPGSPAPPPPHFHGILGGLGPAIASQFFGHGAAAVTDGGAGWVQFLRGFNRCCARVTASRSLALLLRVYAAACAGAGAPCGVQLQPDEGGGDEDGKVVGELAPEEIAVFLWVCWVMAWSASASRVVSDGGDKSEPVTVLLPDVTHLVLSALVSAGVVTDDAGVWGWDVSSGGKGVKVQEFMSWVLSTPFGLGNCLSRYVRDKFRSLAADSVEESSVSTVSTTFDTSDVYLLTRGRAWAIALSLRNKLSEKLLSASVIGMDTEDLLYRSSVHGKGLSRFWSCVEGYKGPMLILLSAFSKGGGENVDSDRRWVIGVLTEEGFENKDTFYGSSGFLCAAHPIFRMLPPSGKEKNFMYCHLHPQIRAYEANPKPVGLAFGGTIGNERIFLDEDFSGVLVRHHAVDKTYQHGSLIPNQGYLPVEASVLDVEVWGLGGEATKRQQNMYKKREDIFSEQRRKVDLKTFASWEDSPEKMMMDMMSDPNTVRREDR

SEQ ID NO: 20975 - protein, 544 aa, Zea mays subsp. mays
  peptide (1)..(544): Ceres Seq. ID no. 15176037
  misc_feature (1)..(544): NCBI GI NO: 38346079 NR Description: OSJNBa0084K01.19
  misc_feature (1)..(544): NCBI GI NO: 27450531 NR Description: hypothetical protein [Prunus persica]
  misc_feature (1)..(544): NCBI GI NO: 15241814 NR Description: expressed protein [Arabidopsis thaliana]
  misc_feature (1)..(544): NCBI GI NO: 15010732 NR Description: AT5g39590/MIJ24_60 [Arabidopsis thaliana]
MGASSSTGNPSPEAHEQREQETLASAALSLPLLRAAFSRSAANALPDALAPPPASFRLPGSPAPPPPHFHGILGGLGPAIASQFFGHGAAAVTDGGAGWVQFLRGFNRCCARVTASRSLALLLRVYAAACAGAGAPCGVQLQPDEGGGDEDGKVVGELAPEEIAVFLWVCWVMAWSASASRVVSDGGDKSEPVTVLLPDVTHLVLSALVSAGVVTDDAGVWGWDVSSGGKGVKVQEFMSWVLSTPFGLGNCLSRYVRDKFRSLAADSVEESSVSTVSTTFDTSDVYLLTRGRAWAIALSLRNKLSEKLLSASVIGMDTEDLLYRSSVHGKGLSRFWSCVEGYKGPMLILLSAFSKGGGENVDSDRRWVIGVLTEEGFENKDTFYGSSGFLCAAHPIFRMLPPSGKEKNFMYCHLHPQIRAYEANPKPVGLAFGGTIGNERIFLDEDFSGVLVRHHAVDKTYQHGSLIPNQGYLPVEASVLDVEVWGLGGEATKRQQNMYKKREDIFSEQRRKVDLKTFASWEDSPEKMMMDMMSDPNTVRREDR

SEQ ID NO: 20976 - protein, 372 aa, Zea mays subsp. mays
  peptide (1)..(372): Ceres Seq. ID no. 15176038
  misc_feature (1)..(372): NCBI GI NO: 38346079 NR Description: OSJNBa0084K01.19
  misc_feature (1)..(372): NCBI GI NO: 27450531 NR Description: hypothetical protein [Prunus persica]
  misc_feature (1)..(372): NCBI GI NO: 15241814 NR Description: expressed protein [Arabidopsis thaliana]
  misc_feature (1)..(372): NCBI GI NO: 15010732 NR Description: AT5g39590/MIJ24_60 [Arabidopsis thaliana]
MAWSASASRVVSDGGDKSEPVTVLLPDVTHLVLSALVSAGVVTDDAGVWGWDVSSGGKGVKVQEFMSWVLSTPFGLGNCLSRYVRDKFRSLAADSVEESSVSTVSTTFDTSDVYLLTRGRAWAIALSLRNKLSEKLLSASVIGMDTEDLLYRSSVHGKGLSRFWSCVEGYKGPMLILLSAFSKGGGENVDSDRRWVIGVLTEEGFENKDTFYGSSGFLCAAHPIFRMLPPSGKEKNFMYCHLHPQIRAYEANPKPVGLAFGGTIGNERIFLDEDFSGVLVRHHAVDKTYQHGSLIPNQGYLPVEASVLDVEVWGLGGEATKRQQNMYKKREDIFSEQRRKVDLKTFASWEDSPEKMMMDMMSDPNTVRREDR

SEQ ID NO: 20977 - DNA, 836 bp, Zea mays subsp. mays
  misc_feature (1)..(836): Ceres Seq. ID no. 15175519
acaaattcacacattttttgttgcattatcacaaacacctcgtccctcacaatgcagctagcaatggcggccaacgctgtcgtttcaccgtcgccgttccgacctcagccctttctccggtcatccttctccggcgtctccgtcaagctcactccccaatccataacgctttcacgctccaagcccctcaccgtcttcgccgccaccaagaaggccgtcgccgtcctcaaggggacctccgccgtcgaaggcgtcgccactctcatccaagaagacgatggcccgacgacagtttctgttcgcatcactggccttactccggggcttcatggttttcacctacatgagtatggtgatacgacaaatgggtgtatttctacgggagcacattttaatcctaataaattgacacatggtgctcctgaggatgaagtccgtcatgcgggtgacctgggaaacatagttgctaatgcagagggggttgcagaggctacaattgtggataatcagataccactctctggccccaattcagtagttggaagagccttggtggtccatgagcttgaggatgaccttggaaagggtgggcatgaactcagtttgacaactggaaatgctggtggaagattagcatgtggtgtggttggtttgactccagcataatcagtgcagcgaattttttgtagcagtcgtgttatgttatcagatattatgttctctgtgaagcatgatgactcactgttttcttcagttaccaatgtaaactgtaaagcataatgtccttctaaagatgagtgtgcaaatgaatcatgaaaacatgttgttagtccttt

SEQ ID NO: 20978 - protein, 221 aa, Zea mays subsp. mays
  peptide (1)..(221): Ceres Seq. ID no. 15175520
  misc_feature (70)..(220): Pfam Name: SODC Pfam Description: Copper/zinc superoxide dismutase
  misc_feature (22)..(220): NCBI GI NO: 20900 NR Description: Cu/Zn superoxide dismutase II [Pisum sativum]
  misc_feature (22)..(220): NCBI GI NO: 134683 NR Description: Superoxide dismutase
  misc_feature (22)..(220): NCBI GI NO: 38073257 NR Description: superoxide dismutase [Trifolium pratense]
  misc_feature (22)..(220): NCBI GI NO: 12230569 NR Description: Superoxide dismutase
  misc_feature (29)..(220): NCBI GI NO: 12230570 NR Description: Superoxide dismutase
  misc_feature (28)..(220): NCBI GI NO: 134684 NR Description: Superoxide dismutase
  misc_feature (25)..(220): NCBI GI NO: 134682 NR Description: Superoxide dismutase
  misc_feature (25)..(220): NCBI GI NO: 33327349 NR Description: superoxidase dismutase [Lycopersicon esculentum]
  misc_feature (22)..(220): NCBI GI NO: 13274148 NR Description: putative CuZn-superoxide dismutase
  misc_feature (41)..(220): NCBI GI NO: 134686 NR Description: Superoxide dismutase
TNSHIFCCIITNTSSLTMQLAMAANAVVSPSPFRPQPFLRSSFSGVSVKLTPQSITLSRSKPLTVFAATKKAVAVLKGTSAVEGVATLIQEDDGPTTVSVRITGLTPGLHGFHLHEYGDTTNGCISTGAHFNPNKLTHGAPEDEVRHAGDLGNIVANAEGVAEATIVDNQIPLSGPNSVVGRALVVHELEDDLGKGGHELSLTTGNAGGRLACGVVGLTPA

SEQ ID NO: 20979 - protein, 204 aa, Zea mays subsp. mays
  peptide (1)..(204): Ceres Seq. ID no. 15175521
  misc_feature (53)..(203): Pfam Name: SODC Pfam Description: Copper/zinc superoxide dismutase
  misc_feature (5)..(203): NCBI GI NO: 20900 NR Description: Cu/Zn superoxide dismutase II [Pisum sativum]
  misc_feature (5)..(203): NCBI GI NO: 134683 NR Description: Superoxide dismutase
  misc_feature (5)..(203): NCBI GI NO: 38073257 NR Description: superoxide dismutase [Trifolium pratense]
  misc_feature (5)..(203): NCBI GI NO: 12230569 NR Description: Superoxide dismutase
  misc_feature (12)..(203): NCBI GI NO: 12230570 NR Description: Superoxide dismutase
  misc_feature (11)..(203): NCBI GI NO: 134684 NR Description: Superoxide dismutase
  misc_feature (8)..(203): NCBI GI NO: 134682 NR Description: Superoxide dismutase
  misc_feature (8)..(203): NCBI GI NO: 33327349 NR Description: superoxidase dismutase [Lycopersicon esculentum]
  misc_feature (5)..(203): NCBI GI NO: 13274148 NR Description: putative CuZn-superoxide dismutase
  misc_feature (24)..(203): NCBI GI NO: 134686 NR Description: Superoxide dismutase
MQLAMAANAVVSPSPFRPQPFLRSSFSGVSVKLTPQSITLSRSKPLTVFAATKKAVAVLKGTSAVEGVATLIQEDDGPTTVSVRITGLTPGLHGFHLHEYGDTTNGCISTGAHFNPNKLTHGAPEDEVRHAGDLGNIVANAEGVAEATIVDNQIPLSGPNSVVGRALVVHELEDDLGKGGHELSLTTGNAGGRLACGVVGLTPA

SEQ ID NO: 20980 - protein, 200 aa, Zea mays subsp. mays
  peptide (1)..(200): Ceres Seq. ID no. 15175522
  misc_feature (49)..(199): Pfam Name: SODC Pfam Description: Copper/zinc superoxide dismutase
  misc_feature (1)..(199): NCBI GI NO: 20900 NR Description: Cu/Zn superoxide dismutase II [Pisum sativum]
  misc_feature (1)..(199): NCBI GI NO: 134683 NR Description: Superoxide dismutase
  misc_feature (1)..(199): NCBI GI NO: 38073257 NR Description: superoxide dismutase [Trifolium pratense]
  misc_feature (1)..(199): NCBI GI NO: 12230569 NR Description: Superoxide dismutase
  misc_feature (8)..(199): NCBI GI NO: 12230570 NR Description: Superoxide dismutase
  misc_feature (7)..(199): NCBI GI NO: 134684 NR Description: Superoxide dismutase
  misc_feature (4)..(199): NCBI GI NO: 134682 NR Description: Superoxide dismutase
  misc_feature (4)..(199): NCBI GI NO: 33327349 NR Description: superoxidase dismutase [Lycopersicon esculentum]
  misc_feature (1)..(199): NCBI GI NO: 13274148 NR Description: putative CuZn-superoxide dismutase
  misc_feature (20)..(199): NCBI GI NO: 134686 NR Description: Superoxide dismutase
MAANAVVSPSPFRPQPFLRSSFSGVSVKLTPQSITLSRSKPLTVFAATKKAVAVLKGTSAVEGVATLIQEDDGPTTVSVRITGLTPGLHGFHLHEYGDTTNGCISTGAHFNPNKLTHGAPEDEVRHAGDLGNIVANAEGVAEATIVDNQIPLSGPNSVVGRALVVHELEDDLGKGGHELSLTTGNAGGRLACGVVGLTPA

SEQ ID NO: 20981 - DNA, 774 bp, Zea mays subsp. mays
  misc_feature (1)..(774): Ceres Seq. ID no. 15179490
gcagattaaatttctaacgacagtcatgtctccgtcaacggcgtcgagtttcgtcggctccatcttagcggttgacgccgccgtctctaccgcgattcacacggcggcgaagccattcctcccgccgttcatcctccttctcctggaaatctccgccgatttccgattctccttcccggtctccctatccctcctcctctcccctccactgcgcccgttcctcatccccttcctcctcggcctcctcctcgatctaatcttcgtcggaatcgtgaagctgatcttccgccgcccacgtcccgcttacaatcatccctcgatgtccgcagcagtatcggccgatcattactcgtttccctccggccacgcgtcccgcgtcttcttcgtcgccgcctcggttcacttcttcacttctgaagctcaagtggtttctccgagctactctttcttagacgggtgggtgagggatcgtggagagggagttgtgaaaggagaggtcttggtgggtgtgtggatctgggctacggtgactgctgtgtcgaggattctgttagggaggcattacgtgctcgacgtagctgctggtgcttgcttgggtgttctagaagctctctttgctcttcggtttctgagattcgaacagatcttggggtggtggtaagaacattgttattgttgttgatgtaatgtttgtgacatcaattgatttttttttcgattacattgtcaaaaacaatggttacttttatgtttcatgaattcaaagtttgtgtc

SEQ ID NO: 20982 - protein, 219 aa, Zea mays subsp. mays
  peptide (1)..(219): Ceres Seq. ID no. 15179491
  misc_feature (66)..(215): Pfam Name: Pfam Description:  PAP2 superfamily
  misc_feature (9)..(216): NCBI GI NO: 15235691 NR Description: phosphatidic acid phosphatase (PAP2)-related
  misc_feature (10)..(215): NCBI GI NO: 12247468 NR Description: PnFL-1 [Ipomoea nil]
  misc_feature (48)..(129): NCBI GI NO: 24583289 NR Description: CG31717-PA [Drosophila melanogaster]
  misc_feature (167)..(204): NCBI GI NO: 24583289 NR Description: CG31717-PA [Drosophila melanogaster]
  misc_feature (9)..(130): NCBI GI NO: 12855379 NR Description: unnamed protein product [Mus musculus]
  misc_feature (170)..(202): NCBI GI NO: 12855379 NR Description: unnamed protein product [Mus musculus]
  misc_feature (71)..(125): NCBI GI NO: 23273743 NR Description: Unknown (protein for MGC:33278) [Homo sapiens]
  misc_feature (170)..(202): NCBI GI NO: 23273743 NR Description: Unknown (protein for MGC:33278) [Homo sapiens]
  misc_feature (9)..(125): NCBI GI NO: 22760264 NR Description: unnamed protein product [Homo sapiens]
  misc_feature (170)..(200): NCBI GI NO: 22760264 NR Description: unnamed protein product [Homo sapiens]
QIKFLTTVMSPSTASSFVGSILAVDAAVSTAIHTAAKPFLPPFILLLLEISADFRFSFPVSLSLLLSPPLRPFLIPFLLGLLLDLIFVGIVKLIFRRPRPAYNHPSMSAAVSADHYSFPSGHASRVFFVAASVHFFTSEAQVVSPSYSFLDGWVRDRGEGVVKGEVLVGVWIWATVTAVSRILLGRHYVLDVAAGACLGVLEALFALRFLRFEQILGWW

SEQ ID NO: 20983 - protein, 211 aa, Zea mays subsp. mays
  peptide (1)..(211): Ceres Seq. ID no. 15179492
  misc_feature (58)..(207): Pfam Name: Pfam Description:  PAP2 superfamily
  misc_feature (1)..(208): NCBI GI NO: 15235691 NR Description: phosphatidic acid phosphatase (PAP2)-related
  misc_feature (2)..(207): NCBI GI NO: 12247468 NR Description: PnFL-1 [Ipomoea nil]
  misc_feature (40)..(121): NCBI GI NO: 24583289 NR Description: CG31717-PA [Drosophila melanogaster]
  misc_feature (159)..(196): NCBI GI NO: 24583289 NR Description: CG31717-PA [Drosophila melanogaster]
  misc_feature (1)..(122): NCBI GI NO: 12855379 NR Description: unnamed protein product [Mus musculus]
  misc_feature (162)..(194): NCBI GI NO: 12855379 NR Description: unnamed protein product [Mus musculus]
  misc_feature (63)..(117): NCBI GI NO: 23273743 NR Description: Unknown (protein for MGC:33278) [Homo sapiens]
  misc_feature (162)..(194): NCBI GI NO: 23273743 NR Description: Unknown (protein for MGC:33278) [Homo sapiens]
  misc_feature (1)..(117): NCBI GI NO: 22760264 NR Description: unnamed protein product [Homo sapiens]
  misc_feature (162)..(192): NCBI GI NO: 22760264 NR Description: unnamed protein product [Homo sapiens]
MSPSTASSFVGSILAVDAAVSTAIHTAAKPFLPPFILLLLEISADFRFSFPVSLSLLLSPPLRPFLIPFLLGLLLDLIFVGIVKLIFRRPRPAYNHPSMSAAVSADHYSFPSGHASRVFFVAASVHFFTSEAQVVSPSYSFLDGWVRDRGEGVVKGEVLVGVWIWATVTAVSRILLGRHYVLDVAAGACLGVLEALFALRFLRFEQILGWW

SEQ ID NO: 20984 - protein, 113 aa, Zea mays subsp. mays
  peptide (1)..(113): Ceres Seq. ID no. 15179493
  misc_feature (1)..(109): Pfam Name: Pfam Description:  PAP2 superfamily
  misc_feature (1)..(110): NCBI GI NO: 15235691 NR Description: phosphatidic acid phosphatase (PAP2)-related
  misc_feature (1)..(109): NCBI GI NO: 12247468 NR Description: PnFL-1 [Ipomoea nil]
  misc_feature (1)..(23): NCBI GI NO: 24583289 NR Description: CG31717-PA [Drosophila melanogaster]
  misc_feature (61)..(98): NCBI GI NO: 24583289 NR Description: CG31717-PA [Drosophila melanogaster]
  misc_feature (1)..(24): NCBI GI NO: 12855379 NR Description: unnamed protein product [Mus musculus]
  misc_feature (64)..(96): NCBI GI NO: 12855379 NR Description: unnamed protein product [Mus musculus]
  misc_feature (1)..(19): NCBI GI NO: 23273743 NR Description: Unknown (protein for MGC:33278) [Homo sapiens]
  misc_feature (64)..(96): NCBI GI NO: 23273743 NR Description: Unknown (protein for MGC:33278) [Homo sapiens]
  misc_feature (1)..(19): NCBI GI NO: 22760264 NR Description: unnamed protein product [Homo sapiens]
  misc_feature (64)..(94): NCBI GI NO: 22760264 NR Description: unnamed protein product [Homo sapiens]
MSAAVSADHYSFPSGHASRVFFVAASVHFFTSEAQVVSPSYSFLDGWVRDRGEGVVKGEVLVGVWIWATVTAVSRILLGRHYVLDVAAGACLGVLEALFALRFLRFEQILGWW

SEQ ID NO: 20985 - DNA, 1878 bp, Zea mays subsp. mays
  misc_feature (1)..(1878): Ceres Seq. ID no. 15179397
ctcctcttctccagcgtccgatccccgtttcccacgaatcccactctactcctccatctgcggcctcctccatgctcctgcccccttctctctcctccttgcttccccgcgcgcacgtttttacaagggtttcggcggaggcgaccggtcgccgacgatggcggacgacagcggcagccacgagggcggcggcggcggcggcgacgacgtccgggagcaggacatgttcttgcctattaccaacatcacccggatcatgaagaaggccgtcccggccaatgccaagatcactaaggacgctaaggagataatgcagtactgcgtctccgagttcatattctttgtgacgagcgaggcgagggagaaaagcaaaaaggaggagcgtaagagaatcaacgtggacgatttgctctggtcagtggatacggcaggattcgagtacgtggagcttctcaggatttgcctacaaaagtacagagagacggggaagtgcacggtgtacacgacgtgatcaggttattaacctgtaacaccttagtgagaaaacattgagcacttggcaggtagtacgcaatcagtttaagaaactgcaaactgcaagctcctgggcaactagtgttgttgctgtgaacaaggtgatagtaaggtgtctacaaaggctggcgagggctctttaaataaggatgcagttagtacccatggtggcaccagtaactcaagcaaccagcatggagtttacaaccaagagatggtaccaccacagcatggagttaacaacaaagagatggacgatatgtcgccacagttggttcaccatggagtttacaaccttgagatggataatatgctgtcacagttggatcaacatgaagtttacaaccaagggatggatgatatgccagcacatttggttcaacatggagtttataaccaagggatatgcgatatgacgccacagttggttcaacatggagtttacaaccaagggatgagcgatatgccaccaaagcatggagtttacaaccaagcgatgaatgatatgccgacacagttagttcaacatggagtttacaaccaagagatggatgatatgctgccacagttggttcaacatggagtttacaaccaagggatgagtgatatgtcgccacagttggttcaacatggaggttacaaccaagagatggatgatatgacgccacagttggttccgcacggagtttacaaccaagggatgagcgatatgctgccgcagttggttcaacatggagttcacaaccaagagatggacgatatgccgccacagttggttcaacatggagtttacaaccaagagatcaatgatatgcagccacagttggttcaacatggactttacaatggagaaatggatgatatgccgccacagttggttcaacatggagttgacaaccaagagatggacgatatgccaccacatttggtccaacatggagtttacaaccaagaggtggacaatatggtgccacatttggttcagcatggagtttacaaccaagggatgagcgatatgctgccacagttggttccacatggagtttacaaccaagagatggataatataacgccacagttggttcagcatggagtttacaaccaagggatggacgatatgccgccacagttggttcaacatggagtttgcaaccaagggatggtcaatatgcaactgcagtttgttcaacatggagtttgcaaccaagggatggacgatatacctccatagctaagagatgttaacctactagaagatactggggtaaataaccttggacccgcttttttaagagaatgtgagttgtgccattctatttaattatataattctttggtttaagc

SEQ ID NO: 20986 - protein, 338 aa, Zea mays subsp. mays
  peptide (1)..(338): Ceres Seq. ID no. 15179398
  misc_feature (89)..(338): NCBI GI NO: 37545275 NR Description: similar to acidic repetitive protein arp1 -Tetrahymena thermophila
  misc_feature (106)..(338): NCBI GI NO: 37545275 NR Description: similar to acidic repetitive protein arp1 -Tetrahymena thermophila
MVPPQHGVNNKEMDDMSPQLVHHGVYNLEMDNMLSQLDQHEVYNQGMDDMPAHLVQHGVYNQGICDMTPQLVQHGVYNQGMSDMPPKHGVYNQAMNDMPTQLVQHGVYNQEMDDMLPQLVQHGVYNQGMSDMSPQLVQHGGYNQEMDDMTPQLVPHGVYNQGMSDMLPQLVQHGVHNQEMDDMPPQLVQHGVYNQEINDMQPQLVQHGLYNGEMDDMPPQLVQHGVDNQEMDDMPPHLVQHGVYNQEVDNMVPHLVQHGVYNQGMSDMLPQLVPHGVYNQEMDNITPQLVQHGVYNQGMDDMPPQLVQHGVCNQGMVNMQLQFVQHGVCNQGMDDIPP

SEQ ID NO: 20987 - protein, 326 aa, Zea mays subsp. mays
  peptide (1)..(326): Ceres Seq. ID no. 15179399
  misc_feature (77)..(326): NCBI GI NO: 37545275 NR Description: similar to acidic repetitive protein arp1 -Tetrahymena thermophila
  misc_feature (94)..(326): NCBI GI NO: 37545275 NR Description: similar to acidic repetitive protein arp1 -Tetrahymena thermophila
MDDMSPQLVHHGVYNLEMDNMLSQLDQHEVYNQGMDDMPAHLVQHGVYNQGICDMTPQLVQHGVYNQGMSDMPPKHGVYNQAMNDMPTQLVQHGVYNQEMDDMLPQLVQHGVYNQGMSDMSPQLVQHGGYNQEMDDMTPQLVPHGVYNQGMSDMLPQLVQHGVHNQEMDDMPPQLVQHGVYNQEINDMQPQLVQHGLYNGEMDDMPPQLVQHGVDNQEMDDMPPHLVQHGVYNQEVDNMVPHLVQHGVYNQGMSDMLPQLVPHGVYNQEMDNITPQLVQHGVYNQGMDDMPPQLVQHGVCNQGMVNMQLQFVQHGVCNQGMDDIPP

SEQ ID NO: 20988 - protein, 323 aa, Zea mays subsp. mays
  peptide (1)..(323): Ceres Seq. ID no. 15179400
  misc_feature (74)..(323): NCBI GI NO: 37545275 NR Description: similar to acidic repetitive protein arp1 -Tetrahymena thermophila
  misc_feature (91)..(323): NCBI GI NO: 37545275 NR Description: similar to acidic repetitive protein arp1 -Tetrahymena thermophila
MSPQLVHHGVYNLEMDNMLSQLDQHEVYNQGMDDMPAHLVQHGVYNQGICDMTPQLVQHGVYNQGMSDMPPKHGVYNQAMNDMPTQLVQHGVYNQEMDDMLPQLVQHGVYNQGMSDMSPQLVQHGGYNQEMDDMTPQLVPHGVYNQGMSDMLPQLVQHGVHNQEMDDMPPQLVQHGVYNQEINDMQPQLVQHGLYNGEMDDMPPQLVQHGVDNQEMDDMPPHLVQHGVYNQEVDNMVPHLVQHGVYNQGMSDMLPQLVPHGVYNQEMDNITPQLVQHGVYNQGMDDMPPQLVQHGVCNQGMVNMQLQFVQHGVCNQGMDDIPP

SEQ ID NO: 20989 - DNA, 961 bp, Zea mays subsp. mays
  misc_feature (1)..(961): Ceres Seq. ID no. 15176514
ctcagtctcccctactatggccttgcctatctccggcacgcgccacctcacgcgctccctcttgtccagtaccaccttactcgcgcctcctaagcttccttcctccgttcgctgcggtgggtttagctccggtcacgatgcggttgtacctcggtttacctcactccgatgccgagctaaccgttcaggctccgcttactcgccgctcaactccggctccaacttcagcgaccgacctccgacggagatggcgcctctgttcccgggatgcgattacgagcactggctgattgttatggacaagcccggcggcgaaggagcgacgaagcaggagatgattgattgttacgtacaaactttagctaaagtcgttggaagtgaggaagaggcgaagaagaggatttacaatgtttcgtgtgagaggtatttggggtttgggtgtgagattgatgaagagacatctactaagcttgaaggtttgcctggtgttctgtttgtgcttccggattcatatgtggatcctgagaacaaagattatggagcggagctatttgttaatggagagatagtccaacgatcaccagagaggcagaggagagttgagccacagccgcagagagcgcaagatagaccgagatacaatgacagaacgcgttactctcgccgcaaagaaaacacacgctgagccgcgactgaagaagatacgcgtacaccgtattgaatcaaatcgaaagcgagtacgatagtggtgatcatgaggatgatgttgctgctgccaggcgaaggttccatgttccaccccgttgctgctaatcgatcaactttggatattgttgcaaatgcttagtttcggtactgtgtaacatctttatatgtaataatgtaaattgaggttacttttactgttttagagaagacactgggatatttgggcatcaaaattcgttttcctttctagaac

SEQ ID NO: 20990 - protein, 227 aa, Zea mays subsp. mays
  peptide (1)..(227): Ceres Seq. ID no. 15176515
  misc_feature (6)..(227): NCBI GI NO: 15226108 NR Description: plastid protein [Arabidopsis thaliana]
  misc_feature (6)..(227): NCBI GI NO: 2440029 NR Description: DAL1 protein [Arabidopsis thaliana]
  misc_feature (6)..(227): NCBI GI NO: 21617909 NR Description: plastid protein [Arabidopsis thaliana]
  misc_feature (27)..(227): NCBI GI NO: 25370552 NR Description: DAG protein homolog
  misc_feature (9)..(225): NCBI GI NO: 38344141 NR Description: OSJNBa0041A02.8
  misc_feature (11)..(227): NCBI GI NO: 15223247 NR Description: plastid protein -related [Arabidopsis thaliana]
  misc_feature (47)..(227): NCBI GI NO: 34897972 NR Description: putative plastid protein
  misc_feature (18)..(227): NCBI GI NO: 15226934 NR Description: expressed protein [Arabidopsis thaliana]
  misc_feature (17)..(225): NCBI GI NO: 18400602 NR Description: expressed protein [Arabidopsis thaliana]
  misc_feature (64)..(224): NCBI GI NO: 15220382 NR Description: DAG protein -related [Arabidopsis thaliana]
SVSPTMALPISGTRHLTRSLLSSTTLLAPPKLPSSVRCGGFSSGHDAVVPRFTSLRCRANRSGSAYSPLNSGSNFSDRPPTEMAPLFPGCDYEHWLIVMDKPGGEGATKQEMIDCYVQTLAKVVGSEEEAKKRIYNVSCERYLGFGCEIDEETSTKLEGLPGVLFVLPDSYVDPENKDYGAELFVNGEIVQRSPERQRRVEPQPQRAQDRPRYNDRTRYSRRKENTR

SEQ ID NO: 20991 - protein, 222 aa, Zea mays subsp. mays
  peptide (1)..(222): Ceres Seq. ID no. 15176516
  misc_feature (1)..(222): NCBI GI NO: 15226108 NR Description: plastid protein [Arabidopsis thaliana]
  misc_feature (1)..(222): NCBI GI NO: 2440029 NR Description: DAL1 protein [Arabidopsis thaliana]
  misc_feature (1)..(222): NCBI GI NO: 21617909 NR Description: plastid protein [Arabidopsis thaliana]
  misc_feature (22)..(222): NCBI GI NO: 25370552 NR Description: DAG protein homolog
  misc_feature (4)..(220): NCBI GI NO: 38344141 NR Description: OSJNBa0041A02.8
  misc_feature (6)..(222): NCBI GI NO: 15223247 NR Description: plastid protein -related [Arabidopsis thaliana]
  misc_feature (42)..(222): NCBI GI NO: 34897972 NR Description: putative plastid protein
  misc_feature (13)..(222): NCBI GI NO: 15226934 NR Description: expressed protein [Arabidopsis thaliana]
  misc_feature (12)..(220): NCBI GI NO: 18400602 NR Description: expressed protein [Arabidopsis thaliana]
  misc_feature (59)..(219): NCBI GI NO: 15220382 NR Description: DAG protein -related [Arabidopsis thaliana]
MALPISGTRHLTRSLLSSTTLLAPPKLPSSVRCGGFSSGHDAVVPRFTSLRCRANRSGSAYSPLNSGSNFSDRPPTEMAPLFPGCDYEHWLIVMDKPGGEGATKQEMIDCYVQTLAKVVGSEEEAKKRIYNVSCERYLGFGCEIDEETSTKLEGLPGVLFVLPDSYVDPENKDYGAELFVNGEIVQRSPERQRRVEPQPQRAQDRPRYNDRTRYSRRKENTR

SEQ ID NO: 20992 - protein, 145 aa, Zea mays subsp. mays
  peptide (1)..(145): Ceres Seq. ID no. 15176517
  misc_feature (1)..(145): NCBI GI NO: 15226108 NR Description: plastid protein [Arabidopsis thaliana]
  misc_feature (1)..(145): NCBI GI NO: 2440029 NR Description: DAL1 protein [Arabidopsis thaliana]
  misc_feature (1)..(145): NCBI GI NO: 21617909 NR Description: plastid protein [Arabidopsis thaliana]
  misc_feature (1)..(145): NCBI GI NO: 25370552 NR Description: DAG protein homolog
  misc_feature (1)..(143): NCBI GI NO: 38344141 NR Description: OSJNBa0041A02.8
  misc_feature (1)..(145): NCBI GI NO: 15223247 NR Description: plastid protein -related [Arabidopsis thaliana]
  misc_feature (1)..(145): NCBI GI NO: 34897972 NR Description: putative plastid protein
  misc_feature (1)..(145): NCBI GI NO: 15226934 NR Description: expressed protein [Arabidopsis thaliana]
  misc_feature (1)..(143): NCBI GI NO: 18400602 NR Description: expressed protein [Arabidopsis thaliana]
  misc_feature (1)..(142): NCBI GI NO: 15220382 NR Description: DAG protein -related [Arabidopsis thaliana]
MAPLFPGCDYEHWLIVMDKPGGEGATKQEMIDCYVQTLAKVVGSEEEAKKRIYNVSCERYLGFGCEIDEETSTKLEGLPGVLFVLPDSYVDPENKDYGAELFVNGEIVQRSPERQRRVEPQPQRAQDRPRYNDRTRYSRRKENTR

SEQ ID NO: 20993 - DNA, 972 bp, Zea mays subsp. mays
  misc_feature (1)..(972): Ceres Seq. ID no. 15176807
atcattcaggtcttcgtctttttcgtctctctctgttctctccatcgctgaacattcagatcgctagctggtcgtgcatctaatctactactattatatttcttcatcttcccatagttgagatcttaaccaaaaaaaaatgaacaaaaacacacggatcgatatcccctcttcgtcttcaccatccttagcttccgcagacggtgagctccacgaagacgacatcttcgcaatcgacataactcacgcgcctcgtccttctccgacgcagcaacaacacccacctgctcgtcaccttcaaagaagcaaaagcagtttgaaaaacgtggaagcttccggtatcctcgctgctctccccgagccttcaggaggaaacagttacctcaaccacgtctttcaccacaaacccgcctctgttctctccacttcagtctcctccacagcttcttcctcgtcttcttcaggcggcggtgcttccgctcgaaccatccccgccgctcctaaaccgcctcaagagaggcttccgtttacgtcttcttttatgaacggagggaagtttcctcagtcggctccagttcgagttccgtcggcgatgatgaatcgtcataagaaggagtttaagttgactgatgtggtggatgttgatgatgatgaggaaggggagatgcttccgcctcacgagatggtagctcgttctttggctcagtcttcgttgctgtcttgctcggtgcttgaaggagcaggaagaacacttaaagggagagatctccggcaggtaaggaatgctgttttcagaagaaccggttttattgattgaatttctctttttttcattctttgatttgttgtccccaattgaaccggttttatttggtttacagaaacattccaatgtattgttcatatatgttgtctacattacacgatttgttgtttacttcatattaatcagattgatgtgattgtttgctt

SEQ ID NO: 20994 - protein, 225 aa, Zea mays subsp. mays
  peptide (1)..(225): Ceres Seq. ID no. 15176808
  misc_feature (20)..(225): Pfam Name: Pfam Description:  Protein of unknown function, DUF584
  misc_feature (1)..(225): NCBI GI NO: 18400614 NR Description: expressed protein [Arabidopsis thaliana]
  misc_feature (1)..(225): NCBI GI NO: 21594619 NR Description: unknown [Arabidopsis thaliana]
  misc_feature (1)..(225): NCBI GI NO: 15983450 NR Description: AT3g15040/K15M2_18 [Arabidopsis thaliana]
  misc_feature (10)..(225): NCBI GI NO: 38346328 NR Description: OJ000126_13.10
  misc_feature (95)..(219): NCBI GI NO: 34908520 NR Description: P0423B08.9
  misc_feature (10)..(225): NCBI GI NO: 37534318 NR Description: putative prolyl 4-hydroxylase alpha subunit-likeprotein
  misc_feature (97)..(225): NCBI GI NO: 21741306 NR Description: OSJNBb0103I08.8
  misc_feature (135)..(223): NCBI GI NO: 7487830 NR Description: hypothetical protein T8O5
  misc_feature (137)..(225): NCBI GI NO: 27476087 NR Description: Hypothetical protein
  misc_feature (132)..(225): NCBI GI NO: 18412629 NR Description: expressed protein [Arabidopsis thaliana]
MNKNTRIDIPSSSSPSLASADGELHEDDIFAIDITHAPRPSPTQQQHPPARHLQRSKSSLKNVEASGILAALPEPSGGNSYLNHVFHHKPASVLSTSVSSTASSSSSSGGGASARTIPAAPKPPQERLPFTSSFMNGGKFPQSAPVRVPSAMMNRHKKEFKLTDVVDVDDDEEGEMLPPHEMVARSLAQSSLLSCSVLEGAGRTLKGRDLRQVRNAVFRRTGFID

SEQ ID NO: 20995 - DNA, 1769 bp, Zea mays subsp. mays
  misc_feature (1)..(1769): Ceres Seq. ID no. 15180029
accgttctcttctccctaatcctggtaatcagtagtagccactagcgctgctgccgttctcttcccctacccgacacaagctccaccacctctatctaccacacgccaccactgtaggagctcctccacgatcatcccgccctagagccataataattcgttgaagaggagggggttcttagaaccagagggcggctacctgtgaaggatacccgtgctgctggctgctgctgttcctcgagctagagccgtgtgtgggctgtgcagattgcagagcgcagcttccagtctcagcattgctttcaatggggaggcactcctgctgttacaagcagaagctgaggaaggggctctggtctcctgaggaagatgagaagctcatgatccacataaccaagcacgggcatggctgctggagcactgtccccaagcttgcagggcttcagaggtgtggcaagagctgcaggctgaggtggataaattacctgaggcctgaccttaaaagaggtgcattctctgaggaggaggaagacctcatcgtcgaacttcatgctgtactggggaacaggtggtctcagattgcaacaaggttgcctggaagaactgacaacgagatcaagaatctctggaactcgagcatcaagaagaagctccggcagaaaggcattgaccccaacacccacaagccgctccttgtcgaggttgaacgcagcaaagcagctccagcgaccagtaccgagagaacctctgagtccaatgatgttgacccttcaagtggcgccgcacttggcaactcgagccatcttcttctcagcgagacagcacaatcaccacagctgccagcgctcggtaagcatcgcagagaaactactagcctggcacatctaagggtgccgcccaaggagttgttccttgaccagctggcttctggtcatgagaacctcactggctgccgcacagcaggcccagttccaaatttccctttccaacagctgatgtgctacaacaatgaatttggcaacaagaatggtgctagtaacaattcactctggtttaaccacaatgagacaagtggcagcaccatttccactgtgatgccaccagtttcgccatcaactctctcgacatcaacagggctcaataggtcaccagacaacccacactcgggaggcactgccattcagagcacccagttctactgggacgctgctaatcctagcagctgcagcagtagaggaagcagcggaagcaacggcttgggatttgagctgcaaagcacaagctcgcttctggagagtagtgttttcccatggacagaattaacaccagataagaatagccaagttcagcttggggaagaactcaagtggcccgacttgctccacggaacattcacagacacacatgcaaccatgcagaaccttagccagtcactgtacgaagatgttatcaaagccgagagccaattcaacatagagggcctctgtgcagcctggtctcaaaatctgcagccacagcaacacctgcaggtatcagatttgtatgacaaggatttgcaaaggatgtccttgtcttttgagaatatctagacagcatgtttcagcatgcagggaacagagaaatagcagaaagctgagtcaatgaagccttaaaaaatacaatatttcttcacagattcatttgaaggctatgtggaggtgtgttttacgtaggtacattcttatgatgaaacagagatcaatactgataactgttcaccagtgtaaatc

SEQ ID NO: 20996 - protein, 427 aa, Zea mays subsp. mays
  peptide (1)..(427): Ceres Seq. ID no. 15180030
  misc_feature (14)..(61): Pfam Name: Pfam Description:  Myb-like DNA-binding domain
  misc_feature (1)..(427): NCBI GI NO: 34902542 NR Description: putative transcription factor (myb)
  misc_feature (1)..(160): NCBI GI NO: 22329445 NR Description: myb family transcription factor
  misc_feature (1)..(160): NCBI GI NO: 25294104 NR Description: hypothetical protein
  misc_feature (1)..(176): NCBI GI NO: 28628949 NR Description: MYB2 [Dendrobium sp. XMW-2002-2]
  misc_feature (1)..(151): NCBI GI NO: 15223612 NR Description: myb family transcription factor
  misc_feature (1)..(176): NCBI GI NO: 2280530 NR Description: ATMYB4 [Arabidopsis thaliana]
  misc_feature (1)..(176): NCBI GI NO: 30690317 NR Description: myb transcription factor (ATMYB4)
  misc_feature (1)..(147): NCBI GI NO: 15234262 NR Description: myb family transcription factor
  misc_feature (45)..(176): NCBI GI NO: 7446174 NR Description: transcription factor MYB4 - Arabidopsis thaliana
  misc_feature (1)..(44): NCBI GI NO: 7446174 NR Description: transcription factor MYB4 - Arabidopsis thaliana
MGRHSCCYKQKLRKGLWSPEEDEKLMIHITKHGHGCWSTVPKLAGLQRCGKSCRLRWINYLRPDLKRGAFSEEEEDLIVELHAVLGNRWSQIATRLPGRTDNEIKNLWNSSIKKKLRQKGIDPNTHKPLLVEVERSKAAPATSTERTSESNDVDPSSGAALGNSSHLLLSETAQSPQLPALGKHRRETTSLAHLRVPPKELFLDQLASGHENLTGCRTAGPVPNFPFQQLMCYNNEFGNKNGASNNSLWFNHNETSGSTISTVMPPVSPSTLSTSTGLNRSPDNPHSGGTAIQSTQFYWDAANPSSCSSRGSSGSNGLGFELQSTSSLLESSVFPWTELTPDKNSQVQLGEELKWPDLLHGTFTDTHATMQNLSQSLYEDVIKAESQFNIEGLCAAWSQNLQPQQHLQVSDLYDKDLQRMSLSFENI

SEQ ID NO: 20997 - protein, 402 aa, Zea mays subsp. mays
  peptide (1)..(402): Ceres Seq. ID no. 15180031
  misc_feature (1)..(36): Pfam Name: Pfam Description:  Myb-like DNA-binding domain
  misc_feature (1)..(402): NCBI GI NO: 34902542 NR Description: putative transcription factor (myb)
  misc_feature (1)..(135): NCBI GI NO: 22329445 NR Description: myb family transcription factor
  misc_feature (1)..(135): NCBI GI NO: 25294104 NR Description: hypothetical protein
  misc_feature (1)..(151): NCBI GI NO: 28628949 NR Description: MYB2 [Dendrobium sp. XMW-2002-2]
  misc_feature (1)..(126): NCBI GI NO: 15223612 NR Description: myb family transcription factor
  misc_feature (1)..(151): NCBI GI NO: 2280530 NR Description: ATMYB4 [Arabidopsis thaliana]
  misc_feature (1)..(151): NCBI GI NO: 30690317 NR Description: myb transcription factor (ATMYB4)
  misc_feature (1)..(122): NCBI GI NO: 15234262 NR Description: myb family transcription factor
  misc_feature (20)..(151): NCBI GI NO: 7446174 NR Description: transcription factor MYB4 - Arabidopsis thaliana
  misc_feature (1)..(19): NCBI GI NO: 7446174 NR Description: transcription factor MYB4 - Arabidopsis thaliana
MIHITKHGHGCWSTVPKLAGLQRCGKSCRLRWINYLRPDLKRGAFSEEEEDLIVELHAVLGNRWSQIATRLPGRTDNEIKNLWNSSIKKKLRQKGIDPNTHKPLLVEVERSKAAPATSTERTSESNDVDPSSGAALGNSSHLLLSETAQSPQLPALGKHRRETTSLAHLRVPPKELFLDQLASGHENLTGCRTAGPVPNFPFQQLMCYNNEFGNKNGASNNSLWFNHNETSGSTISTVMPPVSPSTLSTSTGLNRSPDNPHSGGTAIQSTQFYWDAANPSSCSSRGSSGSNGLGFELQSTSSLLESSVFPWTELTPDKNSQVQLGEELKWPDLLHGTFTDTHATMQNLSQSLYEDVIKAESQFNIEGLCAAWSQNLQPQQHLQVSDLYDKDLQRMSLSFENI

SEQ ID NO: 20998 - DNA, 744 bp, Zea mays subsp. mays
  misc_feature (1)..(744): Ceres Seq. ID no. 15178928
atcatcatcgtggaacgtggagctcacatactaaacaagatccgatctaaccccccggttctcgtcggaatctcttcacggttaaccggcgttcctcacccaccttttcgttccagttatggaagacgtgaagggaaaggagcttgttgatgatactcctcctcctgttgaacaaaatgatgaaactgagattcataaacagccatcgtctgagtccgaggaaaatgcgatcaagaaaaagtatggaggattgttgccaaagaagattcctttgatatccaaggatcatgagcgtgcgttttttgactcagctgattgggcattaggcaagcaaaaaggacaaaagccaaaagggcctttggaagctctccgaccaaaactgcagccaaccccgcaccagcaaccaagggcaagacgaatggccttatcttcaggcgataactctgaagacgctgaggctgacaccaacgaacctctggatgaccaacaagctagcgcatcagctgctgacaacgccaaggatgatggaggcatcgtcgatgctgctgacgccaaagacaacatcaagtcatgaacaaacatatcacaagtcagtttacagaagaataagcgaccaggcttgctttgcagtggttgtagtaatatcgagtctctctctttacattatattccatacttgggtaccagcaaatctgtatcaccatacaaaacctagtatctgaaacgtctatttggacgatttgc

SEQ ID NO: 20999 - protein, 151 aa, Zea mays subsp. mays
  peptide (1)..(151): Ceres Seq. ID no. 15178929
  misc_feature (1)..(151): NCBI GI NO: 18409295 NR Description: expressed protein [Arabidopsis thaliana]
  misc_feature (1)..(121): NCBI GI NO: 34902768 NR Description: unnamed protein product
  misc_feature (18)..(114): NCBI GI NO: 18424791 NR Description: expressed protein [Arabidopsis thaliana]
  misc_feature (38)..(135): NCBI GI NO: 4164473 NR Description: negatively light-regulated protein
  misc_feature (43)..(118): NCBI GI NO: 100535 NR Description: hypothetical protein - swollen duckweed (fragment)
  misc_feature (46)..(114): NCBI GI NO: 10176961 NR Description: gene_id:MHJ24.11~unknown protein
  misc_feature (43)..(108): NCBI GI NO: 100536 NR Description: hypothetical protein - swollen duckweed (fragment)
  misc_feature (1)..(76): NCBI GI NO: 5042462 NR Description: putative negatively light-regulated protein
  misc_feature (30)..(109): NCBI GI NO: 18414599 NR Description: expressed protein [Arabidopsis thaliana]
  misc_feature (21)..(110): NCBI GI NO: 34910886 NR Description: P0003E08.9
MEDVKGKELVDDTPPPVEQNDETEIHKQPSSESEENAIKKKYGGLLPKKIPLISKDHERAFFDSADWALGKQKGQKPKGPLEALRPKLQPTPHQQPRARRMALSSGDNSEDAEADTNEPLDDQQASASAADNAKDDGGIVDAADAKDNIKS

SEQ ID NO: 21000 - protein, 80 aa, Zea mays subsp. mays
  peptide (1)..(80): Ceres Seq. ID no. 15178930
MTNKLAHQLLTTPRMMEASSMLLTPKTTSSHEQTYHKSVYRRISDQACFAVVVVISSLSLYIIFHTWVPANLYHHTKPSI

SEQ ID NO: 21001 - DNA, 857 bp, Zea mays subsp. mays
  misc_feature (1)..(857): Ceres Seq. ID no. 15178299
gaaccaactatcctcaggggacttaagaaacaaaaaaaactttctcgccttcttctagaaacaacaccttctcttccaattagagtctctcaaaaaaaaaatggcggttacatcttctagaaccagatcaaccgcttctgcgctacgctctccgtcttcaccaggcttcgcttcctccacaagctccaccttctcctcccgtactttcttcagcaaccaacatcatcaacatcaaccccacagatccgcgtcccctacgcgcgttaacctcttcgcatcctccccgctaaaacaatcatcgttccgttactcgatcgacaacaccagatccatcgccgtttcgaagcccagcggcggcaacaagatccccgattcgaggaggagatgcatgtgctcgccgacgactcaccccggatcgttccggtgcagtttacacaagaacgtcgcgaatccccacgggcaaggcgccgcgacggcggcggcgtatccgacgaacagtttgaatatgaggagatcggcgatgacgaattctctggtgaggatcggtggggttgaaggcgagtgggtgagaagagcgttgacgacgctgataaggcctttttcgcatcagctgaaaaggaggtttgcttatcagcctaggcctagtcggttatcgtcgatgtcgaaggctgatgatctttgatcgggtttgttattgaatcggagacgaaaacgaccccgtcttgaagttttttgttttgttgcgtgaagatgaattgtacatagtacttcatttgctatcgaaaaatatctagaattgaagaacagtaatagaagtggttatttaaaattaaatggaacaaagggacttggttttt

SEQ ID NO: 21002 - protein, 193 aa, Zea mays subsp. mays
  peptide (1)..(193): Ceres Seq. ID no. 15178300
  misc_feature (17)..(193): NCBI GI NO: 15238753 NR Description: serine-rich protein [Arabidopsis thaliana]
  misc_feature (17)..(193): NCBI GI NO: 21618161 NR Description: serine-rich protein [Arabidopsis thaliana]
  misc_feature (14)..(192): NCBI GI NO: 15238947 NR Description: expressed protein [Arabidopsis thaliana]
  misc_feature (1)..(193): NCBI GI NO: 24461857 NR Description: CTV.15 [Poncirus trifoliata]
  misc_feature (32)..(183): NCBI GI NO: 15241329 NR Description: hypothetical protein [Arabidopsis thaliana]
MAVTSSRTRSTASALRSPSSPGFASSTSSTFSSRTFFSNQHHQHQPHRSASPTRVNLFASSPLKQSSFRYSIDNTRSIAVSKPSGGNKIPDSRRRCMCSPTTHPGSFRCSLHKNVANPHGQGAATAAAYPTNSLNMRRSAMTNSLVRIGGVEGEWVRRALTTLIRPFSHQLKRRFAYQPRPSRLSSMSKADDL

SEQ ID NO: 21003 - protein, 97 aa, Zea mays subsp. mays
  peptide (1)..(97): Ceres Seq. ID no. 15178301
  misc_feature (1)..(97): NCBI GI NO: 15238753 NR Description: serine-rich protein [Arabidopsis thaliana]
  misc_feature (1)..(97): NCBI GI NO: 21618161 NR Description: serine-rich protein [Arabidopsis thaliana]
  misc_feature (1)..(96): NCBI GI NO: 15238947 NR Description: expressed protein [Arabidopsis thaliana]
  misc_feature (1)..(97): NCBI GI NO: 24461857 NR Description: CTV.15 [Poncirus trifoliata]
  misc_feature (1)..(87): NCBI GI NO: 15241329 NR Description: hypothetical protein [Arabidopsis thaliana]
MCSPTTHPGSFRCSLHKNVANPHGQGAATAAAYPTNSLNMRRSAMTNSLVRIGGVEGEWVRRALTTLIRPFSHQLKRRFAYQPRPSRLSSMSKADDL

SEQ ID NO: 21004 - DNA, 1157 bp, Zea mays subsp. mays
  misc_feature (1)..(1157): Ceres Seq. ID no. 15176155
acaacattctcacgcagccctaaaactccttcgcctccctctctcgaatctctcttcctccttcatcatcaaaatggaattctggggagttgaggttagggcagggaagccacttaaagtgaaacctgatgaagactgtctcatccacctttcacaggcatctcttgataaagggaagaagggtgaaaccgccgtcttgtacgtgaccgttgacgggaagaagcttgtgattggaacacttgttcaagacaccatcccccagatcagctttgatctggtctttgagaaggagtttgagctctcacactcgtccaaaggaagcgtccacttcatcggctacaagtctcccaacatcgacgaagaggaggatttcccttgtgactcggaagaggaagaggaggaagttgaggttcctgctacttcaactgtcactacaaacggagcaacacctacttcgagtgttgttactgttgactcaaagccaaaggctgcggctaaggctaagcctgctgtagtgaagcctgaatcagacgaggatgatgatgagtctgacgaggaggatgattctgaagatgatggatctgactctgagaaagggatggatgttgatgaggatgattctgaggatgagaaagatgattctgaggaggaggaagaggatacccctaagaagcctgagacaagcaacaagaagaggccgattgaatctgcaacacctgtctctgctaagaagactaaaccagcagtagcagctacccctcagaaatcagaggagaagaagggagggcacacagctacaccacacccagctaaaaagggaggaaagagtcctatgaatgctaaccagagccccaaatctggaggtcaatcatccggatctggtggtaacaagaagccattcaacaactctggcaagcaatttggttctaacaacaagggcaacaaggggaagggaaagggcagcagagcctaagtgaagtgagatgttttgattttttagtagatgctctgtgagctgagatgaaagagatcggttttatttttatgtttatcctaagattttattctccttgtgggaattgctattttatgttattgcaacttttaaccttatggaattcagtattttgagaatggaaactcggaatgcaatcatg

SEQ ID NO: 21005 - protein, 323 aa, Zea mays subsp. mays
  peptide (1)..(323): Ceres Seq. ID no. 15176156
  misc_feature (119)..(221): Pfam Name: Pfam Description:  Nucleoplasmin
  misc_feature (25)..(320): NCBI GI NO: 25352191 NR Description: probable histone deacetylase (EC 3.5.1.-)
  misc_feature (25)..(320): NCBI GI NO: 30688577 NR Description: histone deacetylase-related protein
  misc_feature (116)..(320): NCBI GI NO: 30688581 NR Description: histone deacetylase-related protein
  misc_feature (25)..(303): NCBI GI NO: 7489751 NR Description: histone deacetylase (EC 3
  misc_feature (25)..(302): NCBI GI NO: 7804960 NR Description: putative histone deacetylase HD2 [Oryza sativa]
  misc_feature (25)..(316): NCBI GI NO: 7716948 NR Description: histone deacetylase 2 isoform b [Zea mays]
  misc_feature (25)..(307): NCBI GI NO: 7716950 NR Description: histone deacetylase 2 isoform c [Zea mays]
  misc_feature (25)..(306): NCBI GI NO: 22597156 NR Description: nucleolar histone deacetylase HD2-P39
  misc_feature (25)..(308): NCBI GI NO: 7804963 NR Description: putative histone deacetylase HD2c
  misc_feature (25)..(308): NCBI GI NO: 11282318 NR Description: histone deacetylase-like protein
QHSHAALKLLRLPLSNLSSSFIIKMEFWGVEVRAGKPLKVKPDEDCLIHLSQASLDKGKKGETAVLYVTVDGKKLVIGTLVQDTIPQISFDLVFEKEFELSHSSKGSVHFIGYKSPNIDEEEDFPCDSEEEEEEVEVPATSTVTTNGATPTSSVVTVDSKPKAAAKAKPAVVKPESDEDDDESDEEDDSEDDGSDSEKGMDVDEDDSEDEKDDSEEEEEDTPKKPETSNKKRPIESATPVSAKKTKPAVAATPQKSEEKKGGHTATPHPAKKGGKSPMNANQSPKSGGQSSGSGGNKKPFNNSGKQFGSNNKGNKGKGKGSRA

SEQ ID NO: 21006 - protein, 299 aa, Zea mays subsp. mays
  peptide (1)..(299): Ceres Seq. ID no. 15176157
  misc_feature (95)..(197): Pfam Name: Pfam Description:  Nucleoplasmin
  misc_feature (1)..(296): NCBI GI NO: 25352191 NR Description: probable histone deacetylase (EC 3.5.1.-)
  misc_feature (1)..(296): NCBI GI NO: 30688577 NR Description: histone deacetylase-related protein
  misc_feature (92)..(296): NCBI GI NO: 30688581 NR Description: histone deacetylase-related protein
  misc_feature (1)..(279): NCBI GI NO: 7489751 NR Description: histone deacetylase (EC 3
  misc_feature (1)..(278): NCBI GI NO: 7804960 NR Description: putative histone deacetylase HD2 [Oryza sativa]
  misc_feature (1)..(292): NCBI GI NO: 7716948 NR Description: histone deacetylase 2 isoform b [Zea mays]
  misc_feature (1)..(283): NCBI GI NO: 7716950 NR Description: histone deacetylase 2 isoform c [Zea mays]
  misc_feature (1)..(282): NCBI GI NO: 22597156 NR Description: nucleolar histone deacetylase HD2-P39
  misc_feature (1)..(284): NCBI GI NO: 7804963 NR Description: putative histone deacetylase HD2c
  misc_feature (1)..(284): NCBI GI NO: 11282318 NR Description: histone deacetylase-like protein
MEFWGVEVRAGKPLKVKPDEDCLIHLSQASLDKGKKGETAVLYVTVDGKKLVIGTLVQDTIPQISFDLVFEKEFELSHSSKGSVHFIGYKSPNIDEEEDFPCDSEEEEEEVEVPATSTVTTNGATPTSSVVTVDSKPKAAAKAKPAVVKPESDEDDDESDEEDDSEDDGSDSEKGMDVDEDDSEDEKDDSEEEEEDTPKKPETSNKKRPIESATPVSAKKTKPAVAATPQKSEEKKGGHTATPHPAKKGGKSPMNANQSPKSGGQSSGSGGNKKPFNNSGKQFGSNNKGNKGKGKGSRA

SEQ ID NO: 21007 - DNA, 901 bp, Zea mays subsp. mays
  misc_feature (1)..(901): Ceres Seq. ID no. 15177482
aaccacacactgccttgttcatctcgaacataaatcaagagcatatcattctttgtgagctttattgatctaaaccaatggcgaactcgacgattcttcttgattactggccaagcatgttctgtatgagggctagagtcgcgttgagggagaaaggtgttgtgttcgaggccagagaagaggatctcacgaacaagagccctttgctcctccagagtaatccgattcacaagaaggtcccggttctgatccacaacggtaaaccggtttgcgagtccctcaatgttgtccagtacgtggacgaggcttggtctgacaagaacccattcttcccttctgatccttacgggaaagctcaggctaggttttgggctgatttcgtggacaagaagtttagtgatgcccaattcaagatatggggaaagaaaggtgaggaacaagcagcaggggtgaaggagtttattgaggcagtgaagattcttgaagctgagcttggagacaaaccttactttggtggagatagctttggatatgtagacattgcactgattacattctacagttggttcggagcatacgagaagtttggtaacttcagcatcgaggcagagagtccaaaactgattgcttgggctaagaggtgtatggagaaagagagtgtgtctaagtctctccctgaccaagagaaaattgttgcgtacgccgctgagtttaggaagaataatctctgatctgaataaaaccttgtttgtgccttctgtttcggatgatgctgtagtctgtttttaactttggtttttgtgtgtttcctaataatgcgtgagggcaagcgtcggcctttgtgtggtggtgttgtatggatcctgagtaatgcatttttaaataaaatatattttcaaat

SEQ ID NO: 21008 - protein, 217 aa, Zea mays subsp. mays; identical to SEQ ID NO: 7301
  peptide (1)..(217): Ceres Seq. ID no. 15177483
  misc_feature (85)..(193): Pfam Name: Pfam Description:  Glutathione S-transferase, C-terminal domain
  misc_feature (1)..(217): NCBI GI NO: 15218311 NR Description: glutathione transferase, putative
  misc_feature (1)..(217): NCBI GI NO: 21592638 NR Description: 2
  misc_feature (1)..(214): NCBI GI NO: 18411929 NR Description: glutathione transferase, putative
  misc_feature (1)..(214): NCBI GI NO: 21592644 NR Description: glutathione transferase, putative
  misc_feature (1)..(214): NCBI GI NO: 8052534 NR Description: F3F9.11 [Arabidopsis thaliana]
  misc_feature (1)..(214): NCBI GI NO: 15220041 NR Description: glutathione transferase, putative
  misc_feature (1)..(168): NCBI GI NO: 8052534 NR Description: F3F9.11 [Arabidopsis thaliana]
  misc_feature (1)..(214): NCBI GI NO: 7447307 NR Description: glutathione transferase (EC 2.5.1.18) - papaya
  misc_feature (1)..(214): NCBI GI NO: 8052535 NR Description: F3F9.13 [Arabidopsis thaliana]
  misc_feature (1)..(214): NCBI GI NO: 15218304 NR Description: glutathione transferase, putative

SEQ ID NO: 21009 - protein, 204 aa, Zea mays subsp. mays; identical to SEQ ID NO: 7302
  peptide (1)..(204): Ceres Seq. ID no. 15177484
  misc_feature (72)..(180): Pfam Name: Pfam Description:  Glutathione S-transferase, C-terminal domain
  misc_feature (1)..(204): NCBI GI NO: 15218311 NR Description: glutathione transferase, putative
  misc_feature (1)..(204): NCBI GI NO: 21592638 NR Description: 2
  misc_feature (1)..(201): NCBI GI NO: 18411929 NR Description: glutathione transferase, putative
  misc_feature (1)..(201): NCBI GI NO: 21592644 NR Description: glutathione transferase, putative
  misc_feature (1)..(201): NCBI GI NO: 8052534 NR Description: F3F9.11 [Arabidopsis thaliana]
  misc_feature (1)..(201): NCBI GI NO: 15220041 NR Description: glutathione transferase, putative
  misc_feature (1)..(155): NCBI GI NO: 8052534 NR Description: F3F9.11 [Arabidopsis thaliana]
  misc_feature (1)..(201): NCBI GI NO: 7447307 NR Description: glutathione transferase (EC 2.5.1.18) - papaya
  misc_feature (1)..(201): NCBI GI NO: 8052535 NR Description: F3F9.13 [Arabidopsis thaliana]
  misc_feature (1)..(201): NCBI GI NO: 15218304 NR Description: glutathione transferase, putative

SEQ ID NO: 21010 - protein, 201 aa, Zea mays subsp. mays; identical to SEQ ID NO: 7303
  peptide (1)..(201): Ceres Seq. ID no. 15177485
  misc_feature (69)..(177): Pfam Name: Pfam Description:  Glutathione S-transferase, C-terminal domain
  misc_feature (1)..(201): NCBI GI NO: 15218311 NR Description: glutathione transferase, putative
  misc_feature (1)..(201): NCBI GI NO: 21592638 NR Description: 2
  misc_feature (1)..(198): NCBI GI NO: 18411929 NR Description: glutathione transferase, putative
  misc_feature (1)..(198): NCBI GI NO: 21592644 NR Description: glutathione transferase, putative
  misc_feature (1)..(198): NCBI GI NO: 8052534 NR Description: F3F9.11 [Arabidopsis thaliana]
  misc_feature (1)..(198): NCBI GI NO: 15220041 NR Description: glutathione transferase, putative
  misc_feature (1)..(152): NCBI GI NO: 8052534 NR Description: F3F9.11 [Arabidopsis thaliana]
  misc_feature (1)..(198): NCBI GI NO: 7447307 NR Description: glutathione transferase (EC 2.5.1.18) - papaya
  misc_feature (1)..(198): NCBI GI NO: 8052535 NR Description: F3F9.13 [Arabidopsis thaliana]
  misc_feature (1)..(198): NCBI GI NO: 15218304 NR Description: glutathione transferase, putative

SEQ ID NO: 21011 - DNA, 680 bp, Zea mays subsp. mays
  misc_feature (1)..(680): Ceres Seq. ID no. 15177478
acataaaccctagaaacgtctaagtgcgatctctctctctcttcctaaagatatgcgggtggtgaatccatccttgtgtatcgacggtgcacaaccattggtgtacctccctcctcctcgctcttctcattttcccgctaatggaaaattccatgggcgttgttactatcctacgagcgtttctatgcaatcccagagcaaaagatctgtctttgcatgtaacgctgccctgaatgcaaaatgcagtcaagggcaaacacagactgttactcgggaatcaccgacaattacacaagctcctacacatggaaaggagaaatccccaaagcttgatgacggtggaagcgggttcccaccccgggatgatggtggtggtgggggcggaggaggcggtggagagagcttctctggtggattcttccttttcgggtttcttatgttcatgggttacttgaaagatttggagggcgaacatgaaaccagccactagctagagaggggaggaaggggaaacagacagacagagagatctctagacgaaatagagataataaaaagtttatactagtgctagcaattaggcacatatttgtatgaatcagacagatttttgttatctcgacataaaacaaaatgcttcatctttataacaaatgttcaaagatttggaactgaggttt

SEQ ID NO: 21012 - protein, 145 aa, Zea mays subsp. mays
  peptide (1)..(145): Ceres Seq. ID no. 15177479
  misc_feature (47)..(145): NCBI GI NO: 25372889 NR Description: protein F26G16.9 [imported] - Arabidopsis thaliana
  misc_feature (50)..(142): NCBI GI NO: 18405726 NR Description: expressed protein [Arabidopsis thaliana]
MRVVNPSLCIDGAQPLVYLPPPRSSHFPANGKFHGRCYYPTSVSMQSQSKRSVFACNAALNAKCSQGQTQTVTRESPTITQAPTHGKEKSPKLDDGGSGFPPRDDGGGGGGGGGGESFSGGFFLFGFLMFMGYLKDLEGEHETSH

SEQ ID NO: 21013 - protein, 101 aa, Zea mays subsp. mays
  peptide (1)..(101): Ceres Seq. ID no. 15177480
  misc_feature (3)..(101): NCBI GI NO: 25372889 NR Description: protein F26G16.9 [imported] - Arabidopsis thaliana
  misc_feature (6)..(98): NCBI GI NO: 18405726 NR Description: expressed protein [Arabidopsis thaliana]
MQSQSKRSVFACNAALNAKCSQGQTQTVTRESPTITQAPTHGKEKSPKLDDGGSGFPPRDDGGGGGGGGGGESFSGGFFLFGFLMFMGYLKDLEGEHETSH

SEQ ID NO: 21014 - protein, 73 aa, Zea mays subsp. mays
  peptide (1)..(73): Ceres Seq. ID no. 15177481
MQNAVKGKHRLLLGNHRQLHKLLHMERRNPQSLMTVEAGSHPGMMVVVGAEEAVERASLVDSSFSGFLCSWVT

SEQ ID NO: 21015 - DNA, 686 bp, Zea mays subsp. mays
  misc_feature (1)..(686): Ceres Seq. ID no. 15176141
gtgtgcactgtgcttcatcatctcctcctcctatcgtctacatttgtttcttggcgtacacgtttctacaggttaccagaaacctaacaatgagccaacctcccgtcggtgttcctcctcctcaaggttatccgccggagggatattcaaaagatgcttatccaccgcaaggatatcctcatcctcctcagcagggatatccgccacaaggctaccctccgcagcagggatatccgccgcaaggctaccctccacaaggctatccaccgcagcaaggttatccaccacagcagggatatcctccgcaagggtatcctcctccgtatgcgcctcaatatcctccgccaccgacgcagcagcatcagccacaaaagtccggtcctgggtgtctagaaggatgtcttgctgctctgtgctgttgctgtctcttggatgcttgcttctgactggagtatgtgctctcagagcttttgatttatttgcaagaaaactgtttagcaacacaagaaccttaagtaacttatgggatataaaaatgatggattgctgatactataatctcttgtctattcgctatctttcgttatgtttttgtcttcttgagttcataaattatgtttctatccacgttctagctcaggtttggatttaagactaatgggaatgtaaattgcttggtatgaatg

SEQ ID NO: 21016 - protein, 182 aa, Zea mays subsp. mays
  peptide (1)..(182): Ceres Seq. ID no. 15176142
CALCFIISSSYRLHLFLGVHVSTGYQKPNNEPTSRRCSSSSRLSAGGIFKRCLSTARISSSSSAGISATRLPSAAGISAARLPSTRLSTAARLSTTAGISSARVSSSVCASISSATDAAASATKVRSWVSRRMSCCSVLLLSLGCLLLTGVCALRAFDLFARKLFSNTRTLSNLWDIKMMDC

SEQ ID NO: 21017 - protein, 147 aa, Zea mays subsp. mays
  peptide (1)..(147): Ceres Seq. ID no. 15176143
  misc_feature (6)..(117): Pfam Name: Pfam Description:  Extensin-like region
  misc_feature (54)..(147): NCBI GI NO: 15227350 NR Description: proline-rich protein family [Arabidopsis thaliana]
  misc_feature (32)..(147): NCBI GI NO: 21554421 NR Description: unknown [Arabidopsis thaliana]
  misc_feature (32)..(147): NCBI GI NO: 15229624 NR Description: proline-rich protein family [Arabidopsis thaliana]
  misc_feature (54)..(147): NCBI GI NO: 40538901 NR Description: expressed protein
  misc_feature (30)..(132): NCBI GI NO: 167666 NR Description: annexin VII
  misc_feature (33)..(132): NCBI GI NO: 113965 NR Description: Annexin A7 (Annexin VII) (Synexin)
  misc_feature (33)..(132): NCBI GI NO: 671859 NR Description: annexin VII [Dictyostelium discoideum]
  misc_feature (33)..(127): NCBI GI NO: 113965 NR Description: Annexin A7 (Annexin VII) (Synexin)
  misc_feature (33)..(127): NCBI GI NO: 6469591 NR Description: unknown [Eufolliculina uhligi]
  misc_feature (33)..(114): NCBI GI NO: 6469591 NR Description: unknown [Eufolliculina uhligi]
VHCASSSPPPIVYICFLAYTFLQVTRNLTMSQPPVGVPPPQGYPPEGYSKDAYPPQGYPHPPQQGYPPQGYPPQQGYPPQGYPPQGYPPQQGYPPQQGYPPQGYPPPYAPQYPPPPTQQHQPQKSGPGCLEGCLAALCCCCLLDACF

SEQ ID NO: 21018 - protein, 118 aa, Zea mays subsp. mays
  peptide (1)..(118): Ceres Seq. ID no. 15176144
  misc_feature (1)..(86): Pfam Name: Pfam Description:  Extensin-like region
  misc_feature (25)..(118): NCBI GI NO: 15227350 NR Description: proline-rich protein family [Arabidopsis thaliana]
  misc_feature (3)..(118): NCBI GI NO: 21554421 NR Description: unknown [Arabidopsis thaliana]
  misc_feature (3)..(118): NCBI GI NO: 15229624 NR Description: proline-rich protein family [Arabidopsis thaliana]
  misc_feature (25)..(118): NCBI GI NO: 40538901 NR Description: expressed protein
  misc_feature (1)..(103): NCBI GI NO: 167666 NR Description: annexin VII
  misc_feature (4)..(103): NCBI GI NO: 113965 NR Description: Annexin A7 (Annexin VII) (Synexin)
  misc_feature (4)..(103): NCBI GI NO: 671859 NR Description: annexin VII [Dictyostelium discoideum]
  misc_feature (4)..(98): NCBI GI NO: 113965 NR Description: Annexin A7 (Annexin VII) (Synexin)
  misc_feature (4)..(98): NCBI GI NO: 6469591 NR Description: unknown [Eufolliculina uhligi]
  misc_feature (4)..(85): NCBI GI NO: 6469591 NR Description: unknown [Eufolliculina uhligi]
MSQPPVGVPPPQGYPPEGYSKDAYPPQGYPHPPQQGYPPQGYPPQQGYPPQGYPPQGYPPQQGYPPQQGYPPQGYPPPYAPQYPPPPTQQHQPQKSGPGCLEGCLAALCCCCLLDACF

SEQ ID NO: 21019 - DNA, 898 bp, Zea mays subsp. mays
  misc_feature (1)..(898): Ceres Seq. ID no. 15178302
ctagattcttctgtaaccttcgtgtatttcctttttgccagcttcctcgtgaacacggtaaaacctttcacaaacatatataaatctctaagcctttcttcgtctgtttgcatctaaattttttcaacttccttctctttcgtcttcttctcagttaaagatccttcgtttcactcttacgatctttgtttacgtgatgtcttcggaggcggaggagtttgcagagttttcggctttgttcgagaggatgatccgacgaggcgaaggtctctctcgattcttacctctgatcttagctctagccggtgaagccgacgaggacggtgaatcaaccgatcagacggcgacacatagagagatcgtcatcgatccggtgaacaggagagtggtgatgatcagatcagctttgggggagttcttgaacggcgacttttcagagaaacaagggaggtcgccggcgtcgaaattgtcggtggagagcttgccacgtgtcgtgatcgggaaagatgaggagagaagaggctcgtgtccgatctgtctcgaggagtggtcggaaggtgacgtggcggcggagatgccgtgtaagcacaggttccactcgaagtgcgtggaggagtggctggggagacacgccacgtgtccgctgtgtaggtacgagatgcctgttgaagaagtggaggaagagaagaaagtaggggtttggattgggttctctgttggtaacggcgaaaggagaaacggagaagaagacggaggaggaagaagcgagggtggctcgaacactcgagatgaaacagaggcttaggtttcagttttagaaagaaacttgtgtatattcttttcgttttttttctttccattgtctttccaatttcaataaaagattggttgatgaact

SEQ ID NO: 21020 - protein, 202 aa, Zea mays subsp. mays
  peptide (1)..(202): Ceres Seq. ID no. 15178303
  misc_feature (111)..(151): Pfam Name: RING finger Pfam Description: Zinc finger, C3HC4 type
  misc_feature (1)..(181): NCBI GI NO: 15223679 NR Description: zinc finger
  misc_feature (4)..(192): NCBI GI NO: 18396059 NR Description: zinc finger
  misc_feature (4)..(192): NCBI GI NO: 21554312 NR Description: unknown [Arabidopsis thaliana]
  misc_feature (76)..(188): NCBI GI NO: 34903272 NR Description: unnamed protein product
  misc_feature (35)..(165): NCBI GI NO: 29477113 NR Description: Similar to hypothetical protein LOC51255
  misc_feature (87)..(165): NCBI GI NO: 7706039 NR Description: hypothetical protein LOC51255 [Homo sapiens]
  misc_feature (87)..(165): NCBI GI NO: 34855987 NR Description: similar to RIKEN cDNA 2500002L14; EST C77350
  misc_feature (87)..(165): NCBI GI NO: 12846584 NR Description: unnamed protein product [Mus musculus]
  misc_feature (76)..(183): NCBI GI NO: 15232595 NR Description: expressed protein [Arabidopsis thaliana]
  misc_feature (84)..(166): NCBI GI NO: 18921323 NR Description: putative zinc finger protein [Oryza sativa]
MSSEAEEFAEFSALFERMIRRGEGLSRFLPLILALAGEADEDGESTDQTATHREIVIDPVNRRVVMIRSALGEFLNGDFSEKQGRSPASKLSVESLPRVVIGKDEERRGSCPICLEEWSEGDVAAEMPCKHRFHSKCVEEWLGRHATCPLCRYEMPVEEVEEEKKVGVWIGFSVGNGERRNGEEDGGGRSEGGSNTRDETEA

SEQ ID NO: 21021 - protein, 185 aa, Zea mays subsp. mays
  peptide (1)..(185): Ceres Seq. ID no. 15178304
  misc_feature (94)..(134): Pfam Name: RING finger Pfam Description: Zinc finger, C3HC4 type
  misc_feature (1)..(164): NCBI GI NO: 15223679 NR Description: zinc finger
  misc_feature (1)..(175): NCBI GI NO: 18396059 NR Description: zinc finger
  misc_feature (1)..(175): NCBI GI NO: 21554312 NR Description: unknown [Arabidopsis thaliana]
  misc_feature (59)..(171): NCBI GI NO: 34903272 NR Description: unnamed protein product
  misc_feature (18)..(148): NCBI GI NO: 29477113 NR Description: Similar to hypothetical protein LOC51255
  misc_feature (70)..(148): NCBI GI NO: 7706039 NR Description: hypothetical protein LOC51255 [Homo sapiens]
  misc_feature (70)..(148): NCBI GI NO: 34855987 NR Description: similar to RIKEN cDNA 2500002L14; EST C77350
  misc_feature (70)..(148): NCBI GI NO: 12846584 NR Description: unnamed protein product [Mus musculus]
  misc_feature (59)..(166): NCBI GI NO: 15232595 NR Description: expressed protein [Arabidopsis thaliana]
  misc_feature (67)..(149): NCBI GI NO: 18921323 NR Description: putative zinc finger protein [Oryza sativa]
MIRRGEGLSRFLPLILALAGEADEDGESTDQTATHREIVIDPVNRRVVMIRSALGEFLNGDFSEKQGRSPASKLSVESLPRVVIGKDEERRGSCPICLEEWSEGDVAAEMPCKHRFHSKCVEEWLGRHATCPLCRYEMPVEEVEEEKKVGVWIGFSVGNGERRNGEEDGGGRSEGGSNTRDETEA

SEQ ID NO: 21022 - protein, 137 aa, Zea mays subsp. mays
  peptide (1)..(137): Ceres Seq. ID no. 15178305
  misc_feature (46)..(86): Pfam Name: RING finger Pfam Description: Zinc finger, C3HC4 type
  misc_feature (1)..(116): NCBI GI NO: 15223679 NR Description: zinc finger
  misc_feature (1)..(127): NCBI GI NO: 18396059 NR Description: zinc finger
  misc_feature (1)..(127): NCBI GI NO: 21554312 NR Description: unknown [Arabidopsis thaliana]
  misc_feature (11)..(123): NCBI GI NO: 34903272 NR Description: unnamed protein product
  misc_feature (1)..(100): NCBI GI NO: 29477113 NR Description: Similar to hypothetical protein LOC51255
  misc_feature (22)..(100): NCBI GI NO: 7706039 NR Description: hypothetical protein LOC51255 [Homo sapiens]
  misc_feature (22)..(100): NCBI GI NO: 34855987 NR Description: similar to RIKEN cDNA 2500002L14; EST C77350
  misc_feature (22)..(100): NCBI GI NO: 12846584 NR Description: unnamed protein product [Mus musculus]
  misc_feature (11)..(118): NCBI GI NO: 15232595 NR Description: expressed protein [Arabidopsis thaliana]
  misc_feature (19)..(101): NCBI GI NO: 18921323 NR Description: putative zinc finger protein [Oryza sativa]
MIRSALGEFLNGDFSEKQGRSPASKLSVESLPRVVIGKDEERRGSCPICLEEWSEGDVAAEMPCKHRFHSKCVEEWLGRHATCPLCRYEMPVEEVEEEKKVGVWIGFSVGNGERRNGEEDGGGRSEGGSNTRDETEA

SEQ ID NO: 21023 - DNA, 978 bp, Zea mays subsp. mays
  misc_feature (1)..(978): Ceres Seq. ID no. 15178931
atccatttcatcaacttcaacgagagagagagagagagagagagagtaaagggagagtaaccaaaccctaatttctatctccttctcctctgaactgaaaagttccctctgctcgaaaagctcccatggcgtttcgaagaaactgtgggttggagctcttggtagcttctttaactctaaccttcgctctgattcagctagtggaggcgaactcagatggagatgctctatacgctcttcgacagagcttgtcggatccagaccatgtgctccagagctgggatcagaatcttgtcaatccttgcacctggttccatgtctcctgtaaccaagacagccgcgtcactcgtgtggatttgggtaattcaaacctttctggacatcttacccctgagcttggcaagctcgaacatctacagtatctggagctgtacaaaaacaacatccaaggaactataccttctgaacttggaaaccttaaaagtctcatcagcttggatctttacaacaacaatcttaccgggcagattcctacttctttggggaagttgaagtctctggtctttctccgcctcaatgacaaccggttgactggttcaatccctagagagctcaccaaaattccaagccttaaagtctttgatgtgtcgaacaatgatttgtgtggaactatcccaatagaaggaccttttgaacacattcctttggagaactttgagaacaactcgagattggagggaccggagttactcggtcttgcaagctacgacaccaactgcaactgagacaactgagacaacacttcaccacttttatcaaatctcacatctattattattgtaataagtatatatatgtcagtagttgaaaaacaaagaagcaaaaaaagagcccaaagactggtgtctgtttaagtaaaaacatatacatgcgactttcgtgtgttttgcattgagaagtaatattggtattggtagc

SEQ ID NO: 21024 - protein, 219 aa, Zea mays subsp. mays
  peptide (1)..(219): Ceres Seq. ID no. 15178932
  misc_feature (168)..(200): Pfam Name: Pfam Description:  Leucine Rich Repeat
  misc_feature (5)..(218): NCBI GI NO: 15242153 NR Description: leucine rich repeat protein (LRP), putative
  misc_feature (5)..(218): NCBI GI NO: 34146800 NR Description: At3g43740 [Arabidopsis thaliana]
  misc_feature (21)..(219): NCBI GI NO: 30385250 NR Description: leucine-rich repeat protein
  misc_feature (16)..(219): NCBI GI NO: 7489030 NR Description: leucine-rich repeat protein LRP - tomato
  misc_feature (13)..(218): NCBI GI NO: 29468120 NR Description: leucine-rich repeat protein [Oryza sativa]
  misc_feature (28)..(218): NCBI GI NO: 34903344 NR Description: unnamed protein product
  misc_feature (13)..(218): NCBI GI NO: 27497122 NR Description: floral organ regulator 1
  misc_feature (4)..(206): NCBI GI NO: 21740899 NR Description: OSJNBa0036B21.13
  misc_feature (26)..(206): NCBI GI NO: 40253600 NR Description: putative somatic embryogenesis receptor kinase 1
  misc_feature (11)..(206): NCBI GI NO: 15081616 NR Description: At1g71830/F14O23_24 [Arabidopsis thaliana]
MAFRRNCGLELLVASLTLTFALIQLVEANSDGDALYALRQSLSDPDHVLQSWDQNLVNPCTWFHVSCNQDSRVTRVDLGNSNLSGHLTPELGKLEHLQYLELYKNNIQGTIPSELGNLKSLISLDLYNNNLTGQIPTSLGKLKSLVFLRLNDNRLTGSIPRELTKIPSLKVFDVSNNDLCGTIPIEGPFEHIPLENFENNSRLEGPELLGLASYDTNCN

SEQ ID NO: 21025 - protein, 111 aa, Zea mays subsp. mays
  peptide (1)..(111): Ceres Seq. ID no. 15178933
MEMLYTLFDRACRIQTMCSRAGIRILSILAPGSMSPVTKTAASLVWIWVIQTFLDILPLSLASSNIYSIWSCTKTTSKELYLLNLETLKVSSAWIFTTTILPGRFLLLWGS

SEQ ID NO: 21026 - protein, 109 aa, Zea mays subsp. mays
  peptide (1)..(109): Ceres Seq. ID no. 15178934
MLYTLFDRACRIQTMCSRAGIRILSILAPGSMSPVTKTAASLVWIWVIQTFLDILPLSLASSNIYSIWSCTKTTSKELYLLNLETLKVSSAWIFTTTILPGRFLLLWGS

SEQ ID NO: 21027 - DNA, 642 bp, Zea mays subsp. mays
  misc_feature (1)..(642): Ceres Seq. ID no. 15177455
aatatcggctagggatgacgacgaggatggcaggattcggcgaggaagaaagtgggatctcagacagtgagatcatagagggttttctgcggccaaagattgaaggagaagcagtggcgattccgggattgatagtggaattgggggaggagttgtacactcgagagccatggctccttccgcagacagcccatcccatccttaaccctcgagagtggctctacttggggaaaccgaatcgaaataatttccccgttgatcacgaagggtgttgggttcgcattggaagtgccatcttgatccgatccgaggagactgatgaaataattgggggaacgtcgagattcagatatcgcttcaggaacaagggggacaaacatgctctgaggtggagtaattggttcatgaaagagtatcgtctctttaacccaacccctcatgttatttgcaagattactgaaaagctgtgctaagataaatttgtttctgttttaatatttttatttttgcaatggactcagattccattccattccttgtgtttcattcgaattttaataaatcaataagttcgggtggtttgattgattctgaatgtgctaatgaaaacctgtgctaagataaatttgtttctgttttaat

SEQ ID NO: 21028 - protein, 156 aa, Zea mays subsp. mays
  peptide (1)..(156): Ceres Seq. ID no. 15177456
  misc_feature (20)..(141): Pfam Name: NAM Pfam Description: No apical meristem
  misc_feature (19)..(141): NCBI GI NO: 18407972 NR Description: No apical meristem (NAM) protein family
  misc_feature (14)..(151): NCBI GI NO: 15238786 NR Description: No apical meristem (NAM) protein family
YRLGMTTRMAGFGEEESGISDSEIIEGFLRPKIEGEAVAIPGLIVELGEELYTREPWLLPQTAHPILNPREWLYLGKPNRNNFPVDHEGCWVRIGSAILIRSEETDEIIGGTSRFRYRFRNKGDKHALRWSNWFMKEYRLFNPTPHVICKITEKLC

SEQ ID NO: 21029 - protein, 152 aa, Zea mays subsp. mays
  peptide (1)..(152): Ceres Seq. ID no. 15177457
  misc_feature (16)..(137): Pfam Name: NAM Pfam Description: No apical meristem
  misc_feature (15)..(137): NCBI GI NO: 18407972 NR Description: No apical meristem (NAM) protein family
  misc_feature (10)..(147): NCBI GI NO: 15238786 NR Description: No apical meristem (NAM) protein family
MTTRMAGFGEEESGISDSEIIEGFLRPKIEGEAVAIPGLIVELGEELYTREPWLLPQTAHPILNPREWLYLGKPNRNNFPVDHEGCWVRIGSAILIRSEETDEIIGGTSRFRYRFRNKGDKHALRWSNWFMKEYRLFNPTPHVICKITEKLC

SEQ ID NO: 21030 - protein, 148 aa, Zea mays subsp. mays
  peptide (1)..(148): Ceres Seq. ID no. 15177458
  misc_feature (12)..(133): Pfam Name: NAM Pfam Description: No apical meristem
  misc_feature (11)..(133): NCBI GI NO: 18407972 NR Description: No apical meristem (NAM) protein family
  misc_feature (6)..(143): NCBI GI NO: 15238786 NR Description: No apical meristem (NAM) protein family
MAGFGEEESGISDSEIIEGFLRPKIEGEAVAIPGLIVELGEELYTREPWLLPQTAHPILNPREWLYLGKPNRNNFPVDHEGCWVRIGSAILIRSEETDEIIGGTSRFRYRFRNKGDKHALRWSNWFMKEYRLFNPTPHVICKITEKLC

SEQ ID NO: 21031 - DNA, 789 bp, Zea mays subsp. mays
  misc_feature (1)..(789): Ceres Seq. ID no. 15179439
atcagaagaagaagtatctttgttttcgctctcttcttctactttcgatctttgacgattagaaaaggaaagtgatggctgccgttaatgggtaccaaggaaacactccggcggcgtcaaagcaatctgctcctccgactaagactgttgatagccaatctgttctcaaaaggctgcaatctgaactaatgggcttgatgatgggtggtgacccgggaatatcggctttcccagaggaagacaacatattctgttggaaagggacaataacaggaagcaaagatactgtgtttgaaggaactgagtacagactctcactctctttctccaatgactatcctttcaagcctcctaagatcaagttccacactggttgcttccaccccaatgttgatctctacggcaatatctgtttggacattcttcaggataaatggtcgtctgcatacgatgtcaggacaatactactatcgattcagagccttttgggagaaccgaacatcagctcaccattgaacactcaagcagcgcagctctggagcaaccaagaagagtataggaagatggttgagaagctctacaagcctcccagtgcatgatagcttcaggatgtgtcattcctttgctctacaatttgtttctgatcatcaacagttttatctgtagcagtttgtgtcattcatttgctctataatttgtttctgatcttcaacagttttacctgagccaaatattgatattgatgtgagcttttcaaaaattaatcagaatgatacacacattcttctt

SEQ ID NO: 21032 - protein, 174 aa, Zea mays subsp. mays; identical to SEQ ID NO: 11156
  peptide (1)..(174): Ceres Seq. ID no. 15179440
  misc_feature (1)..(174): NCBI GI NO: 18403097 NR Description: ubiquitin-conjugating enzyme (UBC20)
  misc_feature (1)..(174): NCBI GI NO: 21618179 NR Description: E2, ubiquitin-conjugating enzyme, putative
  misc_feature (1)..(174): NCBI GI NO: 18402475 NR Description: ubiquitin-conjugating enzyme (UBC19)
  misc_feature (15)..(174): NCBI GI NO: 25293673 NR Description: hypothetical protein F17J6.3
  misc_feature (30)..(174): NCBI GI NO: 9454557 NR Description: Putative ubiquitin carrier protein
  misc_feature (9)..(171): NCBI GI NO: 34903234 NR Description: unnamed protein product
  misc_feature (8)..(170): NCBI GI NO: 3915196 NR Description: Ubiquitin-conjugating enzyme E2-C
  misc_feature (22)..(170): NCBI GI NO: 4388942 NR Description: E2-C
  misc_feature (4)..(170): NCBI GI NO: 31216813 NR Description: ENSANGP00000020629 [Anopheles gambiae]
  misc_feature (11)..(142): NCBI GI NO: 32417826 NR Description: hypothetical protein [Neurospora crassa]

SEQ ID NO: 21033 - protein, 136 aa, Zea mays subsp. mays; identical to SEQ ID NO: 11157
  peptide (1)..(136): Ceres Seq. ID no. 15179441
  misc_feature (1)..(136): NCBI GI NO: 18403097 NR Description: ubiquitin-conjugating enzyme (UBC20)
  misc_feature (1)..(136): NCBI GI NO: 21618179 NR Description: E2, ubiquitin-conjugating enzyme, putative
  misc_feature (1)..(136): NCBI GI NO: 18402475 NR Description: ubiquitin-conjugating enzyme (UBC19)
  misc_feature (1)..(136): NCBI GI NO: 25293673 NR Description: hypothetical protein F17J6.3
  misc_feature (1)..(136): NCBI GI NO: 9454557 NR Description: Putative ubiquitin carrier protein
  misc_feature (1)..(133): NCBI GI NO: 34903234 NR Description: unnamed protein product
  misc_feature (1)..(132): NCBI GI NO: 3915196 NR Description: Ubiquitin-conjugating enzyme E2-C
  misc_feature (1)..(132): NCBI GI NO: 4388942 NR Description: E2-C
  misc_feature (1)..(132): NCBI GI NO: 31216813 NR Description: ENSANGP00000020629 [Anopheles gambiae]
  misc_feature (1)..(104): NCBI GI NO: 32417826 NR Description: hypothetical protein [Neurospora crassa]

SEQ ID NO: 21034 - protein, 133 aa, Zea mays subsp. mays; identical to SEQ ID NO: 11158
  peptide (1)..(133): Ceres Seq. ID no. 15179442
  misc_feature (1)..(133): NCBI GI NO: 18403097 NR Description: ubiquitin-conjugating enzyme (UBC20)
  misc_feature (1)..(133): NCBI GI NO: 21618179 NR Description: E2, ubiquitin-conjugating enzyme, putative
  misc_feature (1)..(133): NCBI GI NO: 18402475 NR Description: ubiquitin-conjugating enzyme (UBC19)
  misc_feature (1)..(133): NCBI GI NO: 25293673 NR Description: hypothetical protein F17J6.3
  misc_feature (1)..(133): NCBI GI NO: 9454557 NR Description: Putative ubiquitin carrier protein
  misc_feature (1)..(130): NCBI GI NO: 34903234 NR Description: unnamed protein product
  misc_feature (1)..(129): NCBI GI NO: 3915196 NR Description: Ubiquitin-conjugating enzyme E2-C
  misc_feature (1)..(129): NCBI GI NO: 4388942 NR Description: E2-C
  misc_feature (1)..(129): NCBI GI NO: 31216813 NR Description: ENSANGP00000020629 [Anopheles gambiae]
  misc_feature (1)..(101): NCBI GI NO: 32417826 NR Description: hypothetical protein [Neurospora crassa]

SEQ ID NO: 21035 - DNA, 785 bp, Zea mays subsp. mays
  misc_feature (1)..(785): Ceres Seq. ID no. 15174289
aaaatctagggttgatgagccaccgtgtatcgatcctctcttctcatttatctcccgtcatggcttcagagaaagaggctgctttagccgccactccttccgattctcccaccatatttgacaagatcatcagtaaagaaattccatccacagttgtttttgaggatgacaaggtcttggcctttagggacataactccacagggtcctgttcacatcctcctcattccaaaagtgagggatggtttaactggcctctctaaggctgaggagaggcacatcgacatcttgggccgccttctctacactgccaagcttgtagccaaacaagaaggcctagatgaaggtttcagaattgtgatcaacgatggtcctcaaggctatcagtcggtgtatcacattcatgttcatctcattggaggacgccaaatgaactggcctcctggctaaaagggtttgatcatctactagtgattgttgtcctggttataagaggaaccctaccctgagtttgctattgtcttcttctttctgaataaaaagagtgtgacataactttttatgattgttatgcgaaaccttggtctatggtttgaagagaatatttgactgttctcttttctggaaccctcttttttattgttgacttggtaaaacatttcaatggtaaaaaagcgtcaaataaatgagtgaatgttagagagttttctgtgtaagatttttagtgtaataatcatctttaggaaaataactaaggaatatactttgtaatattccctctatttc

SEQ ID NO: 21036 - protein, 148 aa, Zea mays subsp. mays
  peptide (1)..(148): Ceres Seq. ID no. 15174290
  misc_feature (5)..(148): NCBI GI NO: 18410510 NR Description: protein kinase C inhibitor-related protein
  misc_feature (20)..(148): NCBI GI NO: 11260559 NR Description: protein kinase C inhibitor-like protein -Arabidopsis thaliana
  misc_feature (20)..(148): NCBI GI NO: 629858 NR Description: protein kinase C inhibitor - maize
  misc_feature (37)..(148): NCBI GI NO: 1177046 NR Description: 14 KD ZINC-BINDING PROTEIN
  misc_feature (20)..(148): NCBI GI NO: 1177047 NR Description: 14 KD ZINC-BINDING PROTEIN
  misc_feature (25)..(148): NCBI GI NO: 15221629 NR Description: protein kinase C inhibitor
  misc_feature (25)..(137): NCBI GI NO: 25518144 NR Description: F28K20.9 protein - Arabidopsis thaliana
  misc_feature (128)..(148): NCBI GI NO: 25518144 NR Description: F28K20.9 protein - Arabidopsis thaliana
  misc_feature (20)..(148): NCBI GI NO: 31217157 NR Description: ENSANGP00000012999 [Anopheles gambiae]
  misc_feature (20)..(148): NCBI GI NO: 23612841 NR Description: protein kinase c inhibitor-like protein, putative
NLGLMSHRVSILSSHLSPVMASEKEAALAATPSDSPTIFDKIISKEIPSTVVFEDDKVLAFRDITPQGPVHILLIPKVRDGLTGLSKAEERHIDILGRLLYTAKLVAKQEGLDEGFRIVINDGPQGYQSVYHIHVHLIGGRQMNWPPG

SEQ ID NO: 21037 - protein, 144 aa, Zea mays subsp. mays
  peptide (1)..(144): Ceres Seq. ID no. 15174291
  misc_feature (1)..(144): NCBI GI NO: 18410510 NR Description: protein kinase C inhibitor-related protein
  misc_feature (16)..(144): NCBI GI NO: 11260559 NR Description: protein kinase C inhibitor-like protein -Arabidopsis thaliana
  misc_feature (16)..(144): NCBI GI NO: 629858 NR Description: protein kinase C inhibitor - maize
  misc_feature (33)..(144): NCBI GI NO: 1177046 NR Description: 14 KD ZINC-BINDING PROTEIN
  misc_feature (16)..(144): NCBI GI NO: 1177047 NR Description: 14 KD ZINC-BINDING PROTEIN
  misc_feature (21)..(144): NCBI GI NO: 15221629 NR Description: protein kinase C inhibitor
  misc_feature (21)..(133): NCBI GI NO: 25518144 NR Description: F28K20.9 protein - Arabidopsis thaliana
  misc_feature (124)..(144): NCBI GI NO: 25518144 NR Description: F28K20.9 protein - Arabidopsis thaliana
  misc_feature (16)..(144): NCBI GI NO: 31217157 NR Description: ENSANGP00000012999 [Anopheles gambiae]
  misc_feature (16)..(144): NCBI GI NO: 23612841 NR Description: protein kinase c inhibitor-like protein, putative
MSHRVSILSSHLSPVMASEKEAALAATPSDSPTIFDKIISKEIPSTVVFEDDKVLAFRDITPQGPVHILLIPKVRDGLTGLSKAEERHIDILGRLLYTAKLVAKQEGLDEGFRIVINDGPQGYQSVYHIHVHLIGGRQMNWPPG

SEQ ID NO: 21038 - protein, 129 aa, Zea mays subsp. mays
  peptide (1)..(129): Ceres Seq. ID no. 15174292
  misc_feature (1)..(129): NCBI GI NO: 18410510 NR Description: protein kinase C inhibitor-related protein
  misc_feature (1)..(129): NCBI GI NO: 11260559 NR Description: protein kinase C inhibitor-like protein -Arabidopsis thaliana
  misc_feature (1)..(129): NCBI GI NO: 629858 NR Description: protein kinase C inhibitor - maize
  misc_feature (18)..(129): NCBI GI NO: 1177046 NR Description: 14 KD ZINC-BINDING PROTEIN
  misc_feature (1)..(129): NCBI GI NO: 1177047 NR Description: 14 KD ZINC-BINDING PROTEIN
  misc_feature (6)..(129): NCBI GI NO: 15221629 NR Description: protein kinase C inhibitor
  misc_feature (6)..(118): NCBI GI NO: 25518144 NR Description: F28K20.9 protein - Arabidopsis thaliana
  misc_feature (109)..(129): NCBI GI NO: 25518144 NR Description: F28K20.9 protein - Arabidopsis thaliana
  misc_feature (1)..(129): NCBI GI NO: 31217157 NR Description: ENSANGP00000012999 [Anopheles gambiae]
  misc_feature (1)..(129): NCBI GI NO: 23612841 NR Description: protein kinase c inhibitor-like protein, putative
MASEKEAALAATPSDSPTIFDKIISKEIPSTVVFEDDKVLAFRDITPQGPVHILLIPKVRDGLTGLSKAEERHIDILGRLLYTAKLVAKQEGLDEGFRIVINDGPQGYQSVYHIHVHLIGGRQMNWPPG

SEQ ID NO: 21039 - DNA, 931 bp, Zea mays subsp. mays
  misc_feature (1)..(931): Ceres Seq. ID no. 15178935
ttgtccgaaaaaatctcagagctccgctgcaatggaggtcactgcgaacgaaccagatatgagaagctccaaatcctctccgagagtaacgataccgaacttcttcgtgtcgctctcctcggcatttacgcaaacaccttccgtgcgtacgaacaagcccagtttgcggcttctaccaccagcttcagactccgtcaagttgattcaagacttccatcgttctctactctccgcgaccgagaaattcgcaggcttcttccactcgctcgccgctgagaaccctctgtttcaggaagcggttcgcttgtcctccgagtttcgcggtgtttgcgacgagattcgtttgaggaacactacaagggttaggcttgccatgtcggatcacgggtttgcagcggttctgcctggagattcagttgcaggaatggtggttgctaacgggttgataaacttcctcaacatctacaacaccgtacttgttgtccgtctagtactcacctggttccccactgctcctcctgccattgttaaccccctcagcactctatgtgatccatacttgaacatattccggggagtcataccgcctcttggaggattagatttgtctcccattttggccttccttgttctcaacgccttcaccagcagtgctatggcgcttccttgtgagctcccaccagctgaaggagtgacttctccatcatcttgtgagacaaagtggatgaggaggagaaggttgagtagcaaccagaaccaaacaccgagctctgcttaaaccttattaaaaaaacaactcctcttttcttcgcttcaacatgtgacatatacttttcgagtaattttattcatctgcatctctggattctgagttttattttgtgtgtaaattttctttataaaatgaataaaaagaattgttactaaaaac

SEQ ID NO: 21040 - protein, 258 aa, Zea mays subsp. mays
  peptide (1)..(258): Ceres Seq. ID no. 15178936
  misc_feature (11)..(258): NCBI GI NO: 22326932 NR Description: expressed protein [Arabidopsis thaliana]
  misc_feature (113)..(251): NCBI GI NO: 27436744 NR Description: Hypothetical protein
  misc_feature (131)..(211): NCBI GI NO: 22298077 NR Description: ORF_ID:tsr0534~hypothetical protein
  misc_feature (148)..(230): NCBI GI NO: 17229553 NR Description: hypothetical protein [Nostoc sp. PCC 7120]
  misc_feature (144)..(211): NCBI GI NO: 37523109 NR Description: hypothetical protein [Gloeobacter violaceus]
  misc_feature (152)..(212): NCBI GI NO: 33861467 NR Description: conserved hypothetical membrane protein
  misc_feature (152)..(212): NCBI GI NO: 33240375 NR Description: Uncharacterized YGGT family conserved membrane
  misc_feature (143)..(216): NCBI GI NO: 15234345 NR Description: expressed protein [Arabidopsis thaliana]
  misc_feature (143)..(216): NCBI GI NO: 21592772 NR Description: unknown [Arabidopsis thaliana]
  misc_feature (143)..(216): NCBI GI NO: 18397948 NR Description: expressed protein [Arabidopsis thaliana]
CPKKSQSSAAMEVTANEPDMRSSKSSPRVTIPNFFVSLSSAFTQTPSVRTNKPSLRLLPPASDSVKLIQDFHRSLLSATEKFAGFFHSLAAENPLFQEAVRLSSEFRGVCDEIRLRNTTRVRLAMSDHGFAAVLPGDSVAGMVVANGLINFLNIYNTVLVVRLVLTWFPTAPPAIVNPLSTLCDPYLNIFRGVIPPLGGLDLSPILAFLVLNAFTSSAMALPCELPPAEGVTSPSSCETKWMRRRRLSSNQNQTPSSA

SEQ ID NO: 21041 - protein, 248 aa, Zea mays subsp. mays
  peptide (1)..(248): Ceres Seq. ID no. 15178937
  misc_feature (1)..(248): NCBI GI NO: 22326932 NR Description: expressed protein [Arabidopsis thaliana]
  misc_feature (103)..(241): NCBI GI NO: 27436744 NR Description: Hypothetical protein
  misc_feature (121)..(201): NCBI GI NO: 22298077 NR Description: ORF_ID:tsr0534~hypothetical protein
  misc_feature (138)..(220): NCBI GI NO: 17229553 NR Description: hypothetical protein [Nostoc sp. PCC 7120]
  misc_feature (134)..(201): NCBI GI NO: 37523109 NR Description: hypothetical protein [Gloeobacter violaceus]
  misc_feature (142)..(202): NCBI GI NO: 33861467 NR Description: conserved hypothetical membrane protein
  misc_feature (142)..(202): NCBI GI NO: 33240375 NR Description: Uncharacterized YGGT family conserved membrane
  misc_feature (133)..(206): NCBI GI NO: 15234345 NR Description: expressed protein [Arabidopsis thaliana]
  misc_feature (133)..(206): NCBI GI NO: 21592772 NR Description: unknown [Arabidopsis thaliana]
  misc_feature (133)..(206): NCBI GI NO: 18397948 NR Description: expressed protein [Arabidopsis thaliana]
MEVTANEPDMRSSKSSPRVTIPNFFVSLSSAFTQTPSVRTNKPSLRLLPPASDSVKLIQDFHRSLLSATEKFAGFFHSLAAENPLFQEAVRLSSEFRGVCDEIRLRNTTRVRLAMSDHGFAAVLPGDSVAGMVVANGLINFLNIYNTVLVVRLVLTWFPTAPPAIVNPLSTLCDPYLNIFRGVIPPLGGLDLSPILAFLVLNAFTSSAMALPCELPPAEGVTSPSSCETKWMRRRRLSSNQNQTPSSA

SEQ ID NO: 21042 - protein, 239 aa, Zea mays subsp. mays
  peptide (1)..(239): Ceres Seq. ID no. 15178938
  misc_feature (1)..(239): NCBI GI NO: 22326932 NR Description: expressed protein [Arabidopsis thaliana]
  misc_feature (94)..(232): NCBI GI NO: 27436744 NR Description: Hypothetical protein
  misc_feature (112)..(192): NCBI GI NO: 22298077 NR Description: ORF_ID:tsr0534~hypothetical protein
  misc_feature (129)..(211): NCBI GI NO: 17229553 NR Description: hypothetical protein [Nostoc sp. PCC 7120]
  misc_feature (125)..(192): NCBI GI NO: 37523109 NR Description: hypothetical protein [Gloeobacter violaceus]
  misc_feature (133)..(193): NCBI GI NO: 33861467 NR Description: conserved hypothetical membrane protein
  misc_feature (133)..(193): NCBI GI NO: 33240375 NR Description: Uncharacterized YGGT family conserved membrane
  misc_feature (124)..(197): NCBI GI NO: 15234345 NR Description: expressed protein [Arabidopsis thaliana]
  misc_feature (124)..(197): NCBI GI NO: 21592772 NR Description: unknown [Arabidopsis thaliana]
  misc_feature (124)..(197): NCBI GI NO: 18397948 NR Description: expressed protein [Arabidopsis thaliana]
MRSSKSSPRVTIPNFFVSLSSAFTQTPSVRTNKPSLRLLPPASDSVKLIQDFHRSLLSATEKFAGFFHSLAAENPLFQEAVRLSSEFRGVCDEIRLRNTTRVRLAMSDHGFAAVLPGDSVAGMVVANGLINFLNIYNTVLVVRLVLTWFPTAPPAIVNPLSTLCDPYLNIFRGVIPPLGGLDLSPILAFLVLNAFTSSAMALPCELPPAEGVTSPSSCETKWMRRRRLSSNQNQTPSSA

SEQ ID NO: 21043 - DNA, 951 bp, Zea mays subsp. mays
  misc_feature (1)..(951): Ceres Seq. ID no. 15174380
aaactctccaccttcactctctaccttcctgacgtgactcctctctctctctctccctccatcaatggccaccacaaactctctccaacaccaccaccactcctcctcttcttaccaccgtcacaatctccatccccagtctcacgtcgtaccatcttctctctccctcaaacacccctcctccaccgccacattctcctcactcatctgctcctcctcctcctcctccgtcgtctccgccgctctcaccacaaacgcctcctccgtaaccgcagaaacctccaccgagttcgacgtcctagcgacccacctcaccaaccaagacttccgcaaagcagacgaagaaacccgtcgccttctcatccagatagccggagaagccgccgtgaaacgcggctacgtcttcttctccgaggtgaaatcaatctccgtccaagatcttcaagccatcgacaacctctggaccaaacacagcgacgggaggttcggatacagcgtgcaacgcaaactctggttgaaagtcaagaaagacttcacgagattcttcattaaagtcgagtggatgaagcttctcgatacggaggtggttcagtacaactacagagctttccctgacgagttccagtgggagcttaacgacgaaacgcctcttggacacttgccgctcacaaacgcgttaagaggaacgcagcttctgaaatgcgttttgagccatcctgcgtttgagatagatggcgatgacatcgaggaagcgggagaagctgagaacagaggtgtgggtggtaaagcaaagacaaaagacacgacagtgtttaaaactgattacagcttctgatgtctttttttttttttaatttatatttgcttctcaatgggattatgaatgtatgaacatgatcaaatcgttagttaatgaatataaacctaaggtctttattggtttatcaatgt

SEQ ID NO: 21044 - protein, 256 aa, Zea mays subsp. mays
  peptide (1)..(256): Ceres Seq. ID no. 15174381
  misc_feature (1)..(256): NCBI GI NO: 17380924 NR Description: unknown protein [Arabidopsis thaliana]
  misc_feature (1)..(256): NCBI GI NO: 15231674 NR Description: expressed protein [Arabidopsis thaliana]
  misc_feature (1)..(256): NCBI GI NO: 32816239 NR Description: GUN4 mutant [Arabidopsis thaliana]
  misc_feature (48)..(220): NCBI GI NO: 23042866 NR Description: hypothetical protein
  misc_feature (70)..(220): NCBI GI NO: 22299137 NR Description: ORF_ID:tlr1594~hypothetical protein
  misc_feature (69)..(227): NCBI GI NO: 33861481 NR Description: conserved hypothetical protein
  misc_feature (68)..(220): NCBI GI NO: 17229318 NR Description: hypothetical protein [Nostoc sp. PCC 7120]
  misc_feature (44)..(221): NCBI GI NO: 11465668 NR Description: ORF238 [Porphyra purpurea]
  misc_feature (67)..(218): NCBI GI NO: 33865601 NR Description: conserved hypothetical protein
  misc_feature (83)..(220): NCBI GI NO: 16329174 NR Description: hypothetical protein [Synechocystis sp. PCC 6803]
MATTNSLQHHHHSSSSYHRHNLHPQSHVVPSSLSLKHPSSTATFSSLICSSSSSSVVSAALTTNASSVTAETSTEFDVLATHLTNQDFRKADEETRRLLIQIAGEAAVKRGYVFFSEVKSISVQDLQAIDNLWTKHSDGRFGYSVQRKLWLKVKKDFTRFFIKVEWMKLLDTEVVQYNYRAFPDEFQWELNDETPLGHLPLTNALRGTQLLKCVLSHPAFEIDGDDIEEAGEAENRGVGGKAKTKDTTVFKTDYSF

SEQ ID NO: 21045 - protein, 183 aa, Zea mays subsp. mays
  peptide (1)..(183): Ceres Seq. ID no. 15174382
KLSTFTLYLPDVTPLSLSPSINGHHKLSPTPPPLLLFLPPSQSPSPVSRRTIFSLPQTPLLHRHILLTHLLLLLLLRRLRRSHHKRLLRNRRNLHRVRRPSDPPHQPRLPQSRRRNPSPSHPDSRRSRRETRLRLLLRGEINLRPRSSSHRQPLDQTQRREVRIQRATQTLVESQERLHEILH

SEQ ID NO: 21046 - DNA, 783 bp, Zea mays subsp. mays
  misc_feature (1)..(783): Ceres Seq. ID no. 15178906
cttcttcttcttcttcttcttcttcgcctctctctagctaaaagctatcgcgcgaattgatcgatccctgacaagatccattcatccaccatcgggcgccatggaggattccacggccacgacgacgacgtcttcgactcatcattatttcaccattttcacgaattaccctctcatctcctccctcacggctttcaccatcgctcaattcatcaaactcttcacctcctggtatagggaaaggagatgggatctcaaacagcttattggctccggaggaatgccttcttctcattcagctaccgttactgctctcgctgtagcaatcggtttacaagagggcttcggtggttctcatttcgctattgctttgatcttagcttctgttgtgatgtatgatgctactggtgtcaggttacacgctggtcgccaagctgaggttctcaatcagattgtctacgaacttcctgcagaacatcccttggctgaaagcagaccattgcgtgaacttctcggccatacccctccccaggtcattgctggtggaatgcttggaagtgtcacagcagtcactggatatttatttaccagggtagctactagctaacgtaaacgaaccaatcatagacgcaactcgcctgcttcattgcctagtgaaaccactcgacagtggacagaaccgaagcagatttacattcaaagccttagtttgattcactacatatataatcgtattcatgaactttctatttgaaatgtaaagaaaacttgaatcatcataac

SEQ ID NO: 21047 - protein, 168 aa, Zea mays subsp. mays
  peptide (1)..(168): Ceres Seq. ID no. 15178907
  misc_feature (18)..(161): Pfam Name: Pfam Description:  Divergent PAP2 family
  misc_feature (1)..(168): NCBI GI NO: 18395459 NR Description: expressed protein [Arabidopsis thaliana]
  misc_feature (1)..(168): NCBI GI NO: 21555270 NR Description: unknown [Arabidopsis thaliana]
  misc_feature (1)..(168): NCBI GI NO: 7486375 NR Description: hypothetical protein F3I6
  misc_feature (1)..(145): NCBI GI NO: 9743358 NR Description: F21J9.1 [Arabidopsis thaliana]
  misc_feature (1)..(145): NCBI GI NO: 26449729 NR Description: unknown protein [Arabidopsis thaliana]
  misc_feature (1)..(166): NCBI GI NO: 15220480 NR Description: F12A21.27 [Arabidopsis thaliana]
  misc_feature (1)..(145): NCBI GI NO: 12324675 NR Description: unknown protein [Arabidopsis thaliana]
  misc_feature (13)..(156): NCBI GI NO: 30686309 NR Description: expressed protein [Arabidopsis thaliana]
  misc_feature (22)..(157): NCBI GI NO: 38344227 NR Description: OJ991113_30.3
  misc_feature (22)..(168): NCBI GI NO: 29150195 NR Description: putative protein
MEDSTATTTTSSTHHYFTIFTNYPLISSLTAFTIAQFIKLFTSWYRERRWDLKQLIGSGGMPSSHSATVTALAVAIGLQEGFGGSHFAIALILASVVMYDATGVRLHAGRQAEVLNQIVYELPAEHPLAESRPLRELLGHTPPQVIAGGMLGSVTAVTGYLFTRVATS

SEQ ID NO: 21048 - protein, 108 aa, Zea mays subsp. mays
  peptide (1)..(108): Ceres Seq. ID no. 15178908
  misc_feature (1)..(101): Pfam Name: Pfam Description:  Divergent PAP2 family
  misc_feature (1)..(108): NCBI GI NO: 18395459 NR Description: expressed protein [Arabidopsis thaliana]
  misc_feature (1)..(108): NCBI GI NO: 21555270 NR Description: unknown [Arabidopsis thaliana]
  misc_feature (1)..(108): NCBI GI NO: 7486375 NR Description: hypothetical protein F3I6
  misc_feature (1)..(85): NCBI GI NO: 9743358 NR Description: F21J9.1 [Arabidopsis thaliana]
  misc_feature (1)..(85): NCBI GI NO: 26449729 NR Description: unknown protein [Arabidopsis thaliana]
  misc_feature (1)..(106): NCBI GI NO: 15220480 NR Description: F12A21.27 [Arabidopsis thaliana]
  misc_feature (1)..(85): NCBI GI NO: 12324675 NR Description: unknown protein [Arabidopsis thaliana]
  misc_feature (1)..(96): NCBI GI NO: 30686309 NR Description: expressed protein [Arabidopsis thaliana]
  misc_feature (1)..(97): NCBI GI NO: 38344227 NR Description: OJ991113_30.3
  misc_feature (1)..(108): NCBI GI NO: 29150195 NR Description: putative protein
MPSSHSATVTALAVAIGLQEGFGGSHFAIALILASVVMYDATGVRLHAGRQAEVLNQIVYELPAEHPLAESRPLRELLGHTPPQVIAGGMLGSVTAVTGYLFTRVATS

SEQ ID NO: 21049 - DNA, 714 bp, Zea mays subsp. mays
  misc_feature (1)..(714): Ceres Seq. ID no. 15178866
acctttccccgagttccgacaatggcttcagcatcagcgacagccactcttctcaagcccactcctcttccaccccataaaccgatcatcaccgcctccgtatctcctcctctccctcctccacgtcgccacaacctcctccgccgagatttgctctccttatccgccgcatcgacgctacttctaacgcaatctctcccgtttctagctccgtcgccggcatccgccgccgaggacgaagagtacgtgaaagatacgtcggcggtgatctccaaagttcggacgacgctctcgatggagaggacagatccgaatgtggcggatgcggtggcggagctgagagaagtgtcgaactcgtgggttgctaagtacaggaaggagaaagctcttctcgggaaagcgtcgttcagggatatttactcggcgttgaatgctgtgtctggacattatgtgagttttggtccgacggctccgatcccggcgaagaggaaggcgaggattcttgaagagatggagactgctgagaaagctctctctagaggaagataaatttacagtgagacctaaccatttcttcttcttcttctccagttccttgtcgatgaagttttctttttacctttaaatgcttatatgagaagagaaacttgaaattgctcgtttgtttttgtaaaatacttcatgataatttacttaattatcatttacaataac

SEQ ID NO: 21050 - protein, 182 aa, Zea mays subsp. mays
  peptide (1)..(182): Ceres Seq. ID no. 15178867
  misc_feature (8)..(182): NCBI GI NO: 18379115 NR Description: photosystem II protein family
  misc_feature (8)..(102): NCBI GI NO: 11692876 NR Description: At1g03600 [Arabidopsis thaliana]
  misc_feature (60)..(180): NCBI GI NO: 22300006 NR Description: photosystem II 11 kD protein
  misc_feature (72)..(181): NCBI GI NO: 17228753 NR Description: photosystem II 11 kD protein [Nostoc sp. PCC 7120]
  misc_feature (57)..(181): NCBI GI NO: 23125315 NR Description: hypothetical protein [Nostoc punctiforme]
  misc_feature (47)..(181): NCBI GI NO: 33866304 NR Description: possible photosystem II Psb27 protein
TFPRVPTMASASATATLLKPTPLPPHKPIITASVSPPLPPPRRHNLLRRDLLSLSAASTLLLTQSLPFLAPSPASAAEDEEYVKDTSAVISKVRTTLSMERTDPNVADAVAELREVSNSWVAKYRKEKALLGKASFRDIYSALNAVSGHYVSFGPTAPIPAKRKARILEEMETAEKALSRGR

SEQ ID NO: 21051 - protein, 175 aa, Zea mays subsp. mays
  peptide (1)..(175): Ceres Seq. ID no. 15178868
  misc_feature (1)..(175): NCBI GI NO: 18379115 NR Description: photosystem II protein family
  misc_feature (1)..(95): NCBI GI NO: 11692876 NR Description: At1g03600 [Arabidopsis thaliana]
  misc_feature (53)..(173): NCBI GI NO: 22300006 NR Description: photosystem II 11 kD protein
  misc_feature (65)..(174): NCBI GI NO: 17228753 NR Description: photosystem II 11 kD protein [Nostoc sp. PCC 7120]
  misc_feature (50)..(174): NCBI GI NO: 23125315 NR Description: hypothetical protein [Nostoc punctiforme]
  misc_feature (40)..(174): NCBI GI NO: 33866304 NR Description: possible photosystem II Psb27 protein
MASASATATLLKPTPLPPHKPIITASVSPPLPPPRRHNLLRRDLLSLSAASTLLLTQSLPFLAPSPASAAEDEEYVKDTSAVISKVRTTLSMERTDPNVADAVAELREVSNSWVAKYRKEKALLGKASFRDIYSALNAVSGHYVSFGPTAPIPAKRKARILEEMETAEKALSRGR

SEQ ID NO: 21052 - DNA, 752 bp, Zea mays subsp. mays; identical to SEQ ID NO: 20579
  misc_feature (1)..(752): Ceres Seq. ID no. 15177467

SEQ ID NO: 21053 - protein, 203 aa, Zea mays subsp. mays; identical to SEQ ID NO: 20580
  peptide (1)..(203): Ceres Seq. ID no. 15177468
  misc_feature (67)..(140): Pfam Name: Pfam Description:  Protease inhibitor/seed storage/LTP family
  misc_feature (24)..(203): NCBI GI NO: 15221052 NR Description: lipid transfer protein family
  misc_feature (24)..(162): NCBI GI NO: 18410388 NR Description: lipid transfer protein family
  misc_feature (24)..(162): NCBI GI NO: 21593596 NR Description: lipid transfer protein, putative
  misc_feature (24)..(140): NCBI GI NO: 25406276 NR Description: probable lipid transfer protein F6D5.5
  misc_feature (60)..(163): NCBI GI NO: 15219496 NR Description: protease inhibitor/seed storage/lipid transfer
  misc_feature (60)..(144): NCBI GI NO: 25406275 NR Description: hypothetical protein F6D5.6
  misc_feature (24)..(201): NCBI GI NO: 25553588 NR Description: OJ1656_E11.14
  misc_feature (61)..(201): NCBI GI NO: 7484433 NR Description: lipid transfer protein - Norway spruce
  misc_feature (67)..(162): NCBI GI NO: 15221585 NR Description: protease inhibitor/seed storage/lipid transfer
  misc_feature (67)..(171): NCBI GI NO: 30696757 NR Description: protease inhibitor/seed storage/lipid transfer

SEQ ID NO: 21054 - protein, 180 aa, Zea mays subsp. mays; identical to SEQ ID NO: 20581
  peptide (1)..(180): Ceres Seq. ID no. 15177469
  misc_feature (44)..(117): Pfam Name: Pfam Description:  Protease inhibitor/seed storage/LTP family
  misc_feature (1)..(180): NCBI GI NO: 15221052 NR Description: lipid transfer protein family
  misc_feature (1)..(139): NCBI GI NO: 18410388 NR Description: lipid transfer protein family
  misc_feature (1)..(139): NCBI GI NO: 21593596 NR Description: lipid transfer protein, putative
  misc_feature (1)..(117): NCBI GI NO: 25406276 NR Description: probable lipid transfer protein F6D5.5
  misc_feature (37)..(140): NCBI GI NO: 15219496 NR Description: protease inhibitor/seed storage/lipid transfer
  misc_feature (37)..(121): NCBI GI NO: 25406275 NR Description: hypothetical protein F6D5.6
  misc_feature (1)..(178): NCBI GI NO: 25553588 NR Description: OJ1656_E11.14
  misc_feature (38)..(178): NCBI GI NO: 7484433 NR Description: lipid transfer protein - Norway spruce
  misc_feature (44)..(139): NCBI GI NO: 15221585 NR Description: protease inhibitor/seed storage/lipid transfer
  misc_feature (44)..(148): NCBI GI NO: 30696757 NR Description: protease inhibitor/seed storage/lipid transfer

SEQ ID NO: 21055 - protein, 153 aa, Zea mays subsp. mays; identical to SEQ ID NO: 20582
  peptide (1)..(153): Ceres Seq. ID no. 15177470
  misc_feature (17)..(90): Pfam Name: Pfam Description:  Protease inhibitor/seed storage/LTP family
  misc_feature (1)..(153): NCBI GI NO: 15221052 NR Description: lipid transfer protein family
  misc_feature (1)..(112): NCBI GI NO: 18410388 NR Description: lipid transfer protein family
  misc_feature (1)..(112): NCBI GI NO: 21593596 NR Description: lipid transfer protein, putative
  misc_feature (1)..(90): NCBI GI NO: 25406276 NR Description: probable lipid transfer protein F6D5.5
  misc_feature (10)..(113): NCBI GI NO: 15219496 NR Description: protease inhibitor/seed storage/lipid transfer
  misc_feature (10)..(94): NCBI GI NO: 25406275 NR Description: hypothetical protein F6D5.6
  misc_feature (1)..(151): NCBI GI NO: 25553588 NR Description: OJ1656_E11.14
  misc_feature (11)..(151): NCBI GI NO: 7484433 NR Description: lipid transfer protein - Norway spruce
  misc_feature (17)..(112): NCBI GI NO: 15221585 NR Description: protease inhibitor/seed storage/lipid transfer
  misc_feature (17)..(121): NCBI GI NO: 30696757 NR Description: protease inhibitor/seed storage/lipid transfer

SEQ ID NO: 21056 - DNA, 730 bp, Zea mays subsp. mays
  misc_feature (1)..(730): Ceres Seq. ID no. 15176713
actcttctgtcgctagtttcctcgcgcacatcaattaagcacgagaaatggcttgtgttcgttcgatacggtctttaacttccgtcactcagtctcctcgatatgtttcacgcaccacaggcattgtcatgtcttcatgctctgttcatcccatcgcgccctcctccttcactggctctcccatttccctcccgagagtccatccaccaactccaacaactcttataagaccgaggagtctcgtcccaatcacgatgatggtcaaacctacgctccagttcatccaagggacggatgagctgactatccctgacgtcaagctgactcggtctagggacgggtctaacggaatggcactcttctccttcgaccaaccatcagttttcgactccagcggtgaggtcggtgagataacgggtttgtacatgattgatgaggaaggtgtgatacagtcgacggatgtgaacgcgagattcgtgaacgggaaaccggaagggattgtggcaaagcacgtgatgcggacgccgaaggaatgggacaggttcatgaggtttatggagcggtactctgaccagaacggcttacagttcgttaagaagcaatgaggttgggggacttttctatgagcaaaatgtgtatgttacatttttttttaaactctcttggtttatgatatttttttctcttagttttgatctttacttgagtttcaatttttcaatgctacttt

SEQ ID NO: 21057 - protein, 185 aa, Zea mays subsp. mays
  peptide (1)..(185): Ceres Seq. ID no. 15176714
  misc_feature (73)..(185): Pfam Name: Pfam Description:  Photosystem II reaction centre W protein, PsbW
  misc_feature (1)..(185): NCBI GI NO: 7488014 NR Description: photosystem II protein W homolog T5F17
  misc_feature (1)..(185): NCBI GI NO: 18417239 NR Description: photosystem II protein W - like
  misc_feature (68)..(184): NCBI GI NO: 34907246 NR Description: photosystem II protein W-like protein
  misc_feature (87)..(184): NCBI GI NO: 19880501 NR Description: saline responsive OSSRII protein [Oryza sativa]
  misc_feature (76)..(183): NCBI GI NO: 11467474 NR Description: photosystem II protein W [Odontella sinensis]
  misc_feature (76)..(183): NCBI GI NO: 11467617 NR Description: photosystem II protein W [Guillardia theta]
  misc_feature (75)..(183): NCBI GI NO: 11465813 NR Description: photosystem II protein W [Porphyra purpurea]
  misc_feature (76)..(183): NCBI GI NO: 11467376 NR Description: photosystem II protein W [Cyanophora paradoxa]
  misc_feature (76)..(185): NCBI GI NO: 22298036 NR Description: photosystem II reaction center W protein
MACVRSIRSLTSVTQSPRYVSRTTGIVMSSCSVHPIAPSSFTGSPISLPRVHPPTPTTLIRPRSLVPITMMVKPTLQFIQGTDELTIPDVKLTRSRDGSNGMALFSFDQPSVFDSSGEVGEITGLYMIDEEGVIQSTDVNARFVNGKPEGIVAKHVMRTPKEWDRFMRFMERYSDQNGLQFVKKQ

SEQ ID NO: 21058 - protein, 158 aa, Zea mays subsp. mays
  peptide (1)..(158): Ceres Seq. ID no. 15176715
  misc_feature (46)..(158): Pfam Name: Pfam Description:  Photosystem II reaction centre W protein, PsbW
  misc_feature (1)..(158): NCBI GI NO: 7488014 NR Description: photosystem II protein W homolog T5F17
  misc_feature (1)..(158): NCBI GI NO: 18417239 NR Description: photosystem II protein W - like
  misc_feature (41)..(157): NCBI GI NO: 34907246 NR Description: photosystem II protein W-like protein
  misc_feature (60)..(157): NCBI GI NO: 19880501 NR Description: saline responsive OSSRII protein [Oryza sativa]
  misc_feature (49)..(156): NCBI GI NO: 11467474 NR Description: photosystem II protein W [Odontella sinensis]
  misc_feature (49)..(156): NCBI GI NO: 11467617 NR Description: photosystem II protein W [Guillardia theta]
  misc_feature (48)..(156): NCBI GI NO: 11465813 NR Description: photosystem II protein W [Porphyra purpurea]
  misc_feature (49)..(156): NCBI GI NO: 11467376 NR Description: photosystem II protein W [Cyanophora paradoxa]
  misc_feature (49)..(158): NCBI GI NO: 22298036 NR Description: photosystem II reaction center W protein
MSSCSVHPIAPSSFTGSPISLPRVHPPTPTTLIRPRSLVPITMMVKPTLQFIQGTDELTIPDVKLTRSRDGSNGMALFSFDQPSVFDSSGEVGEITGLYMIDEEGVIQSTDVNARFVNGKPEGIVAKHVMRTPKEWDRFMRFMERYSDQNGLQFVKKQ

SEQ ID NO: 21059 - protein, 116 aa, Zea mays subsp. mays
  peptide (1)..(116): Ceres Seq. ID no. 15176716
  misc_feature (4)..(116): Pfam Name: Pfam Description:  Photosystem II reaction centre W protein, PsbW
  misc_feature (1)..(116): NCBI GI NO: 7488014 NR Description: photosystem II protein W homolog T5F17
  misc_feature (1)..(116): NCBI GI NO: 18417239 NR Description: photosystem II protein W - like
  misc_feature (1)..(115): NCBI GI NO: 34907246 NR Description: photosystem II protein W-like protein
  misc_feature (18)..(115): NCBI GI NO: 19880501 NR Description: saline responsive OSSRII protein [Oryza sativa]
  misc_feature (7)..(114): NCBI GI NO: 11467474 NR Description: photosystem II protein W [Odontella sinensis]
  misc_feature (7)..(114): NCBI GI NO: 11467617 NR Description: photosystem II protein W [Guillardia theta]
  misc_feature (6)..(114): NCBI GI NO: 11465813 NR Description: photosystem II protein W [Porphyra purpurea]
  misc_feature (7)..(114): NCBI GI NO: 11467376 NR Description: photosystem II protein W [Cyanophora paradoxa]
  misc_feature (7)..(116): NCBI GI NO: 22298036 NR Description: photosystem II reaction center W protein
MMVKPTLQFIQGTDELTIPDVKLTRSRDGSNGMALFSFDQPSVFDSSGEVGEITGLYMIDEEGVIQSTDVNARFVNGKPEGIVAKHVMRTPKEWDRFMRFMERYSDQNGLQFVKKQ

SEQ ID NO: 21060 - DNA, 1045 bp, Zea mays subsp. mays
  misc_feature (1)..(1045): Ceres Seq. ID no. 15176130
attttgaaaaaatcaaaactttctataatttgtttcaagtaagaagaagaaaggagaagaatcaatgaatccagattccgattaccctcacctccccaacatcaagatccaccacccttcctcccctcgccactcccaccaccactcctcctccactccctccgccgccactcccacccccaccgccggagcccgccgtaaaatcggagtcgccgttgacctctccgaagaaagcgccttcgccgtccgctgggccgtcgatcactacatccgccccggagacgccgtcgtcatcctccacgtctcccccacctccgtcctcttcggcgccgactggggccccctccctctccagtctccgcctcctccgggccaccccacccaggaggatttcgacgccttcacgtcctccaaggtctccgatctcgcgaagcccctgaaggaggcggggttccctcacaagatccagatagtgaaggaccacgacatgagggagaggctgtgtttggaaatcgagaggctgaatctgagcgcggtgatcatggggagcagagggtttggagctgagaagaagagagggagcgatgggaagcttggctctgttagtgattattgtgttcaccactgtgtttgtcctgttgttgtcgtgaggtatcctgatgatcgtgacggtcctgctgctcctggggaggtgggtggaggtacgagggaagctattgtcactgtgaaggcggggagggatgatgatggcgaggatgatgaagctcataaggctaagattgctgctgcttccgctcatcatgaacacgtcaaagatgaataatgcgccttagtatctcattggattcaccctcttgcaaggttggatgattcgctatcttttgcaatcatcaagtccctggaatctcctctgaatttattatttcttcaatgtctttttttatatattattgactcgtatgtatgattttcgcattaaaacaatgaaattgctactaacattaaaaaaaaaaaaaatccttttaggattataatcttcatagtg

SEQ ID NO: 21061 - protein, 252 aa, Zea mays subsp. mays
  peptide (1)..(252): Ceres Seq. ID no. 15176131
  misc_feature (43)..(196): Pfam Name: Pfam Description:  Universal stress protein family
  misc_feature (1)..(252): NCBI GI NO: 18416966 NR Description: expressed protein [Arabidopsis thaliana]
  misc_feature (1)..(250): NCBI GI NO: 7486798 NR Description: hypothetical protein M4I22
  misc_feature (1)..(230): NCBI GI NO: 8885586 NR Description: gene_id:F24B18
  misc_feature (1)..(230): NCBI GI NO: 18423628 NR Description: expressed protein [Arabidopsis thaliana]
  misc_feature (30)..(237): NCBI GI NO: 25402657 NR Description: protein T23J18.3 [imported] - Arabidopsis thaliana
  misc_feature (30)..(237): NCBI GI NO: 30682187 NR Description: expressed protein [Arabidopsis thaliana]
  misc_feature (17)..(216): NCBI GI NO: 34910112 NR Description: B1100D10.31
  misc_feature (107)..(237): NCBI GI NO: 28971968 NR Description: CHP-rich zinc finger protein-like
  misc_feature (107)..(237): NCBI GI NO: 33146953 NR Description: CHP-rich zinc finger protein-like
  misc_feature (39)..(161): NCBI GI NO: 15232490 NR Description: CHP-rich zinc finger protein, putative
MNPDSDYPHLPNIKIHHPSSPRHSHHHSSSTPSAATPTPTAGARRKIGVAVDLSEESAFAVRWAVDHYIRPGDAVVILHVSPTSVLFGADWGPLPLQSPPPPGHPTQEDFDAFTSSKVSDLAKPLKEAGFPHKIQIVKDHDMRERLCLEIERLNLSAVIMGSRGFGAEKKRGSDGKLGSVSDYCVHHCVCPVVVVRYPDDRDGPAAPGEVGGGTREAIVTVKAGRDDDGEDDEAHKAKIAAASAHHEHVKDE

SEQ ID NO: 21062 - DNA, 787 bp, Zea mays subsp. mays
  misc_feature (1)..(787): Ceres Seq. ID no. 15176615
caatcggaatcttactctttctctatctcacctggaaaaaaaatggcgatgtgggtatttgggtacggatctctaatttggaaaacgggttttcctttcgacgatcgtcttcctggtttcatcaaaaactatcgccgtgttttccaccaaggtagtactgatcatagaggaacccctgaattcccgggaagaacagtgacattagagcctgcacctggagaaatctgttggggagtcgcttacaagataaccaaagaggaagacaaaaaagacgctttattacatctggaagtgagggagaagcaatatgaccagaaagagtatcttgatttcttcatagacattcatgactcagaaccagctgtatcaggagtgatggtatatatagcttcttctgacaagaagagcaacaacaactacttaggaccagctccttttgaagacattgccaaacagatagtaaaagcggaaggaccttcagggtcaaacagagactatctgttcaaccttgaagaggctctcgttcaactcgggtttaaggataaacatgtcacagatcttgctacgcatgttaggcttattctttcggcgactcaggatgccgccaccaaggatgtctagattccctgtgttttttatttgtccaaaaagaacaaaactgaattgataagagatgctgctgcattgcatcccatattcgatgtgttaactatcaatcaactctattgttattcatattttgatcacatcgtggtacggatttaaatatagtgtgattcagcgattc

SEQ ID NO: 21063 - protein, 206 aa, Zea mays subsp. mays
  peptide (1)..(206): Ceres Seq. ID no. 15176616
  misc_feature (17)..(194): Pfam Name: Pfam Description:  ChaC-like protein
  misc_feature (15)..(200): NCBI GI NO: 18401334 NR Description: expressed protein [Arabidopsis thaliana]
  misc_feature (17)..(200): NCBI GI NO: 12083292 NR Description: unknown protein [Arabidopsis thaliana]
  misc_feature (15)..(192): NCBI GI NO: 38344831 NR Description: OSJNBa0064H22.12
  misc_feature (15)..(206): NCBI GI NO: 15239626 NR Description: expressed protein [Arabidopsis thaliana]
  misc_feature (15)..(206): NCBI GI NO: 21593515 NR Description: unknown [Arabidopsis thaliana]
  misc_feature (15)..(206): NCBI GI NO: 18417778 NR Description: expressed protein [Arabidopsis thaliana]
  misc_feature (15)..(205): NCBI GI NO: 27525010 NR Description: putative cation transporter [Beta procumbens]
  misc_feature (87)..(200): NCBI GI NO: 25349686 NR Description: hypothetical protein T12C22.6
  misc_feature (118)..(206): NCBI GI NO: 7486723 NR Description: hypothetical protein F9D12
  misc_feature (15)..(90): NCBI GI NO: 7486723 NR Description: hypothetical protein F9D12
QSESYSFSISPGKKMAMWVFGYGSLIWKTGFPFDDRLPGFIKNYRRVFHQGSTDHRGTPEFPGRTVTLEPAPGEICWGVAYKITKEEDKKDALLHLEVREKQYDQKEYLDFFIDIHDSEPAVSGVMVYIASSDKKSNNNYLGPAPFEDIAKQIVKAEGPSGSNRDYLFNLEEALVQLGFKDKHVTDLATHVRLILSATQDAATKDV

SEQ ID NO: 21064 - protein, 192 aa, Zea mays subsp. mays
  peptide (1)..(192): Ceres Seq. ID no. 15176617
  misc_feature (3)..(180): Pfam Name: Pfam Description:  ChaC-like protein
  misc_feature (1)..(186): NCBI GI NO: 18401334 NR Description: expressed protein [Arabidopsis thaliana]
  misc_feature (3)..(186): NCBI GI NO: 12083292 NR Description: unknown protein [Arabidopsis thaliana]
  misc_feature (1)..(178): NCBI GI NO: 38344831 NR Description: OSJNBa0064H22.12
  misc_feature (1)..(192): NCBI GI NO: 15239626 NR Description: expressed protein [Arabidopsis thaliana]
  misc_feature (1)..(192): NCBI GI NO: 21593515 NR Description: unknown [Arabidopsis thaliana]
  misc_feature (1)..(192): NCBI GI NO: 18417778 NR Description: expressed protein [Arabidopsis thaliana]
  misc_feature (1)..(191): NCBI GI NO: 27525010 NR Description: putative cation transporter [Beta procumbens]
  misc_feature (73)..(186): NCBI GI NO: 25349686 NR Description: hypothetical protein T12C22.6
  misc_feature (104)..(192): NCBI GI NO: 7486723 NR Description: hypothetical protein F9D12
  misc_feature (1)..(76): NCBI GI NO: 7486723 NR Description: hypothetical protein F9D12
MAMWVFGYGSLIWKTGFPFDDRLPGFIKNYRRVFHQGSTDHRGTPEFPGRTVTLEPAPGEICWGVAYKITKEEDKKDALLHLEVREKQYDQKEYLDFFIDIHDSEPAVSGVMVYIASSDKKSNNNYLGPAPFEDIAKQIVKAEGPSGSNRDYLFNLEEALVQLGFKDKHVTDLATHVRLILSATQDAATKDV

SEQ ID NO: 21065 - protein, 190 aa, Zea mays subsp. mays
  peptide (1)..(190): Ceres Seq. ID no. 15176618
  misc_feature (1)..(178): Pfam Name: Pfam Description:  ChaC-like protein
  misc_feature (1)..(184): NCBI GI NO: 18401334 NR Description: expressed protein [Arabidopsis thaliana]
  misc_feature (1)..(184): NCBI GI NO: 12083292 NR Description: unknown protein [Arabidopsis thaliana]
  misc_feature (1)..(176): NCBI GI NO: 38344831 NR Description: OSJNBa0064H22.12
  misc_feature (1)..(190): NCBI GI NO: 15239626 NR Description: expressed protein [Arabidopsis thaliana]
  misc_feature (1)..(190): NCBI GI NO: 21593515 NR Description: unknown [Arabidopsis thaliana]
  misc_feature (1)..(190): NCBI GI NO: 18417778 NR Description: expressed protein [Arabidopsis thaliana]
  misc_feature (1)..(189): NCBI GI NO: 27525010 NR Description: putative cation transporter [Beta procumbens]
  misc_feature (71)..(184): NCBI GI NO: 25349686 NR Description: hypothetical protein T12C22.6
  misc_feature (102)..(190): NCBI GI NO: 7486723 NR Description: hypothetical protein F9D12
  misc_feature (1)..(74): NCBI GI NO: 7486723 NR Description: hypothetical protein F9D12
MWVFGYGSLIWKTGFPFDDRLPGFIKNYRRVFHQGSTDHRGTPEFPGRTVTLEPAPGEICWGVAYKITKEEDKKDALLHLEVREKQYDQKEYLDFFIDIHDSEPAVSGVMVYIASSDKKSNNNYLGPAPFEDIAKQIVKAEGPSGSNRDYLFNLEEALVQLGFKDKHVTDLATHVRLILSATQDAATKDV

SEQ ID NO: 21066 - DNA, 714 bp, Zea mays subsp. mays
  misc_feature (1)..(714): Ceres Seq. ID no. 15176138
atacaacaaatcatacaaaaacacatacaaaacatataaaagaagaaaatctccggttgataaaaactatttaaatgaagaggaacggtgaaactaagcggcggaggaacgtggcggaagaggcggagcagggaggaggagatccggcgatgtgggaggatcttgatcggaatttcagacaagtgcaatctgttttggacagaaacagatcacttatccagcaagtcaacgacaatcaccagtcaagaatggcagataacatgtccaagaacgttgctttgatccaagaactcaacggaaacatctctaaggttgtttctatgtattctgacctcaacaccaatttctcatcggcgtttcacggtgggaagaacggtcgcgacggtggtggtgctaccggaaccagagctaattaaatcaaccctggtctttcttagttggaccggccggtttaacatttcgaatcagtcggtttaacatatggtctaaaccaacctgttatataagttatgttattgcaatgattgtcgttagaataatccgtgggagaaaacccattatatgggttatctatcttattaaaactgaagtacaaaatgagattgtttggaaacatgtatatgagtttaaaaaataagagtgtttggtaacatggattgtagtcttttaaaaaaatattacttttgtttggaaataaagatagtagtatttagc

SEQ ID NO: 21067 - protein, 113 aa, Zea mays subsp. mays
  peptide (1)..(113): Ceres Seq. ID no. 15176139
  misc_feature (1)..(112): NCBI GI NO: 18405258 NR Description: expressed protein [Arabidopsis thaliana]
  misc_feature (2)..(113): NCBI GI NO: 34499881 NR Description: early flowering 4 [Mesembryanthemum crystallinum]
  misc_feature (23)..(110): NCBI GI NO: 15227672 NR Description: hypothetical protein [Arabidopsis thaliana]
  misc_feature (17)..(113): NCBI GI NO: 4680489 NR Description: hypothetical protein [Oryza sativa]
  misc_feature (20)..(112): NCBI GI NO: 4680201 NR Description: hypothetical protein [Sorghum bicolor]
  misc_feature (23)..(111): NCBI GI NO: 18396289 NR Description: expressed protein [Arabidopsis thaliana]
  misc_feature (20)..(110): NCBI GI NO: 38637104 NR Description: unknown protein
  misc_feature (23)..(105): NCBI GI NO: 18410139 NR Description: expressed protein [Arabidopsis thaliana]
  misc_feature (23)..(105): NCBI GI NO: 25406197 NR Description: hypothetical protein F28P22.18
  misc_feature (23)..(105): NCBI GI NO: 8778455 NR Description: F1L3.15 [Arabidopsis thaliana]
MKRNGETKRRRNVAEEAEQGGGDPAMWEDLDRNFRQVQSVLDRNRSLIQQVNDNHQSRMADNMSKNVALIQELNGNISKVVSMYSDLNTNFSSAFHGGKNGRDGGGATGTRAN

SEQ ID NO: 21068 - protein, 88 aa, Zea mays subsp. mays
  peptide (1)..(88): Ceres Seq. ID no. 15176140
  misc_feature (1)..(87): NCBI GI NO: 18405258 NR Description: expressed protein [Arabidopsis thaliana]
  misc_feature (1)..(88): NCBI GI NO: 34499881 NR Description: early flowering 4 [Mesembryanthemum crystallinum]
  misc_feature (1)..(85): NCBI GI NO: 15227672 NR Description: hypothetical protein [Arabidopsis thaliana]
  misc_feature (1)..(88): NCBI GI NO: 4680489 NR Description: hypothetical protein [Oryza sativa]
  misc_feature (1)..(87): NCBI GI NO: 4680201 NR Description: hypothetical protein [Sorghum bicolor]
  misc_feature (1)..(86): NCBI GI NO: 18396289 NR Description: expressed protein [Arabidopsis thaliana]
  misc_feature (1)..(85): NCBI GI NO: 38637104 NR Description: unknown protein
  misc_feature (1)..(80): NCBI GI NO: 18410139 NR Description: expressed protein [Arabidopsis thaliana]
  misc_feature (1)..(80): NCBI GI NO: 25406197 NR Description: hypothetical protein F28P22.18
  misc_feature (1)..(80): NCBI GI NO: 8778455 NR Description: F1L3.15 [Arabidopsis thaliana]
MWEDLDRNFRQVQSVLDRNRSLIQQVNDNHQSRMADNMSKNVALIQELNGNISKVVSMYSDLNTNFSSAFHGGKNGRDGGGATGTRAN

SEQ ID NO: 21069 - DNA, 2191 bp, Zea mays subsp. mays
  misc_feature (1)..(2191): Ceres Seq. ID no. 15179424
gctggtgcttctacggggcctggcgatttgaattcgagtggtgcgtgtatagagcgtgagagagagaaaagagagtggctcttgcgctctgcagtccagttcttgaatccagagctgcgattcgtgctcgcctgacgccgatgggccggagcctgagcccgctgctacggcaggagctggacaacctggacaaggacgctgacagccgccgcgccgccatgaaggcgctcaagtcgtacgccagacacctggactccaagtccatcccgcacttcctcgccgaggtctccgacaccaccgcggccggcgccggcgccggcagcggcatgcccaccggcggcgagttcaccatctcgctctacgaggtgctggcgcgggtgcacggccgcaacatcgtgccgcagatcggcaacatcatggccaccatcatgtgcacgctctcctccagcgggggctccttcccgctccaccaggcctgctccaaggtggtgcccgccatcgcgcggcacggcatcgacccctccgcgcccgacggggagaaggccggcatcatcgcctccctctgcaggccgctctgcagcgcgctcatgggggggagccaggacgtcggcgccgcctccggcgcggcgctgtgcctgaaggcgctcgtcgagtccagcaactggaggttcgcgtccggggagctggtgaacgaggtctgcctcaaggtggccggggcgatgcacgacagcgcgacgcggtcgaacgcgcacatgggcctcgccatggccctggtgaagcacaacggcctgatcgcggaggcgtacgcgaggtccatcgtgcgctccgggctgcagatccttgatggggacacggcggatagcagctcccagaagcgcctctcggcgatccagatgatcaatttcttcatgaagttcgttgaccccaggtgcctgtcttcagagcttggcagggtgattgatgtgatggagcggtgccagaatgaccgcatgcctttcgtccgaggtgctgcgtttgaggcatcacagagtgcgaggaacatcgccgcgcagaagggatcaagacatgaggttggcacgagcccgatggttggctccaatttccacaagagaagggagaagagcccatgccggagcctctggggtgccaagcgcagccctgcagcctccaccatggctgctgcttctccagtccagttcagatccccggaatcgcaggttgtggattcatccatcatgaacggcagcacgctccacgactcaccggtctcagtcgggcagtcctcttgcaactttgatcagagtcggcgcacgaaccggaggttgtggagcaatgatgccgttgatgtttctctgaaggatggcttgttcattcagctttgctcaaacagcaattcctatgaagatgacttgggcgaggtctgtgacagtgaagtgactgatgctaactttgagtgtaccaacacatttgcagggtttgtgtcaccaagccacaatggttccatatcaagggacaagactcccagtcccagggcttcagacaggccgataaatattgatgacgtgaagatatactcaacaccaaggaagcttctccgattgcttcaaagctcatacgactctgactctgctagcaacatcggacagtccactgcaaagctcagaggcttgtcgtcaccagatcaggaacacaagggactagtgatctcatctgaacagatgcaatctctgcattcagacaacaagggtgatgagatgaaagatgagaacgaaaccatttatatgcagaacagcaaaggtcggactcagactctatccaatgctgatgcatcagtactttccactaccgaggctgagaacacatccatcaagacttcccctgaaattgagctcaatggggatgatgtctgtattacaagcagcatagggaagaccaggaagtatagagcaaaattcactttgtttctgagcgtgatcgtgatctttttagcaatcatcaccatgctcatcaggatagagaatgatgatgattcagcgtaccttgtccccacttaatattttgtatgcttcattgctgtctgtttaaattcctatttttattttatcactatagagtggtttgtgttttgaacaattttgcagtcatctatccatgaatgacagcaaataattaaattagaattttcatgctc

SEQ ID NO: 21070 - protein, 637 aa, Zea mays subsp. mays
  peptide (1)..(637): Ceres Seq. ID no. 15179425
  misc_feature (1)..(422): NCBI GI NO: 22330247 NR Description: hypothetical protein [Arabidopsis thaliana]
  misc_feature (1)..(422): NCBI GI NO: 25405725 NR Description: hypothetical protein F20D21.21
  misc_feature (1)..(304): NCBI GI NO: 15229201 NR Description: expressed protein [Arabidopsis thaliana]
MGRSLSPLLRQELDNLDKDADSRRAAMKALKSYARHLDSKSIPHFLAEVSDTTAAGAGAGSGMPTGGEFTISLYEVLARVHGRNIVPQIGNIMATIMCTLSSSGGSFPLHQACSKVVPAIARHGIDPSAPDGEKAGIIASLCRPLCSALMGGSQDVGAASGAALCLKALVESSNWRFASGELVNEVCLKVAGAMHDSATRSNAHMGLAMALVKHNGLIAEAYARSIVRSGLQILDGDTADSSSQKRLSAIQMINFFMKFVDPRCLSSELGRVIDVMERCQNDRMPFVRGAAFEASQSARNIAAQKGSRHEVGTSPMVGSNFHKRREKSPCRSLWGAKRSPAASTMAAASPVQFRSPESQVVDSSIMNGSTLHDSPVSVGQSSCNFDQSRRTNRRLWSNDAVDVSLKDGLFIQLCSNSNSYEDDLGEVCDSEVTDANFECTNTFAGFVSPSHNGSISRDKTPSPRASDRPINIDDVKIYSTPRKLLRLLQSSYDSDSASNIGQSTAKLRGLSSPDQEHKGLVISSEQMQSLHSDNKGDEMKDENETIYMQNSKGRTQTLSNADASVLSTTEAENTSIKTSPEIELNGDDVCITSSIGKTRKYRAKFTLFLSVIVIFLAIITMLIRIENDDDSAYLVPT

SEQ ID NO: 21071 - protein, 611 aa, Zea mays subsp. mays
  peptide (1)..(611): Ceres Seq. ID no. 15179426
  misc_feature (1)..(396): NCBI GI NO: 22330247 NR Description: hypothetical protein [Arabidopsis thaliana]
  misc_feature (1)..(396): NCBI GI NO: 25405725 NR Description: hypothetical protein F20D21.21
  misc_feature (1)..(278): NCBI GI NO: 15229201 NR Description: expressed protein [Arabidopsis thaliana]
MKALKSYARHLDSKSIPHFLAEVSDTTAAGAGAGSGMPTGGEFTISLYEVLARVHGRNIVPQIGNIMATIMCTLSSSGGSFPLHQACSKVVPAIARHGIDPSAPDGEKAGIIASLCRPLCSALMGGSQDVGAASGAALCLKALVESSNWRFASGELVNEVCLKVAGAMHDSATRSNAHMGLAMALVKHNGLIAEAYARSIVRSGLQILDGDTADSSSQKRLSAIQMINFFMKFVDPRCLSSELGRVIDVMERCQNDRMPFVRGAAFEASQSARNIAAQKGSRHEVGTSPMVGSNFHKRREKSPCRSLWGAKRSPAASTMAAASPVQFRSPESQVVDSSIMNGSTLHDSPVSVGQSSCNFDQSRRTNRRLWSNDAVDVSLKDGLFIQLCSNSNSYEDDLGEVCDSEVTDANFECTNTFAGFVSPSHNGSISRDKTPSPRASDRPINIDDVKIYSTPRKLLRLLQSSYDSDSASNIGQSTAKLRGLSSPDQEHKGLVISSEQMQSLHSDNKGDEMKDENETIYMQNSKGRTQTLSNADASVLSTTEAENTSIKTSPEIELNGDDVCITSSIGKTRKYRAKFTLFLSVIVIFLAIITMLIRIENDDDSAYLVPT

SEQ ID NO: 21072 - protein, 575 aa, Zea mays subsp. mays
  peptide (1)..(575): Ceres Seq. ID no. 15179427
  misc_feature (1)..(360): NCBI GI NO: 22330247 NR Description: hypothetical protein [Arabidopsis thaliana]
  misc_feature (1)..(360): NCBI GI NO: 25405725 NR Description: hypothetical protein F20D21.21
  misc_feature (1)..(242): NCBI GI NO: 15229201 NR Description: expressed protein [Arabidopsis thaliana]
MPTGGEFTISLYEVLARVHGRNIVPQIGNIMATIMCTLSSSGGSFPLHQACSKVVPAIARHGIDPSAPDGEKAGIIASLCRPLCSALMGGSQDVGAASGAALCLKALVESSNWRFASGELVNEVCLKVAGAMHDSATRSNAHMGLAMALVKHNGLIAEAYARSIVRSGLQILDGDTADSSSQKRLSAIQMINFFMKFVDPRCLSSELGRVIDVMERCQNDRMPFVRGAAFEASQSARNIAAQKGSRHEVGTSPMVGSNFHKRREKSPCRSLWGAKRSPAASTMAAASPVQFRSPESQVVDSSIMNGSTLHDSPVSVGQSSCNFDQSRRTNRRLWSNDAVDVSLKDGLFIQLCSNSNSYEDDLGEVCDSEVTDANFECTNTFAGFVSPSHNGSISRDKTPSPRASDRPINIDDVKIYSTPRKLLRLLQSSYDSDSASNIGQSTAKLRGLSSPDQEHKGLVISSEQMQSLHSDNKGDEMKDENETIYMQNSKGRTQTLSNADASVLSTTEAENTSIKTSPEIELNGDDVCITSSIGKTRKYRAKFTLFLSVIVIFLAIITMLIRIENDDDSAYLVPT

SEQ ID NO: 21073 - DNA, 1667 bp, Zea mays subsp. mays
  misc_feature (1)..(1667): Ceres Seq. ID no. 15176145
aatctccccttctcttcctcttctcccttttcttaaacttcggaatccaggatcgtgggtcgatcggttctcagaatccgatcaagacccagtagttcgttttcatcgacacatccttcactgttttccaaaagaatggagatggaatcatgtaagctgttcatcggtgggatctcttgggagaccactgaagatcgtcttcgcgagtattttcagagtttcggtgaggttttggaggccgtcatcatgaaggatcgagccactggtcgtgctcgtggctttggtttccttgtcttctctgaccccattgttgctgagagagtcgtgtttctcagacacgtgattgatggtaaacttgttgaggcgaagaaggcagttccaagagatgatcacgtagtattgaacaaaagttacaacactagtctccaggggtcacctggcccagcaaacagcaagaagatctttgttggaggtttggcttcatcggtgacagaagctgagttcaaaaagtattttgctcagtttggggtgatcactgacgttgtggtgatgtatgaccacagaacccagcgaccgagaggcttcgggttcatctcttttgagtcagaggacgctgtagacaaagttctgcagaggacattccacgaactcaatggaaagatggttgaggtcaaactggctgttcctaaggaaatggctctgaaccctatccggaaccaaatgaatgttaatagctttggcagtagtagaatcagtgcattgctgatgaacgagtacacccaagggttcagcccgagtccaatctccggttatggagtcaaacctgaagttaggtacagtccaggattaggtaataggggtggtggattctcaccgtttggacatggatacggaattgagctgaactttgagccagatcagagtcagaactttgggtctggttccagtgcaggctttgggcggccccttagcccaggatatgctccgagtcttggcaggtacggtagccagattgagtcaggaggagctgggaacggtcctgtgctaaatgcagcaacaaagaaccatttatggggtaatggtggtgggctaggttacatgtcaaactcaccaatatctagaagcagcttcaatggaatgtcttcactaggcagcatcggagacaactcgagacgtaatagctaccgcagtgagggaggaggaggcttaggattagaagcaatgagagggggtcatgttggtggttacagcagcggctcaagcagcttggagacagactctttgtacagtgactcggcgtggctttcgctgcctgcaaaggcggaggaaagaatgggagcgtttgacttcatgtccagaggaccagctggctacatcaacaggcaaccaaacggaggaattgcagcttagagaagtgagaaactcattccatggagatcagatgatgttttgactgtttgcagaagagagatttttagaagatgaaaaaaaaaagtaattgttcaaaaaaaagtttatttactttcttactattttgattgttgttatagtttttatttttcaccctttttctaatttggggttttgtttcttttatcttgaagtaagaaaaatgtaaaatgagttatataatgagacaaagaaacaatgaagttgtgtattatgtt

SEQ ID NO: 21074 - protein, 424 aa, Zea mays subsp. mays
  peptide (1)..(424): Ceres Seq. ID no. 15176146
  misc_feature (109)..(179): Pfam Name: a.k.a. RRM, RBD, or RNP domain Pfam Description: RNA recognition motif.
  misc_feature (1)..(424): NCBI GI NO: 18422817 NR Description: heterogeneous nuclear ribonucleoprotein
  misc_feature (1)..(424): NCBI GI NO: 21553963 NR Description: RNA-binding protein-like [Arabidopsis thaliana]
  misc_feature (1)..(344): NCBI GI NO: 9758790 NR Description: RNA-binding protein-like [Arabidopsis thaliana]
  misc_feature (1)..(374): NCBI GI NO: 6648193 NR Description: putative RNA-binding protein
  misc_feature (1)..(374): NCBI GI NO: 30680456 NR Description: heterogeneous nuclear ribonucleoprotein
  misc_feature (1)..(374): NCBI GI NO: 15292697 NR Description: putative RNA-binding protein
  misc_feature (1)..(374): NCBI GI NO: 18398061 NR Description: heterogeneous nuclear ribonucleoprotein
  misc_feature (1)..(382): NCBI GI NO: 38175737 NR Description: putative heterogeneous nuclear ribonucleoprotein A1
  misc_feature (1)..(393): NCBI GI NO: 18416794 NR Description: heterogeneous nuclear ribonucleoprotein
  misc_feature (7)..(393): NCBI GI NO: 7487039 NR Description: hypothetical protein T15N24
MEMESCKLFIGGISWETTEDRLREYFQSFGEVLEAVIMKDRATGRARGFGFLVFSDPIVAERVVFLRHVIDGKLVEAKKAVPRDDHVVLNKSYNTSLQGSPGPANSKKIFVGGLASSVTEAEFKKYFAQFGVITDVVVMYDHRTQRPRGFGFISFESEDAVDKVLQRTFHELNGKMVEVKLAVPKEMALNPIRNQMNVNSFGSSRISALLMNEYTQGFSPSPISGYGVKPEVRYSPGLGNRGGGFSPFGHGYGIELNFEPDQSQNFGSGSSAGFGRPLSPGYAPSLGRYGSQIESGGAGNGPVLNAATKNHLWGNGGGLGYMSNSPISRSSFNGMSSLGSIGDNSRRNSYRSEGGGGLGLEAMRGGHVGGYSSGSSSLETDSLYSDSAWLSLPAKAEERMGAFDFMSRGPAGYINRQPNGGIAA

SEQ ID NO: 21075 - protein, 422 aa, Zea mays subsp. mays
  peptide (1)..(422): Ceres Seq. ID no. 15176147
  misc_feature (107)..(177): Pfam Name: a.k.a. RRM, RBD, or RNP domain Pfam Description: RNA recognition motif.
  misc_feature (1)..(422): NCBI GI NO: 18422817 NR Description: heterogeneous nuclear ribonucleoprotein
  misc_feature (1)..(422): NCBI GI NO: 21553963 NR Description: RNA-binding protein-like [Arabidopsis thaliana]
  misc_feature (1)..(342): NCBI GI NO: 9758790 NR Description: RNA-binding protein-like [Arabidopsis thaliana]
  misc_feature (1)..(372): NCBI GI NO: 6648193 NR Description: putative RNA-binding protein
  misc_feature (1)..(372): NCBI GI NO: 30680456 NR Description: heterogeneous nuclear ribonucleoprotein
  misc_feature (1)..(372): NCBI GI NO: 15292697 NR Description: putative RNA-binding protein
  misc_feature (1)..(372): NCBI GI NO: 18398061 NR Description: heterogeneous nuclear ribonucleoprotein
  misc_feature (1)..(380): NCBI GI NO: 38175737 NR Description: putative heterogeneous nuclear ribonucleoprotein A1
  misc_feature (1)..(391): NCBI GI NO: 18416794 NR Description: heterogeneous nuclear ribonucleoprotein
  misc_feature (5)..(391): NCBI GI NO: 7487039 NR Description: hypothetical protein T15N24
MESCKLFIGGISWETTEDRLREYFQSFGEVLEAVIMKDRATGRARGFGFLVFSDPIVAERVVFLRHVIDGKLVEAKKAVPRDDHVVLNKSYNTSLQGSPGPANSKKIFVGGLASSVTEAEFKKYFAQFGVITDVVVMYDHRTQRPRGFGFISFESEDAVDKVLQRTFHELNGKMVEVKLAVPKEMALNPIRNQMNVNSFGSSRISALLMNEYTQGFSPSPISGYGVKPEVRYSPGLGNRGGGFSPFGHGYGIELNFEPDQSQNFGSGSSAGFGRPLSPGYAPSLGRYGSQIESGGAGNGPVLNAATKNHLWGNGGGLGYMSNSPISRSSFNGMSSLGSIGDNSRRNSYRSEGGGGLGLEAMRGGHVGGYSSGSSSLETDSLYSDSAWLSLPAKAEERMGAFDFMSRGPAGYINRQPNGGIAA

SEQ ID NO: 21076 - protein, 387 aa, Zea mays subsp. mays
  peptide (1)..(387): Ceres Seq. ID no. 15176148
  misc_feature (72)..(142): Pfam Name: a.k.a. RRM, RBD, or RNP domain Pfam Description: RNA recognition motif.
  misc_feature (1)..(387): NCBI GI NO: 18422817 NR Description: heterogeneous nuclear ribonucleoprotein
  misc_feature (1)..(387): NCBI GI NO: 21553963 NR Description: RNA-binding protein-like [Arabidopsis thaliana]
  misc_feature (1)..(307): NCBI GI NO: 9758790 NR Description: RNA-binding protein-like [Arabidopsis thaliana]
  misc_feature (1)..(337): NCBI GI NO: 6648193 NR Description: putative RNA-binding protein
  misc_feature (1)..(337): NCBI GI NO: 18398061 NR Description: heterogeneous nuclear ribonucleoprotein
  misc_feature (1)..(337): NCBI GI NO: 30680456 NR Description: heterogeneous nuclear ribonucleoprotein
  misc_feature (1)..(337): NCBI GI NO: 15292697 NR Description: putative RNA-binding protein
  misc_feature (1)..(345): NCBI GI NO: 38175737 NR Description: putative heterogeneous nuclear ribonucleoprotein A1
  misc_feature (1)..(356): NCBI GI NO: 18416794 NR Description: heterogeneous nuclear ribonucleoprotein
  misc_feature (1)..(356): NCBI GI NO: 7487039 NR Description: hypothetical protein T15N24
MKDRATGRARGFGFLVFSDPIVAERVVFLRHVIDGKLVEAKKAVPRDDHVVLNKSYNTSLQGSPGPANSKKIFVGGLASSVTEAEFKKYFAQFGVITDVVVMYDHRTQRPRGFGFISFESEDAVDKVLQRTFHELNGKMVEVKLAVPKEMALNPIRNQMNVNSFGSSRISALLMNEYTQGFSPSPISGYGVKPEVRYSPGLGNRGGGFSPFGHGYGIELNFEPDQSQNFGSGSSAGFGRPLSPGYAPSLGRYGSQIESGGAGNGPVLNAATKNHLWGNGGGLGYMSNSPISRSSFNGMSSLGSIGDNSRRNSYRSEGGGGLGLEAMRGGHVGGYSSGSSSLETDSLYSDSAWLSLPAKAEERMGAFDFMSRGPAGYINRQPNGGIAA

SEQ ID NO: 21077 - DNA, 2018 bp, Zea mays subsp. mays
  misc_feature (1)..(2018): Ceres Seq. ID no. 15176169
tctctcgctcccggatcgccgcgagctcctttttgatctttgactcgcatcgcgtctcctctcgcctccgttttggataagcccgtctggaagcctctcctgctttcatttcgccggcccgcggagaacagctcggcgggttcccttcgtgcagcgttcggagagctcttcctgctgctctgcgacggacggggacggagaggtcaaaaatgtaccatcacggatgatggatggtctccggtatcatctgcgtgggacatagatggaggactacttttcacgcttcctaaaccttggttggcagctaagacaatacttgacagaattaatagaaaatttggttcggaccattaatcggattcctcaacgtcttggagtccaattctctgctagccatggaggatcattgactggcaccacagtatactttcatgaaagggcatctacgttatctgttaatactattaccactacagaaaaacagactgcaaatggaacatctgaaggcgcaattttcagaaaaggactttccagtatttacgaaagatcatgtgtcaggtcttcctatcttttacatggcttcatgctggtacgaagattggcattcagtgtgcgagatctgtggaatctattttcaagtgaagtacacgccaaactaaccaggatcttacatcgtttctggacaacactacagggatcttgtgaagacataggatggttgcaaagaactcgggcatcacttcgttcagttgatgggacaggtcgcttcaaggagattttgcatgagataaggaatggcgtgcattgcctgcctgatacactgatttacttatttattcctggcctttttagcaaccacagtccactttacttcaccaatacgaaacgattcttttcaaaaatgggattggcttgccatattgcgaaaattcatagcgaggcgtcagtggagaagaacgcgtgggaactgaaacagtacattgaggagctctactgggggtctggtaagcaggttctgctccttggtcatagcaaaggtggagttgatgcagctgcagctctttccttgtactggtctgagctcaagggtaaggttgctggcctggcgttggttcagagcccatatggtggcaccccggtcgcctccgatatccttcgagaaggccagatcgctgataaggagacaaggaggatcatgcagctcatcgtatgcaaactaatcaagggcgacatcagggccttggaggacctcacgtatgccaagagaaaggacttcatctcccagcacaaactccccatcgatgagctgccgatcatctccttccacaccgaagccagcaccgcgcccacagcgctcgcgtcgctgacccgtgtcgcccaagccgagctcctcccatggctacccctgccacggttcttcctgtctgcatccgagtttgtcgagtcaatgctcgcctctctgaaggtccccgtggttgcgcctgtgtctgcagccatggcggtgacagccctccacctgcggctgcgctatggggagaggagcgacgggctggtgacacggcgcgacgccgaggtgcctgggtcagtggtagttagacccgagaggaggctggaccacgcgtggatggtgtactccacgctgaagatgggcagcgctgaggccgatgcgagcgagatgtgcgaggctctgctggccatgctcgttgagattggcaggaagaaattttgctgaccatctggtcatctggagttctccatggttttggttatatatgcacatatatgtcacgcatactacaaatgatagagtattacagtctttacagggaacagtggaaattagattaatttccttggtgaaagcagggctctgtgataaaaccatatgctactttttttgacaatatgcatactttgtggcaatatgcattaattttggacgaaccataggctactttggctatgtaatgttcttcgcacttcacatttaatttagttttttttaatggttttggttt

SEQ ID NO: 21078 - protein, 489 aa, Zea mays subsp. mays
  peptide (1)..(489): Ceres Seq. ID no. 15176170
  misc_feature (135)..(376): NCBI GI NO: 18377628 NR Description: unknown protein [Arabidopsis thaliana]
  misc_feature (135)..(376): NCBI GI NO: 30689883 NR Description: expressed protein [Arabidopsis thaliana]
  misc_feature (401)..(487): NCBI GI NO: 18377628 NR Description: unknown protein [Arabidopsis thaliana]
  misc_feature (401)..(487): NCBI GI NO: 30689883 NR Description: expressed protein [Arabidopsis thaliana]
  misc_feature (198)..(376): NCBI GI NO: 7486943 NR Description: hypothetical protein At2g44970
  misc_feature (401)..(487): NCBI GI NO: 7486943 NR Description: hypothetical protein At2g44970
  misc_feature (135)..(178): NCBI GI NO: 7486943 NR Description: hypothetical protein At2g44970
MEDYFSRFLNLGWQLRQYLTELIENLVRTINRIPQRLGVQFSASHGGSLTGTTVYFHERASTLSVNTITTTEKQTANGTSEGAIFRKGLSSIYERSCVRSSYLLHGFMLVRRLAFSVRDLWNLFSSEVHAKLTRILHRFWTTLQGSCEDIGWLQRTRASLRSVDGTGRFKEILHEIRNGVHCLPDTLIYLFIPGLFSNHSPLYFTNTKRFFSKMGLACHIAKIHSEASVEKNAWELKQYIEELYWGSGKQVLLLGHSKGGVDAAAALSLYWSELKGKVAGLALVQSPYGGTPVASDILREGQIADKETRRIMQLIVCKLIKGDIRALEDLTYAKRKDFISQHKLPIDELPIISFHTEASTAPTALASLTRVAQAELLPWLPLPRFFLSASEFVESMLASLKVPVVAPVSAAMAVTALHLRLRYGERSDGLVTRRDAEVPGSVVVRPERRLDHAWMVYSTLKMGSAEADASEMCEALLAMLVEIGRKKFC

SEQ ID NO: 21079 - protein, 382 aa, Zea mays subsp. mays
  peptide (1)..(382): Ceres Seq. ID no. 15176171
  misc_feature (28)..(269): NCBI GI NO: 18377628 NR Description: unknown protein [Arabidopsis thaliana]
  misc_feature (28)..(269): NCBI GI NO: 30689883 NR Description: expressed protein [Arabidopsis thaliana]
  misc_feature (294)..(380): NCBI GI NO: 18377628 NR Description: unknown protein [Arabidopsis thaliana]
  misc_feature (294)..(380): NCBI GI NO: 30689883 NR Description: expressed protein [Arabidopsis thaliana]
  misc_feature (91)..(269): NCBI GI NO: 7486943 NR Description: hypothetical protein At2g44970
  misc_feature (294)..(380): NCBI GI NO: 7486943 NR Description: hypothetical protein At2g44970
  misc_feature (28)..(71): NCBI GI NO: 7486943 NR Description: hypothetical protein At2g44970
MLVRRLAFSVRDLWNLFSSEVHAKLTRILHRFWTTLQGSCEDIGWLQRTRASLRSVDGTGRFKEILHEIRNGVHCLPDTLIYLFIPGLFSNHSPLYFTNTKRFFSKMGLACHIAKIHSEASVEKNAWELKQYIEELYWGSGKQVLLLGHSKGGVDAAAALSLYWSELKGKVAGLALVQSPYGGTPVASDILREGQIADKETRRIMQLIVCKLIKGDIRALEDLTYAKRKDFISQHKLPIDELPIISFHTEASTAPTALASLTRVAQAELLPWLPLPRFFLSASEFVESMLASLKVPVVAPVSAAMAVTALHLRLRYGERSDGLVTRRDAEVPGSVVVRPERRLDHAWMVYSTLKMGSAEADASEMCEALLAMLVEIGRKKFC

SEQ ID NO: 21080 - protein, 276 aa, Zea mays subsp. mays
  peptide (1)..(276): Ceres Seq. ID no. 15176172
  misc_feature (1)..(163): NCBI GI NO: 18377628 NR Description: unknown protein [Arabidopsis thaliana]
  misc_feature (1)..(163): NCBI GI NO: 30689883 NR Description: expressed protein [Arabidopsis thaliana]
  misc_feature (188)..(274): NCBI GI NO: 18377628 NR Description: unknown protein [Arabidopsis thaliana]
  misc_feature (188)..(274): NCBI GI NO: 30689883 NR Description: expressed protein [Arabidopsis thaliana]
  misc_feature (1)..(163): NCBI GI NO: 7486943 NR Description: hypothetical protein At2g44970
  misc_feature (188)..(274): NCBI GI NO: 7486943 NR Description: hypothetical protein At2g44970
MGLACHIAKIHSEASVEKNAWELKQYIEELYWGSGKQVLLLGHSKGGVDAAAALSLYWSELKGKVAGLALVQSPYGGTPVASDILREGQIADKETRRIMQLIVCKLIKGDIRALEDLTYAKRKDFISQHKLPIDELPIISFHTEASTAPTALASLTRVAQAELLPWLPLPRFFLSASEFVESMLASLKVPVVAPVSAAMAVTALHLRLRYGERSDGLVTRRDAEVPGSVVVRPERRLDHAWMVYSTLKMGSAEADASEMCEALLAMLVEIGRKKFC

SEQ ID NO: 21081 - DNA, 842 bp, Zea mays subsp. mays
  misc_feature (1)..(842): Ceres Seq. ID no. 15178836
ctgaaactcttatcttttctccagacagagcaaaacagtctcacgatggctactaccacgtcatctccgccgtgtcatatctccgtctcattcctccgtcagcttcctccttgcaccactgttcagttcttcggtttctcaccgacccagcgtaaactgggcgggttaacggtagcccggaacaatctggcgcaggattttctcggggacttcggagctcgtgacccgtacccggcggagatagcgagccagttcggagataaggtgttgggaccccaaagcacagagcacaagattctgattcctaatgcctctgttctctccctctcgcagctcgaatgctcccctgtttcgccttctcaggctcctttatcccccgatgaggccaaaacgctcctccataaggttttgggatggagtatagtggaggatgaagcgggcggtctgaaaataagatgcatgtggaaggtgagggattttgggtgcggcgttgaactcataaacaggatccataaggtggctgacgcttctggtcattacccttctctccatttggaaagtcctacccaagttagagctgaactatctacctcttccattggtgggctgagcatgaacgatttcataatggcggcaaagatagatgatatcaagacttctgatctttcctcaaggaaaagagtctgggcataacaaacgtggatttttcattacttatctcatatttgtgacatttttgtatgataacaatataatataagtgatgtattcgttggtctttatgttaagttattatatagaaactatgtattattcatcatcatattggaaatcattttagc

SEQ ID NO: 21082 - protein, 230 aa, Zea mays subsp. mays
  peptide (1)..(230): Ceres Seq. ID no. 15178837
  misc_feature (118)..(219): Pfam Name: Pfam Description:  Pterin 4 alpha carbinolamine dehydratase
  misc_feature (16)..(230): NCBI GI NO: 15241386 NR Description: expressed protein [Arabidopsis thaliana]
  misc_feature (16)..(230): NCBI GI NO: 21617915 NR Description: unknown [Arabidopsis thaliana]
  misc_feature (105)..(228): NCBI GI NO: 26449459 NR Description: unknown protein [Arabidopsis thaliana]
  misc_feature (105)..(228): NCBI GI NO: 30690915 NR Description: expressed protein [Arabidopsis thaliana]
  misc_feature (110)..(217): NCBI GI NO: 32473155 NR Description: probable pterin-4-alpha-carbinolamine dehydratase
  misc_feature (109)..(217): NCBI GI NO: 21673181 NR Description: pterin-4-alpha-carbinolamine dehydratase
  misc_feature (105)..(215): NCBI GI NO: 30248108 NR Description: Pterin 4 alpha carbinolamine dehydratase
LKLLSFLQTEQNSLTMATTTSSPPCHISVSFLRQLPPCTTVQFFGFSPTQRKLGGLTVARNNLAQDFLGDFGARDPYPAEIASQFGDKVLGPQSTEHKILIPNASVLSLSQLECSPVSPSQAPLSPDEAKTLLHKVLGWSIVEDEAGGLKIRCMWKVRDFGCGVELINRIHKVADASGHYPSLHLESPTQVRAELSTSSIGGLSMNDFIMAAKIDDIKTSDLSSRKRVWA

SEQ ID NO: 21083 - protein, 215 aa, Zea mays subsp. mays
  peptide (1)..(215): Ceres Seq. ID no. 15178838
  misc_feature (103)..(204): Pfam Name: Pfam Description:  Pterin 4 alpha carbinolamine dehydratase
  misc_feature (1)..(215): NCBI GI NO: 15241386 NR Description: expressed protein [Arabidopsis thaliana]
  misc_feature (1)..(215): NCBI GI NO: 21617915 NR Description: unknown [Arabidopsis thaliana]
  misc_feature (90)..(213): NCBI GI NO: 26449459 NR Description: unknown protein [Arabidopsis thaliana]
  misc_feature (90)..(213): NCBI GI NO: 30690915 NR Description: expressed protein [Arabidopsis thaliana]
  misc_feature (95)..(202): NCBI GI NO: 32473155 NR Description: probable pterin-4-alpha-carbinolamine dehydratase
  misc_feature (94)..(202): NCBI GI NO: 21673181 NR Description: pterin-4-alpha-carbinolamine dehydratase
  misc_feature (90)..(200): NCBI GI NO: 30248108 NR Description: Pterin 4 alpha carbinolamine dehydratase
MATTTSSPPCHISVSFLRQLPPCTTVQFFGFSPTQRKLGGLTVARNNLAQDFLGDFGARDPYPAEIASQFGDKVLGPQSTEHKILIPNASVLSLSQLECSPVSPSQAPLSPDEAKTLLHKVLGWSIVEDEAGGLKIRCMWKVRDFGCGVELINRIHKVADASGHYPSLHLESPTQVRAELSTSSIGGLSMNDFIMAAKIDDIKTSDLSSRKRVWA

SEQ ID NO: 21084 - DNA, 1124 bp, Zea mays subsp. mays
  misc_feature (1)..(1124): Ceres Seq. ID no. 15176153
acaaaacaaaatctgaacttcaaaagcaaagcttcccactctcgttattctctaaaccattcccaagaaaaaaaaaatcaaaatgtcttcgttagttttcaaactctttttatttgtgtctctcttccaaatctcaatctctgctaggaaactagcacaagatgaaccaaaccagttccaatcattgaaataccacaaaggagctcttctctccggcaaaatctccattaacctattctggtacggaaaattcaaaccagctcaaagagcaatcatctccgatttcatcacttcgctttcacattcctcttcagaccaaccatctgtcgccacgtggtggaaaaccactgagaaatactacaaactcgccgcaggagataaaactccttctccttcactctcactcactctcaagtcacaaatcctcgacgagacttactctctcggaaaatctctaacagacagagacatccgcaagttagcctcaaaaggagatcaatacgatgcggttaacgttgttttgacttcagctgacgtggcggtaactggatttggtatgagtcgatgcgggacacacggacatgctcgtggtaatgcgggtaaacgcggatccaaattcgcttatatttgggtcggaaactccgaaacgcaatgcccgggtcaatgcgcgtggccatttcacgcaccggtgtacggtcctcagagcccgccgctcgtggcgccgaacaacgatgtgggactcgacggtatggtgattaacttagcgagtcttttagctggaaccgcaacgaacccctttggtaatggttattaccagggcccacaaaacgcaccgctcgaagctgcgtccgcgtgtcctggtgtttatgggaaaggagcttatcctggttacgctggaaatttacttgtcgatgctacgacgggaggtagttttaatgcgtatggtgcaaacggcaggaagttcttgctacctgcgttgtatgatcctacaacgtcggattgctctactatggtttgaggaagaaaaaatatgtttgatgtttcatcttttggttttgtagtagaaaatgatactattctagtgtaattcttttattttattcattaatattattctgagttcc

SEQ ID NO: 21085 - protein, 311 aa, Zea mays subsp. mays
  peptide (1)..(311): Ceres Seq. ID no. 15176154
  misc_feature (35)..(311): Pfam Name: Pfam Description:  Phosphate-induced protein 1 conserved region
  misc_feature (1)..(311): NCBI GI NO: 21593043 NR Description: putative phi-1-like phosphate-induced protein
  misc_feature (1)..(311): NCBI GI NO: 15236667 NR Description: phi-1 phosphate-induced protein -related
  misc_feature (2)..(311): NCBI GI NO: 3759184 NR Description: phi-1 [Nicotiana tabacum]
  misc_feature (1)..(310): NCBI GI NO: 15219504 NR Description: phosphate-induced (phi-1) protein -related
  misc_feature (2)..(311): NCBI GI NO: 15237656 NR Description: phi-1-related protein [Arabidopsis thaliana]
  misc_feature (1)..(311): NCBI GI NO: 31074969 NR Description: erg-1 [Solanum tuberosum]
  misc_feature (1)..(242): NCBI GI NO: 11762144 NR Description: At1g35140 [Arabidopsis thaliana]
  misc_feature (43)..(311): NCBI GI NO: 15242420 NR Description: expressed protein [Arabidopsis thaliana]
  misc_feature (118)..(310): NCBI GI NO: 13194680 NR Description: phosphate-induced protein 1-like protein
  misc_feature (17)..(308): NCBI GI NO: 21594010 NR Description: unknown [Arabidopsis thaliana]
MSSLVFKLFLFVSLFQISISARKLAQDEPNQFQSLKYHKGALLSGKISINLFWYGKFKPAQRAIISDFITSLSHSSSDQPSVATWWKTTEKYYKLAAGDKTPSPSLSLTLKSQILDETYSLGKSLTDRDIRKLASKGDQYDAVNVVLTSADVAVTGFGMSRCGTHGHARGNAGKRGSKFAYIWVGNSETQCPGQCAWPFHAPVYGPQSPPLVAPNNDVGLDGMVINLASLLAGTATNPFGNGYYQGPQNAPLEAASACPGVYGKGAYPGYAGNLLVDATTGGSFNAYGANGRKFLLPALYDPTTSDCSTMV

SEQ ID NO: 21086 - DNA, 806 bp, Zea mays subsp. mays
  misc_feature (1)..(806): Ceres Seq. ID no. 15174297
gtttagattacttttcgagaaatcgacgcggaaagagcttcttcttcttcttccatctctccgattcgcaaagaaggaatgtcgagtctatacagaggtgtttcaaggaaagagaaacccagacgtcatcatgggttgaatcagcagaagaggcaagagatcaaggaagcttttgatctctttgacactgatggctctggtaccatcgatgctaaagagcttaatgttgctatgagggcgcttggtttcgagatgacggaagagcaaatcgagaaaatgatagcagatgtggacaaggatggaagtggagccatagattacgatgagttttaccatatgatgactgctaaaattggtgaacgtgacaccaaagaagagctcaccaaggctttcaagatcattgatcttgacaataatgggaagatatctgctgatgatatcaaacgcatggcaaaggacttgggtgaaaacttcactgatgctgagatacgtgaaatggtggaagaagctgaccgtgaccgtgatggtgaagttaatatggaagagttcatgaggatgatgaagagaactgctgcttatgagtactaaaatatagttgttgttgtattggtactgatgaggtctctgttataaatacttccttttaaccgtggcattactatatgtctttactgaagatacgtgtttccgtttttttatctattttatgagacaagtttggtcttttgtgttggtttatgttgtatcaaaagacttcggattagtttgcaaaagtttcttaaatgtggaggaggttgctttggttt

SEQ ID NO: 21087 - protein, 169 aa, Zea mays subsp. mays
  peptide (1)..(169): Ceres Seq. ID no. 15174298
  misc_feature (136)..(164): Pfam Name: Pfam Description:  EF hand
  misc_feature (1)..(165): NCBI GI NO: 15229732 NR Description: caltractin (centrin) [Arabidopsis thaliana]
  misc_feature (1)..(169): NCBI GI NO: 729051 NR Description: CALTRACTIN (CENTRIN)
  misc_feature (1)..(165): NCBI GI NO: 6358509 NR Description: centrin [Nicotiana tabacum]
  misc_feature (1)..(164): NCBI GI NO: 6358511 NR Description: centrin [Nicotiana tabacum]
  misc_feature (1)..(169): NCBI GI NO: 34906754 NR Description: putative caltractin
  misc_feature (3)..(169): NCBI GI NO: 33146874 NR Description: putative caltractin
  misc_feature (2)..(165): NCBI GI NO: 15234588 NR Description: caltractin (centrin), putative
  misc_feature (2)..(165): NCBI GI NO: 21554823 NR Description: caltractin-like protein [Arabidopsis thaliana]
  misc_feature (1)..(167): NCBI GI NO: 2920835 NR Description: centrin [Marsilea vestita]
  misc_feature (9)..(167): NCBI GI NO: 543936 NR Description: CALTRACTIN (CENTRIN)
MSSLYRGVSRKEKPRRHHGLNQQKRQEIKEAFDLFDTDGSGTIDAKELNVAMRALGFEMTEEQIEKMIADVDKDGSGAIDYDEFYHMMTAKIGERDTKEELTKAFKIIDLDNNGKISADDIKRMAKDLGENFTDAEIREMVEEADRDRDGEVNMEEFMRMMKRTAAYEY

SEQ ID NO: 21088 - protein, 118 aa, Zea mays subsp. mays
  peptide (1)..(118): Ceres Seq. ID no. 15174299
  misc_feature (85)..(113): Pfam Name: Pfam Description:  EF hand
  misc_feature (1)..(114): NCBI GI NO: 15229732 NR Description: caltractin (centrin) [Arabidopsis thaliana]
  misc_feature (1)..(118): NCBI GI NO: 729051 NR Description: CALTRACTIN (CENTRIN)
  misc_feature (1)..(114): NCBI GI NO: 6358509 NR Description: centrin [Nicotiana tabacum]
  misc_feature (1)..(113): NCBI GI NO: 6358511 NR Description: centrin [Nicotiana tabacum]
  misc_feature (1)..(118): NCBI GI NO: 34906754 NR Description: putative caltractin
  misc_feature (1)..(118): NCBI GI NO: 33146874 NR Description: putative caltractin
  misc_feature (1)..(114): NCBI GI NO: 15234588 NR Description: caltractin (centrin), putative
  misc_feature (1)..(114): NCBI GI NO: 21554823 NR Description: caltractin-like protein [Arabidopsis thaliana]
  misc_feature (1)..(116): NCBI GI NO: 2920835 NR Description: centrin [Marsilea vestita]
  misc_feature (1)..(116): NCBI GI NO: 543936 NR Description: CALTRACTIN (CENTRIN)
MRALGFEMTEEQIEKMIADVDKDGSGAIDYDEFYHMMTAKIGERDTKEELTKAFKIIDLDNNGKISADDIKRMAKDLGENFTDAEIREMVEEADRDRDGEVNMEEFMRMMKRTAAYEY

SEQ ID NO: 21089 - protein, 111 aa, Zea mays subsp. mays
  peptide (1)..(111): Ceres Seq. ID no. 15174300
  misc_feature (78)..(106): Pfam Name: Pfam Description:  EF hand
  misc_feature (1)..(107): NCBI GI NO: 15229732 NR Description: caltractin (centrin) [Arabidopsis thaliana]
  misc_feature (1)..(111): NCBI GI NO: 729051 NR Description: CALTRACTIN (CENTRIN)
  misc_feature (1)..(107): NCBI GI NO: 6358509 NR Description: centrin [Nicotiana tabacum]
  misc_feature (1)..(106): NCBI GI NO: 6358511 NR Description: centrin [Nicotiana tabacum]
  misc_feature (1)..(111): NCBI GI NO: 34906754 NR Description: putative caltractin
  misc_feature (1)..(111): NCBI GI NO: 33146874 NR Description: putative caltractin
  misc_feature (1)..(107): NCBI GI NO: 15234588 NR Description: caltractin (centrin), putative
  misc_feature (1)..(107): NCBI GI NO: 21554823 NR Description: caltractin-like protein [Arabidopsis thaliana]
  misc_feature (1)..(109): NCBI GI NO: 2920835 NR Description: centrin [Marsilea vestita]
  misc_feature (1)..(109): NCBI GI NO: 543936 NR Description: CALTRACTIN (CENTRIN)
MTEEQIEKMIADVDKDGSGAIDYDEFYHMMTAKIGERDTKEELTKAFKIIDLDNNGKISADDIKRMAKDLGENFTDAEIREMVEEADRDRDGEVNMEEFMRMMKRTAAYEY

SEQ ID NO: 21090 - DNA, 1011 bp, Zea mays subsp. mays
  misc_feature (1)..(1011): Ceres Seq. ID no. 15178847
ataaaaactaaaaattaagaaatagcgtcgaacgttctctctccctctctcaagtaacagagatccaaatagatggagaagggagagtcaacaagcacgtcttactccgacaccaacggctcaaacgaaccagatcacgacttcgaatgcaacatctgcttcgagttagctcaagaccccatcgtcactctctgcggccacctcttctgctggccttgcttgtaccgttggcttcaccaccactctcactcccaagaatgccctgtctgcaaagctctcgtccaagacgacaagctcgtccctctctacggccgcggcaagaaccagaccgaccctaggaccaaacgttaccccgggatgcggattcccaacaggccagctggtcagagacccgagacggcctctcctcctcctcagcagcctcagaacgacgcggcgagtaactttttcaactacgggattggtttgatgggtgggtttatgcccatggcgactaccaggattgggaacttcagctttggggttggtgggttgttgccttctttgtttaactttcagttccatgggtttcctgacgcggcgctctatggcaccgcgccgggttacccttttggtggttaccataacggtttccgtggagttcctggtggtaacaatgaaccgacggcgcctggtggagggcacccaagcgatgcagctctgaagaatatcctcattgtcgttggaatctgcgtgttcttcttccttttattgtgaaaacagtttgggtttttttttttattatccaggtatgatagttgcaaactctcttacttggtttgaacaatgtcttgtatatacgttacggtaatagcctgagtatgtgtctccttttcctacgtttgttttttgctatttgaagaagattacttggatcttctatacacaactctcgttttttaatcttatttgcttttgacgttgtatctgcatcttatgagaactagttggtgtggaaaataactattgcat

SEQ ID NO: 21091 - protein, 227 aa, Zea mays subsp. mays
  peptide (1)..(227): Ceres Seq. ID no. 15178848
  misc_feature (26)..(66): Pfam Name: RING finger Pfam Description: Zinc finger, C3HC4 type
  misc_feature (1)..(226): NCBI GI NO: 15224062 NR Description: zinc finger
  misc_feature (1)..(226): NCBI GI NO: 21553849 NR Description: putative RING zinc finger protein
  misc_feature (9)..(227): NCBI GI NO: 18394721 NR Description: zinc finger
  misc_feature (4)..(227): NCBI GI NO: 34909840 NR Description: P0403C05.28
  misc_feature (4)..(226): NCBI GI NO: 29150403 NR Description: unknown protein
  misc_feature (14)..(147): NCBI GI NO: 15222064 NR Description: zinc finger
  misc_feature (5)..(226): NCBI GI NO: 17554742 NR Description: RiNg Finger protein (24.9 kD) (rnf-5)
  misc_feature (1)..(201): NCBI GI NO: 39581891 NR Description: Hypothetical protein CBG20152
  misc_feature (6)..(165): NCBI GI NO: 29841097 NR Description: similar to GenBank Accession Number AJ428489putative ubiquitin ligase in Taenia solium
  misc_feature (4)..(154): NCBI GI NO: 31215747 NR Description: ENSANGP00000012621 [Anopheles gambiae]
MEKGESTSTSYSDTNGSNEPDHDFECNICFELAQDPIVTLCGHLFCWPCLYRWLHHHSHSQECPVCKALVQDDKLVPLYGRGKNQTDPRTKRYPGMRIPNRPAGQRPETASPPPQQPQNDAASNFFNYGIGLMGGFMPMATTRIGNFSFGVGGLLPSLFNFQFHGFPDAALYGTAPGYPFGGYHNGFRGVPGGNNEPTAPGGGHPSDAALKNILIVVGICVFFFLLL

SEQ ID NO: 21092 - protein, 132 aa, Zea mays subsp. mays
  peptide (1)..(132): Ceres Seq. ID no. 15178849
  misc_feature (1)..(131): NCBI GI NO: 15224062 NR Description: zinc finger
  misc_feature (1)..(131): NCBI GI NO: 21553849 NR Description: putative RING zinc finger protein
  misc_feature (1)..(132): NCBI GI NO: 18394721 NR Description: zinc finger
  misc_feature (1)..(132): NCBI GI NO: 34909840 NR Description: P0403C05.28
  misc_feature (1)..(131): NCBI GI NO: 29150403 NR Description: unknown protein
  misc_feature (1)..(52): NCBI GI NO: 15222064 NR Description: zinc finger
  misc_feature (1)..(131): NCBI GI NO: 17554742 NR Description: RiNg Finger protein (24.9 kD) (rnf-5)
  misc_feature (1)..(106): NCBI GI NO: 39581891 NR Description: Hypothetical protein CBG20152
  misc_feature (1)..(70): NCBI GI NO: 29841097 NR Description: similar to GenBank Accession Number AJ428489putative ubiquitin ligase in Taenia solium
  misc_feature (1)..(59): NCBI GI NO: 31215747 NR Description: ENSANGP00000012621 [Anopheles gambiae]
MRIPNRPAGQRPETASPPPQQPQNDAASNFFNYGIGLMGGFMPMATTRIGNFSFGVGGLLPSLFNFQFHGFPDAALYGTAPGYPFGGYHNGFRGVPGGNNEPTAPGGGHPSDAALKNILIVVGICVFFFLLL

SEQ ID NO: 21093 - DNA, 705 bp, Zea mays subsp. mays
  misc_feature (1)..(705): Ceres Seq. ID no. 15178899
gcaagcgatttcgagaagaagctaaaaaaaatggcgtcaacacgtctcttcgttctctactgcttcttcttcgtcttctcaatcatcttctccgtttccgaatctaaagccttgcagcctcacgccgccgagtctttcaacgtcagcctcatccagaaactgaggagtagttgctcgtacacagtgatcatctcgacgagctgttcgtcgtcgaggtacacgcgcgaccaaatcagcgtggccttcggcgatgcatacggtaaccagatatacgcaccaaggcttgacgatccatccacaaagactttcgagcaatgttcatccgacacgttcgagataaacggaccatgcacttaccagatctgctacgtctatctctacaggtctggtcccgatggctggatccccgagagtgttaagataaacacacatggctccaaagccgtcaccttcccttataacaccctcgtccccgagagtatatggtacggtttcaattactgcaacagcgcctcgggttctagtgtcctatccattggtcttgtccttctggggtttgttgtcgccggttcaacattgcttttgtaaaatggttggtttgtgtgaacatattaggacttaatgctgaataaatgtgtaaaaactgttggggttctagagatgtccctattatctgtgtaatctatgatgaagttactacctgct

SEQ ID NO: 21094 - protein, 195 aa, Zea mays subsp. mays
  peptide (1)..(195): Ceres Seq. ID no. 15178900
  misc_feature (41)..(168): Pfam Name: ATS3 Pfam Description: Embryo-specific protein 3,
  misc_feature (11)..(195): NCBI GI NO: 8809633 NR Description: contains similarity to embryo-specific protein3~gene_id:MMI9
  misc_feature (11)..(195): NCBI GI NO: 15241727 NR Description: expressed protein [Arabidopsis thaliana]
  misc_feature (16)..(169): NCBI GI NO: 15227355 NR Description: hypothetical protein [Arabidopsis thaliana]
  misc_feature (57)..(170): NCBI GI NO: 15241758 NR Description: embryo-specific protein - like
  misc_feature (57)..(170): NCBI GI NO: 26450767 NR Description: embryo-specific protein like
  misc_feature (45)..(175): NCBI GI NO: 3335171 NR Description: embryo-specific protein 3 [Arabidopsis thaliana]
  misc_feature (45)..(175): NCBI GI NO: 13877521 NR Description: embryo-specific protein 3; ATS3
  misc_feature (45)..(175): NCBI GI NO: 15240721 NR Description: embryo-specific protein 3 (ATS3)
  misc_feature (33)..(175): NCBI GI NO: 34910236 NR Description: OSJNBa0089K24.2
ASDFEKKLKKMASTRLFVLYCFFFVFSIIFSVSESKALQPHAAESFNVSLIQKLRSSCSYTVIISTSCSSSRYTRDQISVAFGDAYGNQIYAPRLDDPSTKTFEQCSSDTFEINGPCTYQICYVYLYRSGPDGWIPESVKINTHGSKAVTFPYNTLVPESIWYGFNYCNSASGSSVLSIGLVLLGFVVAGSTLLL

SEQ ID NO: 21095 - protein, 185 aa, Zea mays subsp. mays
  peptide (1)..(185): Ceres Seq. ID no. 15178901
  misc_feature (31)..(158): Pfam Name: ATS3 Pfam Description: Embryo-specific protein 3,
  misc_feature (1)..(185): NCBI GI NO: 8809633 NR Description: contains similarity to embryo-specific protein3~gene_id:MMI9
  misc_feature (1)..(185): NCBI GI NO: 15241727 NR Description: expressed protein [Arabidopsis thaliana]
  misc_feature (6)..(159): NCBI GI NO: 15227355 NR Description: hypothetical protein [Arabidopsis thaliana]
  misc_feature (47)..(160): NCBI GI NO: 15241758 NR Description: embryo-specific protein - like
  misc_feature (47)..(160): NCBI GI NO: 26450767 NR Description: embryo-specific protein like
  misc_feature (35)..(165): NCBI GI NO: 3335171 NR Description: embryo-specific protein 3 [Arabidopsis thaliana]
  misc_feature (35)..(165): NCBI GI NO: 13877521 NR Description: embryo-specific protein 3; ATS3
  misc_feature (35)..(165): NCBI GI NO: 15240721 NR Description: embryo-specific protein 3 (ATS3)
  misc_feature (23)..(165): NCBI GI NO: 34910236 NR Description: OSJNBa0089K24.2
MASTRLFVLYCFFFVFSIIFSVSESKALQPHAAESFNVSLIQKLRSSCSYTVIISTSCSSSRYTRDQISVAFGDAYGNQIYAPRLDDPSTKTFEQCSSDTFEINGPCTYQICYVYLYRSGPDGWIPESVKINTHGSKAVTFPYNTLVPESIWYGFNYCNSASGSSVLSIGLVLLGFVVAGSTLLL

SEQ ID NO: 21096 - DNA, 817 bp, Zea mays subsp. mays
  misc_feature (1)..(817): Ceres Seq. ID no. 15176828
ctcgtccagggatcatcatgatttgattggcaacttaaccagaatcaatgatgaatgacctgagcaaatacaggtcaattttcactagattctattttcttggggaaatcaagtttctctgagacggttatcttccctatcatctgaaagtccctgagactttcgccgctctcatctctctctctcggttcgggtatgactcgtcacgtgatactgacatcagaagaaagaaactctccaccgaccacgatgatcaaacacgcggagaggaggaaggtgggagaggtagccggaggagccgcagctgagtgtgcggccgtgtggtgttgcggtccttgcgccgtggttaacctagttgttctcgctgtgtatagagttcccgcggccgtttgtaagaaagcttggcgacaaaccaaacggcaacgttttatgaggagacgacacggtttacttgcgtcagcggctgccgagagcaccgtgcacgctagactaaaggaggaagatccaacggctgaaattgttttcgaagaaaatgtagtgaatgtcgagttaaacgacgtcgtcgtgcttgaggatgagatgtttgaacgtttctatggggcaggattttggagaagcccgtcacagagggacacatcatcaggaagtatatgatttctttgtgaaaatattaataattaatttgatttatatgtgattctttaaaattatcatgcgggtatgtgaataggagaaatgtagtaatatttatacattgttcgtttttgtttcgttcgatttaaatataactacgtctcaattgggatttggggtggct

SEQ ID NO: 21097 - protein, 152 aa, Zea mays subsp. mays
  peptide (1)..(152): Ceres Seq. ID no. 15176829
  misc_feature (1)..(152): NCBI GI NO: 18401348 NR Description: expressed protein [Arabidopsis thaliana]
  misc_feature (12)..(152): NCBI GI NO: 21617979 NR Description: unknown [Arabidopsis thaliana]
  misc_feature (68)..(152): NCBI GI NO: 25370727 NR Description: hypothetical protein At2g27180
  misc_feature (30)..(86): NCBI GI NO: 18399317 NR Description: expressed protein [Arabidopsis thaliana]
  misc_feature (122)..(149): NCBI GI NO: 18399317 NR Description: expressed protein [Arabidopsis thaliana]
  misc_feature (30)..(149): NCBI GI NO: 15240027 NR Description: hypothetical protein [Arabidopsis thaliana]
  misc_feature (1)..(148): NCBI GI NO: 322884 NR Description: pollen-preferential protein - trumpet lily
MTRHVILTSEERNSPPTTMIKHAERRKVGEVAGGAAAECAAVWCCGPCAVVNLVVLAVYRVPAAVCKKAWRQTKRQRFMRRRHGLLASAAAESTVHARLKEEDPTAEIVFEENVVNVELNDVVVLEDEMFERFYGAGFWRSPSQRDTSSGSI

SEQ ID NO: 21098 - protein, 134 aa, Zea mays subsp. mays
  peptide (1)..(134): Ceres Seq. ID no. 15176830
  misc_feature (1)..(134): NCBI GI NO: 18401348 NR Description: expressed protein [Arabidopsis thaliana]
  misc_feature (1)..(134): NCBI GI NO: 21617979 NR Description: unknown [Arabidopsis thaliana]
  misc_feature (50)..(134): NCBI GI NO: 25370727 NR Description: hypothetical protein At2g27180
  misc_feature (12)..(68): NCBI GI NO: 18399317 NR Description: expressed protein [Arabidopsis thaliana]
  misc_feature (104)..(131): NCBI GI NO: 18399317 NR Description: expressed protein [Arabidopsis thaliana]
  misc_feature (12)..(131): NCBI GI NO: 15240027 NR Description: hypothetical protein [Arabidopsis thaliana]
  misc_feature (1)..(130): NCBI GI NO: 322884 NR Description: pollen-preferential protein - trumpet lily
MIKHAERRKVGEVAGGAAAECAAVWCCGPCAVVNLVVLAVYRVPAAVCKKAWRQTKRQRFMRRRHGLLASAAAESTVHARLKEEDPTAEIVFEENVVNVELNDVVVLEDEMFERFYGAGFWRSPSQRDTSSGSI

SEQ ID NO: 21099 - DNA, 1445 bp, Zea mays subsp. mays
  misc_feature (1)..(1445): Ceres Seq. ID no. 15176709
ctctcttcgctcagctcccacaagaaagggcgaagaatctctccctcctccttgaccttctcttcgccatcgattccctttgaggtgcaaaaatggttgaacagactcagcaacaaccctcgattctccagaaggcttcttctggccagctcatgcgctccggggtttctcaggacatccatggctacgcatctggtttccagaggcgtgcgacctacggaaactactcgaacgctgcgtttcagtaccctctcgcggcctcttccaggattgtggcgactactactacttctcctgtttttgtgcaagctccaagtgagaaaggattctctagcttcgctattgatttcttgatgggtggtgtttccgctgctgtctctaagaccgcggctgctccaattgagcgtgtgaagcttttgattcagaaccaggatgagatgcttaaggctggtaggttatctgagccttacaagggtattggtgattgtttcggaaggactattaaggatgaagggtttggttctttgtggagaggaaacactgctaacgttatccgttacttccccactcaggcattgaactttgcgttcaaagattacttcaagaggcttttcaactttaagaaggacagggatggttactggaagtggtttgctggtaacttgggatctggaggtgctgctggtgcatcttcccttctcttcgtgtactctcttgactatgcacgtacccgtctcgccaacgactccaaggcagccaagaagggaggtgaaaggcagttcaatggtcttgttgatgtctacaagaagactctcaagtccgatggtatcgctggactttaccgtggattcaacatctcctgtgttggtatcattgtctaccgtggtctctactttggtctgtatgactctttgaagcctctcctccccgctgacctccaggacagtttcttcgcttcctttgcccttggatggctcatcaccaacggtgctggtcttgcatcgtacccaatcgacacagtccgtagaagaatgatgatgacctccggtgaagccgtcaagtacaagagctccatggatgcattccaacagatcctgaagaaggaaggacccaagtctctgttcaagggtgctggtgccaacatcctccgtgctattgcaggtgctggtgtgctctctggatacgacaagctccagttacttcttctcggaaagaagtacggatctggatccggctaagcaatactaatccaccaaacagttaaaaagcttcggctttatttttatttttctcgatttaatttgcagttttttcagactttttttaaaaaaggtcaagatgttgatgaaatcttttgctataaaaactagagaggaggcaaggggaatttttcttattgaataaattttgtatggggatggagtttgacttcctcctttgaaccc

SEQ ID NO: 21100 - protein, 381 aa, Zea mays subsp. mays
  peptide (1)..(381): Ceres Seq. ID no. 15176710
  misc_feature (1)..(379): NCBI GI NO: 444790 NR Description: nucleotide translocator
  misc_feature (1)..(379): NCBI GI NO: 478810 NR Description: ADP,ATP carrier protein - Arabidopsis thaliana
  misc_feature (1)..(379): NCBI GI NO: 15240640 NR Description: mitochondrial ADP,ATP carrier protein 2
  misc_feature (1)..(379): NCBI GI NO: 15231937 NR Description: mitochondrial ADP,ATP carrier protein 1
  misc_feature (7)..(379): NCBI GI NO: 99658 NR Description: ADP,ATP carrier protein - Arabidopsis thaliana
  misc_feature (7)..(379): NCBI GI NO: 3334115 NR Description: ADP,ATP carrier protein 1, mitochondrial precursor
  misc_feature (7)..(379): NCBI GI NO: 113457 NR Description: ADP,ATP carrier protein, mitochondrial precursor
  misc_feature (7)..(379): NCBI GI NO: 1890116 NR Description: ADP/ATP translocator [Lycopersicon esculentum]
  misc_feature (7)..(379): NCBI GI NO: 100424 NR Description: ADP,ATP carrier protein precursor - potato
  misc_feature (1)..(379): NCBI GI NO: 2780194 NR Description: adenine nucleotide translocator [Lupinus albus]
MVEQTQQQPSILQKASSGQLMRSGVSQDIHGYASGFQRRATYGNYSNAAFQYPLAASSRIVATTTTSPVFVQAPSEKGFSSFAIDFLMGGVSAAVSKTAAAPIERVKLLIQNQDEMLKAGRLSEPYKGIGDCFGRTIKDEGFGSLWRGNTANVIRYFPTQALNFAFKDYFKRLFNFKKDRDGYWKWFAGNLGSGGAAGASSLLFVYSLDYARTRLANDSKAAKKGGERQFNGLVDVYKKTLKSDGIAGLYRGFNISCVGIIVYRGLYFGLYDSLKPLLPADLQDSFFASFALGWLITNGAGLASYPIDTVRRRMMMTSGEAVKYKSSMDAFQQILKKEGPKSLFKGAGANILRAIAGAGVLSGYDKLQLLLLGKKYGSGSG

SEQ ID NO: 21101 - protein, 361 aa, Zea mays subsp. mays
  peptide (1)..(361): Ceres Seq. ID no. 15176711
  misc_feature (1)..(359): NCBI GI NO: 444790 NR Description: nucleotide translocator
  misc_feature (1)..(359): NCBI GI NO: 478810 NR Description: ADP,ATP carrier protein - Arabidopsis thaliana
  misc_feature (1)..(359): NCBI GI NO: 15240640 NR Description: mitochondrial ADP,ATP carrier protein 2
  misc_feature (1)..(359): NCBI GI NO: 15231937 NR Description: mitochondrial ADP,ATP carrier protein 1
  misc_feature (1)..(359): NCBI GI NO: 99658 NR Description: ADP,ATP carrier protein - Arabidopsis thaliana
  misc_feature (1)..(359): NCBI GI NO: 3334115 NR Description: ADP,ATP carrier protein 1, mitochondrial precursor
  misc_feature (1)..(359): NCBI GI NO: 113457 NR Description: ADP,ATP carrier protein, mitochondrial precursor
  misc_feature (1)..(359): NCBI GI NO: 1890116 NR Description: ADP/ATP translocator [Lycopersicon esculentum]
  misc_feature (1)..(359): NCBI GI NO: 100424 NR Description: ADP,ATP carrier protein precursor - potato
  misc_feature (1)..(359): NCBI GI NO: 2780194 NR Description: adenine nucleotide translocator [Lupinus albus]
MRSGVSQDIHGYASGFQRRATYGNYSNAAFQYPLAASSRIVATTTTSPVFVQAPSEKGFSSFAIDFLMGGVSAAVSKTAAAPIERVKLLIQNQDEMLKAGRLSEPYKGIGDCFGRTIKDEGFGSLWRGNTANVIRYFPTQALNFAFKDYFKRLFNFKKDRDGYWKWFAGNLGSGGAAGASSLLFVYSLDYARTRLANDSKAAKKGGERQFNGLVDVYKKTLKSDGIAGLYRGFNISCVGIIVYRGLYFGLYDSLKPLLPADLQDSFFASFALGWLITNGAGLASYPIDTVRRRMMMTSGEAVKYKSSMDAFQQILKKEGPKSLFKGAGANILRAIAGAGVLSGYDKLQLLLLGKKYGSGSG

SEQ ID NO: 21102 - protein, 294 aa, Zea mays subsp. mays
  peptide (1)..(294): Ceres Seq. ID no. 15176712
  misc_feature (1)..(292): NCBI GI NO: 444790 NR Description: nucleotide translocator
  misc_feature (1)..(292): NCBI GI NO: 478810 NR Description: ADP,ATP carrier protein - Arabidopsis thaliana
  misc_feature (1)..(292): NCBI GI NO: 15240640 NR Description: mitochondrial ADP,ATP carrier protein 2
  misc_feature (1)..(292): NCBI GI NO: 15231937 NR Description: mitochondrial ADP,ATP carrier protein 1
  misc_feature (1)..(292): NCBI GI NO: 99658 NR Description: ADP,ATP carrier protein - Arabidopsis thaliana
  misc_feature (1)..(292): NCBI GI NO: 3334115 NR Description: ADP,ATP carrier protein 1, mitochondrial precursor
  misc_feature (1)..(292): NCBI GI NO: 113457 NR Description: ADP,ATP carrier protein, mitochondrial precursor
  misc_feature (1)..(292): NCBI GI NO: 1890116 NR Description: ADP/ATP translocator [Lycopersicon esculentum]
  misc_feature (1)..(292): NCBI GI NO: 100424 NR Description: ADP,ATP carrier protein precursor - potato
  misc_feature (1)..(292): NCBI GI NO: 2780194 NR Description: adenine nucleotide translocator [Lupinus albus]
MGGVSAAVSKTAAAPIERVKLLIQNQDEMLKAGRLSEPYKGIGDCFGRTIKDEGFGSLWRGNTANVIRYFPTQALNFAFKDYFKRLFNFKKDRDGYWKWFAGNLGSGGAAGASSLLFVYSLDYARTRLANDSKAAKKGGERQFNGLVDVYKKTLKSDGIAGLYRGFNISCVGIIVYRGLYFGLYDSLKPLLPADLQDSFFASFALGWLITNGAGLASYPIDTVRRRMMMTSGEAVKYKSSMDAFQQILKKEGPKSLFKGAGANILRAIAGAGVLSGYDKLQLLLLGKKYGSGSG

SEQ ID NO: 21103 - DNA, 748 bp, Zea mays subsp. mays
  misc_feature (1)..(748): Ceres Seq. ID no. 15177492
aacaatattatctcaaagctaaccaacaatggcgttcccaaaggtgttcttcgacataaacatcaacggccaggcagcgggaaggatcgtgatggagttgtatacggataagacgccgaagacggctgagaatttcagagctctgtgcactggagagaagggagtggggcgtaagggaaagcccctccacttcaagggatcttccttccaccgagtgatccccagtttcatgtgccagggaggtgatttcaccgcgggaaacgggacaggaggtgagtccatctacggtgataagttcgaggacgagaactttgagaggaagcacacgggtcctggcaacctttccatggcgaacgccggagccaacaccaacggatctcagttcttcatctgcaccgtaaaaaccgattggcttgacggtaagcacgtggtgttcgggcaggtggtggaagggttagacgtggtgaaggcgatcgagaaggtgggatcgtcgtctggaaagccgtcgaagccggtggttatcgccgattgtggacagctctcttagatagatctctctcatctatcctcattttaaattatagcgtcagcgtccttgtcctatatatgttatgtatgtttggtgtctcgtttgtatgtgtagtcataatcttggtgtgtattctcatgacagtcttttggattgccagagagaaactcgtcaccctaattacctactaccataaataaatattgaacatcttgcagt

SEQ ID NO: 21104 - protein, 172 aa, Zea mays subsp. mays
  peptide (1)..(172): Ceres Seq. ID no. 15177493
  misc_feature (1)..(172): NCBI GI NO: 15234781 NR Description: peptidylprolyl isomerase ROC1
  misc_feature (4)..(172): NCBI GI NO: 15226467 NR Description: cyclophilin (CYP2) [Arabidopsis thaliana]
  misc_feature (4)..(172): NCBI GI NO: 11270324 NR Description: peptidylprolyl isomerase (EC 5.2.1.8) CYP2
  misc_feature (4)..(172): NCBI GI NO: 15227259 NR Description: cytosolic cyclophilin (ROC3)
  misc_feature (4)..(172): NCBI GI NO: 21886603 NR Description: peptidylprolyl isomerase (cyclophilin)
  misc_feature (1)..(172): NCBI GI NO: 17981611 NR Description: cyclophilin [Glycine max]
  misc_feature (2)..(172): NCBI GI NO: 18076088 NR Description: cyclophilin [Ricinus communis]
  misc_feature (1)..(172): NCBI GI NO: 1076510 NR Description: peptidylprolyl isomerase (EC 5
  misc_feature (1)..(171): NCBI GI NO: 11270320 NR Description: peptidylprolyl isomerase (EC 5.2.1.8) vcCyP
  misc_feature (1)..(171): NCBI GI NO: 11270318 NR Description: peptidylprolyl isomerase (EC 5.2.1.8) CYP18
MAFPKVFFDININGQAAGRIVMELYTDKTPKTAENFRALCTGEKGVGRKGKPLHFKGSSFHRVIPSFMCQGGDFTAGNGTGGESIYGDKFEDENFERKHTGPGNLSMANAGANTNGSQFFICTVKTDWLDGKHVVFGQVVEGLDVVKAIEKVGSSSGKPSKPVVIADCGQLS

SEQ ID NO: 21105 - protein, 151 aa, Zea mays subsp. mays
  peptide (1)..(151): Ceres Seq. ID no. 15177494
  misc_feature (1)..(151): NCBI GI NO: 15234781 NR Description: peptidylprolyl isomerase ROC1
  misc_feature (1)..(151): NCBI GI NO: 15226467 NR Description: cyclophilin (CYP2) [Arabidopsis thaliana]
  misc_feature (1)..(151): NCBI GI NO: 11270324 NR Description: peptidylprolyl isomerase (EC 5.2.1.8) CYP2
  misc_feature (1)..(151): NCBI GI NO: 15227259 NR Description: cytosolic cyclophilin (ROC3)
  misc_feature (1)..(151): NCBI GI NO: 21886603 NR Description: peptidylprolyl isomerase (cyclophilin)
  misc_feature (1)..(151): NCBI GI NO: 17981611 NR Description: cyclophilin [Glycine max]
  misc_feature (1)..(151): NCBI GI NO: 18076088 NR Description: cyclophilin [Ricinus communis]
  misc_feature (1)..(151): NCBI GI NO: 1076510 NR Description: peptidylprolyl isomerase (EC 5
  misc_feature (1)..(150): NCBI GI NO: 11270320 NR Description: peptidylprolyl isomerase (EC 5.2.1.8) vcCyP
  misc_feature (1)..(150): NCBI GI NO: 11270318 NR Description: peptidylprolyl isomerase (EC 5.2.1.8) CYP18
MELYTDKTPKTAENFRALCTGEKGVGRKGKPLHFKGSSFHRVIPSFMCQGGDFTAGNGTGGESIYGDKFEDENFERKHTGPGNLSMANAGANTNGSQFFICTVKTDWLDGKHVVFGQVVEGLDVVKAIEKVGSSSGKPSKPVVIADCGQLS

SEQ ID NO: 21106 - protein, 105 aa, Zea mays subsp. mays
  peptide (1)..(105): Ceres Seq. ID no. 15177495
  misc_feature (1)..(105): NCBI GI NO: 15234781 NR Description: peptidylprolyl isomerase ROC1
  misc_feature (1)..(105): NCBI GI NO: 15226467 NR Description: cyclophilin (CYP2) [Arabidopsis thaliana]
  misc_feature (1)..(105): NCBI GI NO: 11270324 NR Description: peptidylprolyl isomerase (EC 5.2.1.8) CYP2
  misc_feature (1)..(105): NCBI GI NO: 15227259 NR Description: cytosolic cyclophilin (ROC3)
  misc_feature (1)..(105): NCBI GI NO: 21886603 NR Description: peptidylprolyl isomerase (cyclophilin)
  misc_feature (1)..(105): NCBI GI NO: 17981611 NR Description: cyclophilin [Glycine max]
  misc_feature (1)..(105): NCBI GI NO: 18076088 NR Description: cyclophilin [Ricinus communis]
  misc_feature (1)..(105): NCBI GI NO: 1076510 NR Description: peptidylprolyl isomerase (EC 5
  misc_feature (1)..(104): NCBI GI NO: 11270320 NR Description: peptidylprolyl isomerase (EC 5.2.1.8) vcCyP
  misc_feature (1)..(104): NCBI GI NO: 11270318 NR Description: peptidylprolyl isomerase (EC 5.2.1.8) CYP18
MCQGGDFTAGNGTGGESIYGDKFEDENFERKHTGPGNLSMANAGANTNGSQFFICTVKTDWLDGKHVVFGQVVEGLDVVKAIEKVGSSSGKPSKPVVIADCGQLS

SEQ ID NO: 21107 - DNA, 1955 bp, Zea mays subsp. mays
  misc_feature (1)..(1955): Ceres Seq. ID no. 15179432
atttgatttcgctcagaaaagtagaaaacgccagccgaacacaccggtccgccgcccacgccagcgctgagctcaccaggaaaccgtcttcttccactggcgcgggctaggagcgtcgccgccgcgtcgcggttatgggtacggcggctgtcgtggaggacacgatacgcgtcgtcctcacctgcctccctgctccgcccttccgcaccaccggttcctcccgtccctaccagagtcccagcggcggcggcggcggcggggaccgcatcagccgcctctcagacgcggtgctctctaacatcgtggcgcgtctccccgccaaggacgcagcgcgcactaccgcgctctccaggcgctggcgccgcgtctgggcctccactccactcgtcctcgacgactccgacctcctcgtcttccacgacgacggcggctgctctacgcccaactggttagccgtcacagacaccgtgtcccacgtcctctcctcccacagggggcccatccgctttgtgcgcctcacctgctgctacatggcgctggcctcgcacaacggcgcgctccagtactggctccgggtcctcgctgcggggggagtcgaggatctcgtcctcgtcaaccgcccattacccacctccgtgggcctccccatcgacgtcctccacctcgcctccctccgcaccctctacctcggtttctggtgcttcccggacaccgccgccctcccgcgaggccgcgccaccgtgttcccctgcctccaggagattggactctgcgctaccgtcatccacgccagggacatcgactacctgctcgcctgcagccccgtgctcgagaagttcgccagcatcaccagcatctacttcacagaccctgtccggatccgcagctgcagcctccggtgccttgtcttctgggagtccctggccaatgagctcgacctggtcgtcgccccgcgcctccagcgcctaatcctgtggcagtcgcgccaatggatgatcggctccgtccatttccgcagcaggatcaggattggctccgccaccgaactcaaggtgctcggctacctggagccaagcatccaccagctcgagattggcggcaccataattgatagtggaacaaagatgaccccatctaacatggttccaagtgtcaagatcttggccttgaagatgcagttcagaatccgcaaggaagtcaagatgctgcccaccttcctgagatgctttcccaatgtggagacattgcatgttctgtcacatgaaactgatgagcaaaatggcaagttcaatttgaagttctgggaggaggttggctccatcagctgcctagagacacgcatcaccaaggtggtgtttgacaaattcagaggagagcgttgtgagctcgcgttcctcaagttcgtcctagagagggcagaatcgctgctgaagcttgtggttgtattggccaatggagatcaagcctcagtggatgagatgcttgccaagttgaagtctctgaccacggtgaaacgagccagcgatttccctactctgttggcagttgcccgtgagggtgacagcgcctggtactttgagagagcatccgatctttctgttactgaccccttcaatttgtgaagctcaaggcgatgacatattccatgaccaattctattgttctcctgagccaatcagttgttctttgtcattcagggtatacttgctaggcattccctagaatcttgtctcgtcttgtgttgactgtaaatgtgagtacagttctgagtgaatcaggagaggtatatagtttatggaaagcgctgcttgacatttcactattgaaaatataggttctgcatagctgctcttgagttgactacttccaaatgttgtcactggctagtttctcagttgtgatgtactgcatactgggcatagttggaactggaaaatatcatattggtaaccccg

SEQ ID NO: 21108 - protein, 495 aa, Zea mays subsp. mays
  peptide (1)..(495): Ceres Seq. ID no. 15179433
  misc_feature (45)..(90): Pfam Name: Pfam Description:  F-box domain
  misc_feature (7)..(494): NCBI GI NO: 34912332 NR Description: putative ribosomal RNA apurinic site specific lyase
  misc_feature (7)..(494): NCBI GI NO: 34912330 NR Description: putative ribosomal RNA apurinic site specific lyase
  misc_feature (9)..(493): NCBI GI NO: 34912334 NR Description: putative ribosomal RNA apurinic site specific lyase
  misc_feature (7)..(493): NCBI GI NO: 38346010 NR Description: OSJNBa0035O13.12
  misc_feature (12)..(494): NCBI GI NO: 20521319 NR Description: putative ribosomal RNA apurinic site specific lyase
  misc_feature (9)..(493): NCBI GI NO: 20521321 NR Description: putative ribosomal RNA apurinic site specific lyase
  misc_feature (41)..(494): NCBI GI NO: 20521325 NR Description: putative ribosomal RNA apurinic site specific lyase
  misc_feature (89)..(493): NCBI GI NO: 15290059 NR Description: putative ribosomal RNA apurinic site specific lyase
  misc_feature (29)..(280): NCBI GI NO: 15290059 NR Description: putative ribosomal RNA apurinic site specific lyase
  misc_feature (39)..(437): NCBI GI NO: 38347598 NR Description: OSJNBa0042I15.11
MGTAAVVEDTIRVVLTCLPAPPFRTTGSSRPYQSPSGGGGGGDRISRLSDAVLSNIVARLPAKDAARTTALSRRWRRVWASTPLVLDDSDLLVFHDDGGCSTPNWLAVTDTVSHVLSSHRGPIRFVRLTCCYMALASHNGALQYWLRVLAAGGVEDLVLVNRPLPTSVGLPIDVLHLASLRTLYLGFWCFPDTAALPRGRATVFPCLQEIGLCATVIHARDIDYLLACSPVLEKFASITSIYFTDPVRIRSCSLRCLVFWESLANELDLVVAPRLQRLILWQSRQWMIGSVHFRSRIRIGSATELKVLGYLEPSIHQLEIGGTIIDSGTKMTPSNMVPSVKILALKMQFRIRKEVKMLPTFLRCFPNVETLHVLSHETDEQNGKFNLKFWEEVGSISCLETRITKVVFDKFRGERCELAFLKFVLERAESLLKLVVVLANGDQASVDEMLAKLKSLTTVKRASDFPTLLAVAREGDSAWYFERASDLSVTDPFNL

SEQ ID NO: 21109 - protein, 363 aa, Zea mays subsp. mays
  peptide (1)..(363): Ceres Seq. ID no. 15179434
  misc_feature (1)..(362): NCBI GI NO: 34912332 NR Description: putative ribosomal RNA apurinic site specific lyase
  misc_feature (1)..(362): NCBI GI NO: 34912330 NR Description: putative ribosomal RNA apurinic site specific lyase
  misc_feature (1)..(361): NCBI GI NO: 34912334 NR Description: putative ribosomal RNA apurinic site specific lyase
  misc_feature (1)..(361): NCBI GI NO: 38346010 NR Description: OSJNBa0035O13.12
  misc_feature (1)..(362): NCBI GI NO: 20521319 NR Description: putative ribosomal RNA apurinic site specific lyase
  misc_feature (1)..(361): NCBI GI NO: 20521321 NR Description: putative ribosomal RNA apurinic site specific lyase
  misc_feature (1)..(362): NCBI GI NO: 20521325 NR Description: putative ribosomal RNA apurinic site specific lyase
  misc_feature (1)..(361): NCBI GI NO: 15290059 NR Description: putative ribosomal RNA apurinic site specific lyase
  misc_feature (1)..(148): NCBI GI NO: 15290059 NR Description: putative ribosomal RNA apurinic site specific lyase
  misc_feature (1)..(305): NCBI GI NO: 38347598 NR Description: OSJNBa0042I15.11
MALASHNGALQYWLRVLAAGGVEDLVLVNRPLPTSVGLPIDVLHLASLRTLYLGFWCFPDTAALPRGRATVFPCLQEIGLCATVIHARDIDYLLACSPVLEKFASITSIYFTDPVRIRSCSLRCLVFWESLANELDLVVAPRLQRLILWQSRQWMIGSVHFRSRIRIGSATELKVLGYLEPSIHQLEIGGTIIDSGTKMTPSNMVPSVKILALKMQFRIRKEVKMLPTFLRCFPNVETLHVLSHETDEQNGKFNLKFWEEVGSISCLETRITKVVFDKFRGERCELAFLKFVLERAESLLKLVVVLANGDQASVDEMLAKLKSLTTVKRASDFPTLLAVAREGDSAWYFERASDLSVTDPFNL

SEQ ID NO: 21110 - DNA, 1966 bp, Zea mays subsp. mays
  misc_feature (1)..(1966): Ceres Seq. ID no. 15175523
agctatcgcctattccttccctccctcgcattccggcaggctccgcaaacgtccgtgcgcccccgcgtcgccgcttcctccgtcccttccgttctcggcgaatcgaatccgctagcccccgacatttatggctgccgcgttaactcgcctccgatccgccgtcgagcggctcgggccttcccgcgcccgcgccttctcatcagccgctgctgaggccggggctgcgggaccgtgcagcgactctagggctttcgccgcggcctcggtggccgccggctcaggtctcgggatctggctgctgtcctcgaacccgcagccactcacagagtccggccaggcggaggatgccgccaccgcgggaggtggaggcaacagggccttctccgcagcttttggcggtgtcggagccaccggggagcgggagggcatgtttctgttcggagattcatatcgccgaagggtgttcttcaagtacgagaagaggattaggacgcgcagccctccagagaagatctttgagtacttcgcatccgtccacagcccagagggtgagatgtacatgttacctaccgacctgatgagggcggttgttcctgttttcccctcatctgagtccaaaaatgtcagggaagggagattgaagggggagcgccaccctggcgagctacaatgtgctccatctgagtttttcatgctattcgatacaaatggtgatggtgtcatctccttttctgagtatatcttctttgtaacattacttagtatccctgaatcaagcttccatgtggcttttaagatgtttgaccttgaccacaatggggaaattgacaaagacgagtttaggaaagtgatgacactgatgcgatcctataatagacaaggagctgcccatagggatggtttacgctttggacgcaaggttggtcagccagtggaaaatggtggactggtcgaatacttctttggcaaggatgggaatgaacatctacactatgataagttctctagttttttgaagaaattgcatgatgagattgtccgcttggagtttagtcactacgatgtgaaatcatccaacacaatacctgttaaggactttgcgttatccatggttgcttctgctgatatgatttacatagacaagttactggatagagttgaggatttggacgacaatcttgacctcaaggatctgcgtattacctttgaggagttcaaggcatttgctgatcttcgaagaaggttggaaccatttagaatggctatcttcagctacggcaaagtaaatggtctgttgacgaagcaggatctaaaacgtgccgcatcacatgtttgtggagtggacttgactgataaagtagtagacataattttccatgtgtttgatgctaactgtgatggtaacctgagttcagaggagttcctgaggtcattacaaagaagagaaagtgatattcgccagccagcaacgtcaggtttcctaggggtgatcgcctgttggctgaactgtacaaagtgttctcttcaacagatgctgtcccagtagattcttttttgacgctcatgacagtcttcagttgcccttggttgctctgtgcttattgagctggagaacgtcatcggggagttctgaagtgtgaagaggatttttgttgtaaatattaccctgcggcccctgcttagtagctcctacgttaccacgtagcagctgtaacctgtaaggaattccttccgttctcgttcaagggcttcgatgacatacatcttctcccctgacattaaatctccgtcgacttagctggagccttgctacctatcttgcttttagctcatccctgatgctaatattctgtggattgtggttgaacaatcacacttgtaagactagcttgggaatactatttttctaagagattttcaattttccaaggaaaaataaactaattttctttggaaatttcaaacg

SEQ ID NO: 21111 - protein, 472 aa, Zea mays subsp. mays
  peptide (1)..(472): Ceres Seq. ID no. 15175524
  misc_feature (183)..(211): Pfam Name: Pfam Description:  EF hand
  misc_feature (2)..(470): NCBI GI NO: 38345151 NR Description: OSJNBa0014K14.5
  misc_feature (102)..(465): NCBI GI NO: 15236653 NR Description: calcium-binding EF-hand family protein
  misc_feature (41)..(463): NCBI GI NO: 40786511 NR Description: calcium binding atopy-related autoantigen 1
  misc_feature (31)..(463): NCBI GI NO: 21450201 NR Description: calcium binding atopy-related autoantigen 1
  misc_feature (31)..(463): NCBI GI NO: 26346488 NR Description: unnamed protein product [Mus musculus]
  misc_feature (108)..(463): NCBI GI NO: 19920872 NR Description: CG4495-PA [Drosophila melanogaster]
  misc_feature (108)..(463): NCBI GI NO: 39587689 NR Description: Hypothetical protein CBG01795
  misc_feature (108)..(463): NCBI GI NO: 13278855 NR Description: calcium binding atopy-related autoantigen 1
  misc_feature (108)..(463): NCBI GI NO: 17543982 NR Description: calcium binding atopy-related autoantigen 1 like
  misc_feature (108)..(463): NCBI GI NO: 31238870 NR Description: ENSANGP00000005253 [Anopheles gambiae]
MAAALTRLRSAVERLGPSRARAFSSAAAEAGAAGPCSDSRAFAAASVAAGSGLGIWLLSSNPQPLTESGQAEDAATAGGGGNRAFSAAFGGVGATGEREGMFLFGDSYRRRVFFKYEKRIRTRSPPEKIFEYFASVHSPEGEMYMLPTDLMRAVVPVFPSSESKNVREGRLKGERHPGELQCAPSEFFMLFDTNGDGVISFSEYIFFVTLLSIPESSFHVAFKMFDLDHNGEIDKDEFRKVMTLMRSYNRQGAAHRDGLRFGRKVGQPVENGGLVEYFFGKDGNEHLHYDKFSSFLKKLHDEIVRLEFSHYDVKSSNTIPVKDFALSMVASADMIYIDKLLDRVEDLDDNLDLKDLRITFEEFKAFADLRRRLEPFRMAIFSYGKVNGLLTKQDLKRAASHVCGVDLTDKVVDIIFHVFDANCDGNLSSEEFLRSLQRRESDIRQPATSGFLGVIACWLNCTKCSLQQMLSQ

SEQ ID NO: 21112 - protein, 372 aa, Zea mays subsp. mays
  peptide (1)..(372): Ceres Seq. ID no. 15175525
  misc_feature (83)..(111): Pfam Name: Pfam Description:  EF hand
  misc_feature (1)..(370): NCBI GI NO: 38345151 NR Description: OSJNBa0014K14.5
  misc_feature (2)..(365): NCBI GI NO: 15236653 NR Description: calcium-binding EF-hand family protein
  misc_feature (1)..(363): NCBI GI NO: 40786511 NR Description: calcium binding atopy-related autoantigen 1
  misc_feature (1)..(363): NCBI GI NO: 21450201 NR Description: calcium binding atopy-related autoantigen 1
  misc_feature (1)..(363): NCBI GI NO: 26346488 NR Description: unnamed protein product [Mus musculus]
  misc_feature (8)..(363): NCBI GI NO: 19920872 NR Description: CG4495-PA [Drosophila melanogaster]
  misc_feature (8)..(363): NCBI GI NO: 39587689 NR Description: Hypothetical protein CBG01795
  misc_feature (8)..(363): NCBI GI NO: 13278855 NR Description: calcium binding atopy-related autoantigen 1
  misc_feature (8)..(363): NCBI GI NO: 17543982 NR Description: calcium binding atopy-related autoantigen 1 like
  misc_feature (8)..(363): NCBI GI NO: 31238870 NR Description: ENSANGP00000005253 [Anopheles gambiae]
MFLFGDSYRRRVFFKYEKRIRTRSPPEKIFEYFASVHSPEGEMYMLPTDLMRAVVPVFPSSESKNVREGRLKGERHPGELQCAPSEFFMLFDTNGDGVISFSEYIFFVTLLSIPESSFHVAFKMFDLDHNGEIDKDEFRKVMTLMRSYNRQGAAHRDGLRFGRKVGQPVENGGLVEYFFGKDGNEHLHYDKFSSFLKKLHDEIVRLEFSHYDVKSSNTIPVKDFALSMVASADMIYIDKLLDRVEDLDDNLDLKDLRITFEEFKAFADLRRRLEPFRMAIFSYGKVNGLLTKQDLKRAASHVCGVDLTDKVVDIIFHVFDANCDGNLSSEEFLRSLQRRESDIRQPATSGFLGVIACWLNCTKCSLQQMLSQ

SEQ ID NO: 21113 - protein, 330 aa, Zea mays subsp. mays
  peptide (1)..(330): Ceres Seq. ID no. 15175526
  misc_feature (41)..(69): Pfam Name: Pfam Description:  EF hand
  misc_feature (1)..(328): NCBI GI NO: 38345151 NR Description: OSJNBa0014K14.5
  misc_feature (1)..(323): NCBI GI NO: 15236653 NR Description: calcium-binding EF-hand family protein
  misc_feature (1)..(321): NCBI GI NO: 40786511 NR Description: calcium binding atopy-related autoantigen 1
  misc_feature (1)..(321): NCBI GI NO: 21450201 NR Description: calcium binding atopy-related autoantigen 1
  misc_feature (1)..(321): NCBI GI NO: 26346488 NR Description: unnamed protein product [Mus musculus]
  misc_feature (1)..(321): NCBI GI NO: 19920872 NR Description: CG4495-PA [Drosophila melanogaster]
  misc_feature (1)..(321): NCBI GI NO: 39587689 NR Description: Hypothetical protein CBG01795
  misc_feature (1)..(321): NCBI GI NO: 13278855 NR Description: calcium binding atopy-related autoantigen 1
  misc_feature (1)..(321): NCBI GI NO: 17543982 NR Description: calcium binding atopy-related autoantigen 1 like
  misc_feature (1)..(321): NCBI GI NO: 31238870 NR Description: ENSANGP00000005253 [Anopheles gambiae]
MYMLPTDLMRAVVPVFPSSESKNVREGRLKGERHPGELQCAPSEFFMLFDTNGDGVISFSEYIFFVTLLSIPESSFHVAFKMFDLDHNGEIDKDEFRKVMTLMRSYNRQGAAHRDGLRFGRKVGQPVENGGLVEYFFGKDGNEHLHYDKFSSFLKKLHDEIVRLEFSHYDVKSSNTIPVKDFALSMVASADMIYIDKLLDRVEDLDDNLDLKDLRITFEEFKAFADLRRRLEPFRMAIFSYGKVNGLLTKQDLKRAASHVCGVDLTDKVVDIIFHVFDANCDGNLSSEEFLRSLQRRESDIRQPATSGFLGVIACWLNCTKCSLQQMLSQ

SEQ ID NO: 21114 - DNA, 1062 bp, Zea mays subsp. mays
  misc_feature (1)..(1062): Ceres Seq. ID no. 15178797
attcaaaacaaaacaccatacaacatggatcataagacaaacacgacactgcttttctcgctcttgttttccatcacgtacctcatcaccatcgcgacatcgaaagatctatgtaaccaaaacgacaaaaacaccctccttaaaatcaagaagtccctaaacaacccttaccacctcgcctcgtggcacccggaaaccgactgctgctcctggtactgcctcgaatgcggcgacgccaccgttaaccaccgcgtcatctccctaaccatattcgccggtcagatatccggtcagattccgcctgaagtgggtgacttaccgtatcttcagaatcttatgttccacaggatcactaacatcaccggtcagatcccatccaccatcaccaagcttaagtatctccgttctctcatgcttagctggttgaacctcaccggcccggttcctgatttccttagtcagctcatgaatcttgaatacttaagccttgccttcaatcagctctctggttccatacctagctctctcgctttgttacctaaactttcgtacattgatgttagtaggaataaacttacaggtacaatacctgaatcatttggatcgtttccagcagaagttcctcaccttatcttttcacacaatcagctctccggttctatacccaaatcactaggcaaccttgattttaaccggatagatttctcaaggaacaagctcacaggcgatgcttcgatgttgtttggagccaacaaaacgacgttttccattgacttatcaagaaacatgttccagtttgatctgtccagagttgtgctccatgagtcacttggtgtactggacttgaaccacaatgggatcacagggagtattccggttcagtggactgaatattctctccaaatcttaaatgttagctataacagactgtgtggacccatccccactggaggaagtcttcagagatttgattcttatacatattttcataacaagtgtttatgtggtgcacctcttgatagtagttgcaagtaataaaccaagcttatctctagttttccc

SEQ ID NO: 21115 - protein, 344 aa, Zea mays subsp. mays
  peptide (1)..(344): Ceres Seq. ID no. 15178798
  misc_feature (9)..(344): NCBI GI NO: 26094811 NR Description: polygalacturonase inhibitor protein
  misc_feature (9)..(344): NCBI GI NO: 21593869 NR Description: polygalacturonase inhibiting protein 1
  misc_feature (16)..(344): NCBI GI NO: 15240182 NR Description: polygalacturonase inhibiting protein (PGIP1)
  misc_feature (9)..(344): NCBI GI NO: 15240183 NR Description: polygalacturonase inhibiting protein (PGIP2)
  misc_feature (18)..(344): NCBI GI NO: 7800201 NR Description: polygalacturonase inhibiting protein 2; PGIP2
  misc_feature (9)..(344): NCBI GI NO: 22324851 NR Description: polygalacturonase inhibitory protein
  misc_feature (15)..(341): NCBI GI NO: 22256016 NR Description: polygalacturonase inhibitor protein
  misc_feature (50)..(341): NCBI GI NO: 22324853 NR Description: polygalacturonase inhibitory protein
  misc_feature (13)..(344): NCBI GI NO: 18148925 NR Description: polygalacturonase-inhibitor protein
  misc_feature (13)..(344): NCBI GI NO: 18148376 NR Description: polygalacturonase-inhibitor protein
IQNKTPYNMDHKTNTTLLFSLLFSITYLITIATSKDLCNQNDKNTLLKIKKSLNNPYHLASWHPETDCCSWYCLECGDATVNHRVISLTIFAGQISGQIPPEVGDLPYLQNLMFHRITNITGQIPSTITKLKYLRSLMLSWLNLTGPVPDFLSQLMNLEYLSLAFNQLSGSIPSSLALLPKLSYIDVSRNKLTGTIPESFGSFPAEVPHLIFSHNQLSGSIPKSLGNLDFNRIDFSRNKLTGDASMLFGANKTTFSIDLSRNMFQFDLSRVVLHESLGVLDLNHNGITGSIPVQWTEYSLQILNVSYNRLCGPIPTGGSLQRFDSYTYFHNKCLCGAPLDSSCK

SEQ ID NO: 21116 - protein, 336 aa, Zea mays subsp. mays
  peptide (1)..(336): Ceres Seq. ID no. 15178799
  misc_feature (1)..(336): NCBI GI NO: 26094811 NR Description: polygalacturonase inhibitor protein
  misc_feature (1)..(336): NCBI GI NO: 21593869 NR Description: polygalacturonase inhibiting protein 1
  misc_feature (8)..(336): NCBI GI NO: 15240182 NR Description: polygalacturonase inhibiting protein (PGIP1)
  misc_feature (1)..(336): NCBI GI NO: 15240183 NR Description: polygalacturonase inhibiting protein (PGIP2)
  misc_feature (10)..(336): NCBI GI NO: 7800201 NR Description: polygalacturonase inhibiting protein 2; PGIP2
  misc_feature (1)..(336): NCBI GI NO: 22324851 NR Description: polygalacturonase inhibitory protein
  misc_feature (7)..(333): NCBI GI NO: 22256016 NR Description: polygalacturonase inhibitor protein
  misc_feature (42)..(333): NCBI GI NO: 22324853 NR Description: polygalacturonase inhibitory protein
  misc_feature (5)..(336): NCBI GI NO: 18148925 NR Description: polygalacturonase-inhibitor protein
  misc_feature (5)..(336): NCBI GI NO: 18148376 NR Description: polygalacturonase-inhibitor protein
MDHKTNTTLLFSLLFSITYLITIATSKDLCNQNDKNTLLKIKKSLNNPYHLASWHPETDCCSWYCLECGDATVNHRVISLTIFAGQISGQIPPEVGDLPYLQNLMFHRITNITGQIPSTITKLKYLRSLMLSWLNLTGPVPDFLSQLMNLEYLSLAFNQLSGSIPSSLALLPKLSYIDVSRNKLTGTIPESFGSFPAEVPHLIFSHNQLSGSIPKSLGNLDFNRIDFSRNKLTGDASMLFGANKTTFSIDLSRNMFQFDLSRVVLHESLGVLDLNHNGITGSIPVQWTEYSLQILNVSYNRLCGPIPTGGSLQRFDSYTYFHNKCLCGAPLDSSCK

SEQ ID NO: 21117 - protein, 232 aa, Zea mays subsp. mays
  peptide (1)..(232): Ceres Seq. ID no. 15178800
  misc_feature (1)..(232): NCBI GI NO: 26094811 NR Description: polygalacturonase inhibitor protein
  misc_feature (1)..(232): NCBI GI NO: 21593869 NR Description: polygalacturonase inhibiting protein 1
  misc_feature (1)..(232): NCBI GI NO: 15240182 NR Description: polygalacturonase inhibiting protein (PGIP1)
  misc_feature (1)..(232): NCBI GI NO: 15240183 NR Description: polygalacturonase inhibiting protein (PGIP2)
  misc_feature (1)..(232): NCBI GI NO: 7800201 NR Description: polygalacturonase inhibiting protein 2; PGIP2
  misc_feature (1)..(232): NCBI GI NO: 22324851 NR Description: polygalacturonase inhibitory protein
  misc_feature (1)..(229): NCBI GI NO: 22256016 NR Description: polygalacturonase inhibitor protein
  misc_feature (1)..(229): NCBI GI NO: 22324853 NR Description: polygalacturonase inhibitory protein
  misc_feature (1)..(232): NCBI GI NO: 18148925 NR Description: polygalacturonase-inhibitor protein
  misc_feature (1)..(232): NCBI GI NO: 18148376 NR Description: polygalacturonase-inhibitor protein
MFHRITNITGQIPSTITKLKYLRSLMLSWLNLTGPVPDFLSQLMNLEYLSLAFNQLSGSIPSSLALLPKLSYIDVSRNKLTGTIPESFGSFPAEVPHLIFSHNQLSGSIPKSLGNLDFNRIDFSRNKLTGDASMLFGANKTTFSIDLSRNMFQFDLSRVVLHESLGVLDLNHNGITGSIPVQWTEYSLQILNVSYNRLCGPIPTGGSLQRFDSYTYFHNKCLCGAPLDSSCK

SEQ ID NO: 21118 - DNA, 785 bp, Zea mays subsp. mays
  misc_feature (1)..(785): Ceres Seq. ID no. 15178869
attgttgctgcacttccaccactctgattcatttcgattgagctttctctctttttcttgctatggctcgtcggtctggagattgcatgcgatgtctggtgatcttcgcggtggtatctgctttagtagtgtgtggaccagctctttattggagattcaacaaaggcttcgttggatcatccactcgtaagagctctgtttgtcctccttgcgtctgtgactgcccacctcctgtctctctcctcgagatcgctcctgggcttgcgaatctcactgttacagattgtggaggcgatgatccggagctcaagcaggaaatggagaagcagtttgtggaccttctgaccgaggagctgaagctgcaagaagcagttgctgatgagcatagccgtcatatgaacgttacactcttagaagctaagagagttgcgtctcagtaccaaaaggaagctgagaaatgcaacgccgccactgagatctgtgagtcagctagggagagagctgaagctttgttgatcaaggagaggaagatcactgctttgtgggagaagagagctcgtcaatcaggttgggaaggtgagtaaaaaactgattgtccgttctcatgacaaaccctgaagtgtttttgtctgagaaaccgaattttttcaaggaaaagtcctttatgttccacgtttctccatatatgtagtcttttgtttttgcctttggaatcgtaatgtagctaaagaatggctttggccttgtattgacttctcttcaaatatataattgttcatttctct

SEQ ID NO: 21119 - protein, 173 aa, Zea mays subsp. mays
  peptide (1)..(173): Ceres Seq. ID no. 15178870
  misc_feature (1)..(173): Pfam Name: DUF1068 Pfam Description: Protein of unknown function
  misc_feature (1)..(173): NCBI GI NO: 18417716 NR Description: expressed protein [Arabidopsis thaliana]
  misc_feature (1)..(173): NCBI GI NO: 25407700 NR Description: hypothetical protein AT4g30990
  misc_feature (1)..(173): NCBI GI NO: 18400504 NR Description: expressed protein [Arabidopsis thaliana]
  misc_feature (9)..(173): NCBI GI NO: 25364110 NR Description: hypothetical protein At2g24290
  misc_feature (1)..(171): NCBI GI NO: 38345038 NR Description: OSJNBa0029H02.22
  misc_feature (12)..(172): NCBI GI NO: 27922919 NR Description: unknown protein [Phytophthora sojae]
  misc_feature (1)..(171): NCBI GI NO: 18403016 NR Description: expressed protein [Arabidopsis thaliana]
  misc_feature (12)..(171): NCBI GI NO: 21553781 NR Description: unknown [Arabidopsis thaliana]
  misc_feature (1)..(173): NCBI GI NO: 18390477 NR Description: expressed protein [Arabidopsis thaliana]
  misc_feature (74)..(173): NCBI GI NO: 15233480 NR Description: hypothetical protein [Arabidopsis thaliana]
MARRSGDCMRCLVIFAVVSALVVCGPALYWRFNKGFVGSSTRKSSVCPPCVCDCPPPVSLLEIAPGLANLTVTDCGGDDPELKQEMEKQFVDLLTEELKLQEAVADEHSRHMNVTLLEAKRVASQYQKEAEKCNAATEICESARERAEALLIKERKITALWEKRARQSGWEGE

SEQ ID NO: 21120 - protein, 165 aa, Zea mays subsp. mays
  peptide (1)..(165): Ceres Seq. ID no. 15178871
  misc_feature (1)..(165): Pfam Name: DUF1068 Pfam Description: Protein of unknown function
  misc_feature (1)..(165): NCBI GI NO: 18417716 NR Description: expressed protein [Arabidopsis thaliana]
  misc_feature (1)..(165): NCBI GI NO: 25407700 NR Description: hypothetical protein AT4g30990
  misc_feature (1)..(165): NCBI GI NO: 18400504 NR Description: expressed protein [Arabidopsis thaliana]
  misc_feature (1)..(165): NCBI GI NO: 25364110 NR Description: hypothetical protein At2g24290
  misc_feature (1)..(163): NCBI GI NO: 38345038 NR Description: OSJNBa0029H02.22
  misc_feature (4)..(164): NCBI GI NO: 27922919 NR Description: unknown protein [Phytophthora sojae]
  misc_feature (1)..(163): NCBI GI NO: 18403016 NR Description: expressed protein [Arabidopsis thaliana]
  misc_feature (4)..(163): NCBI GI NO: 21553781 NR Description: unknown [Arabidopsis thaliana]
  misc_feature (1)..(165): NCBI GI NO: 18390477 NR Description: expressed protein [Arabidopsis thaliana]
  misc_feature (66)..(165): NCBI GI NO: 15233480 NR Description: hypothetical protein [Arabidopsis thaliana]
MRCLVIFAVVSALVVCGPALYWRFNKGFVGSSTRKSSVCPPCVCDCPPPVSLLEIAPGLANLTVTDCGGDDPELKQEMEKQFVDLLTEELKLQEAVADEHSRHMNVTLLEAKRVASQYQKEAEKCNAATEICESARERAEALLIKERKITALWEKRARQSGWEGE

SEQ ID NO: 21121 - protein, 88 aa, Zea mays subsp. mays
  peptide (1)..(88): Ceres Seq. ID no. 15178872
  misc_feature (1)..(88): Pfam Name: DUF1068 Pfam Description: Protein of unknown function
  misc_feature (1)..(88): NCBI GI NO: 18417716 NR Description: expressed protein [Arabidopsis thaliana]
  misc_feature (1)..(88): NCBI GI NO: 25407700 NR Description: hypothetical protein AT4g30990
  misc_feature (1)..(88): NCBI GI NO: 18400504 NR Description: expressed protein [Arabidopsis thaliana]
  misc_feature (1)..(88): NCBI GI NO: 25364110 NR Description: hypothetical protein At2g24290
  misc_feature (1)..(86): NCBI GI NO: 38345038 NR Description: OSJNBa0029H02.22
  misc_feature (1)..(87): NCBI GI NO: 27922919 NR Description: unknown protein [Phytophthora sojae]
  misc_feature (1)..(86): NCBI GI NO: 18403016 NR Description: expressed protein [Arabidopsis thaliana]
  misc_feature (1)..(86): NCBI GI NO: 21553781 NR Description: unknown [Arabidopsis thaliana]
  misc_feature (1)..(88): NCBI GI NO: 18390477 NR Description: expressed protein [Arabidopsis thaliana]
  misc_feature (1)..(88): NCBI GI NO: 15233480 NR Description: hypothetical protein [Arabidopsis thaliana]
MEKQFVDLLTEELKLQEAVADEHSRHMNVTLLEAKRVASQYQKEAEKCNAATEICESARERAEALLIKERKITALWEKRARQSGWEGE

SEQ ID NO: 21122 - DNA, 1110 bp, Zea mays subsp. mays
  misc_feature (1)..(1110): Ceres Seq. ID no. 15178902
gtctgaaactgaaacgctctaagcaaaaatcatcaatgtcgacggaacgagaagtagtctgtgtcaccggcgcaagtggctgcatcgggtcgtggctcgtccatctgctcctcctccgcggctactccgttcacgccaccgtgaaaaacctccaggatgagaaagagacgaaacatctggaagctctcgaaggagcagccacgcgcctccatctattcgagatggatctactgaagtacgacactgtttccgccgccgtcaacggatgttccggcgttttccacctcgcatctccctgtatcgtcgacgaagtccaagatcctcagaagcaactacttgatccagcggttaaggggacattaaatgtactcacggcggcgaaagaagccggcgtgaagagggttgtggtgacgtcttccatatcggcgataaccccaagccccaactggcctgctgataagatcaagaacgaggactgttgggctgatgaagacttctgcaagcaaaatggattgtggtatccactttctaagacgcttgctaagaaggcagcttgggagtttgcagaggagaagggattagatgtggttgtggtgaatccaggaaccgtcatgggtcctgttattcctccatccatcaacgctagcatgctcatgcttcaacgcctccttgaggggtgtacagagacatacgagaacttcttcatgggttcggtgcatttcaaggatgtggcattagctcatatacttgtctatgagaacccatctgctaaaggaagacacctgtgcgttgaggccatctctcactacggtgattttgtagccaaagtagctgaactctatcctaattacagtgtccccaagttaccgagagagactcaaccgggtttactccgagccaagaacgcagcaaagaagctgatggaattggggttagagttcagttccatggaggttatcatcaaggatggtgtggagagtcttaaaagcaaaggatttatctcttaaactcatttgcttgatctagcagtgagcaaattatggtggcagcagaatcatgttatgttatatatataagactttgtaatttgaataagctgcacattgttgt

SEQ ID NO: 21123 - protein, 334 aa, Zea mays subsp. mays
  peptide (1)..(334): Ceres Seq. ID no. 15178903
  misc_feature (16)..(205): Pfam Name: Pfam Description:  3-beta hydroxysteroid dehydrogenase/ isomerase family
  misc_feature (12)..(334): NCBI GI NO: 15237678 NR Description: cinnamoyl-CoA reductase family
  misc_feature (15)..(334): NCBI GI NO: 28876000 NR Description: putative cinnamoyl-CoA reductase
  misc_feature (18)..(333): NCBI GI NO: 34907928 NR Description: putative cinnamoyl CoA reductase
  misc_feature (16)..(333): NCBI GI NO: 15226955 NR Description: cinnamoyl-CoA reductase family
  misc_feature (10)..(333): NCBI GI NO: 31414896 NR Description: cinnamoyl CoA reductase [Fragaria x ananassa]
  misc_feature (4)..(334): NCBI GI NO: 34913420 NR Description: putative cinnamyl-alcohol dehydrogenase
  misc_feature (15)..(334): NCBI GI NO: 17978649 NR Description: cinnamoyl-CoA reductase [Pinus taeda]
  misc_feature (12)..(333): NCBI GI NO: 7431406 NR Description: probable cinnamyl-alcohol dehydrogenase (EC1
  misc_feature (3)..(333): NCBI GI NO: 25405464 NR Description: hypothetical protein F5D21.12
  misc_feature (12)..(334): NCBI GI NO: 27465024 NR Description: dihydroflavonol reductase [Populus tremuloides]
LKLKRSKQKSSMSTEREVVCVTGASGCIGSWLVHLLLLRGYSVHATVKNLQDEKETKHLEALEGAATRLHLFEMDLLKYDTVSAAVNGCSGVFHLASPCIVDEVQDPQKQLLDPAVKGTLNVLTAAKEAGVKRVVVTSSISAITPSPNWPADKIKNEDCWADEDFCKQNGLWYPLSKTLAKKAAWEFAEEKGLDVVVVNPGTVMGPVIPPSINASMLMLQRLLEGCTETYENFFMGSVHFKDVALAHILVYENPSAKGRHLCVEAISHYGDFVAKVAELYPNYSVPKLPRETQPGLLRAKNAAKKLMELGLEFSSMEVIIKDGVESLKSKGFIS

SEQ ID NO: 21124 - protein, 323 aa, Zea mays subsp. mays
  peptide (1)..(323): Ceres Seq. ID no. 15178904
  misc_feature (5)..(194): Pfam Name: Pfam Description:  3-beta hydroxysteroid dehydrogenase/ isomerase family
  misc_feature (1)..(323): NCBI GI NO: 15237678 NR Description: cinnamoyl-CoA reductase family
  misc_feature (4)..(323): NCBI GI NO: 28876000 NR Description: putative cinnamoyl-CoA reductase
  misc_feature (7)..(322): NCBI GI NO: 34907928 NR Description: putative cinnamoyl CoA reductase
  misc_feature (5)..(322): NCBI GI NO: 15226955 NR Description: cinnamoyl-CoA reductase family
  misc_feature (1)..(322): NCBI GI NO: 31414896 NR Description: cinnamoyl CoA reductase [Fragaria x ananassa]
  misc_feature (1)..(323): NCBI GI NO: 34913420 NR Description: putative cinnamyl-alcohol dehydrogenase
  misc_feature (4)..(323): NCBI GI NO: 17978649 NR Description: cinnamoyl-CoA reductase [Pinus taeda]
  misc_feature (1)..(322): NCBI GI NO: 7431406 NR Description: probable cinnamyl-alcohol dehydrogenase (EC1
  misc_feature (1)..(322): NCBI GI NO: 25405464 NR Description: hypothetical protein F5D21.12
  misc_feature (1)..(323): NCBI GI NO: 27465024 NR Description: dihydroflavonol reductase [Populus tremuloides]
MSTEREVVCVTGASGCIGSWLVHLLLLRGYSVHATVKNLQDEKETKHLEALEGAATRLHLFEMDLLKYDTVSAAVNGCSGVFHLASPCIVDEVQDPQKQLLDPAVKGTLNVLTAAKEAGVKRVVVTSSISAITPSPNWPADKIKNEDCWADEDFCKQNGLWYPLSKTLAKKAAWEFAEEKGLDVVVVNPGTVMGPVIPPSINASMLMLQRLLEGCTETYENFFMGSVHFKDVALAHILVYENPSAKGRHLCVEAISHYGDFVAKVAELYPNYSVPKLPRETQPGLLRAKNAAKKLMELGLEFSSMEVIIKDGVESLKSKGFIS

SEQ ID NO: 21125 - protein, 261 aa, Zea mays subsp. mays
  peptide (1)..(261): Ceres Seq. ID no. 15178905
  misc_feature (1)..(132): Pfam Name: Pfam Description:  3-beta hydroxysteroid dehydrogenase/ isomerase family
  misc_feature (1)..(261): NCBI GI NO: 15237678 NR Description: cinnamoyl-CoA reductase family
  misc_feature (1)..(261): NCBI GI NO: 28876000 NR Description: putative cinnamoyl-CoA reductase
  misc_feature (1)..(260): NCBI GI NO: 34907928 NR Description: putative cinnamoyl CoA reductase
  misc_feature (1)..(260): NCBI GI NO: 15226955 NR Description: cinnamoyl-CoA reductase family
  misc_feature (1)..(260): NCBI GI NO: 31414896 NR Description: cinnamoyl CoA reductase [Fragaria x ananassa]
  misc_feature (1)..(261): NCBI GI NO: 34913420 NR Description: putative cinnamyl-alcohol dehydrogenase
  misc_feature (1)..(261): NCBI GI NO: 17978649 NR Description: cinnamoyl-CoA reductase [Pinus taeda]
  misc_feature (1)..(260): NCBI GI NO: 7431406 NR Description: probable cinnamyl-alcohol dehydrogenase (EC1
  misc_feature (1)..(260): NCBI GI NO: 25405464 NR Description: hypothetical protein F5D21.12
  misc_feature (1)..(261): NCBI GI NO: 27465024 NR Description: dihydroflavonol reductase [Populus tremuloides]
MDLLKYDTVSAAVNGCSGVFHLASPCIVDEVQDPQKQLLDPAVKGTLNVLTAAKEAGVKRVVVTSSISAITPSPNWPADKIKNEDCWADEDFCKQNGLWYPLSKTLAKKAAWEFAEEKGLDVVVVNPGTVMGPVIPPSINASMLMLQRLLEGCTETYENFFMGSVHFKDVALAHILVYENPSAKGRHLCVEAISHYGDFVAKVAELYPNYSVPKLPRETQPGLLRAKNAAKKLMELGLEFSSMEVIIKDGVESLKSKGFIS

SEQ ID NO: 21126 - DNA, 881 bp, Zea mays subsp. mays
  misc_feature (1)..(881): Ceres Seq. ID no. 15178112
acaccttgtttgactcaacaacgactcgtctaaccctttagcagcagccatgacaactcctccttgccggaccataaacgctaataatgctatcgccgcgccatcgccttcgggaatgatcttccacggtaagaggctcgtgaaatcaagctcacctggcttgaatctcccgacgaagagattggcttggagcttaagttctccggggaggtttctctcttctccagtggcctctagttctacatcggcggctgtgacatcgaattctacgaatcgactggaagctttagaagaagggattgagaaggtcatttatcaatgtagattcatggcgtttcttggaactttaggatctcttttgggatcggttctgtgtttcatcaagggatgtcagtacgtcggagactcgtttgtgcagtactctgtgaaccgtgggaaggtgatattacttctggtagaagccatagatacataccttctaggaactgtgatgttagtcttcgggatgggcctttacgagctcttcattagcaacctcacaacttcggaaaccatttcacacgacagtgtttccaatagatcgagtctctttggcatgttccccttaaaggagcgacctcaatggttagaggtgaaaacagttagtgagctgaaaacgaagctgggacatgttatagtgatgctactgttgattggtttgttcgacaagagcaggaaagttgccatcacttctgtcgcggatttgctatgtatctctgcttctatctttctttcttcggcttgtctcttcttgctctctaggctcaatggctcacactgagttaatcctgttgccttttttaaacacatgacactttgtattatgtgtataatgttttagt

SEQ ID NO: 21127 - protein, 256 aa, Zea mays subsp. mays
  peptide (1)..(256): Ceres Seq. ID no. 15178113
  misc_feature (28)..(256): NCBI GI NO: 18415304 NR Description: expressed protein [Arabidopsis thaliana]
  misc_feature (28)..(256): NCBI GI NO: 15810053 NR Description: AT4g19390/T5K18_170 [Arabidopsis thaliana]
  misc_feature (28)..(256): NCBI GI NO: 7487716 NR Description: hypothetical protein T5K18
  misc_feature (60)..(253): NCBI GI NO: 34899026 NR Description: contains ESTsAU173916
  misc_feature (20)..(253): NCBI GI NO: 15240692 NR Description: expressed protein [Arabidopsis thaliana]
  misc_feature (20)..(253): NCBI GI NO: 20465418 NR Description: unknown protein [Arabidopsis thaliana]
  misc_feature (79)..(253): NCBI GI NO: 34395260 NR Description: unknown protein
  misc_feature (81)..(253): NCBI GI NO: 31126772 NR Description: unknown protein
MTTPPCRTINANNAIAAPSPSGMIFHGKRLVKSSSPGLNLPTKRLAWSLSSPGRFLSSPVASSSTSAAVTSNSTNRLEALEEGIEKVIYQCRFMAFLGTLGSLLGSVLCFIKGCQYVGDSFVQYSVNRGKVILLLVEAIDTYLLGTVMLVFGMGLYELFISNLTTSETISHDSVSNRSSLFGMFPLKERPQWLEVKTVSELKTKLGHVIVMLLLIGLFDKSRKVAITSVADLLCISASIFLSSACLFLLSRLNGSH

SEQ ID NO: 21128 - protein, 234 aa, Zea mays subsp. mays
  peptide (1)..(234): Ceres Seq. ID no. 15178114
  misc_feature (6)..(234): NCBI GI NO: 18415304 NR Description: expressed protein [Arabidopsis thaliana]
  misc_feature (6)..(234): NCBI GI NO: 15810053 NR Description: AT4g19390/T5K18_170 [Arabidopsis thaliana]
  misc_feature (6)..(234): NCBI GI NO: 7487716 NR Description: hypothetical protein T5K18
  misc_feature (38)..(231): NCBI GI NO: 34899026 NR Description: contains ESTsAU173916
  misc_feature (1)..(231): NCBI GI NO: 15240692 NR Description: expressed protein [Arabidopsis thaliana]
  misc_feature (1)..(231): NCBI GI NO: 20465418 NR Description: unknown protein [Arabidopsis thaliana]
  misc_feature (57)..(231): NCBI GI NO: 34395260 NR Description: unknown protein
  misc_feature (59)..(231): NCBI GI NO: 31126772 NR Description: unknown protein
MIFHGKRLVKSSSPGLNLPTKRLAWSLSSPGRFLSSPVASSSTSAAVTSNSTNRLEALEEGIEKVIYQCRFMAFLGTLGSLLGSVLCFIKGCQYVGDSFVQYSVNRGKVILLLVEAIDTYLLGTVMLVFGMGLYELFISNLTTSETISHDSVSNRSSLFGMFPLKERPQWLEVKTVSELKTKLGHVIVMLLLIGLFDKSRKVAITSVADLLCISASIFLSSACLFLLSRLNGSH

SEQ ID NO: 21129 - protein, 163 aa, Zea mays subsp. mays
  peptide (1)..(163): Ceres Seq. ID no. 15178115
  misc_feature (1)..(163): NCBI GI NO: 18415304 NR Description: expressed protein [Arabidopsis thaliana]
  misc_feature (1)..(163): NCBI GI NO: 15810053 NR Description: AT4g19390/T5K18_170 [Arabidopsis thaliana]
  misc_feature (1)..(163): NCBI GI NO: 7487716 NR Description: hypothetical protein T5K18
  misc_feature (1)..(160): NCBI GI NO: 34899026 NR Description: contains ESTsAU173916
  misc_feature (1)..(160): NCBI GI NO: 15240692 NR Description: expressed protein [Arabidopsis thaliana]
  misc_feature (1)..(160): NCBI GI NO: 20465418 NR Description: unknown protein [Arabidopsis thaliana]
  misc_feature (1)..(160): NCBI GI NO: 34395260 NR Description: unknown protein
  misc_feature (1)..(160): NCBI GI NO: 31126772 NR Description: unknown protein
MAFLGTLGSLLGSVLCFIKGCQYVGDSFVQYSVNRGKVILLLVEAIDTYLLGTVMLVFGMGLYELFISNLTTSETISHDSVSNRSSLFGMFPLKERPQWLEVKTVSELKTKLGHVIVMLLLIGLFDKSRKVAITSVADLLCISASIFLSSACLFLLSRLNGSH

SEQ ID NO: 21130 - DNA, 585 bp, Zea mays subsp. mays
  misc_feature (1)..(585): Ceres Seq. ID no. 15176134
gagaagcgtcgtccgtcgtattcaatctctgaacatcttcaattttttttttttgagaaagtattgctaagatggctgctcccagtccaattcctgccggcatttctaaggaacaggcgtttagcatggcacaaacggagatggaatatcgagttgaactcttcaacaagcttgctcaaacatgctttgttaaatgtgtggataaaaggtacaaggaaaatgagttaaacatgggtgagaacagttgcattgaccgttgtgtttccaagtactggcaggtaaatggaatggtcggacagctcttaagtgctggcaagcctcctccacagtaagccccgtttagaggcaaagtcataggaccaaaaagctcacggagagacaaaaactctcttctttctttccaaagttttaaggcaatcttattgtttttgttgtcttgcattacatttttggcgcttatttggacaaattatgcaattctctgagactttatttataagagatgaaatgaaataaccaaataaaaatcaaaaaaacatctatttatgatttgtataatttatatgaaagagaaacgtctatgcc

SEQ ID NO: 21131 - protein, 86 aa, Zea mays subsp. mays
  peptide (1)..(86): Ceres Seq. ID no. 15176135
  misc_feature (15)..(81): Pfam Name: Pfam Description:  Tim10/DDP family zinc finger
  misc_feature (5)..(84): NCBI GI NO: 18402072 NR Description: small zinc finger-related protein (TIM10)
  misc_feature (7)..(84): NCBI GI NO: 5107088 NR Description: small zinc finger-like protein [Pinus taeda]
  misc_feature (7)..(83): NCBI GI NO: 5107180 NR Description: small zinc finger-like protein
  misc_feature (11)..(84): NCBI GI NO: 38175439 NR Description: small zinc finger-like protein
  misc_feature (1)..(71): NCBI GI NO: 34897366 NR Description: putative zinc finger protein [Oryza sativa]
  misc_feature (11)..(76): NCBI GI NO: 6321793 NR Description: May act cooperatively with Mrs5p in mitochondrial protein import or other related essential mitochondrial processes
  misc_feature (11)..(76): NCBI GI NO: 12230195 NR Description: Mitochondrial import inner membrane translocase subunit TIM10
  misc_feature (15)..(85): NCBI GI NO: 19114054 NR Description: putative mitochondrial intermembrane protein MRS11homolog
  misc_feature (20)..(79): NCBI GI NO: 39794536 NR Description: Unknown (protein for MGC:76115)
  misc_feature (15)..(80): NCBI GI NO: 39584809 NR Description: Hypothetical protein CBG13275
MAAPSPIPAGISKEQAFSMAQTEMEYRVELFNKLAQTCFVKCVDKRYKENELNMGENSCIDRCVSKYWQVNGMVGQLLSAGKPPPQ

SEQ ID NO: 21132 - protein, 75 aa, Zea mays subsp. mays
  peptide (1)..(75): Ceres Seq. ID no. 15176136
EKRRPSYSISEHLQFFFFEKVLLRWLLPVQFLPAFLRNRRLAWHKRRWNIELNSSTSLLKHALLNVWIKGTRKMS

SEQ ID NO: 21133 - protein, 68 aa, Zea mays subsp. mays
  peptide (1)..(68): Ceres Seq. ID no. 15176137
  misc_feature (1)..(63): Pfam Name: Pfam Description:  Tim10/DDP family zinc finger
  misc_feature (1)..(66): NCBI GI NO: 18402072 NR Description: small zinc finger-related protein (TIM10)
  misc_feature (1)..(66): NCBI GI NO: 5107088 NR Description: small zinc finger-like protein [Pinus taeda]
  misc_feature (1)..(65): NCBI GI NO: 5107180 NR Description: small zinc finger-like protein
  misc_feature (1)..(66): NCBI GI NO: 38175439 NR Description: small zinc finger-like protein
  misc_feature (1)..(53): NCBI GI NO: 34897366 NR Description: putative zinc finger protein [Oryza sativa]
  misc_feature (1)..(58): NCBI GI NO: 6321793 NR Description: May act cooperatively with Mrs5p in mitochondrial protein import or other related essential mitochondrial processes
  misc_feature (1)..(58): NCBI GI NO: 12230195 NR Description: Mitochondrial import inner membrane translocase subunit TIM10
  misc_feature (1)..(67): NCBI GI NO: 19114054 NR Description: putative mitochondrial intermembrane protein MRS11homolog
  misc_feature (2)..(61): NCBI GI NO: 39794536 NR Description: Unknown (protein for MGC:76115)
  misc_feature (1)..(62): NCBI GI NO: 39584809 NR Description: Hypothetical protein CBG13275
MAQTEMEYRVELFNKLAQTCFVKCVDKRYKENELNMGENSCIDRCVSKYWQVNGMVGQLLSAGKPPPQ

SEQ ID NO: 21134 - DNA, 1315 bp, Zea mays subsp. mays
  misc_feature (1)..(1315): Ceres Seq. ID no. 15179393
ctcaatctcttgttcctctaatagtctaattcatcctcctctctttcttcgaagttactttctccccgtttcgtatctgatcagtcaatctcgaagatagatccggaggttttgagctgaaacagagagagaaagaaacagagtaatggcgaacagagattcagagagaggaggaggagggaagcagaacaacaccaacaacaacaacaacaactatatctatgacgaaagctccagcgatactcattggacttcgtggctcgttccactgatcgtcgtggcgaatctcgccgtctttatcgccgttatgttcgttaacgactgtcccaagaagatcatcggaccaaacaaagcttgcgtcgctagattcctcggaagattctcttttcagcccctcagagagaaccccctctttggcccttcttcctctacattggagagaatgggagcgttggagtgggggaaagtagtacatgagcatcaaggatggagactcgtcacttgtatgtggctacacgctggtatccttcatctcctcaccaatatgttgagtttgatcttcattggtatccgccttgagcagcagtttggcttcataagagtcgggcttatctacttaatctctggtctcggtggaagcatactctcctctcttttccttcaagaaagtatctccgttggtgcttctggtgctctctttggacttcttggagctatgttgtctgaacttctcaccaattggactatctatgctaacaaggcggctgctttgttcacactcctgttcatcatagcgatcaacttaggactaggcttgcttcctcgggttgacaatttcgcgcatattggagggtttataaccgggttctgcctcggttttatcctccttgtccggccacagcacggttgggaaagttcccgcaccaacacttcccttaccaaacgcaagtatagcatctaccagtacgttctgttcatagttgcagtccttatacttgtggtttgtttaactgttggatcagtgatgcttttcaaaggagagaatggtaacaaacattgcaaatggtgtcatcgcctcagctgtttccccacttcgaaatggacctgttaatcatcatcatcatcattatcctctaaaaattcttatatgtgttcttcttgtagcagataatttgtttgttctttttgcctttgacctctcttgccttatataacatacatgtatattaccaaataaaacgatattgttggattgaaggtacgtaatctcattatagtacatctgtataaatagtaatattgttggattaaaggt

SEQ ID NO: 21135 - protein, 321 aa, Zea mays subsp. mays
  peptide (1)..(321): Ceres Seq. ID no. 15179394
  misc_feature (1)..(321): NCBI GI NO: 15221690 NR Description: membrane protein, Rhomboid family
  misc_feature (32)..(321): NCBI GI NO: 15222058 NR Description: membrane protein, Rhomboid family
  misc_feature (32)..(321): NCBI GI NO: 25402744 NR Description: protein T12C24.28
  misc_feature (26)..(321): NCBI GI NO: 15240744 NR Description: membrane protein, Rhomboid family
  misc_feature (6)..(321): NCBI GI NO: 294845 NR Description: membrane protein
  misc_feature (1)..(321): NCBI GI NO: 30693911 NR Description: membrane protein, Rhomboid family
  misc_feature (2)..(320): NCBI GI NO: 15236387 NR Description: membrane protein, Rhomboid family
  misc_feature (24)..(321): NCBI GI NO: 38344377 NR Description: OSJNBb0032E06.11
  misc_feature (2)..(321): NCBI GI NO: 37536172 NR Description: putative membrane protein
  misc_feature (35)..(278): NCBI GI NO: 34895778 NR Description: putative membrane protein
MANRDSERGGGGKQNNTNNNNNNYIYDESSSDTHWTSWLVPLIVVANLAVFIAVMFVNDCPKKIIGPNKACVARFLGRFSFQPLRENPLFGPSSSTLERMGALEWGKVVHEHQGWRLVTCMWLHAGILHLLTNMLSLIFIGIRLEQQFGFIRVGLIYLISGLGGSILSSLFLQESISVGASGALFGLLGAMLSELLTNWTIYANKAAALFTLLFIIAINLGLGLLPRVDNFAHIGGFITGFCLGFILLVRPQHGWESSRTNTSLTKRKYSIYQYVLFIVAVLILVVCLTVGSVMLFKGENGNKHCKWCHRLSCFPTSKWTC

SEQ ID NO: 21136 - protein, 267 aa, Zea mays subsp. mays
  peptide (1)..(267): Ceres Seq. ID no. 15179395
  misc_feature (1)..(267): NCBI GI NO: 15221690 NR Description: membrane protein, Rhomboid family
  misc_feature (1)..(267): NCBI GI NO: 15222058 NR Description: membrane protein, Rhomboid family
  misc_feature (1)..(267): NCBI GI NO: 25402744 NR Description: protein T12C24.28
  misc_feature (1)..(267): NCBI GI NO: 15240744 NR Description: membrane protein, Rhomboid family
  misc_feature (1)..(267): NCBI GI NO: 294845 NR Description: membrane protein
  misc_feature (1)..(267): NCBI GI NO: 30693911 NR Description: membrane protein, Rhomboid family
  misc_feature (1)..(266): NCBI GI NO: 15236387 NR Description: membrane protein, Rhomboid family
  misc_feature (1)..(267): NCBI GI NO: 38344377 NR Description: OSJNBb0032E06.11
  misc_feature (1)..(267): NCBI GI NO: 37536172 NR Description: putative membrane protein
  misc_feature (1)..(224): NCBI GI NO: 34895778 NR Description: putative membrane protein
MFVNDCPKKIIGPNKACVARFLGRFSFQPLRENPLFGPSSSTLERMGALEWGKVVHEHQGWRLVTCMWLHAGILHLLTNMLSLIFIGIRLEQQFGFIRVGLIYLISGLGGSILSSLFLQESISVGASGALFGLLGAMLSELLTNWTIYANKAAALFTLLFIIAINLGLGLLPRVDNFAHIGGFITGFCLGFILLVRPQHGWESSRTNTSLTKRKYSIYQYVLFIVAVLILVVCLTVGSVMLFKGENGNKHCKWCHRLSCFPTSKWTC

SEQ ID NO: 21137 - protein, 222 aa, Zea mays subsp. mays
  peptide (1)..(222): Ceres Seq. ID no. 15179396
  misc_feature (1)..(222): NCBI GI NO: 15221690 NR Description: membrane protein, Rhomboid family
  misc_feature (1)..(222): NCBI GI NO: 15222058 NR Description: membrane protein, Rhomboid family
  misc_feature (1)..(222): NCBI GI NO: 25402744 NR Description: protein T12C24.28
  misc_feature (1)..(222): NCBI GI NO: 15240744 NR Description: membrane protein, Rhomboid family
  misc_feature (1)..(222): NCBI GI NO: 294845 NR Description: membrane protein
  misc_feature (1)..(222): NCBI GI NO: 30693911 NR Description: membrane protein, Rhomboid family
  misc_feature (1)..(221): NCBI GI NO: 15236387 NR Description: membrane protein, Rhomboid family
  misc_feature (1)..(222): NCBI GI NO: 38344377 NR Description: OSJNBb0032E06.11
  misc_feature (1)..(222): NCBI GI NO: 37536172 NR Description: putative membrane protein
  misc_feature (1)..(179): NCBI GI NO: 34895778 NR Description: putative membrane protein
MGALEWGKVVHEHQGWRLVTCMWLHAGILHLLTNMLSLIFIGIRLEQQFGFIRVGLIYLISGLGGSILSSLFLQESISVGASGALFGLLGAMLSELLTNWTIYANKAAALFTLLFIIAINLGLGLLPRVDNFAHIGGFITGFCLGFILLVRPQHGWESSRTNTSLTKRKYSIYQYVLFIVAVLILVVCLTVGSVMLFKGENGNKHCKWCHRLSCFPTSKWTC

SEQ ID NO: 21138 - DNA, 1081 bp, Zea mays subsp. mays
  misc_feature (1)..(1081): Ceres Seq. ID no. 15176822
aaaagcagcaagcttcatcatctccctctctctgtccgatctaatcgatccctcaatcactcaacgaagtctcatctttcgatctaatcgacaccccttttcgataatctcattgagatgagctctgaagcgtcggcggctggagacggcggcgaaacgagcggtgggccagcacccgcatacgacaaacagaaggagaaggcgcgcgtgagcaggacgtctctgatcctgtggcacgcgcaccagaacgacgcagccgcagtccggaagctcctggaggaagatccgtctctggttcacgccagagactacgacaagcgaacgcctctccacgtggcgtcgcttcacgggtggatcgacgtcgtcaaatgtctgatcgagtttggtgctgatgtcaacgctcaggacaggtggaagaacacgcctctggctgatgcagaaggtgctaggaagcagaaaatgatcgagctattgaaatctcatggcggtttatcttatggtcaaaacggaagtcactttgaaccaaagcctgtgccaccaccaattccaaagaagtgtgactgggagattgaacctgctgagcttgatttctctaacgccgccatgattgggaagggttcatttggtgagattgtgaaagcttattggagaggaacaccagtagctgtcaaacgtattcttccttctctctcagatgatagacttgttattcaggacttcaggcatgaggttgatttgctagttaagcttcgccattcgaatatagtgcagttcttaggagccgtaaccgaaagaaagccacttatgttaatcacagagtacttacgcgggggagatcttcaccaatacctcaaggagaagggaggtcttactccagcaactgctgtcaactttgccttggatatcgctaggtactttcaatctttttaacagtttgagatattatgtgaaaacttatacatggcctgactgagtgaatctattctattaaaacagcagtgtgacccattgataaaagtagagtccaattattatttttccaaaaaactgattattttataactgcttatattaaataact

SEQ ID NO: 21139 - protein, 270 aa, Zea mays subsp. mays
  peptide (1)..(270): Ceres Seq. ID no. 15176823
  misc_feature (158)..(265): Pfam Name: Pfam Description:  Protein kinase domain
  misc_feature (1)..(265): NCBI GI NO: 15223025 NR Description: protein kinase -related [Arabidopsis thaliana]
  misc_feature (1)..(265): NCBI GI NO: 18700097 NR Description: At1g14000/F7A19_9 [Arabidopsis thaliana]
  misc_feature (1)..(265): NCBI GI NO: 8778397 NR Description: F16A14.22 [Arabidopsis thaliana]
  misc_feature (9)..(265): NCBI GI NO: 34913284 NR Description: putative protein kinase
  misc_feature (9)..(265): NCBI GI NO: 33146898 NR Description: putative ankyrin-kinase
  misc_feature (34)..(265): NCBI GI NO: 11358145 NR Description: hypothetical protein T20N10
  misc_feature (34)..(265): NCBI GI NO: 18411024 NR Description: expressed protein [Arabidopsis thaliana]
  misc_feature (37)..(265): NCBI GI NO: 7488240 NR Description: protein kinase homolog F13C5
  misc_feature (37)..(265): NCBI GI NO: 18415205 NR Description: protein kinase - like protein
  misc_feature (34)..(265): NCBI GI NO: 15232181 NR Description: hypothetical protein [Arabidopsis thaliana]
MSSEASAAGDGGETSGGPAPAYDKQKEKARVSRTSLILWHAHQNDAAAVRKLLEEDPSLVHARDYDKRTPLHVASLHGWIDVVKCLIEFGADVNAQDRWKNTPLADAEGARKQKMIELLKSHGGLSYGQNGSHFEPKPVPPPIPKKCDWEIEPAELDFSNAAMIGKGSFGEIVKAYWRGTPVAVKRILPSLSDDRLVIQDFRHEVDLLVKLRHSNIVQFLGAVTERKPLMLITEYLRGGDLHQYLKEKGGLTPATAVNFALDIARYFQSF

SEQ ID NO: 21140 - protein, 156 aa, Zea mays subsp. mays
  peptide (1)..(156): Ceres Seq. ID no. 15176824
  misc_feature (44)..(151): Pfam Name: Pfam Description:  Protein kinase domain
  misc_feature (1)..(151): NCBI GI NO: 15223025 NR Description: protein kinase -related [Arabidopsis thaliana]
  misc_feature (1)..(151): NCBI GI NO: 18700097 NR Description: At1g14000/F7A19_9 [Arabidopsis thaliana]
  misc_feature (1)..(151): NCBI GI NO: 8778397 NR Description: F16A14.22 [Arabidopsis thaliana]
  misc_feature (1)..(151): NCBI GI NO: 34913284 NR Description: putative protein kinase
  misc_feature (1)..(151): NCBI GI NO: 33146898 NR Description: putative ankyrin-kinase
  misc_feature (1)..(151): NCBI GI NO: 11358145 NR Description: hypothetical protein T20N10
  misc_feature (1)..(151): NCBI GI NO: 18411024 NR Description: expressed protein [Arabidopsis thaliana]
  misc_feature (1)..(151): NCBI GI NO: 7488240 NR Description: protein kinase homolog F13C5
  misc_feature (1)..(151): NCBI GI NO: 18415205 NR Description: protein kinase - like protein
  misc_feature (1)..(151): NCBI GI NO: 15232181 NR Description: hypothetical protein [Arabidopsis thaliana]
MIELLKSHGGLSYGQNGSHFEPKPVPPPIPKKCDWEIEPAELDFSNAAMIGKGSFGEIVKAYWRGTPVAVKRILPSLSDDRLVIQDFRHEVDLLVKLRHSNIVQFLGAVTERKPLMLITEYLRGGDLHQYLKEKGGLTPATAVNFALDIARYFQSF

SEQ ID NO: 21141 - DNA, 715 bp, Zea mays subsp. mays
  misc_feature (1)..(715): Ceres Seq. ID no. 15176126
aacaaccatccaatctgagaatatgagcgaagaactcgttcaacacgaatctcattctcaggcatcgatatttagccgttttttcagaatgttctcttttatctacccattgctgaacgttataaagcttattatagcttccgtgacctccttagtctgcttagcgttttcttgtgtgacactcggtggttcagccgtggcattaatcgtatccacaccacttttcatcatgtttagtccaattctcgtacccgctactattgccactaccctcctagccagtgggctcatggccggtaccaccctcggactgaccggcataggtctcatcatggggctcgttaggactgcaggaggagtttcattgctccaatcaccattaagaaaaatcatagtaaatagaataaaagcaagacttgggggtggcggtggcggttcacgtctggcgaggctcaaaaaaatcctgggattattaaacaagctccgtggtatgggtgcaggtggagctgctgcccctgcggctgaagctgcccctgcggctgaagctgcacctgcggctgaagctgcacctgcggctgcacctgcagctgcacctgcggctgcaccctaattaatttaagaatttatgactcgtaaactaaaaggaaaataacttttttactatgttttatgtaataaattgtttctgtagtaaaaaaataaaaatattatgtgt

SEQ ID NO: 21142 - protein, 202 aa, Zea mays subsp. mays
  peptide (1)..(202): Ceres Seq. ID no. 15176127
  misc_feature (36)..(155): Pfam Name: Pfam Description:  Oleosin
  misc_feature (20)..(202): NCBI GI NO: 266692 NR Description: OLEOSIN C98
  misc_feature (8)..(195): NCBI GI NO: 15054378 NR Description: putative oleosin [Brassica oleracea]
  misc_feature (26)..(173): NCBI GI NO: 4580945 NR Description: oleosin [Brassica oleracea]
  misc_feature (8)..(126): NCBI GI NO: 7488469 NR Description: oleosin-like protein - rape
  misc_feature (172)..(202): NCBI GI NO: 7488469 NR Description: oleosin-like protein - rape
  misc_feature (170)..(202): NCBI GI NO: 7488469 NR Description: oleosin-like protein - rape
  misc_feature (163)..(202): NCBI GI NO: 7488469 NR Description: oleosin-like protein - rape
  misc_feature (170)..(202): NCBI GI NO: 7488469 NR Description: oleosin-like protein - rape
  misc_feature (171)..(202): NCBI GI NO: 7488469 NR Description: oleosin-like protein - rape
  misc_feature (170)..(202): NCBI GI NO: 7488469 NR Description: oleosin-like protein - rape
TTIQSENMSEELVQHESHSQASIFSRFFRMFSFIYPLLNVIKLIIASVTSLVCLAFSCVTLGGSAVALIVSTPLFIMFSPILVPATIATTLLASGLMAGTTLGLTGIGLIMGLVRTAGGVSLLQSPLRKIIVNRIKARLGGGGGGSRLARLKKILGLLNKLRGMGAGGAAAPAAEAAPAAEAAPAAEAAPAAAPAAAPAAAP

SEQ ID NO: 21143 - protein, 195 aa, Zea mays subsp. mays
  peptide (1)..(195): Ceres Seq. ID no. 15176128
  misc_feature (29)..(148): Pfam Name: Pfam Description:  Oleosin
  misc_feature (13)..(195): NCBI GI NO: 266692 NR Description: OLEOSIN C98
  misc_feature (1)..(188): NCBI GI NO: 15054378 NR Description: putative oleosin [Brassica oleracea]
  misc_feature (19)..(166): NCBI GI NO: 4580945 NR Description: oleosin [Brassica oleracea]
  misc_feature (1)..(119): NCBI GI NO: 7488469 NR Description: oleosin-like protein - rape
  misc_feature (165)..(195): NCBI GI NO: 7488469 NR Description: oleosin-like protein - rape
  misc_feature (163)..(195): NCBI GI NO: 7488469 NR Description: oleosin-like protein - rape
  misc_feature (156)..(195): NCBI GI NO: 7488469 NR Description: oleosin-like protein - rape
  misc_feature (163)..(195): NCBI GI NO: 7488469 NR Description: oleosin-like protein - rape
  misc_feature (164)..(195): NCBI GI NO: 7488469 NR Description: oleosin-like protein - rape
  misc_feature (163)..(195): NCBI GI NO: 7488469 NR Description: oleosin-like protein - rape
MSEELVQHESHSQASIFSRFFRMFSFIYPLLNVIKLIIASVTSLVCLAFSCVTLGGSAVALIVSTPLFIMFSPILVPATIATTLLASGLMAGTTLGLTGIGLIMGLVRTAGGVSLLQSPLRKIIVNRIKARLGGGGGGSRLARLKKILGLLNKLRGMGAGGAAAPAAEAAPAAEAAPAAEAAPAAAPAAAPAAAP

SEQ ID NO: 21144 - protein, 173 aa, Zea mays subsp. mays
  peptide (1)..(173): Ceres Seq. ID no. 15176129
  misc_feature (7)..(126): Pfam Name: Pfam Description:  Oleosin
  misc_feature (1)..(173): NCBI GI NO: 266692 NR Description: OLEOSIN C98
  misc_feature (1)..(166): NCBI GI NO: 15054378 NR Description: putative oleosin [Brassica oleracea]
  misc_feature (1)..(144): NCBI GI NO: 4580945 NR Description: oleosin [Brassica oleracea]
  misc_feature (1)..(97): NCBI GI NO: 7488469 NR Description: oleosin-like protein - rape
  misc_feature (143)..(173): NCBI GI NO: 7488469 NR Description: oleosin-like protein - rape
  misc_feature (141)..(173): NCBI GI NO: 7488469 NR Description: oleosin-like protein - rape
  misc_feature (134)..(173): NCBI GI NO: 7488469 NR Description: oleosin-like protein - rape
  misc_feature (141)..(173): NCBI GI NO: 7488469 NR Description: oleosin-like protein - rape
  misc_feature (142)..(173): NCBI GI NO: 7488469 NR Description: oleosin-like protein - rape
  misc_feature (141)..(173): NCBI GI NO: 7488469 NR Description: oleosin-like protein - rape
MFSFIYPLLNVIKLIIASVTSLVCLAFSCVTLGGSAVALIVSTPLFIMFSPILVPATIATTLLASGLMAGTTLGLTGIGLIMGLVRTAGGVSLLQSPLRKIIVNRIKARLGGGGGGSRLARLKKILGLLNKLRGMGAGGAAAPAAEAAPAAEAAPAAEAAPAAAPAAAPAAAP

SEQ ID NO: 21145 - DNA, 776 bp, Zea mays subsp. mays
  misc_feature (1)..(776): Ceres Seq. ID no. 15176177
aaaaaactgttagacgaagcatcgagaaagcaatgatcctactttcggttagttcctcttcatcatctcccatcgccgccgtcttctccgtcgcgcttcttctgttccacttctctgaagctactcttgcagctccttgtccgatcaatggtttgccaatagtgaggaatataagtgaacttcctcaggataactatggaaggccaggcctttctcacatgactgttgctggatcagttttgcacggaatgaaagaggttgagatatggcttcaaacgtttgctccaggctcagggacgccgattcacaggcactcttgtgaagaggttttcgttgtccttaaaggcaatggtactctgtatctcgctgaaacacatggaagtttccctgggaaacctattgagtttccagtctttgccaacagtactattcatattcccatcaatgatgctcatcaggtcaagaacactggtcatgaggacctgcaggtgttggttattatatcccggccgccaattaaagtctttacctacgatgactggtttatgccacacactgctgcgaggttaaagttcccttactactgggatgagcaatgcctccaagaatcacagaaggacgagctttaataaagtaaatgaatgttcactctttgaaactctcagtcttattgtttttgaaaaatatgtaactgagcaacatcttacctacaccattagtctgtacttcgtagtcttttcataaacaagttaatgcgatctatagttttatttgcc

SEQ ID NO: 21146 - protein, 208 aa, Zea mays subsp. mays
  peptide (1)..(208): Ceres Seq. ID no. 15176178
  misc_feature (44)..(208): Pfam Name: Pfam Description:  Auxin binding protein
  misc_feature (11)..(208): NCBI GI NO: 22122218 NR Description: resistant endoplasmic reticulum auxin-binding protein 1
  misc_feature (11)..(208): NCBI GI NO: 22122222 NR Description: susceptible endoplasmic reticulum auxin-binding protein 1b
  misc_feature (11)..(208): NCBI GI NO: 22122220 NR Description: susceptible endoplasmic reticulum auxin-binding protein 1a
  misc_feature (11)..(208): NCBI GI NO: 15236229 NR Description: auxin-binding protein 1 precursor
  misc_feature (11)..(208): NCBI GI NO: 21592915 NR Description: auxin-binding protein 1 precursor
  misc_feature (11)..(208): NCBI GI NO: 22122216 NR Description: resistant endoplasmic reticulum auxin-binding protein 2
  misc_feature (11)..(208): NCBI GI NO: 22122224 NR Description: susceptible endoplasmic reticulum auxin-binding protein 2
  misc_feature (11)..(208): NCBI GI NO: 7442015 NR Description: auxin-binding protein precursor - radish
  misc_feature (27)..(208): NCBI GI NO: 1843533 NR Description: auxin binding protein [Malus x domestica]
  misc_feature (30)..(208): NCBI GI NO: 461449 NR Description: AUXIN-BINDING PROTEIN T85 PRECURSOR (ABP)
KTVRRSIEKAMILLSVSSSSSSPIAAVFSVALLLFHFSEATLAAPCPINGLPIVRNISELPQDNYGRPGLSHMTVAGSVLHGMKEVEIWLQTFAPGSGTPIHRHSCEEVFVVLKGNGTLYLAETHGSFPGKPIEFPVFANSTIHIPINDAHQVKNTGHEDLQVLVIISRPPIKVFTYDDWFMPHTAARLKFPYYWDEQCLQESQKDEL

SEQ ID NO: 21147 - protein, 198 aa, Zea mays subsp. mays
  peptide (1)..(198): Ceres Seq. ID no. 15176179
  misc_feature (34)..(198): Pfam Name: Pfam Description:  Auxin binding protein
  misc_feature (1)..(198): NCBI GI NO: 22122218 NR Description: resistant endoplasmic reticulum auxin-binding protein 1
  misc_feature (1)..(198): NCBI GI NO: 22122222 NR Description: susceptible endoplasmic reticulum auxin-binding protein 1b
  misc_feature (1)..(198): NCBI GI NO: 22122220 NR Description: susceptible endoplasmic reticulum auxin-binding protein 1a
  misc_feature (1)..(198): NCBI GI NO: 15236229 NR Description: auxin-binding protein 1 precursor
  misc_feature (1)..(198): NCBI GI NO: 21592915 NR Description: auxin-binding protein 1 precursor
  misc_feature (1)..(198): NCBI GI NO: 22122216 NR Description: resistant endoplasmic reticulum auxin-binding protein 2
  misc_feature (1)..(198): NCBI GI NO: 22122224 NR Description: susceptible endoplasmic reticulum auxin-binding protein 2
  misc_feature (1)..(198): NCBI GI NO: 7442015 NR Description: auxin-binding protein precursor - radish
  misc_feature (17)..(198): NCBI GI NO: 1843533 NR Description: auxin binding protein [Malus x domestica]
  misc_feature (20)..(198): NCBI GI NO: 461449 NR Description: AUXIN-BINDING PROTEIN T85 PRECURSOR (ABP)
MILLSVSSSSSSPIAAVFSVALLLFHFSEATLAAPCPINGLPIVRNISELPQDNYGRPGLSHMTVAGSVLHGMKEVEIWLQTFAPGSGTPIHRHSCEEVFVVLKGNGTLYLAETHGSFPGKPIEFPVFANSTIHIPINDAHQVKNTGHEDLQVLVIISRPPIKVFTYDDWFMPHTAARLKFPYYWDEQCLQESQKDEL

SEQ ID NO: 21148 - protein, 136 aa, Zea mays subsp. mays
  peptide (1)..(136): Ceres Seq. ID no. 15176180
  misc_feature (1)..(136): Pfam Name: Pfam Description:  Auxin binding protein
  misc_feature (1)..(136): NCBI GI NO: 22122218 NR Description: resistant endoplasmic reticulum auxin-binding protein 1
  misc_feature (1)..(136): NCBI GI NO: 22122222 NR Description: susceptible endoplasmic reticulum auxin-binding protein 1b
  misc_feature (1)..(136): NCBI GI NO: 22122220 NR Description: susceptible endoplasmic reticulum auxin-binding protein 1a
  misc_feature (1)..(136): NCBI GI NO: 15236229 NR Description: auxin-binding protein 1 precursor
  misc_feature (1)..(136): NCBI GI NO: 21592915 NR Description: auxin-binding protein 1 precursor
  misc_feature (1)..(136): NCBI GI NO: 22122216 NR Description: resistant endoplasmic reticulum auxin-binding protein 2
  misc_feature (1)..(136): NCBI GI NO: 22122224 NR Description: susceptible endoplasmic reticulum auxin-binding protein 2
  misc_feature (1)..(136): NCBI GI NO: 7442015 NR Description: auxin-binding protein precursor - radish
  misc_feature (1)..(136): NCBI GI NO: 1843533 NR Description: auxin binding protein [Malus x domestica]
  misc_feature (1)..(136): NCBI GI NO: 461449 NR Description: AUXIN-BINDING PROTEIN T85 PRECURSOR (ABP)
MTVAGSVLHGMKEVEIWLQTFAPGSGTPIHRHSCEEVFVVLKGNGTLYLAETHGSFPGKPIEFPVFANSTIHIPINDAHQVKNTGHEDLQVLVIISRPPIKVFTYDDWFMPHTAARLKFPYYWDEQCLQESQKDEL

SEQ ID NO: 21149 - DNA, 638 bp, Zea mays subsp. mays
  misc_feature (1)..(638): Ceres Seq. ID no. 15176173
attaatttctttctcactctctcgaaatcacacgatgaaaagatcctccgccgtcacgtcaccgccatctctctccctctttctcctcctgctcctaccattgctagctcaatcctccgacgaccttatcgacaaaatctgcagagtgacgccgttcatcgacctctgtgaagcctctctccgccctctcactccctcaccttccgaccccaagtctctagcctcggccatggcttccgttgttcttggtaacatgactgatacgttaggctatatccaatcactgatcagacactctcacgatcctgcggcagagcgagcactagctcagtgcgctgagctgtaccggccggtggtcaagttcaacattcctcaggcgatcgacgcaatgcggcgaggagagttagggttcgcgacgtatgtgctcggagacgctgagaaacagactgacacttgccagaagtggatcaacagtgccggtgctgatgatgaaaattcggtggctcttacggctagaaacaagcaggttaagaatctttgtgacgtggccatttctgtgattaagtctctaatgaagggtcgttaagacaagaatctttgtttctgttgcagataataattatatattacatatttgt

SEQ ID NO: 21150 - protein, 194 aa, Zea mays subsp. mays
  peptide (1)..(194): Ceres Seq. ID no. 15176174
  misc_feature (12)..(193): NCBI GI NO: 15228972 NR Description: hypothetical protein [Arabidopsis thaliana]
  misc_feature (24)..(191): NCBI GI NO: 18401982 NR Description: invertase/pectin methylesterase inhibitor
  misc_feature (26)..(191): NCBI GI NO: 7489025 NR Description: invertase inhibitor precursor - tomato
  misc_feature (38)..(191): NCBI GI NO: 22212790 NR Description: invertase inhibitor-like protein [Ipomoea batatas]
LISFSLSRNHTMKRSSAVTSPPSLSLFLLLLLPLLAQSSDDLIDKICRVTPFIDLCEASLRPLTPSPSDPKSLASAMASVVLGNMTDTLGYIQSLIRHSHDPAAERALAQCAELYRPVVKFNIPQAIDAMRRGELGFATYVLGDAEKQTDTCQKWINSAGADDENSVALTARNKQVKNLCDVAISVIKSLMKGR

SEQ ID NO: 21151 - protein, 183 aa, Zea mays subsp. mays
  peptide (1)..(183): Ceres Seq. ID no. 15176175
  misc_feature (1)..(182): NCBI GI NO: 15228972 NR Description: hypothetical protein [Arabidopsis thaliana]
  misc_feature (13)..(180): NCBI GI NO: 18401982 NR Description: invertase/pectin methylesterase inhibitor
  misc_feature (15)..(180): NCBI GI NO: 7489025 NR Description: invertase inhibitor precursor - tomato
  misc_feature (27)..(180): NCBI GI NO: 22212790 NR Description: invertase inhibitor-like protein [Ipomoea batatas]
MKRSSAVTSPPSLSLFLLLLLPLLAQSSDDLIDKICRVTPFIDLCEASLRPLTPSPSDPKSLASAMASVVLGNMTDTLGYIQSLIRHSHDPAAERALAQCAELYRPVVKFNIPQAIDAMRRGELGFATYVLGDAEKQTDTCQKWINSAGADDENSVALTARNKQVKNLCDVAISVIKSLMKGR

SEQ ID NO: 21152 - protein, 118 aa, Zea mays subsp. mays
  peptide (1)..(118): Ceres Seq. ID no. 15176176
  misc_feature (1)..(117): NCBI GI NO: 15228972 NR Description: hypothetical protein [Arabidopsis thaliana]
  misc_feature (1)..(115): NCBI GI NO: 18401982 NR Description: invertase/pectin methylesterase inhibitor
  misc_feature (1)..(115): NCBI GI NO: 7489025 NR Description: invertase inhibitor precursor - tomato
  misc_feature (1)..(115): NCBI GI NO: 22212790 NR Description: invertase inhibitor-like protein [Ipomoea batatas]
MASVVLGNMTDTLGYIQSLIRHSHDPAAERALAQCAELYRPVVKFNIPQAIDAMRRGELGFATYVLGDAEKQTDTCQKWINSAGADDENSVALTARNKQVKNLCDVAISVIKSLMKGR

SEQ ID NO: 21153 - DNA, 1370 bp, Zea mays subsp. mays
  misc_feature (1)..(1370): Ceres Seq. ID no. 13598818
gaactttatystrwtyaaaaaaaacaagggatgtcaaaactcaacaggacaaccgggtacacgtcgatgtgatatgactatatgaggcaccagcttatggatctttctgtgcctactaggctactaccgtttttgcctagtccagcagtccagccctggccacaattaaggtttctctaatttgactgccacaggcacctggttttcttgctgcttccgctgtttcttcctcaacctctccagctcagctgccgcaggctgcgactgccatggattccaaatccatggaagcatttgtggcaagtgaggcctccgtcttcatgaatcagccccctccacatatgtctagaccaacaattattatcaagctcattttgtggttgctgtggaccatcacccacttagcaatcagcattttaaatttatggtctcatctgatttatagtctagactgctatcttatttcatctggattgttgcggaagtatcagaatcttcatctgggtagactgaagtacttggctattgtggtagatagcaaagaagctaaaagtactgagaaggtcaagcgactgttacgctggctctcatctatgggtgtgaagtatgtatgtctctacgacattgagggagttctgaaaaaatcttttgaacctgctgtgaatgtttcaagagataggactgcaggagaacattttggcattggagcaaacatcaaagatctacactgtagccaaagagagatgatgatagattgtctttctggttctgatggcaaggagggtattgctaaagcagccagtttactttgctcaacttacttcaacggtgatactcatggagatggcaaaaggaaaccagcatttacagaagctgacatggctgctgcactgaaggctgtaggttgtggtggaccagaacccgatcttcttctcatgtatggtcctgctagatgccatttaggatttcctgcatggagattacggtatactgaaattatgtatatggggccactgaaatcaatgaaatatggtgcaattgtgaaagccttatataacttctcaaagaaacaccaaaattatgggaaatgatagctgatactagtttaaagaagaccatttgatcatggagaatcgacaccttggaactactggacagttactctgcggcccgcatccatttgcttctgctgctgcttactggagcacaggagtatttaacgttagacataccattgacacccatttcatgtttgcttgtaataagataaaaagtgctgtcgatagaacatacatacgggacaacatcccactgaaagttccacccatagcaatgagcaatgaaagaaacacaagaaatcttaccatctc

SEQ ID NO: 21154 - protein, 273 aa, Zea mays subsp. mays
  peptide (1)..(273): Ceres Seq. ID no. 15222426
  misc_feature (38)..(272): NCBI GI NO: 25083010 NR Description: Unknown protein [Arabidopsis thaliana]
  misc_feature (38)..(272): NCBI GI NO: 25372987 NR Description: protein F25C20.9 [imported] - Arabidopsis thaliana
  misc_feature (38)..(212): NCBI GI NO: 15221091 NR Description: expressed protein [Arabidopsis thaliana]
  misc_feature (86)..(273): NCBI GI NO: 20270243 NR Description: hypothetical protein, MGC:7199 [Homo sapiens]
  misc_feature (70)..(273): NCBI GI NO: 13384840 NR Description: hypothetical protein D10Ertd438e [Mus musculus]
MDSKSMEAFVASEASVFMNQPPPHMSRPTIIIKLILWLLWTITHLAISILNLWSHLIYSLDCYLISSGLLRKYQNLHLGRLKYLAIVVDSKEAKSTEKVKRLLRWLSSMGVKYVCLYDIEGVLKKSFEPAVNVSRDRTAGEHFGIGANIKDLHCSQREMMIDCLSGSDGKEGIAKAASLLCSTYFNGDTHGDGKRKPAFTEADMAAALKAVGCGGPEPDLLLMYGPARCHLGFPAWRLRYTEIMYMGPLKSMKYGAIVKALYNFSKKHQNYGK

SEQ ID NO: 21155 - protein, 268 aa, Zea mays subsp. mays
  peptide (1)..(268): Ceres Seq. ID no. 15222427
  misc_feature (33)..(267): NCBI GI NO: 25083010 NR Description: Unknown protein [Arabidopsis thaliana]
  misc_feature (33)..(267): NCBI GI NO: 25372987 NR Description: protein F25C20.9 [imported] - Arabidopsis thaliana
  misc_feature (33)..(207): NCBI GI NO: 15221091 NR Description: expressed protein [Arabidopsis thaliana]
  misc_feature (81)..(268): NCBI GI NO: 20270243 NR Description: hypothetical protein, MGC:7199 [Homo sapiens]
  misc_feature (65)..(268): NCBI GI NO: 13384840 NR Description: hypothetical protein D10Ertd438e [Mus musculus]
MEAFVASEASVFMNQPPPHMSRPTIIIKLILWLLWTITHLAISILNLWSHLIYSLDCYLISSGLLRKYQNLHLGRLKYLAIVVDSKEAKSTEKVKRLLRWLSSMGVKYVCLYDIEGVLKKSFEPAVNVSRDRTAGEHFGIGANIKDLHCSQREMMIDCLSGSDGKEGIAKAASLLCSTYFNGDTHGDGKRKPAFTEADMAAALKAVGCGGPEPDLLLMYGPARCHLGFPAWRLRYTEIMYMGPLKSMKYGAIVKALYNFSKKHQNYGK

SEQ ID NO: 21156 - protein, 256 aa, Zea mays subsp. mays
  peptide (1)..(256): Ceres Seq. ID no. 15222428
  misc_feature (21)..(255): NCBI GI NO: 25083010 NR Description: Unknown protein [Arabidopsis thaliana]
  misc_feature (21)..(255): NCBI GI NO: 25372987 NR Description: protein F25C20.9 [imported] - Arabidopsis thaliana
  misc_feature (21)..(195): NCBI GI NO: 15221091 NR Description: expressed protein [Arabidopsis thaliana]
  misc_feature (69)..(256): NCBI GI NO: 20270243 NR Description: hypothetical protein, MGC:7199 [Homo sapiens]
  misc_feature (53)..(256): NCBI GI NO: 13384840 NR Description: hypothetical protein D10Ertd438e [Mus musculus]
MNQPPPHMSRPTIIIKLILWLLWTITHLAISILNLWSHLIYSLDCYLISSGLLRKYQNLHLGRLKYLAIVVDSKEAKSTEKVKRLLRWLSSMGVKYVCLYDIEGVLKKSFEPAVNVSRDRTAGEHFGIGANIKDLHCSQREMMIDCLSGSDGKEGIAKAASLLCSTYFNGDTHGDGKRKPAFTEADMAAALKAVGCGGPEPDLLLMYGPARCHLGFPAWRLRYTEIMYMGPLKSMKYGAIVKALYNFSKKHQNYGK

SEQ ID NO: 21157 - DNA, 849 bp, Zea mays subsp. mays
  misc_feature (1)..(849): Ceres Seq. ID no. 13598819
ctagaacatcctaatcaaaaagtttatatgtgagcgttcctcgcaattaatagagagatctatctatctatcgatcgagctttcgttatcctcctcgatcttaattacaggtcatagctaagcaggtctgacaggatgtcgtggcagacatacgtcgatgagcacctcatgtgcgagatcgagggccaccacctgacctccgctgccatagtcggccacgacggcgccgtttgggcccagagcaccgcattcccacagttcaagacagaggagatgaccaacatcatgaaggacttcgacgagcccgggttcctggccccgaccggcctcttcctcggccccaccaagtacatggtcatccaaggcgagcccggcgctgtcatccgcgggaagaagggatctggaggcataactgtgaagaagacagggcaagcgatggtggtcggcatctacgacgagcccatgacccccggccagtgcaacatggtggtcgagaggctcggcgactacctcgtagagcaaggcctgtgaatggattcatttaatctgcgagcatccagcagcagcaacgataccaacaccagcattatttaattggtagcctcctctagctacgcacgcatttttagtcccctacacgtccttggattctgcgtggctctgttaatcatctctcatccttcgtctgccatttctcccctgcccgtcgccgatcaccagagatttttgttccttgttggtaccatgcattttggcaaataattttgtgattccatccccaaattaaagtttggttgtcgtatggtttgtaaacccagaacaatatatatatatgtgtgtgtgtgatcg

SEQ ID NO: 21158 - protein, 131 aa, Zea mays subsp. mays
  peptide (1)..(131): Ceres Seq. ID no. 13598820
  misc_feature (2)..(126): Pfam Name: Pfam Description:  Profilin
  misc_feature (1)..(131): NCBI GI NO: 37532730 NR Description: Profilin A
  misc_feature (1)..(131): NCBI GI NO: 464470 NR Description: Profilin 3 (ZmPRO3)
  misc_feature (1)..(131): NCBI GI NO: 422032 NR Description: profilin 2 - maize
  misc_feature (1)..(131): NCBI GI NO: 548597 NR Description: PROFILIN 2 (ZMPRO2)
  misc_feature (1)..(131): NCBI GI NO: 3914422 NR Description: Profilin (Pollen allergen Cyn d 12)
  misc_feature (1)..(131): NCBI GI NO: 464466 NR Description: Profilin 1 (ZmPRO1)
  misc_feature (1)..(131): NCBI GI NO: 3914432 NR Description: PROFILIN 2/4 (POLLEN ALLERGEN PHL P 11) (PHL P XI)
  misc_feature (1)..(131): NCBI GI NO: 14423860 NR Description: Profilin 3 (Pollen allergen Hev b 8.0201)
  misc_feature (1)..(131): NCBI GI NO: 21322677 NR Description: profilin [Phoenix dactylifera]
  misc_feature (1)..(131): NCBI GI NO: 464471 NR Description: PROFILIN 1 (POLLEN ALLERGEN PHL P 11) (PHL P XI)
MSWQTYVDEHLMCEIEGHHLTSAAIVGHDGAVWAQSTAFPQFKTEEMTNIMKDFDEPGFLAPTGLFLGPTKYMVIQGEPGAVIRGKKGSGGITVKKTGQAMVVGIYDEPMTPGQCNMVVERLGDYLVEQGL

SEQ ID NO: 21159 - protein, 120 aa, Zea mays subsp. mays
  peptide (1)..(120): Ceres Seq. ID no. 13598821
  misc_feature (1)..(115): Pfam Name: Pfam Description:  Profilin
  misc_feature (1)..(120): NCBI GI NO: 37532730 NR Description: Profilin A
  misc_feature (1)..(120): NCBI GI NO: 464470 NR Description: Profilin 3 (ZmPRO3)
  misc_feature (1)..(120): NCBI GI NO: 422032 NR Description: profilin 2 - maize
  misc_feature (1)..(120): NCBI GI NO: 548597 NR Description: PROFILIN 2 (ZMPRO2)
  misc_feature (1)..(120): NCBI GI NO: 3914422 NR Description: Profilin (Pollen allergen Cyn d 12)
  misc_feature (1)..(120): NCBI GI NO: 464466 NR Description: Profilin 1 (ZmPRO1)
  misc_feature (1)..(120): NCBI GI NO: 3914432 NR Description: PROFILIN 2/4 (POLLEN ALLERGEN PHL P 11) (PHL P XI)
  misc_feature (1)..(120): NCBI GI NO: 14423860 NR Description: Profilin 3 (Pollen allergen Hev b 8.0201)
  misc_feature (1)..(120): NCBI GI NO: 21322677 NR Description: profilin [Phoenix dactylifera]
  misc_feature (1)..(120): NCBI GI NO: 464471 NR Description: PROFILIN 1 (POLLEN ALLERGEN PHL P 11) (PHL P XI)
MCEIEGHHLTSAAIVGHDGAVWAQSTAFPQFKTEEMTNIMKDFDEPGFLAPTGLFLGPTKYMVIQGEPGAVIRGKKGSGGITVKKTGQAMVVGIYDEPMTPGQCNMVVERLGDYLVEQGL

SEQ ID NO: 21160 - protein, 85 aa, Zea mays subsp. mays
  peptide (1)..(85): Ceres Seq. ID no. 13598822
  misc_feature (1)..(80): Pfam Name: Pfam Description:  Profilin
  misc_feature (1)..(85): NCBI GI NO: 37532730 NR Description: Profilin A
  misc_feature (1)..(85): NCBI GI NO: 464470 NR Description: Profilin 3 (ZmPRO3)
  misc_feature (1)..(85): NCBI GI NO: 422032 NR Description: profilin 2 - maize
  misc_feature (1)..(85): NCBI GI NO: 548597 NR Description: PROFILIN 2 (ZMPRO2)
  misc_feature (1)..(85): NCBI GI NO: 3914422 NR Description: Profilin (Pollen allergen Cyn d 12)
  misc_feature (1)..(85): NCBI GI NO: 464466 NR Description: Profilin 1 (ZmPRO1)
  misc_feature (1)..(85): NCBI GI NO: 3914432 NR Description: PROFILIN 2/4 (POLLEN ALLERGEN PHL P 11) (PHL P XI)
  misc_feature (1)..(85): NCBI GI NO: 14423860 NR Description: Profilin 3 (Pollen allergen Hev b 8.0201)
  misc_feature (1)..(85): NCBI GI NO: 21322677 NR Description: profilin [Phoenix dactylifera]
  misc_feature (1)..(85): NCBI GI NO: 464471 NR Description: PROFILIN 1 (POLLEN ALLERGEN PHL P 11) (PHL P XI)
MTNIMKDFDEPGFLAPTGLFLGPTKYMVIQGEPGAVIRGKKGSGGITVKKTGQAMVVGIYDEPMTPGQCNMVVERLGDYLVEQGL

SEQ ID NO: 21161 - DNA, 1217 bp, Zea mays subsp. mays
  misc_feature (1)..(1217): Ceres Seq. ID no. 15178142
ccctccccgctcaccaccagtcaccaacgcccaccgggcctcgtccctcgtggcggcaactgggcggccgtcgctgccgccctacgccaggtgccgaggcgaccttcaggcccttggctggcgacgagcaccagtgcaccaccaatactctgagcctggctgccgaaagtgccttttggggttcttgtaatcttgttacattaggattcatttttgatgacttcatcaagaagcaagagcaagagcagaagtaggagccgcagtcgcagcaggagcaggagccgcagtcctcggcgaagagataggttgcgcagtgaacgtgcaccccaccgcagtcgtagccggagccgcagcccataccgtcgcagagaacgacgtggtcacagggattttgcatgcaagaactgccggagacctgggcacttcgctaaggagtgtccatctgcacctatgtgcaataactgtaaccttccaggccactttgcagcagaatgcaccttacaaactgtttgctggaactgcaaagagtctgggcacattgccagtgagtgcaagaacgaggccctatgccacgcctgcaacaagacaggtcacttggcacgtgactgccctacttcaggtgctaacgtcaagctatgcaacaaatgctttaaatcaggccacatcgccgttgactgcaccaacgaacgggcctgcaacaactgccgtcagccagggcacatagctcgggagtgcaagaacgacccggtctgcaacctgtgcaatgtctccggccacgtcgcgcgcgtctgcccaaagacgactctggcttcagtgatacagggcggcccgttccgagatatcctgtgccgcatctgcggtcagccggggcacatcagccgcaactgcatggcgaccatcatctgcgacacatgcggtgggagggggcacatgtcttatgagtgcccatcggcaagaatattcgggctccgcaggctctgaagatcttttcgccaagggctccgctttgttctgatggctgagtttcgccaggatgtttcatttgtttctgacagtattggaacagttttccttctgccgttgtagttgaggaatgattctgtaggatgtgttgcgggtgaaaactccttttttcccccttttaatcaggatagccctttgtgggctcaaacattgctgtaacggctcgtgtgaaaattgccaggtcatgatttaac

SEQ ID NO: 21162 - protein, 254 aa, Zea mays subsp. mays
  peptide (1)..(254): Ceres Seq. ID no. 15178143
  misc_feature (5)..(54): Pfam Name: Pfam Description:  Protamine P1
  misc_feature (3)..(253): NCBI GI NO: 18410883 NR Description: DNA-binding protein [Arabidopsis thaliana]
  misc_feature (6)..(253): NCBI GI NO: 21537255 NR Description: DNA-binding protein [Arabidopsis thaliana]
  misc_feature (22)..(248): NCBI GI NO: 37536582 NR Description: putative zinc finger protein
  misc_feature (24)..(253): NCBI GI NO: 25404984 NR Description: protein F10A5.22 [imported] - Arabidopsis thaliana
  misc_feature (60)..(194): NCBI GI NO: 6324074 NR Description: GIG3 suppressor; Gis2p [Saccharomyces cerevisiae]
  misc_feature (99)..(245): NCBI GI NO: 32421763 NR Description: hypothetical protein [Neurospora crassa]
  misc_feature (55)..(113): NCBI GI NO: 32421763 NR Description: hypothetical protein [Neurospora crassa]
  misc_feature (98)..(254): NCBI GI NO: 37536582 NR Description: putative zinc finger protein
  misc_feature (96)..(246): NCBI GI NO: 6324074 NR Description: GIG3 suppressor; Gis2p [Saccharomyces cerevisiae]
  misc_feature (60)..(246): NCBI GI NO: 729704 NR Description: DNA-binding protein HEXBP
MTSSRSKSKSRSRSRSRSRSRSRSPRRRDRLRSERAPHRSRSRSRSPYRRRERRGHRDFACKNCRRPGHFAKECPSAPMCNNCNLPGHFAAECTLQTVCWNCKESGHIASECKNEALCHACNKTGHLARDCPTSGANVKLCNKCFKSGHIAVDCTNERACNNCRQPGHIARECKNDPVCNLCNVSGHVARVCPKTTLASVIQGGPFRDILCRICGQPGHISRNCMATIICDTCGGRGHMSYECPSARIFGLRRL

SEQ ID NO: 21163 - protein, 176 aa, Zea mays subsp. mays
  peptide (1)..(176): Ceres Seq. ID no. 15178144
  misc_feature (1)..(175): NCBI GI NO: 18410883 NR Description: DNA-binding protein [Arabidopsis thaliana]
  misc_feature (1)..(175): NCBI GI NO: 21537255 NR Description: DNA-binding protein [Arabidopsis thaliana]
  misc_feature (1)..(170): NCBI GI NO: 37536582 NR Description: putative zinc finger protein
  misc_feature (1)..(175): NCBI GI NO: 25404984 NR Description: protein F10A5.22 [imported] - Arabidopsis thaliana
  misc_feature (1)..(116): NCBI GI NO: 6324074 NR Description: GIG3 suppressor; Gis2p [Saccharomyces cerevisiae]
  misc_feature (21)..(167): NCBI GI NO: 32421763 NR Description: hypothetical protein [Neurospora crassa]
  misc_feature (1)..(35): NCBI GI NO: 32421763 NR Description: hypothetical protein [Neurospora crassa]
  misc_feature (20)..(176): NCBI GI NO: 37536582 NR Description: putative zinc finger protein
  misc_feature (18)..(168): NCBI GI NO: 6324074 NR Description: GIG3 suppressor; Gis2p [Saccharomyces cerevisiae]
  misc_feature (1)..(168): NCBI GI NO: 729704 NR Description: DNA-binding protein HEXBP
MCNNCNLPGHFAAECTLQTVCWNCKESGHIASECKNEALCHACNKTGHLARDCPTSGANVKLCNKCFKSGHIAVDCTNERACNNCRQPGHIARECKNDPVCNLCNVSGHVARVCPKTTLASVIQGGPFRDILCRICGQPGHISRNCMATIICDTCGGRGHMSYECPSARIFGLRRL

SEQ ID NO: 21164 - DNA, 560 bp, Zea mays subsp. mays
  misc_feature (1)..(560): Ceres Seq. ID no. 13585976
tgctctcatttcttttgtacattattcttctgatcatatatgtcttgttaaaatccatgatgctcagttctgtgttctctcatttcatggaagaggctaatgctatatagtcttgcctgatgtttagcagatctcctcatttaaaacggttggttatgccagcatggaaccgcatcaccaaagtgggaatatgtaatgctatccaaaggtggcaggcgctggagtccttgacaatgcctaccatcggacatcctccatatattatggaagagatagcaaggagctgcaagaatttcacagaacttaagatcatgggctcatttgatcaacaatttgcctcggcaattttgcagttccttccaaagctgaaagtgctgagccttcgttgctcgaaggtgtccatggatgcactgcaatgtttgctgaactcgatggagtatcttgaggttctgaatatttcacactgcctgctgttggttgtcgcggcgaatgggcggaagcaagtggttcatgaactggacagccaaattctcgagagagcttcacggctgcgtgaattc

SEQ ID NO: 21165 - protein, 147 aa, Zea mays subsp. mays
  peptide (1)..(147): Ceres Seq. ID no. 13585977
  misc_feature (4)..(146): NCBI GI NO: 37535806 NR Description: putative Rhizobium-induced nodule developmentassociated protein
  misc_feature (4)..(146): NCBI GI NO: 15229043 NR Description: F-box protein family [Arabidopsis thaliana]
  misc_feature (4)..(146): NCBI GI NO: 21618163 NR Description: unknown [Arabidopsis thaliana]
  misc_feature (4)..(116): NCBI GI NO: 15234238 NR Description: F-box protein family [Arabidopsis thaliana]
MFSRSPHLKRLVMPAWNRITKVGICNAIQRWQALESLTMPTIGHPPYIMEEIARSCKNFTELKIMGSFDQQFASAILQFLPKLKVLSLRCSKVSMDALQCLLNSMEYLEVLNISHCLLLVVAANGRKQVVHELDSQILERASRLREF

SEQ ID NO: 21166 - protein, 135 aa, Zea mays subsp. mays
  peptide (1)..(135): Ceres Seq. ID no. 13585978
  misc_feature (1)..(134): NCBI GI NO: 37535806 NR Description: putative Rhizobium-induced nodule developmentassociated protein
  misc_feature (1)..(134): NCBI GI NO: 15229043 NR Description: F-box protein family [Arabidopsis thaliana]
  misc_feature (1)..(134): NCBI GI NO: 21618163 NR Description: unknown [Arabidopsis thaliana]
  misc_feature (1)..(104): NCBI GI NO: 15234238 NR Description: F-box protein family [Arabidopsis thaliana]
MPAWNRITKVGICNAIQRWQALESLTMPTIGHPPYIMEEIARSCKNFTELKIMGSFDQQFASAILQFLPKLKVLSLRCSKVSMDALQCLLNSMEYLEVLNISHCLLLVVAANGRKQVVHELDSQILERASRLREF

SEQ ID NO: 21167 - protein, 109 aa, Zea mays subsp. mays
  peptide (1)..(109): Ceres Seq. ID no. 13585979
  misc_feature (1)..(108): NCBI GI NO: 37535806 NR Description: putative Rhizobium-induced nodule developmentassociated protein
  misc_feature (1)..(108): NCBI GI NO: 15229043 NR Description: F-box protein family [Arabidopsis thaliana]
  misc_feature (1)..(108): NCBI GI NO: 21618163 NR Description: unknown [Arabidopsis thaliana]
  misc_feature (1)..(78): NCBI GI NO: 15234238 NR Description: F-box protein family [Arabidopsis thaliana]
MPTIGHPPYIMEEIARSCKNFTELKIMGSFDQQFASAILQFLPKLKVLSLRCSKVSMDALQCLLNSMEYLEVLNISHCLLLVVAANGRKQVVHELDSQILERASRLREF

SEQ ID NO: 21168 - DNA, 2306 bp, Zea mays subsp. mays
  misc_feature (1)..(2306): Ceres Seq. ID no. 15180558
gttctcctacatcccttttccctctctgcccctgcgaacggggcgccaccacctaccagttatctccctccgctgcgcagcccctctgttagaccgtcgttgccgccctactccaggtgggtaggtcttcttcgggcccttcgccggcgacaagcaccaccaggggacctcgccggcgcaggggagggtgcaccgtcgccaggagccaagagccagcagccaggaaccagagccgccgccacttctagagctcaatcgatcagcgactcagattttcatctgaggatgggtaaggactatgaccctatggagattgacgaccagaagcagcaacagctagaagtcaccgctgcggtgccagaagggttcaacactgactatctccgtgtctactacggaaagctcttcccatatggtgatttcttcaaatggctttgctatggaaatgatggaaagcaccctggatgtgatcaatcatatgttggacgtcgagagttttcgtttacactggagaatgacatttacttgcgcttccaatcctttgatactgctactgaattagagagttctatcaaggagaagtgccctttcaagattgatattggacctgtctacagtgtagatccttcaaagcgtcacgcttacgcccaatctggcaataatgtctttgtaccagtcgagagagaactaatttttgacattgatatatctgattatgatgatgttcgctactgctgctctggagctgatgtctgcagagactgctggcccttgatgacaattgctatcaaaattttggatacttctcttagagatgattttggtttcagtcacatactatgggtatacagtggacgtcgtggtgtccattgctgggtctgtgatagcagagcaagaaagctcagcaatgaacaaagggctgcaattgctgactactttcgagtctacaagggtggtgaaaatgcactgaagaaagtatccttggctggacctgttctccatcccttccttgcccggtcatacatggatgttcttaaaaccttctttgaagataggttgctccttaaccaacaactctttgcatcagaggagagatgtcggaagatactcgatctcatccctgatgaaagtgttgctagtgaggtccatgacaagtggcagggaaatagacgatcttctatttcaaaagaagatgtcaatgcgaccagatgggagcaattgaagatgactttacagtctggaaaaaaggctcaggggcttcgtagatgtgtggaagagattgtcttctcatacacataccctagacttgacatggaggtatcaaagcacatgaatcatttactaaaagctcccttttgtatacatccaaagacaggccgtgtttgtgttccgattgaccccagtaattgtgatgattttgatcctgcggctgttccgactctatcacagcttttaggagagctgaatgctactggttttcagacagatcctgaaaataattgggaaagaacgtcccttgggaaatccatcagttttttcagaacttccttcctgcacccattgctgaaagcatgcaaggaggaactggaaagtgcatatagcgcgaagcttcagcagtccaagaattcattggtgaggtctttgtgaatgcaccattctttatatctgctgaggatgcaggtgccgtggatgcaaggaaaagtgatgagtacaaagaaactattattccagctggaaagacacatgaggtcattttgagtgttgaagctgtaaactcatacatcgcatgggacttttccttgcaacaaggggccctcaacatggtattggacattggctttcatgtggagtacattagcccttcaggggagaaaactttaattcttccataccgacgatatgaagctgaccaaggtaatttttgcactgtttcatcgggatcatacaaacttgtgtgggacaattcatattcttcattcttcaaaaaggtccttcggtacaaggtggatgctgtgccaccggttgttgagccggccttgtcagccacggaactctgaagaggtctgtcttaatataatgatgtaacgagggccgatgcatgcccgagtatagctgtacaaatgtttctgaaggccccacacggtgctgttactgattattccatcgaatgctttgcggtgttctgatcgcagcattccctgatagctcgctgtcagagcgcatggatatgtactttgtgtgcacatggctgcggccacttgtcaccgacgaatgcctgaatataacagaaatgtattatatcgacc

SEQ ID NO: 21169 - protein, 548 aa, Zea mays subsp. mays
  peptide (1)..(548): Ceres Seq. ID no. 15180559
  misc_feature (150)..(461): Pfam Name: Pfam Description:  DNA primase small subunit
  misc_feature (150)..(500): NCBI GI NO: 15238209 NR Description: DNA polymerase alpha subunit IV
  misc_feature (126)..(543): NCBI GI NO: 28839820 NR Description: Similar to primase, polypeptide 1, 49kDa
  misc_feature (126)..(541): NCBI GI NO: 29612475 NR Description: Similar to primase, polypeptide 1, 49kDa
  misc_feature (126)..(531): NCBI GI NO: 4506051 NR Description: primase, polypeptide 1, 49kDa
  misc_feature (114)..(508): NCBI GI NO: 40744428 NR Description: hypothetical protein AN3033.2
  misc_feature (126)..(531): NCBI GI NO: 3676248 NR Description: DNA polymerase alpha subunit IV (primase)
  misc_feature (126)..(531): NCBI GI NO: 6679459 NR Description: DNA primase, p49 subunit [Mus musculus]
  misc_feature (126)..(531): NCBI GI NO: 110830 NR Description: DNA primase (EC 2.7.7.-) 46K chain - mouse
  misc_feature (60)..(527): NCBI GI NO: 32421129 NR Description: hypothetical protein [Neurospora crassa]
  misc_feature (109)..(535): NCBI GI NO: 31215873 NR Description: ENSANGP00000020414 [Anopheles gambiae]
VLLHPFSLSAPANGAPPPTSYLPPLRSPSVRPSLPPYSRWVGLLRALRRRQAPPGDLAGAGEGAPSPGAKSQQPGTRAAATSRAQSISDSDFHLRMGKDYDPMEIDDQKQQQLEVTAAVPEGFNTDYLRVYYGKLFPYGDFFKWLCYGNDGKHPGCDQSYVGRREFSFTLENDIYLRFQSFDTATELESSIKEKCPFKIDIGPVYSVDPSKRHAYAQSGNNVFVPVERELIFDIDISDYDDVRYCCSGADVCRDCWPLMTIAIKILDTSLRDDFGFSHILWVYSGRRGVHCWVCDSRARKLSNEQRAAIADYFRVYKGGENALKKVSLAGPVLHPFLARSYMDVLKTFFEDRLLLNQQLFASEERCRKILDLIPDESVASEVHDKWQGNRRSSISKEDVNATRWEQLKMTLQSGKKAQGLRRCVEEIVFSYTYPRLDMEVSKHMNHLLKAPFCIHPKTGRVCVPIDPSNCDDFDPAAVPTLSQLLGELNATGFQTDPENNWERTSLGKSISFFRTSFLHPLLKACKEELESAYSAKLQQSKNSLVRSL

SEQ ID NO: 21170 - protein, 453 aa, Zea mays subsp. mays
  peptide (1)..(453): Ceres Seq. ID no. 15180560
  misc_feature (55)..(366): Pfam Name: Pfam Description:  DNA primase small subunit
  misc_feature (55)..(405): NCBI GI NO: 15238209 NR Description: DNA polymerase alpha subunit IV
  misc_feature (31)..(448): NCBI GI NO: 28839820 NR Description: Similar to primase, polypeptide 1, 49kDa
  misc_feature (31)..(446): NCBI GI NO: 29612475 NR Description: Similar to primase, polypeptide 1, 49kDa
  misc_feature (31)..(436): NCBI GI NO: 4506051 NR Description: primase, polypeptide 1, 49kDa
  misc_feature (19)..(413): NCBI GI NO: 40744428 NR Description: hypothetical protein AN3033.2
  misc_feature (31)..(436): NCBI GI NO: 3676248 NR Description: DNA polymerase alpha subunit IV (primase)
  misc_feature (31)..(436): NCBI GI NO: 6679459 NR Description: DNA primase, p49 subunit [Mus musculus]
  misc_feature (31)..(436): NCBI GI NO: 110830 NR Description: DNA primase (EC 2.7.7.-) 46K chain - mouse
  misc_feature (1)..(432): NCBI GI NO: 32421129 NR Description: hypothetical protein [Neurospora crassa]
  misc_feature (14)..(440): NCBI GI NO: 31215873 NR Description: ENSANGP00000020414 [Anopheles gambiae]
MGKDYDPMEIDDQKQQQLEVTAAVPEGFNTDYLRVYYGKLFPYGDFFKWLCYGNDGKHPGCDQSYVGRREFSFTLENDIYLRFQSFDTATELESSIKEKCPFKIDIGPVYSVDPSKRHAYAQSGNNVFVPVERELIFDIDISDYDDVRYCCSGADVCRDCWPLMTIAIKILDTSLRDDFGFSHILWVYSGRRGVHCWVCDSRARKLSNEQRAAIADYFRVYKGGENALKKVSLAGPVLHPFLARSYMDVLKTFFEDRLLLNQQLFASEERCRKILDLIPDESVASEVHDKWQGNRRSSISKEDVNATRWEQLKMTLQSGKKAQGLRRCVEEIVFSYTYPRLDMEVSKHMNHLLKAPFCIHPKTGRVCVPIDPSNCDDFDPAAVPTLSQLLGELNATGFQTDPENNWERTSLGKSISFFRTSFLHPLLKACKEELESAYSAKLQQSKNSLVRSL

SEQ ID NO: 21171 - protein, 446 aa, Zea mays subsp. mays
  peptide (1)..(446): Ceres Seq. ID no. 15180561
  misc_feature (48)..(359): Pfam Name: Pfam Description:  DNA primase small subunit
  misc_feature (48)..(398): NCBI GI NO: 15238209 NR Description: DNA polymerase alpha subunit IV
  misc_feature (24)..(441): NCBI GI NO: 28839820 NR Description: Similar to primase, polypeptide 1, 49kDa
  misc_feature (24)..(439): NCBI GI NO: 29612475 NR Description: Similar to primase, polypeptide 1, 49kDa
  misc_feature (24)..(429): NCBI GI NO: 4506051 NR Description: primase, polypeptide 1, 49kDa
  misc_feature (12)..(406): NCBI GI NO: 40744428 NR Description: hypothetical protein AN3033.2
  misc_feature (24)..(429): NCBI GI NO: 3676248 NR Description: DNA polymerase alpha subunit IV (primase)
  misc_feature (24)..(429): NCBI GI NO: 6679459 NR Description: DNA primase, p49 subunit [Mus musculus]
  misc_feature (24)..(429): NCBI GI NO: 110830 NR Description: DNA primase (EC 2.7.7.-) 46K chain - mouse
  misc_feature (1)..(425): NCBI GI NO: 32421129 NR Description: hypothetical protein [Neurospora crassa]
  misc_feature (7)..(433): NCBI GI NO: 31215873 NR Description: ENSANGP00000020414 [Anopheles gambiae]
MEIDDQKQQQLEVTAAVPEGFNTDYLRVYYGKLFPYGDFFKWLCYGNDGKHPGCDQSYVGRREFSFTLENDIYLRFQSFDTATELESSIKEKCPFKIDIGPVYSVDPSKRHAYAQSGNNVFVPVERELIFDIDISDYDDVRYCCSGADVCRDCWPLMTIAIKILDTSLRDDFGFSHILWVYSGRRGVHCWVCDSRARKLSNEQRAAIADYFRVYKGGENALKKVSLAGPVLHPFLARSYMDVLKTFFEDRLLLNQQLFASEERCRKILDLIPDESVASEVHDKWQGNRRSSISKEDVNATRWEQLKMTLQSGKKAQGLRRCVEEIVFSYTYPRLDMEVSKHMNHLLKAPFCIHPKTGRVCVPIDPSNCDDFDPAAVPTLSQLLGELNATGFQTDPENNWERTSLGKSISFFRTSFLHPLLKACKEELESAYSAKLQQSKNSLVRSL

SEQ ID NO: 21172 - DNA, 1575 bp, Zea mays subsp. mays
  misc_feature (1)..(1575): Ceres Seq. ID no. 15180586
ctcacaggctcacacgatactttccccctccactagggttccccgtccgttccccctcggccgcatcagctgtttgaggcggcaaccaagggccgcggaagcatctgcgtcgagccatggataaggggatcttcaccaacgatggctccttcatggagaggttcaagcagatgcagcaggaggcgcaggagaagaaggccgctgctgcctccgcctcatcggctcccaagcatgcgaaccccaagcaggggtttgctgttgcggcaaacaagaggccattcgagctgaagaacgctgctccggtagcctcagctggtaagctggcctttagtctcaagaaggccaaggtcgccgttgcacctgtgtttgcagccgacgaggaggatgaggatgccgtggatgttgagagggaggagcccgccaaacgccagaagtctgtgcaagctgatgctcctgcggcagctgccccgtccggggctgttgccccacccccaccaaatgatatgacagtgagacaagtcgctgacaaactggcaagctttgttgccaaaaacgggagacagtttgagaatatcacacggcagaggaatcctggagatacaccattcaagtttctatttgacaaacactgtccagactacaaatattatgagtttcagcttgctgaagaggaaagggctcttgctcagtcaaaggaggctgaagcatcgaaagctaactctggcactgcaagcttcaaggcaccaggtggtacttatagaagctcatttgaacagaagtctaactatcagacacctgcatcagctttgtacggggcatatgagggtagttcttcccaaggaagctcttctagttacggtgatcatacagctccaccatcagatcctgtagcattgatggaattctatgcaaagaaggctgcactggaagaacggaagaggccaccaaggcagtcgaaagatgaaatgccgccacctccttctcttcaaggtcctcctaagaagggacaccacatgggtgatttcattcctcaagaagaacttgaaaagtttatggcacggtgtaatgatgctgcagcacaaaaggctaccaaagaagccgctgagaaggctaagattcaggcggacaatattgggcacaaacttttatctaagatgggttggagggaaggcgagggtcttgggagcgagagaagaggccgtgcagatcccgttatggctggagatgtgaagaaggatcatcttggtgttggggctgtccagcctggtgaggtcacatctgaagatgacatctatgagcaatacaagaaacggatgatgcttggataccgctataggccaaaccctctgaacaatccaaggaaatcatactactgatgcgggggagttcgtctgaggggagataaatgtcaagaagttcgttattcagcatatttcttggaatgccacagatgcaaggcttccgggggttctacaaagctttgttctttgtgtagtgtgtttatctttgtggatttaaatgtctgttcaaacgtgtatcatgtttcagacaatgatgtattgctttcttggatct

SEQ ID NO: 21173 - protein, 419 aa, Zea mays subsp. mays
  peptide (1)..(419): Ceres Seq. ID no. 15180587
  misc_feature (133)..(187): Pfam Name: Pfam Description:  Surp module
  misc_feature (1)..(293): NCBI GI NO: 11357298 NR Description: gamma response I protein - Arabidopsis thaliana
  misc_feature (259)..(419): NCBI GI NO: 11357298 NR Description: gamma response I protein - Arabidopsis thaliana
  misc_feature (224)..(419): NCBI GI NO: 18409491 NR Description: gamma response I protein [Arabidopsis thaliana]
  misc_feature (1)..(293): NCBI GI NO: 18409491 NR Description: gamma response I protein [Arabidopsis thaliana]
  misc_feature (126)..(301): NCBI GI NO: 6807742 NR Description: hypothetical protein [Homo sapiens]
  misc_feature (298)..(419): NCBI GI NO: 6807742 NR Description: hypothetical protein [Homo sapiens]
  misc_feature (298)..(419): NCBI GI NO: 34877669 NR Description: similar to splicing factor 4 [Rattus norvegicus]
  misc_feature (129)..(192): NCBI GI NO: 34877669 NR Description: similar to splicing factor 4 [Rattus norvegicus]
  misc_feature (103)..(301): NCBI GI NO: 7512956 NR Description: hypothetical protein F23858_1 - human (fragment)
  misc_feature (298)..(419): NCBI GI NO: 7512956 NR Description: hypothetical protein F23858_1 - human (fragment)
MDKGIFTNDGSFMERFKQMQQEAQEKKAAAASASSAPKHANPKQGFAVAANKRPFELKNAAPVASAGKLAFSLKKAKVAVAPVFAADEEDEDAVDVEREEPAKRQKSVQADAPAAAAPSGAVAPPPPNDMTVRQVADKLASFVAKNGRQFENITRQRNPGDTPFKFLFDKHCPDYKYYEFQLAEEERALAQSKEAEASKANSGTASFKAPGGTYRSSFEQKSNYQTPASALYGAYEGSSSQGSSSSYGDHTAPPSDPVALMEFYAKKAALEERKRPPRQSKDEMPPPPSLQGPPKKGHHMGDFIPQEELEKFMARCNDAAAQKATKEAAEKAKIQADNIGHKLLSKMGWREGEGLGSERRGRADPVMAGDVKKDHLGVGAVQPGEVTSEDDIYEQYKKRMMLGYRYRPNPLNNPRKSYY

SEQ ID NO: 21174 - protein, 407 aa, Zea mays subsp. mays
  peptide (1)..(407): Ceres Seq. ID no. 15180588
  misc_feature (121)..(175): Pfam Name: Pfam Description:  Surp module
  misc_feature (1)..(281): NCBI GI NO: 11357298 NR Description: gamma response I protein - Arabidopsis thaliana
  misc_feature (247)..(407): NCBI GI NO: 11357298 NR Description: gamma response I protein - Arabidopsis thaliana
  misc_feature (212)..(407): NCBI GI NO: 18409491 NR Description: gamma response I protein [Arabidopsis thaliana]
  misc_feature (1)..(281): NCBI GI NO: 18409491 NR Description: gamma response I protein [Arabidopsis thaliana]
  misc_feature (114)..(289): NCBI GI NO: 6807742 NR Description: hypothetical protein [Homo sapiens]
  misc_feature (286)..(407): NCBI GI NO: 6807742 NR Description: hypothetical protein [Homo sapiens]
  misc_feature (286)..(407): NCBI GI NO: 34877669 NR Description: similar to splicing factor 4 [Rattus norvegicus]
  misc_feature (117)..(180): NCBI GI NO: 34877669 NR Description: similar to splicing factor 4 [Rattus norvegicus]
  misc_feature (91)..(289): NCBI GI NO: 7512956 NR Description: hypothetical protein F23858_1 - human (fragment)
  misc_feature (286)..(407): NCBI GI NO: 7512956 NR Description: hypothetical protein F23858_1 - human (fragment)
MERFKQMQQEAQEKKAAAASASSAPKHANPKQGFAVAANKRPFELKNAAPVASAGKLAFSLKKAKVAVAPVFAADEEDEDAVDVEREEPAKRQKSVQADAPAAAAPSGAVAPPPPNDMTVRQVADKLASFVAKNGRQFENITRQRNPGDTPFKFLFDKHCPDYKYYEFQLAEEERALAQSKEAEASKANSGTASFKAPGGTYRSSFEQKSNYQTPASALYGAYEGSSSQGSSSSYGDHTAPPSDPVALMEFYAKKAALEERKRPPRQSKDEMPPPPSLQGPPKKGHHMGDFIPQEELEKFMARCNDAAAQKATKEAAEKAKIQADNIGHKLLSKMGWREGEGLGSERRGRADPVMAGDVKKDHLGVGAVQPGEVTSEDDIYEQYKKRMMLGYRYRPNPLNNPRKSYY

SEQ ID NO: 21175 - protein, 401 aa, Zea mays subsp. mays
  peptide (1)..(401): Ceres Seq. ID no. 15180589
  misc_feature (115)..(169): Pfam Name: Pfam Description:  Surp module
  misc_feature (1)..(275): NCBI GI NO: 11357298 NR Description: gamma response I protein - Arabidopsis thaliana
  misc_feature (241)..(401): NCBI GI NO: 11357298 NR Description: gamma response I protein - Arabidopsis thaliana
  misc_feature (206)..(401): NCBI GI NO: 18409491 NR Description: gamma response I protein [Arabidopsis thaliana]
  misc_feature (1)..(275): NCBI GI NO: 18409491 NR Description: gamma response I protein [Arabidopsis thaliana]
  misc_feature (108)..(283): NCBI GI NO: 6807742 NR Description: hypothetical protein [Homo sapiens]
  misc_feature (280)..(401): NCBI GI NO: 6807742 NR Description: hypothetical protein [Homo sapiens]
  misc_feature (280)..(401): NCBI GI NO: 34877669 NR Description: similar to splicing factor 4 [Rattus norvegicus]
  misc_feature (111)..(174): NCBI GI NO: 34877669 NR Description: similar to splicing factor 4 [Rattus norvegicus]
  misc_feature (85)..(283): NCBI GI NO: 7512956 NR Description: hypothetical protein F23858_1 - human (fragment)
  misc_feature (280)..(401): NCBI GI NO: 7512956 NR Description: hypothetical protein F23858_1 - human (fragment)
MQQEAQEKKAAAASASSAPKHANPKQGFAVAANKRPFELKNAAPVASAGKLAFSLKKAKVAVAPVFAADEEDEDAVDVEREEPAKRQKSVQADAPAAAAPSGAVAPPPPNDMTVRQVADKLASFVAKNGRQFENITRQRNPGDTPFKFLFDKHCPDYKYYEFQLAEEERALAQSKEAEASKANSGTASFKAPGGTYRSSFEQKSNYQTPASALYGAYEGSSSQGSSSSYGDHTAPPSDPVALMEFYAKKAALEERKRPPRQSKDEMPPPPSLQGPPKKGHHMGDFIPQEELEKFMARCNDAAAQKATKEAAEKAKIQADNIGHKLLSKMGWREGEGLGSERRGRADPVMAGDVKKDHLGVGAVQPGEVTSEDDIYEQYKKRMMLGYRYRPNPLNNPRKSYY

SEQ ID NO: 21176 - DNA, 1395 bp, Zea mays subsp. mays
  misc_feature (1)..(1395): Ceres Seq. ID no. 15180012
acaggttccctgatatcggtggccagcagccgactttgtggttagtccattctcttccggcgggatacgttgcggaccacttcgctcagctgctcgcgacggcggcttgtaccctgatttgggtggggaggatgcctgatatccagctgggatgccacactataaggtcccatggtaccaaagtggcaacattacacatgtatgactggattatacttttatgtcttgctgtacttgatggactgttaaacataatcgagccctttcaccgctttgttggacgcgacatgatgaccgacttgagttatcccctcaagggcaacacaatcccattttgggctgttccactgattgcgatcgtgctacccttggttatctttgctgtcatttacttcaaaaagaaaaatgtctatgatttacaccacggcatactagggatcttgtattcagtgcttataactgctgtgatcactgatgcaattaaggatggtgttggtcgccctcggccagatttcttttggcgttgttttcctgatggcaaacctaattttaataatataaccaccgatgtgatatgccatggagaaaagagtgtcatcaaggaaggtcataagagtttcccaagtgggcattcttcatggtctttcgctggtctaggttttcttgcatggtacttggctggaaaacttaaagcttttgatcgcaaaggtcacattgcaaaactgtgcttagtttttctgcctctacttgtcgcgtcacttgtggctgtttctcgagttgatgattactggcatcactggcaagatgtctttgccggcggcatcataggtcttacagttgcttcattctgttacctgcagttcttcccatatccctttgacaatgatgccctatggccacacgcatacttccaacagctagctgagacacacagtaatggtaatgcaaactcaatcaacataagacctacagagtttgaagatgaaccagatgaccatggtgacattgtcctgagggacaccagccctatcttggagtcaatggagtctggcaggagaccatgaagaagcatgccactgtgggtttgtccaaggtgcccttcaaattctggaagcgtgatgagttttgtggtttcatcatgtagccgtccaacgtaaaaacagtatggaggtatatctaccaccacctgatgatttgatgatccacagactgtcgtggttagctgtaaatgacagcgaatgtttatgtttctagtgacaatgtgaatatttggttttgcacggctgtgatatgggaagtttgtttcgaggttaccctttggctgtaatgaaattgtccgacgacctgcagatggattgcaaacggtctttagggggcaatcactccatccaagat

SEQ ID NO: 21177 - protein, 353 aa, Zea mays subsp. mays
  peptide (1)..(353): Ceres Seq. ID no. 15180013
  misc_feature (116)..(292): Pfam Name: Pfam Description:  PAP2 superfamily
  misc_feature (44)..(352): NCBI GI NO: 38637528 NR Description: unknown protein
  misc_feature (44)..(352): NCBI GI NO: 38637527 NR Description: putative phosphatidic acid phosphatase beta
  misc_feature (44)..(319): NCBI GI NO: 10673973 NR Description: phosphatidic acid phosphatase beta
  misc_feature (44)..(326): NCBI GI NO: 15218051 NR Description: phosphatidic acid phosphatase (PAP2) family
  misc_feature (53)..(331): NCBI GI NO: 34910912 NR Description: putative phosphatidic acid phosphatase beta
  misc_feature (43)..(351): NCBI GI NO: 18396250 NR Description: phosphatidic acid phosphatase (PAP2) family
  misc_feature (43)..(351): NCBI GI NO: 9621903 NR Description: phosphatidic acid phosphatase alpha
  misc_feature (44)..(351): NCBI GI NO: 6957723 NR Description: putative phosphatidate phosphohydrolase
  misc_feature (53)..(332): NCBI GI NO: 20161571 NR Description: putative phosphatidic acid phosphatase beta
  misc_feature (42)..(308): NCBI GI NO: 15724220 NR Description: At2g01180/F10A8.6 [Arabidopsis thaliana]
RFPDIGGQQPTLWLVHSLPAGYVADHFAQLLATAACTLIWVGRMPDIQLGCHTIRSHGTKVATLHMYDWIILLCLAVLDGLLNIIEPFHRFVGRDMMTDLSYPLKGNTIPFWAVPLIAIVLPLVIFAVIYFKKKNVYDLHHGILGILYSVLITAVITDAIKDGVGRPRPDFFWRCFPDGKPNFNNITTDVICHGEKSVIKEGHKSFPSGHSSWSFAGLGFLAWYLAGKLKAFDRKGHIAKLCLVFLPLLVASLVAVSRVDDYWHHWQDVFAGGIIGLTVASFCYLQFFPYPFDNDALWPHAYFQQLAETHSNGNANSINIRPTEFEDEPDDHGDIVLRDTSPILESMESGRRP

SEQ ID NO: 21178 - protein, 310 aa, Zea mays subsp. mays
  peptide (1)..(310): Ceres Seq. ID no. 15180014
  misc_feature (73)..(249): Pfam Name: Pfam Description:  PAP2 superfamily
  misc_feature (1)..(309): NCBI GI NO: 38637528 NR Description: unknown protein
  misc_feature (1)..(309): NCBI GI NO: 38637527 NR Description: putative phosphatidic acid phosphatase beta
  misc_feature (1)..(276): NCBI GI NO: 10673973 NR Description: phosphatidic acid phosphatase beta
  misc_feature (1)..(283): NCBI GI NO: 15218051 NR Description: phosphatidic acid phosphatase (PAP2) family
  misc_feature (10)..(288): NCBI GI NO: 34910912 NR Description: putative phosphatidic acid phosphatase beta
  misc_feature (1)..(308): NCBI GI NO: 18396250 NR Description: phosphatidic acid phosphatase (PAP2) family
  misc_feature (1)..(308): NCBI GI NO: 9621903 NR Description: phosphatidic acid phosphatase alpha
  misc_feature (1)..(308): NCBI GI NO: 6957723 NR Description: putative phosphatidate phosphohydrolase
  misc_feature (10)..(289): NCBI GI NO: 20161571 NR Description: putative phosphatidic acid phosphatase beta
  misc_feature (1)..(265): NCBI GI NO: 15724220 NR Description: At2g01180/F10A8.6 [Arabidopsis thaliana]
MPDIQLGCHTIRSHGTKVATLHMYDWIILLCLAVLDGLLNIIEPFHRFVGRDMMTDLSYPLKGNTIPFWAVPLIAIVLPLVIFAVIYFKKKNVYDLHHGILGILYSVLITAVITDAIKDGVGRPRPDFFWRCFPDGKPNFNNITTDVICHGEKSVIKEGHKSFPSGHSSWSFAGLGFLAWYLAGKLKAFDRKGHIAKLCLVFLPLLVASLVAVSRVDDYWHHWQDVFAGGIIGLTVASFCYLQFFPYPFDNDALWPHAYFQQLAETHSNGNANSINIRPTEFEDEPDDHGDIVLRDTSPILESMESGRRP

SEQ ID NO: 21179 - protein, 288 aa, Zea mays subsp. mays
  peptide (1)..(288): Ceres Seq. ID no. 15180015
  misc_feature (51)..(227): Pfam Name: Pfam Description:  PAP2 superfamily
  misc_feature (1)..(287): NCBI GI NO: 38637528 NR Description: unknown protein
  misc_feature (1)..(287): NCBI GI NO: 38637527 NR Description: putative phosphatidic acid phosphatase beta
  misc_feature (1)..(254): NCBI GI NO: 10673973 NR Description: phosphatidic acid phosphatase beta
  misc_feature (1)..(261): NCBI GI NO: 15218051 NR Description: phosphatidic acid phosphatase (PAP2) family
  misc_feature (1)..(266): NCBI GI NO: 34910912 NR Description: putative phosphatidic acid phosphatase beta
  misc_feature (1)..(286): NCBI GI NO: 18396250 NR Description: phosphatidic acid phosphatase (PAP2) family
  misc_feature (1)..(286): NCBI GI NO: 9621903 NR Description: phosphatidic acid phosphatase alpha
  misc_feature (1)..(286): NCBI GI NO: 6957723 NR Description: putative phosphatidate phosphohydrolase
  misc_feature (1)..(267): NCBI GI NO: 20161571 NR Description: putative phosphatidic acid phosphatase beta
  misc_feature (1)..(243): NCBI GI NO: 15724220 NR Description: At2g01180/F10A8.6 [Arabidopsis thaliana]
MYDWIILLCLAVLDGLLNIIEPFHRFVGRDMMTDLSYPLKGNTIPFWAVPLIAIVLPLVIFAVIYFKKKNVYDLHHGILGILYSVLITAVITDAIKDGVGRPRPDFFWRCFPDGKPNFNNITTDVICHGEKSVIKEGHKSFPSGHSSWSFAGLGFLAWYLAGKLKAFDRKGHIAKLCLVFLPLLVASLVAVSRVDDYWHHWQDVFAGGIIGLTVASFCYLQFFPYPFDNDALWPHAYFQQLAETHSNGNANSINIRPTEFEDEPDDHGDIVLRDTSPILESMESGRRP

SEQ ID NO: 21180 - DNA, 742 bp, Zea mays subsp. mays
  misc_feature (1)..(742): Ceres Seq. ID no. 13598807
cattcagatttccaatgcaaatgatgatgtcgttcatcactgtggttcaagaaaactacccgaatcgtcttggggtattgtttgtcatccgtcttcctccagttgtcagagttattgcacagacatttcttcaagtcttgaaaccagctacaaagcagaagttgcgttttgagggagattcgtacaagaaggcattggcggagttcctgcaggctgtgccagcgtttctgggcggtaaatgcagctgcccgcgatgtgagagtcctcgtgatgattcagtgatacaggcaggggaagggagcaagaagcagccccgcttggtcagcgttgatgacgggttacctgtcacagacttggacttcgacttggatgaagagatcccatcaccttatagctgcgagaacgccatcagggctgcgataatcggcctgctgatggtgtgcatcttcgtcgcgtttctggctgggatgatcgaccctgcatccgttccagccagtgcctgagagcttgtggaatagagcatgcacgtacatgtgttgctaattaggatgcagggtgctgtatttcttggcaggcttcttgtatgttgtcgtcagaccgccatagagcgctttctcccagtgtgagcgagcgcatgaataatatatatcctctgtgtcaaatgttggttagcagttcaattcgggcctactagatttcactattttcttttttatcttgatcgggcctactgaatttttgc

SEQ ID NO: 21181 - protein, 166 aa, Zea mays subsp. mays
  peptide (1)..(166): Ceres Seq. ID no. 13598808
  misc_feature (2)..(87): Pfam Name: Pfam Description:  CRAL/TRIO domain
  misc_feature (1)..(166): NCBI GI NO: 29124131 NR Description: unknown protein
  misc_feature (2)..(163): NCBI GI NO: 15231434 NR Description: SEC14 cytosolic factor, putative
FRFPMQMMMSFITVVQENYPNRLGVLFVIRLPPVVRVIAQTFLQVLKPATKQKLRFEGDSYKKALAEFLQAVPAFLGGKCSCPRCESPRDDSVIQAGEGSKKQPRLVSVDDGLPVTDLDFDLDEEIPSPYSCENAIRAAIIGLLMVCIFVAFLAGMIDPASVPASA

SEQ ID NO: 21182 - protein, 162 aa, Zea mays subsp. mays
  peptide (1)..(162): Ceres Seq. ID no. 13598809
  misc_feature (1)..(83): Pfam Name: Pfam Description:  CRAL/TRIO domain
  misc_feature (1)..(162): NCBI GI NO: 29124131 NR Description: unknown protein
  misc_feature (1)..(159): NCBI GI NO: 15231434 NR Description: SEC14 cytosolic factor, putative
MQMMMSFITVVQENYPNRLGVLFVIRLPPVVRVIAQTFLQVLKPATKQKLRFEGDSYKKALAEFLQAVPAFLGGKCSCPRCESPRDDSVIQAGEGSKKQPRLVSVDDGLPVTDLDFDLDEEIPSPYSCENAIRAAIIGLLMVCIFVAFLAGMIDPASVPASA

SEQ ID NO: 21183 - protein, 160 aa, Zea mays subsp. mays
  peptide (1)..(160): Ceres Seq. ID no. 13598810
  misc_feature (1)..(81): Pfam Name: Pfam Description:  CRAL/TRIO domain
  misc_feature (1)..(160): NCBI GI NO: 29124131 NR Description: unknown protein
  misc_feature (1)..(157): NCBI GI NO: 15231434 NR Description: SEC14 cytosolic factor, putative
MMMSFITVVQENYPNRLGVLFVIRLPPVVRVIAQTFLQVLKPATKQKLRFEGDSYKKALAEFLQAVPAFLGGKCSCPRCESPRDDSVIQAGEGSKKQPRLVSVDDGLPVTDLDFDLDEEIPSPYSCENAIRAAIIGLLMVCIFVAFLAGMIDPASVPASA

SEQ ID NO: 21184 - DNA, 1460 bp, Zea mays subsp. mays
  misc_feature (1)..(1460): Ceres Seq. ID no. 12567001
gcacgagaccattacctagaacatcctaatcgaaaagcatttcttggacccgcacacccacgcttccaaaagttaggaggggaacccatcagccaagagctacgcaaacgcacagcgatgcaccagcacgagataccagccaccatgcgcctgtccctcctcctcgtcatcgtggccgccctctcggcgcgcgccgcggcgcagctgccgccggcgggcggcgccctgaagccggacttctatagccagtcgtgcccgcgcgcggagcggatcattgcggaggtgatgcagacgaagcagatggcgaacccgacgacggccgcgggcctgctccgcgtcttcttccacgactgcttcgtcagcgggtgcgacgcgtcggtgctgatcgcgtccacccagttccagaagtcggagcacgacgcggagatcaaccactccctccccggggacgccttcgacgccgtggtgcgcgccaagctggccctggagctggagtgccccggggtggtgtcctgcgccgacatcctcgcactggcgtcgggcgtgctgatcaccatgaccggcgggccccggtacccggtcccgctggggcgcagggactcgctgtcgtcgtcgcccacggcgcccgacgtggagctgccgcacgccaacttcaccgtggaccgcctcatccagatgttcggcgccaaggggttcacggtgcaggagctggtggcgctgtccggcgcccacacgctgggcttctcccactgcaaggagttcgccgaccgcctctacaacttccgcaaccagggcgggaagccggagcagttcgaccccagcatgaacccgtcctacgccagggggctacaggacgtgtgcagggactacctcaaggaccccaccatcgccgcgttcaacgacatcatgacgcccggcaagttcgacaacatgtacttcgtcaacctcgagcgcggcctcggcctgctcagcaccgacgaggagctgtggacggacccacgcaccaagcccctggtgcagctctatgcatccaacgccaccgccttcttcgacgacttcggccgcgccatggagaagctcagcttgttcggcgtcaagaccggcgccgacggcgaggtcaggcggcgctgcgacgcctacaacagcggccccgccgtcgccgccaccatacccaagatgtgacgacgctgcgcgtggtacgacgacgggcgcgcacgtgcttgtctgcatgcggatcgatcgacggccgagctgtctggcacgacgacggcgtgttgatcgagggcctcggctcctccagctgcgacggttcacgatggtgttaagatttcgtgccgaaatgtgatatgtttcatgctcgatcaagtaatttattcctaatctgtgtgctgcgcaaaagaaagaaaaacttcgaagtgttgcgctactcgctagtatgaattaattcgtttttccctttg

SEQ ID NO: 21185 - protein, 393 aa, Zea mays subsp. mays
  peptide (1)..(393): Ceres Seq. ID no. 12567002
  misc_feature (76)..(382): NCBI GI NO: 9759442 NR Description: peroxidase [Arabidopsis thaliana]
  misc_feature (76)..(382): NCBI GI NO: 18422742 NR Description: peroxidase, putative; protein id: At5g47000
  misc_feature (76)..(382): NCBI GI NO: 21593687 NR Description: peroxidase [Arabidopsis thaliana]
  misc_feature (51)..(381): NCBI GI NO: 15236620 NR Description: peroxidase, putative; protein id: At4g17690.1
  misc_feature (72)..(381): NCBI GI NO: 15232929 NR Description: peroxidase, putative; protein id: At3g28200
  misc_feature (76)..(381): NCBI GI NO: 15221670 NR Description: peroxidase, putative; protein id: At1g24110.1
  misc_feature (72)..(381): NCBI GI NO: 14334600 NR Description: putative peroxidase [Arabidopsis thaliana]
  misc_feature (49)..(381): NCBI GI NO: 15242580 NR Description: peroxidase, putative; protein id: At5g40150.1
  misc_feature (99)..(381): NCBI GI NO: 1890317 NR Description: peroxidase ATP26a [Arabidopsis thaliana]
  misc_feature (50)..(381): NCBI GI NO: 15235600 NR Description: peroxidase, putative; protein id: At4g37530
ARDHYLEHPNRKAFLGPAHPRFQKLGGEPISQELRKRTAMHQHEIPATMRLSLLLVIVAALSARAAAQLPPAGGALKPDFYSQSCPRAERIIAEVMQTKQMANPTTAAGLLRVFFHDCFVSGCDASVLIASTQFQKSEHDAEINHSLPGDAFDAVVRAKLALELECPGVVSCADILALASGVLITMTGGPRYPVPLGRRDSLSSSPTAPDVELPHANFTVDRLIQMFGAKGFTVQELVALSGAHTLGFSHCKEFADRLYNFRNQGGKPEQFDPSMNPSYARGLQDVCRDYLKDPTIAAFNDIMTPGKFDNMYFVNLERGLGLLSTDEELWTDPRTKPLVQLYASNATAFFDDFGRAMEKLSLFGVKTGADGEVRRRCDAYNSGPAVAATIPKM

SEQ ID NO: 21186 - protein, 354 aa, Zea mays subsp. mays
  peptide (1)..(354): Ceres Seq. ID no. 12567003
  misc_feature (37)..(343): NCBI GI NO: 9759442 NR Description: peroxidase [Arabidopsis thaliana]
  misc_feature (37)..(343): NCBI GI NO: 21593687 NR Description: peroxidase [Arabidopsis thaliana]
  misc_feature (37)..(343): NCBI GI NO: 18422742 NR Description: peroxidase, putative; protein id: At5g47000
  misc_feature (12)..(342): NCBI GI NO: 15236620 NR Description: peroxidase, putative; protein id: At4g17690.1
  misc_feature (33)..(342): NCBI GI NO: 15232929 NR Description: peroxidase, putative; protein id: At3g28200
  misc_feature (37)..(342): NCBI GI NO: 15221670 NR Description: peroxidase, putative; protein id: At1g24110.1
  misc_feature (33)..(342): NCBI GI NO: 14334600 NR Description: putative peroxidase [Arabidopsis thaliana]
  misc_feature (10)..(342): NCBI GI NO: 15242580 NR Description: peroxidase, putative; protein id: At5g40150.1
  misc_feature (60)..(342): NCBI GI NO: 1890317 NR Description: peroxidase ATP26a [Arabidopsis thaliana]
  misc_feature (11)..(342): NCBI GI NO: 15235600 NR Description: peroxidase, putative; protein id: At4g37530
MHQHEIPATMRLSLLLVIVAALSARAAAQLPPAGGALKPDFYSQSCPRAERIIAEVMQTKQMANPTTAAGLLRVFFHDCFVSGCDASVLIASTQFQKSEHDAEINHSLPGDAFDAVVRAKLALELECPGVVSCADILALASGVLITMTGGPRYPVPLGRRDSLSSSPTAPDVELPHANFTVDRLIQMFGAKGFTVQELVALSGAHTLGFSHCKEFADRLYNFRNQGGKPEQFDPSMNPSYARGLQDVCRDYLKDPTIAAFNDIMTPGKFDNMYFVNLERGLGLLSTDEELWTDPRTKPLVQLYASNATAFFDDFGRAMEKLSLFGVKTGADGEVRRRCDAYNSGPAVAATIPKM

SEQ ID NO: 21187 - protein, 345 aa, Zea mays subsp. mays
  peptide (1)..(345): Ceres Seq. ID no. 12567004
  misc_feature (28)..(334): NCBI GI NO: 9759442 NR Description: peroxidase [Arabidopsis thaliana]
  misc_feature (28)..(334): NCBI GI NO: 18422742 NR Description: peroxidase, putative; protein id: At5g47000
  misc_feature (28)..(334): NCBI GI NO: 21593687 NR Description: peroxidase [Arabidopsis thaliana]
  misc_feature (3)..(333): NCBI GI NO: 15236620 NR Description: peroxidase, putative; protein id: At4g17690.1
  misc_feature (24)..(333): NCBI GI NO: 15232929 NR Description: peroxidase, putative; protein id: At3g28200
  misc_feature (28)..(333): NCBI GI NO: 15221670 NR Description: peroxidase, putative; protein id: At1g24110.1
  misc_feature (24)..(333): NCBI GI NO: 14334600 NR Description: putative peroxidase [Arabidopsis thaliana]
  misc_feature (1)..(333): NCBI GI NO: 15242580 NR Description: peroxidase, putative; protein id: At5g40150.1
  misc_feature (51)..(333): NCBI GI NO: 1890317 NR Description: peroxidase ATP26a [Arabidopsis thaliana]
  misc_feature (2)..(333): NCBI GI NO: 15235600 NR Description: peroxidase, putative; protein id: At4g37530
MRLSLLLVIVAALSARAAAQLPPAGGALKPDFYSQSCPRAERIIAEVMQTKQMANPTTAAGLLRVFFHDCFVSGCDASVLIASTQFQKSEHDAEINHSLPGDAFDAVVRAKLALELECPGVVSCADILALASGVLITMTGGPRYPVPLGRRDSLSSSPTAPDVELPHANFTVDRLIQMFGAKGFTVQELVALSGAHTLGFSHCKEFADRLYNFRNQGGKPEQFDPSMNPSYARGLQDVCRDYLKDPTIAAFNDIMTPGKFDNMYFVNLERGLGLLSTDEELWTDPRTKPLVQLYASNATAFFDDFGRAMEKLSLFGVKTGADGEVRRRCDAYNSGPAVAATIPKM

SEQ ID NO: 21188 - DNA, 844 bp, Zea mays subsp. mays
  misc_feature (1)..(844): Ceres Seq. ID no. 13598823
accaacgccgagctgtgagataggatgggcaagctgtggacgatcctcactcacctccactcccttgcagggccaacggtgatgctgctgtaccctctgtacgcgtccgtgcgggcgatggagagcccgtccaagctggacgacgagcagtggctcgcctactggatcctctactccttcgtcacgctcatggagatgctcctcgagtccctcatatactggatccccatctggtacgagctcaagctgctgttcatcgcgtggctcgtgctccccaacttcaggggcgccgccttcatctacgacaagttcgtgcgcgagcagctccggaagcacggcctcaccgccgccggctccgtcaagtcgtcgtcgccgtcgtccaaggacaaggacaagcccaagaacaagttcctcgccttcgtcacgcccaagaaggatcatgaagcttactgaagtgggttgcagtgatcccattcctggaccatgtcccggcaacctgtagctgtagtgcactccactagatttctgttgtgtttgttctcgacttgaaatagagcctgtacgatgtgtgtatggccattctgtatgtgtgagcatcaactctaacatggaatggagacaagagccaawwgtttaaamamaawaaagtkggaactggaggggggaaaaaaaaaaaaaaaaaaaaaaaaaaaaaaaaaaaaaaaaaaaaaaaaaaaaaaaaaaaattaaaaaaaaaaaaaaaaattttcgaaccsgssaaccccgggggggggcccggaccccaattcccccaaaagggggccgaataacgcccgcccccgggccgccgtttaacaacgccggg

SEQ ID NO: 21189 - protein, 142 aa, Zea mays subsp. mays
  peptide (1)..(142): Ceres Seq. ID no. 15222429
  misc_feature (5)..(101): Pfam Name: Pfam Description:  TB2/DP1, HVA22 family
  misc_feature (1)..(104): NCBI GI NO: 33342176 NR Description: hypothetical protein [Triticum aestivum]
  misc_feature (1)..(104): NCBI GI NO: 1076715 NR Description: abscisic acid-induced protein HVA22 - barley
  misc_feature (1)..(106): NCBI GI NO: 18423191 NR Description: expressed protein [Arabidopsis thaliana]
  misc_feature (1)..(118): NCBI GI NO: 18416458 NR Description: abscisic acid-induced - like protein
  misc_feature (20)..(106): NCBI GI NO: 8777395 NR Description: gene_id:MFB16
  misc_feature (20)..(132): NCBI GI NO: 7484787 NR Description: abscisic acid-induced protein homolog F13M23
  misc_feature (4)..(98): NCBI GI NO: 15221266 NR Description: AtHVA22a [Arabidopsis thaliana]
  misc_feature (7)..(101): NCBI GI NO: 15241840 NR Description: AtHVA22b-related protein [Arabidopsis thaliana]
  misc_feature (7)..(101): NCBI GI NO: 4884934 NR Description: AtHVA22b [Arabidopsis thaliana]
  misc_feature (4)..(98): NCBI GI NO: 15222421 NR Description: AtHVA22c [Arabidopsis thaliana]
MGKLWTILTHLHSLAGPTVMLLYPLYASVRAMESPSKLDDEQWLAYWILYSFVTLMEMLLESLIYWIPIWYELKLLFIAWLVLPNFRGAAFIYDKFVREQLRKHGLTAAGSVKSSSPSSKDKDKPKNKFLAFVTPKKDHEAY

SEQ ID NO: 21190 - protein, 123 aa, Zea mays subsp. mays
  peptide (1)..(123): Ceres Seq. ID no. 15222430
  misc_feature (1)..(82): Pfam Name: Pfam Description:  TB2/DP1, HVA22 family
  misc_feature (1)..(85): NCBI GI NO: 33342176 NR Description: hypothetical protein [Triticum aestivum]
  misc_feature (1)..(85): NCBI GI NO: 1076715 NR Description: abscisic acid-induced protein HVA22 - barley
  misc_feature (1)..(87): NCBI GI NO: 18423191 NR Description: expressed protein [Arabidopsis thaliana]
  misc_feature (1)..(99): NCBI GI NO: 18416458 NR Description: abscisic acid-induced - like protein
  misc_feature (1)..(87): NCBI GI NO: 8777395 NR Description: gene_id:MFB16
  misc_feature (1)..(113): NCBI GI NO: 7484787 NR Description: abscisic acid-induced protein homolog F13M23
  misc_feature (1)..(79): NCBI GI NO: 15221266 NR Description: AtHVA22a [Arabidopsis thaliana]
  misc_feature (1)..(82): NCBI GI NO: 15241840 NR Description: AtHVA22b-related protein [Arabidopsis thaliana]
  misc_feature (1)..(82): NCBI GI NO: 4884934 NR Description: AtHVA22b [Arabidopsis thaliana]
  misc_feature (1)..(79): NCBI GI NO: 15222421 NR Description: AtHVA22c [Arabidopsis thaliana]
MLLYPLYASVRAMESPSKLDDEQWLAYWILYSFVTLMEMLLESLIYWIPIWYELKLLFIAWLVLPNFRGAAFIYDKFVREQLRKHGLTAAGSVKSSSPSSKDKDKPKNKFLAFVTPKKDHEAY

SEQ ID NO: 21191 - protein, 111 aa, Zea mays subsp. mays
  peptide (1)..(111): Ceres Seq. ID no. 15222431
  misc_feature (1)..(70): Pfam Name: Pfam Description:  TB2/DP1, HVA22 family
  misc_feature (1)..(73): NCBI GI NO: 33342176 NR Description: hypothetical protein [Triticum aestivum]
  misc_feature (1)..(73): NCBI GI NO: 1076715 NR Description: abscisic acid-induced protein HVA22 - barley
  misc_feature (1)..(75): NCBI GI NO: 18423191 NR Description: expressed protein [Arabidopsis thaliana]
  misc_feature (1)..(87): NCBI GI NO: 18416458 NR Description: abscisic acid-induced - like protein
  misc_feature (1)..(75): NCBI GI NO: 8777395 NR Description: gene_id:MFB16
  misc_feature (1)..(101): NCBI GI NO: 7484787 NR Description: abscisic acid-induced protein homolog F13M23
  misc_feature (1)..(67): NCBI GI NO: 15221266 NR Description: AtHVA22a [Arabidopsis thaliana]
  misc_feature (1)..(70): NCBI GI NO: 15241840 NR Description: AtHVA22b-related protein [Arabidopsis thaliana]
  misc_feature (1)..(70): NCBI GI NO: 4884934 NR Description: AtHVA22b [Arabidopsis thaliana]
  misc_feature (1)..(67): NCBI GI NO: 15222421 NR Description: AtHVA22c [Arabidopsis thaliana]
MESPSKLDDEQWLAYWILYSFVTLMEMLLESLIYWIPIWYELKLLFIAWLVLPNFRGAAFIYDKFVREQLRKHGLTAAGSVKSSSPSSKDKDKPKNKFLAFVTPKKDHEAY

SEQ ID NO: 21192 - DNA, 980 bp, Zea mays subsp. mays
  misc_feature (1)..(980): Ceres Seq. ID no. 15177927
  misc_feature (979)..(979): n is a, c, t, g, unknown, or other
atatccacacctgagtcccctccgccgcctgccgcactctcccgcgacgccaccaccacacgttcacggtagcgagagcttatcgtcgtcggcggcgaagatggtgtcgctgaagctgcagaagcggctcgccgcgagcgtcctcaagtgtgggaaaggcaaagtctggcttgaccccaatgaagtcagcgagatctccatggctaactcccgccagaacatccggaagttggttaagaatgggtttatcatcaggaagcctcagaaggttcactctaggtcccgtgcaagaagggcacatgaggccaagcagaagggaaggcactctggatatggcaagcgcaggggtaccagggaggctaggctccccaccaagattctgtggatgaggaggatgcgtgttctgaggcgcctgctctgcaagtaccgtgaggccaagaagatcgacaagcacatgtatcatgacatgtacatgaaggtcaagggtaatatgtttaagaacaagagggtgcttatggagagtatccacaagtccaaggctgagaaggccagagagaagacactttctgatcagtttgaggccaagcgtgcaaagagcaaggcaagccgtgagaggaagattgctaggagggaggagaggctggcccagggcccaagagaaccaacagcacctgtcgcagccccagctccatctactggggtgccaaagaaagcaaagaagtgaagtatggaaacaaagctgtagctttttggtactatataagcatgactttggagcacctgaagtattttgctgttatatagtttcgtgtctcaaatattctgagtcttgtatgtattctgcctgcgtttcagattcagattttttttttattttggacccaatcaaccctgcactgccttgtcgaggaccgtggtccgtggatggcaatggttcttacttcttactggttatattatatatgctgcaagattgctng

SEQ ID NO: 21193 - protein, 240 aa, Zea mays subsp. mays
  peptide (1)..(240): Ceres Seq. ID no. 15177928
  misc_feature (35)..(182): Pfam Name: Pfam Description:  Ribosomal protein L19e
  misc_feature (34)..(240): NCBI GI NO: 29837764 NR Description: putative ribosomal protein L19
  misc_feature (34)..(233): NCBI GI NO: 32401377 NR Description: ribosomal protein L19 [Triticum aestivum]
  misc_feature (34)..(240): NCBI GI NO: 15218602 NR Description: 60S ribosomal protein L19 (RPL19A)
  misc_feature (34)..(231): NCBI GI NO: 40287526 NR Description: 60S ribosomal protein L19 [Capsicum annuum]
  misc_feature (34)..(240): NCBI GI NO: 18087585 NR Description: At1g02780/T14P4_3 [Arabidopsis thaliana]
  misc_feature (34)..(240): NCBI GI NO: 15228314 NR Description: 60S ribosomal protein L19 (RPL19B)
  misc_feature (34)..(240): NCBI GI NO: 15235290 NR Description: 60S ribosomal protein L19 (RPL19C)
  misc_feature (34)..(232): NCBI GI NO: 7440943 NR Description: ribosomal protein L19
  misc_feature (34)..(215): NCBI GI NO: 28200276 NR Description: ribosomal protein L19
  misc_feature (34)..(215): NCBI GI NO: 28630352 NR Description: ribosomal protein L19 [Branchiostoma lanceolatum]
YPHLSPLRRLPHSPATPPPHVHGSESLSSSAAKMVSLKLQKRLAASVLKCGKGKVWLDPNEVSEISMANSRQNIRKLVKNGFIIRKPQKVHSRSRARRAHEAKQKGRHSGYGKRRGTREARLPTKILWMRRMRVLRRLLCKYREAKKIDKHMYHDMYMKVKGNMFKNKRVLMESIHKSKAEKAREKTLSDQFEAKRAKSKASRERKIARREERLAQGPREPTAPVAAPAPSTGVPKKAKK

SEQ ID NO: 21194 - protein, 207 aa, Zea mays subsp. mays
  peptide (1)..(207): Ceres Seq. ID no. 15177929
  misc_feature (2)..(149): Pfam Name: Pfam Description:  Ribosomal protein L19e
  misc_feature (1)..(207): NCBI GI NO: 29837764 NR Description: putative ribosomal protein L19
  misc_feature (1)..(200): NCBI GI NO: 32401377 NR Description: ribosomal protein L19 [Triticum aestivum]
  misc_feature (1)..(207): NCBI GI NO: 15218602 NR Description: 60S ribosomal protein L19 (RPL19A)
  misc_feature (1)..(198): NCBI GI NO: 40287526 NR Description: 60S ribosomal protein L19 [Capsicum annuum]
  misc_feature (1)..(207): NCBI GI NO: 18087585 NR Description: At1g02780/T14P4_3 [Arabidopsis thaliana]
  misc_feature (1)..(207): NCBI GI NO: 15228314 NR Description: 60S ribosomal protein L19 (RPL19B)
  misc_feature (1)..(207): NCBI GI NO: 15235290 NR Description: 60S ribosomal protein L19 (RPL19C)
  misc_feature (1)..(199): NCBI GI NO: 7440943 NR Description: ribosomal protein L19
  misc_feature (1)..(182): NCBI GI NO: 28200276 NR Description: ribosomal protein L19
  misc_feature (1)..(182): NCBI GI NO: 28630352 NR Description: ribosomal protein L19 [Branchiostoma lanceolatum]
MVSLKLQKRLAASVLKCGKGKVWLDPNEVSEISMANSRQNIRKLVKNGFIIRKPQKVHSRSRARRAHEAKQKGRHSGYGKRRGTREARLPTKILWMRRMRVLRRLLCKYREAKKIDKHMYHDMYMKVKGNMFKNKRVLMESIHKSKAEKAREKTLSDQFEAKRAKSKASRERKIARREERLAQGPREPTAPVAAPAPSTGVPKKAKK

SEQ ID NO: 21195 - protein, 174 aa, Zea mays subsp. mays
  peptide (1)..(174): Ceres Seq. ID no. 15177930
  misc_feature (1)..(116): Pfam Name: Pfam Description:  Ribosomal protein L19e
  misc_feature (1)..(174): NCBI GI NO: 29837764 NR Description: putative ribosomal protein L19
  misc_feature (1)..(167): NCBI GI NO: 32401377 NR Description: ribosomal protein L19 [Triticum aestivum]
  misc_feature (1)..(174): NCBI GI NO: 15218602 NR Description: 60S ribosomal protein L19 (RPL19A)
  misc_feature (1)..(165): NCBI GI NO: 40287526 NR Description: 60S ribosomal protein L19 [Capsicum annuum]
  misc_feature (1)..(174): NCBI GI NO: 18087585 NR Description: At1g02780/T14P4_3 [Arabidopsis thaliana]
  misc_feature (1)..(174): NCBI GI NO: 15228314 NR Description: 60S ribosomal protein L19 (RPL19B)
  misc_feature (1)..(174): NCBI GI NO: 15235290 NR Description: 60S ribosomal protein L19 (RPL19C)
  misc_feature (1)..(166): NCBI GI NO: 7440943 NR Description: ribosomal protein L19
  misc_feature (1)..(149): NCBI GI NO: 28200276 NR Description: ribosomal protein L19
  misc_feature (1)..(149): NCBI GI NO: 28630352 NR Description: ribosomal protein L19 [Branchiostoma lanceolatum]
MANSRQNIRKLVKNGFIIRKPQKVHSRSRARRAHEAKQKGRHSGYGKRRGTREARLPTKILWMRRMRVLRRLLCKYREAKKIDKHMYHDMYMKVKGNMFKNKRVLMESIHKSKAEKAREKTLSDQFEAKRAKSKASRERKIARREERLAQGPREPTAPVAAPAPSTGVPKKAKK

SEQ ID NO: 21196 - DNA, 1069 bp, Zea mays subsp. mays
  misc_feature (1)..(1069): Ceres Seq. ID no. 15180167
acgccctgttgccttctctcgacttcgagagcaccgccgcacggcatagcgcggctcgcacggccgagccccgacattctaccgcactccttccgctgcacccctttccattctaccgccggcgacgccaaagttcttgggcctcctcatcggctacctttccgccggcgacaggaaacaacgaaccaaaccacttctctgtcgagaggcttcgcgctcctctcttcgccctctgctgttatttttcttaacccggctttccctcgattgctgcgtaatgaggaagctcaagttccatgagcagaagctcctcaagaggcacaatttcttggagtacaagagggagggcggccaccgcgaggcgctcgtcacacagcgctaccgcctcgtggagagggacgactacaagaagtacaatgggatatgcttaatggtgcaaaagctcgttaacatcataaagcagatggacccaagagaccctttcagaatccagatgacagacttgattctcgataagctgtataatatgggtgtaatttcaacaaaagagagcttgttaaagtgtgagaaactttcagtgagcgccttctgcaggcggagacttgcaacagttatggtgaagctcaagtttgcagagcaccttaaggaggctgtgacgtacatcgaacaggggcatgtgcgtgtcggtccagatgcagtcacggacccagcctttcttgtgaccagaaacatggaggacttcatcacctgggtggattcctcaaagatcaagaggaaggtcatggagtacaatgatgcattagatgattatgatgccatgttctgagaaaatcattctgcagaaatttatgtgcccgtcagtagtgtaatcttaagcctgccacatatgggtcttttctgaagaaatctgtgggagttgtcttctgcagggctacttgcatttgtattgcacctgcagatgtgatgcaattttgtggttggttgaaggcacattataaattcatatctgatgtagttgtgcaattgtctttgttaaagagcgggtttgcccggatttcccctagtctgc

SEQ ID NO: 21197 - protein, 182 aa, Zea mays subsp. mays
  peptide (1)..(182): Ceres Seq. ID no. 15180168
  misc_feature (1)..(106): Pfam Name: Pfam Description:  Ribosomal protein S4/S9 N-terminal domain
  misc_feature (1)..(181): NCBI GI NO: 38346067 NR Description: OSJNBa0084K01.7
  misc_feature (1)..(181): NCBI GI NO: 18417773 NR Description: ribosomal protein S4/S9 related
  misc_feature (1)..(181): NCBI GI NO: 21554411 NR Description: ribosomal protein-like [Arabidopsis thaliana]
  misc_feature (1)..(181): NCBI GI NO: 11358773 NR Description: ribosomal protein-like - Arabidopsis thaliana
  misc_feature (1)..(179): NCBI GI NO: 19527196 NR Description: RIKEN cDNA 1190002L16; U3 snoRNP protein 3 homolog
  misc_feature (1)..(179): NCBI GI NO: 6321942 NR Description: part of small
  misc_feature (1)..(179): NCBI GI NO: 34864645 NR Description: similar to RIKEN cDNA 1190002L16
  misc_feature (1)..(179): NCBI GI NO: 8922794 NR Description: chromosome 15 open reading frame 12
  misc_feature (1)..(181): NCBI GI NO: 39595782 NR Description: Hypothetical protein CBG12733
  misc_feature (116)..(182): NCBI GI NO: 37540310 NR Description: similar to chromosome 15 open reading frame 12
MRKLKFHEQKLLKRHNFLEYKREGGHREALVTQRYRLVERDDYKKYNGICLMVQKLVNIIKQMDPRDPFRIQMTDLILDKLYNMGVISTKESLLKCEKLSVSAFCRRRLATVMVKLKFAEHLKEAVTYIEQGHVRVGPDAVTDPAFLVTRNMEDFITWVDSSKIKRKVMEYNDALDDYDAMF

SEQ ID NO: 21198 - protein, 131 aa, Zea mays subsp. mays
  peptide (1)..(131): Ceres Seq. ID no. 15180169
  misc_feature (1)..(55): Pfam Name: Pfam Description:  Ribosomal protein S4/S9 N-terminal domain
  misc_feature (1)..(130): NCBI GI NO: 38346067 NR Description: OSJNBa0084K01.7
  misc_feature (1)..(130): NCBI GI NO: 18417773 NR Description: ribosomal protein S4/S9 related
  misc_feature (1)..(130): NCBI GI NO: 21554411 NR Description: ribosomal protein-like [Arabidopsis thaliana]
  misc_feature (1)..(130): NCBI GI NO: 11358773 NR Description: ribosomal protein-like - Arabidopsis thaliana
  misc_feature (1)..(128): NCBI GI NO: 19527196 NR Description: RIKEN cDNA 1190002L16; U3 snoRNP protein 3 homolog
  misc_feature (1)..(128): NCBI GI NO: 6321942 NR Description: part of small
  misc_feature (1)..(128): NCBI GI NO: 34864645 NR Description: similar to RIKEN cDNA 1190002L16
  misc_feature (1)..(128): NCBI GI NO: 8922794 NR Description: chromosome 15 open reading frame 12
  misc_feature (1)..(130): NCBI GI NO: 39595782 NR Description: Hypothetical protein CBG12733
  misc_feature (65)..(131): NCBI GI NO: 37540310 NR Description: similar to chromosome 15 open reading frame 12
MVQKLVNIIKQMDPRDPFRIQMTDLILDKLYNMGVISTKESLLKCEKLSVSAFCRRRLATVMVKLKFAEHLKEAVTYIEQGHVRVGPDAVTDPAFLVTRNMEDFITWVDSSKIKRKVMEYNDALDDYDAMF

SEQ ID NO: 21199 - protein, 120 aa, Zea mays subsp. mays
  peptide (1)..(120): Ceres Seq. ID no. 15180170
  misc_feature (45)..(92): Pfam Name: Pfam Description:  S4 domain
  misc_feature (1)..(119): NCBI GI NO: 38346067 NR Description: OSJNBa0084K01.7
  misc_feature (1)..(119): NCBI GI NO: 18417773 NR Description: ribosomal protein S4/S9 related
  misc_feature (1)..(119): NCBI GI NO: 21554411 NR Description: ribosomal protein-like [Arabidopsis thaliana]
  misc_feature (1)..(119): NCBI GI NO: 11358773 NR Description: ribosomal protein-like - Arabidopsis thaliana
  misc_feature (1)..(117): NCBI GI NO: 19527196 NR Description: RIKEN cDNA 1190002L16; U3 snoRNP protein 3 homolog
  misc_feature (1)..(117): NCBI GI NO: 6321942 NR Description: part of small
  misc_feature (1)..(117): NCBI GI NO: 8922794 NR Description: chromosome 15 open reading frame 12
  misc_feature (1)..(117): NCBI GI NO: 34864645 NR Description: similar to RIKEN cDNA 1190002L16
  misc_feature (1)..(119): NCBI GI NO: 39595782 NR Description: Hypothetical protein CBG12733
  misc_feature (54)..(120): NCBI GI NO: 37540310 NR Description: similar to chromosome 15 open reading frame 12
MDPRDPFRIQMTDLILDKLYNMGVISTKESLLKCEKLSVSAFCRRRLATVMVKLKFAEHLKEAVTYIEQGHVRVGPDAVTDPAFLVTRNMEDFITWVDSSKIKRKVMEYNDALDDYDAMF

SEQ ID NO: 21200 - DNA, 1490 bp, Zea mays subsp. mays
  misc_feature (1)..(1490): Ceres Seq. ID no. 14309641
actccccgcgccacgcgcctgactgggtgcactgcactggtggtgtgcacgcccctcgtcagtcgtcactcactcgctaccccatatcccattccccccgacggcgcctctggcagcaaggaacaatatgtccaatagggccacccattggtgttatgcctgtcagcgcccaattcgtcttcgcgggcaggatatcatatgtcccaactgcagtgatggttttatccaagaaatcagtgagatgggtggcgtactgaacacttatgggctaactgaaccggactttgaagagcgccaggccagaagatttggaatgatggatgccatatcttccctcatgcggcaacggctgtcagaaataggaagggatagtttgtttgatattcacggtagacaagggacaggtactgaatatggaaggaggtcaactgctattcctacgctggtatttggtggcatcccttctcctgcagttggtagcagtgatgtcaatgttgtcatcagggaaggccgcagagctggcgctgcccgtccgaatttcagtagcttagttgttggtcccagtctggaagctctatttgagcagctactactccagaacaaccgtcaaggcccaccacctgctccacagtcagctattgactccatgcctgtggtaaagataaatcgcaggcatcttgacgaagatccacagtgtgcagtttgcaaagacaaattcgaggttggagcagaggcgcgggagatgccgtgcaagcacttgtaccatactgactgcatcatcccctggctggttcagcacaactcctgccctgtttgccgtcatccgctgccatcacagcgatcaggcagtagtaccagcagcgcccgtgtgccttcagcatactacaacgaaacagctgatcctcctgcggtcgccagggcagatttggatcctgtgccttcagcatactacaacgaaacagcggatcctcctgcggtcaccagagcatatttcgatcctgctccaggaaactacggcagcgaaagccaggaaagtcacgaccccttctcctttctctggccatttggcccgtcgagttcttaccaatatgaagaaaatgttgatgaacctgcagtatacgatccaaaccatatagcatattctgcatggcactatgaccactgactgaaaccctgagttaaagtcaagatatctgcaattcgtgccttgagctctcagctttggtgaggcaaagggctgcttgccgtataaaaaatggatggttattgtgttcagtgcatacccttgctacgcatgtccgttgtggagatatcagctgtgtatagaactgggcgcaacaaactctgctgtaatgcccgtatatattccttttcggtatatcaagtctaaagctatagtgcataagtgctgtaatcggtgaactgagtgcatccagaatatcatgtcatggtaaacataattataattacatggttgtctttttagactg

SEQ ID NO: 21201 - protein, 345 aa, Zea mays subsp. mays
  peptide (1)..(345): Ceres Seq. ID no. 14309642
  misc_feature (190)..(230): Pfam Name: RING finger Pfam Description: Zinc finger, C3HC4 type
  misc_feature (1)..(273): NCBI GI NO: 34908968 NR Description: P0003D09.21
  misc_feature (2)..(257): NCBI GI NO: 18405518 NR Description: RING-H2 finger protein (RHC1a)
  misc_feature (2)..(247): NCBI GI NO: 18410530 NR Description: expressed protein [Arabidopsis thaliana]
  misc_feature (8)..(236): NCBI GI NO: 11994207 NR Description: gene_id:MPN9.20~unknown protein
  misc_feature (8)..(236): NCBI GI NO: 15231003 NR Description: expressed protein [Arabidopsis thaliana]
  misc_feature (89)..(246): NCBI GI NO: 34902106 NR Description: unknown protein
  misc_feature (2)..(38): NCBI GI NO: 34902106 NR Description: unknown protein
  misc_feature (135)..(241): NCBI GI NO: 22655083 NR Description: putative RING zinc finger protein
  misc_feature (22)..(235): NCBI GI NO: 15219060 NR Description: hypothetical protein [Arabidopsis thaliana]
  misc_feature (147)..(242): NCBI GI NO: 37622892 NR Description: ring finger protein 126 isoform 1 [Homo sapiens]
MSNRATHWCYACQRPIRLRGQDIICPNCSDGFIQEISEMGGVLNTYGLTEPDFEERQARRFGMMDAISSLMRQRLSEIGRDSLFDIHGRQGTGTEYGRRSTAIPTLVFGGIPSPAVGSSDVNVVIREGRRAGAARPNFSSLVVGPSLEALFEQLLLQNNRQGPPPAPQSAIDSMPVVKINRRHLDEDPQCAVCKDKFEVGAEAREMPCKHLYHTDCIIPWLVQHNSCPVCRHPLPSQRSGSSTSSARVPSAYYNETADPPAVARADLDPVPSAYYNETADPPAVTRAYFDPAPGNYGSESQESHDPFSFLWPFGPSSSYQYEENVDEPAVYDPNHIAYSAWHYDH

SEQ ID NO: 21202 - protein, 307 aa, Zea mays subsp. mays
  peptide (1)..(307): Ceres Seq. ID no. 14309643
  misc_feature (152)..(192): Pfam Name: RING finger Pfam Description: Zinc finger, C3HC4 type
  misc_feature (1)..(235): NCBI GI NO: 34908968 NR Description: P0003D09.21
  misc_feature (1)..(219): NCBI GI NO: 18405518 NR Description: RING-H2 finger protein (RHC1a)
  misc_feature (1)..(209): NCBI GI NO: 18410530 NR Description: expressed protein [Arabidopsis thaliana]
  misc_feature (1)..(198): NCBI GI NO: 11994207 NR Description: gene_id:MPN9.20~unknown protein
  misc_feature (1)..(198): NCBI GI NO: 15231003 NR Description: expressed protein [Arabidopsis thaliana]
  misc_feature (51)..(208): NCBI GI NO: 34902106 NR Description: unknown protein
  misc_feature (97)..(203): NCBI GI NO: 22655083 NR Description: putative RING zinc finger protein
  misc_feature (1)..(197): NCBI GI NO: 15219060 NR Description: hypothetical protein [Arabidopsis thaliana]
  misc_feature (109)..(204): NCBI GI NO: 37622892 NR Description: ring finger protein 126 isoform 1 [Homo sapiens]
  misc_feature (1)..(208): NCBI GI NO: 14719329 NR Description: putative RING-H2 finger protein [Oryza sativa]
MGGVLNTYGLTEPDFEERQARRFGMMDAISSLMRQRLSEIGRDSLFDIHGRQGTGTEYGRRSTAIPTLVFGGIPSPAVGSSDVNVVIREGRRAGAARPNFSSLVVGPSLEALFEQLLLQNNRQGPPPAPQSAIDSMPVVKINRRHLDEDPQCAVCKDKFEVGAEAREMPCKHLYHTDCIIPWLVQHNSCPVCRHPLPSQRSGSSTSSARVPSAYYNETADPPAVARADLDPVPSAYYNETADPPAVTRAYFDPAPGNYGSESQESHDPFSFLWPFGPSSSYQYEENVDEPAVYDPNHIAYSAWHYDH

SEQ ID NO: 21203 - protein, 283 aa, Zea mays subsp. mays
  peptide (1)..(283): Ceres Seq. ID no. 14309644
  misc_feature (128)..(168): Pfam Name: RING finger Pfam Description: Zinc finger, C3HC4 type
  misc_feature (1)..(211): NCBI GI NO: 34908968 NR Description: P0003D09.21
  misc_feature (1)..(195): NCBI GI NO: 18405518 NR Description: RING-H2 finger protein (RHC1a)
  misc_feature (1)..(185): NCBI GI NO: 18410530 NR Description: expressed protein [Arabidopsis thaliana]
  misc_feature (1)..(174): NCBI GI NO: 11994207 NR Description: gene_id:MPN9.20~unknown protein
  misc_feature (1)..(174): NCBI GI NO: 15231003 NR Description: expressed protein [Arabidopsis thaliana]
  misc_feature (27)..(184): NCBI GI NO: 34902106 NR Description: unknown protein
  misc_feature (73)..(179): NCBI GI NO: 22655083 NR Description: putative RING zinc finger protein
  misc_feature (1)..(173): NCBI GI NO: 15219060 NR Description: hypothetical protein [Arabidopsis thaliana]
  misc_feature (85)..(180): NCBI GI NO: 37622892 NR Description: ring finger protein 126 isoform 1 [Homo sapiens]
  misc_feature (1)..(184): NCBI GI NO: 14719329 NR Description: putative RING-H2 finger protein [Oryza sativa]
MMDAISSLMRQRLSEIGRDSLFDIHGRQGTGTEYGRRSTAIPTLVFGGIPSPAVGSSDVNVVIREGRRAGAARPNFSSLVVGPSLEALFEQLLLQNNRQGPPPAPQSAIDSMPVVKINRRHLDEDPQCAVCKDKFEVGAEAREMPCKHLYHTDCIIPWLVQHNSCPVCRHPLPSQRSGSSTSSARVPSAYYNETADPPAVARADLDPVPSAYYNETADPPAVTRAYFDPAPGNYGSESQESHDPFSFLWPFGPSSSYQYEENVDEPAVYDPNHIAYSAWHYDH

SEQ ID NO: 21204 - DNA, 611 bp, Zea mays subsp. mays
  misc_feature (1)..(611): Ceres Seq. ID no. 13493427
atgcacaacacaacgcttataatacttacaacaaaagataagcccacgaatcagtagatcgaggtcccgcccagtccagcaaaagcacacacggagatgtcccagctgagctctgctggccacatggctgcgacgttcctcctcatcctcctcgcctccgcagcagcaacggtgtcagctgaccaacaagtctctgcctgccagaatgacatagacgcactgtggcgcagctgcaagcagttcgtccagaaggaggggcccaagatgcctccgtccgaggactgctgcaaaaccatcaaggccttagacgcgcacgcgtcctgcatctgcgactacgtcggctccccggacgccaggaataagctagacctggacaaggtgttcttcgttaccaaacagtgcggcgtcaccgtccccaagggctgcggatcaaagcaggactgaagagcggctgaatctgaatggagcaagttggctaacatacgcacggcagctacaaatacttataggaataaataaagttggtcaactgttggtttcatggtgttggagtacaacaactgtactgttcttatcctcatatatgatatatgaactctagttcatcacat

SEQ ID NO: 21205 - protein, 115 aa, Zea mays subsp. mays
  peptide (1)..(115): Ceres Seq. ID no. 13493428
  misc_feature (46)..(110): Pfam Name: Pfam Description:  Protease inhibitor/seed storage/LTP family
  misc_feature (1)..(114): NCBI GI NO: 37531054 NR Description: unknown protein
  misc_feature (16)..(113): NCBI GI NO: 15234923 NR Description: protease inhibitor/seed storage/lipid transfer
MSQLSSAGHMAATFLLILLASAAATVSADQQVSACQNDIDALWRSCKQFVQKEGPKMPPSEDCCKTIKALDAHASCICDYVGSPDARNKLDLDKVFFVTKQCGVTVPKGCGSKQD

SEQ ID NO: 21206 - protein, 106 aa, Zea mays subsp. mays
  peptide (1)..(106): Ceres Seq. ID no. 13493429
  misc_feature (37)..(101): Pfam Name: Pfam Description:  Protease inhibitor/seed storage/LTP family
  misc_feature (1)..(105): NCBI GI NO: 37531054 NR Description: unknown protein
  misc_feature (7)..(104): NCBI GI NO: 15234923 NR Description: protease inhibitor/seed storage/lipid transfer
MAATFLLILLASAAATVSADQQVSACQNDIDALWRSCKQFVQKEGPKMPPSEDCCKTIKALDAHASCICDYVGSPDARNKLDLDKVFFVTKQCGVTVPKGCGSKQD

SEQ ID NO: 21207 - protein, 59 aa, Zea mays subsp. mays
  peptide (1)..(59): Ceres Seq. ID no. 13493430
  misc_feature (1)..(54): Pfam Name: Pfam Description:  Protease inhibitor/seed storage/LTP family
  misc_feature (1)..(58): NCBI GI NO: 37531054 NR Description: unknown protein
  misc_feature (1)..(57): NCBI GI NO: 15234923 NR Description: protease inhibitor/seed storage/lipid transfer
MPPSEDCCKTIKALDAHASCICDYVGSPDARNKLDLDKVFFVTKQCGVTVPKGCGSKQD

SEQ ID NO: 21208 - DNA, 1966 bp, Zea mays subsp. mays
  misc_feature (1)..(1966): Ceres Seq. ID no. 15179554
aggatcccgttctcagtcgccagccactggtcacagccaccgtctccctccttccccaacctcgccgctatcaggtggtggatgcagcagcgcggccgctccttcaacagccgctctcggagcttctcccgcgcccgcgtcgccatcgagggatcttaatctcacagccatccctcgatcatttcgtttgaactcggttctgaaattctgactgacgaacgcacgcaacgacctaccgtgatggacgccgccgccgccgccaccgttgtttctcttaacgggaagatgggggccgaggagaggaaggcgcagaagagctactgggaggagcattccaagaacctcaccgtcgaggccatgatgctggactcccgcgccgctgatctcgacaaggaggagcgccctgaggtcctgtctttgcttccttcatatgaaggaaaatctgtactagagcttggtgctggaataggccgtttcactggagaactcgctaaaacagctgggaatgttcttgctctggattttattgaaagtgcaattaaaaagaatgaaagcattaatggtcactacaagaatgcatcctttatgtgtgctgatgtgacatcccaggacctagtgcttcaagctaactccatcgatctgatattttcaaattggttattgatgtatctttcagatgaagaggttgaacagctagttcagagaatggtgaaatggttgaaggttggtggctatatcttctttagggaatcttgcttccatcaatctggagattcaaaaaggaaagttaatccgacacactatagggaaccaagtttttatactaaggttttcaaagaatgccatacctttgatcaagatgggaattctttcgaactttctctggttacttgcaagtgtattggtgcttatgttaaaaacaagaaaaaccaaaaccagatatgttggctatggcaaaaggtccattcaacggaagataaaggatttcaaagatttttggacaatgtgcagtacaaagccagcggaatattacgttacgagcgcatttttggagaaggttatgtgagcactggtggagttgagactacaaaagaatttgtggacaagctggatctcaaacctggacataaggtgcttgatgttggatgtggaattgggggaggtgacttttatatggccgaaaaatatgatgctcatgttgttggtattgatctttccataaacatggtatcatttgcacttgagcgtgccattgggcgcagttgctcagtggagtttgaagttgctgattgcactacgaagacatacccagacaacacatttgatgtcatatacagccgtgatactatccttcacatacatgacaaaccctctttgttcaaaagtttcttcaactggctgaagcctgggggcaaggtccttatcagtgactactgcaggagtcctgggaaaccatcagaggaatttgcagcatacattaagcagagaggttatgacctacatgctgtggaggcttatggacagatgttgaagagtgctggttttcgtgatgtcattgctgaggatcgaactgatcagttccttggtgttttagataaggagttagctgaatttgaaaagaacaaggatgatttcctgtctgacttcacccaggaggactacgatgatatcgtgaacggttggaaggcaaaactgcagaggagttctgctggtgaacagaggtgggggctgttcatcgccaccaaatgatgatgaagatgtgggctggacatgaaaataaagcatccttttattataattgatgccgcattacttattctgaacccaggttgcctgggtcagtacctactaccctgtttatcgtagtacgtggagagaactcgtccagttttacattcccgtcactgctttgccggagtgctgtggcaatccataaagtctaataaagtaacaataagctgtctgc

SEQ ID NO: 21209 - protein, 502 aa, Zea mays subsp. mays
  peptide (1)..(502): Ceres Seq. ID no. 15179555
  misc_feature (1)..(502): NCBI GI NO: 34911440 NR Description: putative phosphoethanolamine methyltransferase
  misc_feature (8)..(502): NCBI GI NO: 17887465 NR Description: phosphoethanolamine methyltransferase
  misc_feature (19)..(502): NCBI GI NO: 30684743 NR Description: phosphoethanolamine N-methyltransferase, putative
  misc_feature (19)..(502): NCBI GI NO: 20260388 NR Description: unknown protein [Arabidopsis thaliana]
  misc_feature (20)..(502): NCBI GI NO: 32478660 NR Description: phosphoethanolamine N-methyltransferase
  misc_feature (19)..(502): NCBI GI NO: 9294501 NR Description: methyl transferase-like protein
  misc_feature (30)..(502): NCBI GI NO: 15221909 NR Description: phosphoethanolamine N-methyltransferase -related
  misc_feature (16)..(502): NCBI GI NO: 24212082 NR Description: Phosphoethanolamine N-methyltransferase
  misc_feature (19)..(502): NCBI GI NO: 15219502 NR Description: phosphoethanolamine N-methyltransferase -related
  misc_feature (130)..(502): NCBI GI NO: 39582205 NR Description: Hypothetical protein CBG08775
MDAAAAATVVSLNGKMGAEERKAQKSYWEEHSKNLTVEAMMLDSRAADLDKEERPEVLSLLPSYEGKSVLELGAGIGRFTGELAKTAGNVLALDFIESAIKKNESINGHYKNASFMCADVTSQDLVLQANSIDLIFSNWLLMYLSDEEVEQLVQRMVKWLKVGGYIFFRESCFHQSGDSKRKVNPTHYREPSFYTKVFKECHTFDQDGNSFELSLVTCKCIGAYVKNKKNQNQICWLWQKVHSTEDKGFQRFLDNVQYKASGILRYERIFGEGYVSTGGVETTKEFVDKLDLKPGHKVLDVGCGIGGGDFYMAEKYDAHVVGIDLSINMVSFALERAIGRSCSVEFEVADCTTKTYPDNTFDVIYSRDTILHIHDKPSLFKSFFNWLKPGGKVLISDYCRSPGKPSEEFAAYIKQRGYDLHAVEAYGQMLKSAGFRDVIAEDRTDQFLGVLDKELAEFEKNKDDFLSDFTQEDYDDIVNGWKAKLQRSSAGEQRWGLFIATK

SEQ ID NO: 21210 - protein, 487 aa, Zea mays subsp. mays
  peptide (1)..(487): Ceres Seq. ID no. 15179556
  misc_feature (1)..(487): NCBI GI NO: 34911440 NR Description: putative phosphoethanolamine methyltransferase
  misc_feature (1)..(487): NCBI GI NO: 17887465 NR Description: phosphoethanolamine methyltransferase
  misc_feature (4)..(487): NCBI GI NO: 30684743 NR Description: phosphoethanolamine N-methyltransferase, putative
  misc_feature (4)..(487): NCBI GI NO: 20260388 NR Description: unknown protein [Arabidopsis thaliana]
  misc_feature (5)..(487): NCBI GI NO: 32478660 NR Description: phosphoethanolamine N-methyltransferase
  misc_feature (4)..(487): NCBI GI NO: 9294501 NR Description: methyl transferase-like protein
  misc_feature (15)..(487): NCBI GI NO: 15221909 NR Description: phosphoethanolamine N-methyltransferase -related
  misc_feature (1)..(487): NCBI GI NO: 24212082 NR Description: Phosphoethanolamine N-methyltransferase
  misc_feature (4)..(487): NCBI GI NO: 15219502 NR Description: phosphoethanolamine N-methyltransferase -related
  misc_feature (115)..(487): NCBI GI NO: 39582205 NR Description: Hypothetical protein CBG08775
MGAEERKAQKSYWEEHSKNLTVEAMMLDSRAADLDKEERPEVLSLLPSYEGKSVLELGAGIGRFTGELAKTAGNVLALDFIESAIKKNESINGHYKNASFMCADVTSQDLVLQANSIDLIFSNWLLMYLSDEEVEQLVQRMVKWLKVGGYIFFRESCFHQSGDSKRKVNPTHYREPSFYTKVFKECHTFDQDGNSFELSLVTCKCIGAYVKNKKNQNQICWLWQKVHSTEDKGFQRFLDNVQYKASGILRYERIFGEGYVSTGGVETTKEFVDKLDLKPGHKVLDVGCGIGGGDFYMAEKYDAHVVGIDLSINMVSFALERAIGRSCSVEFEVADCTTKTYPDNTFDVIYSRDTILHIHDKPSLFKSFFNWLKPGGKVLISDYCRSPGKPSEEFAAYIKQRGYDLHAVEAYGQMLKSAGFRDVIAEDRTDQFLGVLDKELAEFEKNKDDFLSDFTQEDYDDIVNGWKAKLQRSSAGEQRWGLFIATK

SEQ ID NO: 21211 - protein, 463 aa, Zea mays subsp. mays
  peptide (1)..(463): Ceres Seq. ID no. 15179557
  misc_feature (1)..(463): NCBI GI NO: 34911440 NR Description: putative phosphoethanolamine methyltransferase
  misc_feature (1)..(463): NCBI GI NO: 17887465 NR Description: phosphoethanolamine methyltransferase
  misc_feature (1)..(463): NCBI GI NO: 30684743 NR Description: phosphoethanolamine N-methyltransferase, putative
  misc_feature (1)..(463): NCBI GI NO: 20260388 NR Description: unknown protein [Arabidopsis thaliana]
  misc_feature (1)..(463): NCBI GI NO: 32478660 NR Description: phosphoethanolamine N-methyltransferase
  misc_feature (1)..(463): NCBI GI NO: 9294501 NR Description: methyl transferase-like protein
  misc_feature (1)..(463): NCBI GI NO: 15221909 NR Description: phosphoethanolamine N-methyltransferase -related
  misc_feature (1)..(463): NCBI GI NO: 24212082 NR Description: Phosphoethanolamine N-methyltransferase
  misc_feature (1)..(463): NCBI GI NO: 15219502 NR Description: phosphoethanolamine N-methyltransferase -related
  misc_feature (91)..(463): NCBI GI NO: 39582205 NR Description: Hypothetical protein CBG08775
MMLDSRAADLDKEERPEVLSLLPSYEGKSVLELGAGIGRFTGELAKTAGNVLALDFIESAIKKNESINGHYKNASFMCADVTSQDLVLQANSIDLIFSNWLLMYLSDEEVEQLVQRMVKWLKVGGYIFFRESCFHQSGDSKRKVNPTHYREPSFYTKVFKECHTFDQDGNSFELSLVTCKCIGAYVKNKKNQNQICWLWQKVHSTEDKGFQRFLDNVQYKASGILRYERIFGEGYVSTGGVETTKEFVDKLDLKPGHKVLDVGCGIGGGDFYMAEKYDAHVVGIDLSINMVSFALERAIGRSCSVEFEVADCTTKTYPDNTFDVIYSRDTILHIHDKPSLFKSFFNWLKPGGKVLISDYCRSPGKPSEEFAAYIKQRGYDLHAVEAYGQMLKSAGFRDVIAEDRTDQFLGVLDKELAEFEKNKDDFLSDFTQEDYDDIVNGWKAKLQRSSAGEQRWGLFIATK

SEQ ID NO: 21212 - DNA, 1010 bp, Zea mays subsp. mays
  misc_feature (1)..(1010): Ceres Seq. ID no. 14305591
gctactgccgatccgtgccctcacaccgcctacttgactcctcccgaacttccacatctctgctctgccttcccagtctcccatccctgaaaacctcacaaaaccctcgtttgctccccaccaccccgccgcgccgccgcctgtaccagctgcgtcaagatgagtcggcaccctgaggtgaagtgggctcagaggatcgacaaggtttacatcactgtacagttacctgacgcaaaggatgctaaggtcaatttggatccagatggtgtcttcacattctctggcagcgctggtacaaacttgtatgaattgaaactagatctgaatgacaaagtaaacgttgaggctagcaaaataagtgtgggggtcaggtccatattctgtatcgtagaaaaagctgaagccaaatggtggaagaaactcgttcgagatgatcaaagggcacctcactttgtgaaagttgattgggacaaatgggttgatgaagatgatgatggtgctgatatcaacatggatgggatggacttctcgaatttcggtggcatgggtggtatgggcggcatgggtggcatgggtgatatggctggtatgggtggtcttggtggcatgggtgggatgggtgatcttggtggcatgggtggtatgggaatggatgatttcgaagatgagagtgatgatgaagaagaattgtcgaaacctcaagctgcggacaaggctgttgaggctgaggagacggagtcagcggaaaccaagactgaggcggctcagagcagttgaagatgcttatgatctaagctagattgtatcctcatgttaattctgctgaatcggaggacaaaccttacatttgtggtgctggcaagtcccagtggcgtgccatgaaaatttacgttccgtcttttaactgggtatcctagtgtcgtgctcagcatattatggatattgtttccgtaatgcttcctttggtcgccaatccatgtggttaagagtttgttttactggattgctct

SEQ ID NO: 21213 - protein, 205 aa, Zea mays subsp. mays
  peptide (1)..(205): Ceres Seq. ID no. 14305592
  misc_feature (1)..(202): NCBI GI NO: 38637531 NR Description: putative p23 co-chaperone
  misc_feature (1)..(163): NCBI GI NO: 11229591 NR Description: p23 co-chaperone [Arabidopsis thaliana]
  misc_feature (1)..(163): NCBI GI NO: 30679149 NR Description: glycine-rich protein [Arabidopsis thaliana]
  misc_feature (3)..(153): NCBI GI NO: 7487014 NR Description: hypothetical protein T14P8
  misc_feature (1)..(140): NCBI GI NO: 11934654 NR Description: p23 [Brassica napus]
  misc_feature (1)..(131): NCBI GI NO: 40882701 NR Description: putative ripening regulated protein
  misc_feature (5)..(168): NCBI GI NO: 23482571 NR Description: 34 kDa phosphoprotein [Plasmodium yoelii yoelii]
  misc_feature (1)..(130): NCBI GI NO: 12231292 NR Description: ripening regulated protein DDTFR8
  misc_feature (5)..(205): NCBI GI NO: 32415503 NR Description: hypothetical protein [Neurospora crassa]
  misc_feature (5)..(202): NCBI GI NO: 18376119 NR Description: related to Hsp90 associated co-chaperone
MSRHPEVKWAQRIDKVYITVQLPDAKDAKVNLDPDGVFTFSGSAGTNLYELKLDLNDKVNVEASKISVGVRSIFCIVEKAEAKWWKKLVRDDQRAPHFVKVDWDKWVDEDDDGADINMDGMDFSNFGGMGGMGGMGGMGDMAGMGGLGGMGGMGDLGGMGGMGMDDFEDESDDEEELSKPQAADKAVEAEETESAETKTEAAQSS

SEQ ID NO: 21214 - protein, 105 aa, Zea mays subsp. mays
  peptide (1)..(105): Ceres Seq. ID no. 14305593
MKMMMVLISTWMGWTSRISVAWVVWAAWVAWVIWLVWVVLVAWVGWVILVAWVVWEWMISKMRVMMKKNCRNLKLRTRLLRLRRRSQRKPRLRRLRAVEDAYDLS

SEQ ID NO: 21215 - protein, 103 aa, Zea mays subsp. mays
  peptide (1)..(103): Ceres Seq. ID no. 14305594
MMMVLISTWMGWTSRISVAWVVWAAWVAWVIWLVWVVLVAWVGWVILVAWVVWEWMISKMRVMMKKNCRNLKLRTRLLRLRRRSQRKPRLRRLRAVEDAYDLS

SEQ ID NO: 21216 - DNA, 722 bp, Zea mays subsp. mays
  misc_feature (1)..(722): Ceres Seq. ID no. 12556636
  misc_feature (267)..(267): n is a, c, t, g, unknown, or other
  misc_feature (266)..(266): n is a, c, t, g, unknown, or other
  misc_feature (255)..(255): n is a, c, t, g, unknown, or other
  misc_feature (257)..(257): n is a, c, t, g, unknown, or other
  misc_feature (272)..(272): n is a, c, t, g, unknown, or other
  misc_feature (273)..(273): n is a, c, t, g, unknown, or other
  misc_feature (268)..(268): n is a, c, t, g, unknown, or other
  misc_feature (258)..(258): n is a, c, t, g, unknown, or other
  misc_feature (256)..(256): n is a, c, t, g, unknown, or other
acatccaaattcccaatcccaacccccccaaggcacactccacctccgcaaccaaacgcgctagggtttccgcaccgcacctctagtcctccaccccaccccactaccggcgatggccaccgcggcggcgcagggcggtacgacaagccggcgctccggaagcccgtcttcaccaaggtcgaccagctcaagccgggcactaacgggcacaccctcaccgtcaaggtcgtcagcgccacccccgtgcccggccgnnnncgcccggnnncacnngccgccgcctcgtcccgcgcgccgcgcatcgccgagtgcctcgtcggagacgagaccggcgtcatcgtattcaccgcccgcaacgaccaagttgatttgctgaagcccgatgccacggtgatcttgcgcaatgccaaaatagacatgttcaaaggatcaatgaggcttgcagtggacaaatgggggcggattgaggctacagagccagctagcttcacagtgaaggaagacaacaacttgtcccttgtagagtatgaattggttaacgtggctgaataaccgtcgaatcgtttcttgcccccccttacttctttttcacgcacgccataagatgataagaaaacgaacagcatctcgaagctgagtttatttgttacggtggtcgataaggtcaaggcttctgctgttacacctttggatccaatccattaagatgaattaccccttgc

SEQ ID NO: 21217 - protein, 183 aa, Zea mays subsp. mays
  peptide (1)..(183): Ceres Seq. ID no. 12556637
  misc_feature (48)..(183): NCBI GI NO: 34904470 NR Description: OSJNBa0086P08.14
  misc_feature (9)..(183): NCBI GI NO: 18403397 NR Description: Expressed protein; protein id: At2g33845
  misc_feature (51)..(181): NCBI GI NO: 34909622 NR Description: P0435B05.31
  misc_feature (53)..(181): NCBI GI NO: 15235304 NR Description: putative protein; protein id: At4g28440
  misc_feature (49)..(183): NCBI GI NO: 18395285 NR Description: expressed protein; protein id: At1g23750
  misc_feature (51)..(181): NCBI GI NO: 18391179 NR Description: expressed protein; protein id: At1g10590
  misc_feature (51)..(181): NCBI GI NO: 30681801 NR Description: expressed protein [Arabidopsis thaliana]
  misc_feature (53)..(179): NCBI GI NO: 15219562 NR Description: hypothetical protein; protein id: At1g03810.1
  misc_feature (51)..(121): NCBI GI NO: 6573753 NR Description: F20B24.1 [Arabidopsis thaliana]
  misc_feature (122)..(181): NCBI GI NO: 6573753 NR Description: F20B24.1 [Arabidopsis thaliana]
  misc_feature (85)..(85): Xaa is any aa, unknown or other
  misc_feature (86)..(86): Xaa is any aa, unknown or other
  misc_feature (89)..(89): Xaa is any aa, unknown or other
  misc_feature (90)..(90): Xaa is any aa, unknown or other
  misc_feature (91)..(91): Xaa is any aa, unknown or other
TSKFPIPTPPRHTPPPQPNALGFPHRTSSPPPHPTTGDGHRGGAGRYDKPALRKPVFTKVDQLKPGTNGHTLTVKVVSATPVPGXXRPXXXAAASSRAPRIAECLVGDETGVIVFTARNDQVDLLKPDATVILRNAKIDMFKGSMRLAVDKWGRIEATEPASFTVKEDNNLSLVEYELVNVAE

SEQ ID NO: 21218 - DNA, 1436 bp, Zea mays subsp. mays
  misc_feature (1)..(1436): Ceres Seq. ID no. 15180578
agtactagcagtagcactgcgccgcagcaatggtggtttccctcgccgaataaatctcaccggtcgcgcttcttggcgtgttcctccgctcgcctgggcttcgatctccagccctcgcgtgagcgcgggtgcggccgcggcgccgtggtcatggcgacggaggagtgggagctgcgggaggaggacgcctacgcctacgagttcgagttcgacctcgagaaccccttcaccagccccgccgacgagccgatcgccagtctcctcgacgccgagggccaccacgcgccctctatctccgccgcggcctcggccacccgccgcgccgccgccgccttcatctccaaggtgcgtttcggcggcgagctcgccgtgcacccgcgcgtcgcctacctcgcgctcaactacgtggatcgcttcctctccaagaggcaattggcgtgcgagcagcagccgtgggcgccgcgcctgctcgccatcagctgcctctccctcgccgccaagatgcagcgcgtcgcaacattctccaccgccgacattcagagggacgaagacttcatgttcgacgcggtgaccatccgtcgcatggagcgggtggtgcttggcgcgcttgagtggcgcgcgcgctccgtcacgccgctcgccttcctcggcttcttcctctccgcatgctatccgccgccgcagcaccccccacaggtagccgctgtcaaggcgcgcgccgtcgacctccttctccacgctcagcctgaggtgaagatggcggagttctcaccctccgtggtggcggcggcagcgctgctggccgccgccggagaggtcgccgccgcgaacctccacgcgttccaagccagcttggccgcctgtccctttgtaaatagcgagaagctgcgggagtgcggtgaggtgctggcagcggcgggcggcgtcgggcgggggcgagccgctccgagcgcggacacgcctgtgacggtgctcggtcaccagcgcagcgccagctccgcctcggagaccgactggattaacggcggcgacgcgaagaaacgctgcatgggcccaccatcgcaatgggggtaggcggcaggccgcaggccgagtcaagcgggtattgtcgcagctggatcgaagagtcggagattttactgcagccctgctcctttttttccaaattgtttttaccctttttcttttcccaattctttccttctactttaatgctctcgaggtaaagtgacgaggagtggtggtggtggctgtcatttactagtattcctttttcctagcatgtctttattttagcctagttatggtaatttttgcggcggtgctttggaaggtgaggacggtggatgaacatactgggatggaagagggggatgatgtgaaatggtaaaaaaaataaaaccaaaaggctggcatgttgctttgtcacctcaaat

SEQ ID NO: 21219 - protein, 357 aa, Zea mays subsp. mays
  peptide (1)..(357): Ceres Seq. ID no. 15180579
  misc_feature (99)..(208): Pfam Name: Pfam Description:  Cyclin, N-terminal domain
  misc_feature (72)..(348): NCBI GI NO: 15236274 NR Description: cyclin family [Arabidopsis thaliana]
  misc_feature (67)..(355): NCBI GI NO: 6448480 NR Description: cyclin D1 [Antirrhinum majus]
  misc_feature (67)..(299): NCBI GI NO: 25989347 NR Description: cyclin D1 [Helianthus tuberosus]
  misc_feature (79)..(348): NCBI GI NO: 15223075 NR Description: cyclin delta-1 (CYCD1) [Arabidopsis thaliana]
  misc_feature (79)..(305): NCBI GI NO: 3915635 NR Description: Cyclin delta-1
  misc_feature (99)..(305): NCBI GI NO: 1076311 NR Description: cyclin delta-1 - Arabidopsis thaliana
  misc_feature (64)..(332): NCBI GI NO: 19070615 NR Description: D-type cyclin [Zea mays]
  misc_feature (80)..(336): NCBI GI NO: 19070611 NR Description: D-type cyclin [Zea mays]
  misc_feature (106)..(345): NCBI GI NO: 15229665 NR Description: cyclin family [Arabidopsis thaliana]
  misc_feature (76)..(317): NCBI GI NO: 18916916 NR Description: cyclin [Oryza sativa (japonica cultivar-group)]
STSSSTAPQQWWFPSPNKSHRSRFLACSSARLGFDLQPSRERGCGRGAVVMATEEWELREEDAYAYEFEFDLENPFTSPADEPIASLLDAEGHHAPSISAAASATRRAAAAFISKVRFGGELAVHPRVAYLALNYVDRFLSKRQLACEQQPWAPRLLAISCLSLAAKMQRVATFSTADIQRDEDFMFDAVTIRRMERVVLGALEWRARSVTPLAFLGFFLSACYPPPQHPPQVAAVKARAVDLLLHAQPEVKMAEFSPSVVAAAALLAAAGEVAAANLHAFQASLAACPFVNSEKLRECGEVLAAAGGVGRGRAAPSADTPVTVLGHQRSASSASETDWINGGDAKKRCMGPPSQWG

SEQ ID NO: 21220 - protein, 307 aa, Zea mays subsp. mays
  peptide (1)..(307): Ceres Seq. ID no. 15180580
  misc_feature (49)..(158): Pfam Name: Pfam Description:  Cyclin, N-terminal domain
  misc_feature (22)..(298): NCBI GI NO: 15236274 NR Description: cyclin family [Arabidopsis thaliana]
  misc_feature (17)..(305): NCBI GI NO: 6448480 NR Description: cyclin D1 [Antirrhinum majus]
  misc_feature (17)..(249): NCBI GI NO: 25989347 NR Description: cyclin D1 [Helianthus tuberosus]
  misc_feature (29)..(298): NCBI GI NO: 15223075 NR Description: cyclin delta-1 (CYCD1) [Arabidopsis thaliana]
  misc_feature (29)..(255): NCBI GI NO: 3915635 NR Description: Cyclin delta-1
  misc_feature (49)..(255): NCBI GI NO: 1076311 NR Description: cyclin delta-1 - Arabidopsis thaliana
  misc_feature (14)..(282): NCBI GI NO: 19070615 NR Description: D-type cyclin [Zea mays]
  misc_feature (30)..(286): NCBI GI NO: 19070611 NR Description: D-type cyclin [Zea mays]
  misc_feature (56)..(295): NCBI GI NO: 15229665 NR Description: cyclin family [Arabidopsis thaliana]
  misc_feature (26)..(267): NCBI GI NO: 18916916 NR Description: cyclin [Oryza sativa (japonica cultivar-group)]
MATEEWELREEDAYAYEFEFDLENPFTSPADEPIASLLDAEGHHAPSISAAASATRRAAAAFISKVRFGGELAVHPRVAYLALNYVDRFLSKRQLACEQQPWAPRLLAISCLSLAAKMQRVATFSTADIQRDEDFMFDAVTIRRMERVVLGALEWRARSVTPLAFLGFFLSACYPPPQHPPQVAAVKARAVDLLLHAQPEVKMAEFSPSVVAAAALLAAAGEVAAANLHAFQASLAACPFVNSEKLRECGEVLAAAGGVGRGRAAPSADTPVTVLGHQRSASSASETDWINGGDAKKRCMGPPSQWG

SEQ ID NO: 21221 - protein, 190 aa, Zea mays subsp. mays
  peptide (1)..(190): Ceres Seq. ID no. 15180581
  misc_feature (43)..(180): Pfam Name: Pfam Description:  Cyclin, C-terminal domain
  misc_feature (1)..(181): NCBI GI NO: 15236274 NR Description: cyclin family [Arabidopsis thaliana]
  misc_feature (1)..(188): NCBI GI NO: 6448480 NR Description: cyclin D1 [Antirrhinum majus]
  misc_feature (1)..(132): NCBI GI NO: 25989347 NR Description: cyclin D1 [Helianthus tuberosus]
  misc_feature (1)..(181): NCBI GI NO: 15223075 NR Description: cyclin delta-1 (CYCD1) [Arabidopsis thaliana]
  misc_feature (1)..(138): NCBI GI NO: 3915635 NR Description: Cyclin delta-1
  misc_feature (1)..(138): NCBI GI NO: 1076311 NR Description: cyclin delta-1 - Arabidopsis thaliana
  misc_feature (1)..(165): NCBI GI NO: 19070615 NR Description: D-type cyclin [Zea mays]
  misc_feature (1)..(169): NCBI GI NO: 19070611 NR Description: D-type cyclin [Zea mays]
  misc_feature (1)..(178): NCBI GI NO: 15229665 NR Description: cyclin family [Arabidopsis thaliana]
  misc_feature (1)..(150): NCBI GI NO: 18916916 NR Description: cyclin [Oryza sativa (japonica cultivar-group)]
MQRVATFSTADIQRDEDFMFDAVTIRRMERVVLGALEWRARSVTPLAFLGFFLSACYPPPQHPPQVAAVKARAVDLLLHAQPEVKMAEFSPSVVAAAALLAAAGEVAAANLHAFQASLAACPFVNSEKLRECGEVLAAAGGVGRGRAAPSADTPVTVLGHQRSASSASETDWINGGDAKKRCMGPPSQWG

SEQ ID NO: 21222 - DNA, 1967 bp, Zea mays subsp. mays
  misc_feature (1)..(1967): Ceres Seq. ID no. 15180570
agttccccaaattcccaacgccgccgcgacggcgctgctagctagtctttggtgttgtaggtgttcgattcctgattccaaattccagactccaaactcggttcttcaatcgacagattccgatttacatcccaaagctcttcggattgaaatccagccgcgacccaagagataagagtatttgggattagtagataggatagtagaatagaagaggaacactttcgctgatgattacggcggaggagaagagccccgaaaggggaggaggaggaggaggcgaacccgcgcgcggaggcttttctggagatcatctgccgcgtcccggcgggggaggtggaggcggcgctgtccgcttgcggcatcggccccacggccgaggtcgaggaactggtgctcaagtcccgcgaatgctacaagcgccctaagtccgccgtccgcttcttccgctgggcggggcagtccgtgtcgcacaccgcctacgcatggaacctccttgtcgacatcctcggcaaggccgccatgttcgagcccatgtgggacgccatccgctccatgaagcaggagggcggcggcgggctcgtctccgtcgccaccttcgcctccgtcttcgcctcctactgcgccgctggcaacatcaaagatgcaatcgcggccttagacgtcatggaccgctacggcctcaagcacgacgccgtcgcgctcaactcgctgctctcggcgatttgccgcgtcgagggtcgcgcgcaggatgcgcaggacgtcttcgagcgtaccaaggccaccatcccacccgacggcgacacgttcgcgatactgctcgaggcatgggagaaggaggggaacgcggtgcgcgccaagagcgtctttggcgagatggtcgtccgcatcggctgggacgcagccaacgtatccgcgtacgactccttcctctccactctcgttcggggcggcctgttggacgaggccttcaaatttctgcaggtgatgcggagcaagggctgcttgccggggatcaattttttttctacagctgtggatctggtcgtccgcaagggtgactacctcaacgccgtagccatctggcacatgatggtctctgaagccggcctcgttcccaatttctcaatgtacagcgccatgattggtctccactgcaatgctggtagcatagacgatgctcttgggttgcttgatgaaatgcccctcaacggcgtctttgcaaattctgtcacatacaacaccatactggaaggattcatcaagcatcgcaaggctcgtgaggctgaaagtttcctaacggagatgagcaagaatgagcaactgcctactgcatccaattgcgctgctgctatcagcttgttctttaaggagtttaacccatctgcagcaatcgacgtgtggcgctgtattgtggagcacaacattaccccagctgaggactctgccaaagagctaatagcagggctgcttgattttggcaggtttactgaggtgacgaagcgtgctgatgagatgattgacatgagagttgagttgtcacggtccacaatggagaatatgaagcgtgcttttgctaaggctggcaggcaccaatcatatgacaacattgcaagaaggctaaagcgatattagctgcacatgaatgctttaatcagctgaaactttgcggctcacggggtagacgtttaacgcctggactgcttaattgcatgacaaccaagaatttggactagcctggatcctggaatgtaagtctggaaatctggaactgtactctgatcccacaagcagtggtcgggatgttagtgtagctcttgtagattccggaccccatttgttagctggttactcatcgagtgtaataagtggctagtttagtgaggctgcacattatcgctgtttatttttcatatatattttatgaatatgaaattgggttatgtaagtatcagatattcctggcg

SEQ ID NO: 21223 - protein, 370 aa, Zea mays subsp. mays
  peptide (1)..(370): Ceres Seq. ID no. 15180571
  misc_feature (1)..(369): NCBI GI NO: 21741854 NR Description: OSJNBa0019D11.15
  misc_feature (1)..(367): NCBI GI NO: 14488357 NR Description: unknown protein
  misc_feature (1)..(356): NCBI GI NO: 15223926 NR Description: pentatricopeptide (PPR) repeat-containing protein
  misc_feature (1)..(369): NCBI GI NO: 15223927 NR Description: pentatricopeptide (PPR) repeat-containing protein
  misc_feature (1)..(369): NCBI GI NO: 15219049 NR Description: hypothetical protein [Arabidopsis thaliana]
  misc_feature (1)..(368): NCBI GI NO: 15228767 NR Description: pentatricopeptide (PPR) repeat-containing protein
  misc_feature (1)..(368): NCBI GI NO: 15228788 NR Description: pentatricopeptide (PPR) repeat-containing protein
  misc_feature (1)..(368): NCBI GI NO: 15241508 NR Description: pentatricopeptide (PPR) repeat-containing protein
  misc_feature (1)..(363): NCBI GI NO: 21686921 NR Description: putative reverse transcriptase
  misc_feature (1)..(266): NCBI GI NO: 15228825 NR Description: pentatricopeptide (PPR) repeat-containing protein
MFEPMWDAIRSMKQEGGGGLVSVATFASVFASYCAAGNIKDAIAALDVMDRYGLKHDAVALNSLLSAICRVEGRAQDAQDVFERTKATIPPDGDTFAILLEAWEKEGNAVRAKSVFGEMVVRIGWDAANVSAYDSFLSTLVRGGLLDEAFKFLQVMRSKGCLPGINFFSTAVDLVVRKGDYLNAVAIWHMMVSEAGLVPNFSMYSAMIGLHCNAGSIDDALGLLDEMPLNGVFANSVTYNTILEGFIKHRKAREAESFLTEMSKNEQLPTASNCAAAISLFFKEFNPSAAIDVWRCIVEHNITPAEDSAKELIAGLLDFGRFTEVTKRADEMIDMRVELSRSTMENMKRAFAKAGRHQSYDNIARRLKRY

SEQ ID NO: 21224 - protein, 366 aa, Zea mays subsp. mays
  peptide (1)..(366): Ceres Seq. ID no. 15180572
  misc_feature (1)..(365): NCBI GI NO: 21741854 NR Description: OSJNBa0019D11.15
  misc_feature (1)..(363): NCBI GI NO: 14488357 NR Description: unknown protein
  misc_feature (1)..(352): NCBI GI NO: 15223926 NR Description: pentatricopeptide (PPR) repeat-containing protein
  misc_feature (1)..(365): NCBI GI NO: 15223927 NR Description: pentatricopeptide (PPR) repeat-containing protein
  misc_feature (1)..(365): NCBI GI NO: 15219049 NR Description: hypothetical protein [Arabidopsis thaliana]
  misc_feature (1)..(364): NCBI GI NO: 15228767 NR Description: pentatricopeptide (PPR) repeat-containing protein
  misc_feature (1)..(364): NCBI GI NO: 15228788 NR Description: pentatricopeptide (PPR) repeat-containing protein
  misc_feature (1)..(364): NCBI GI NO: 15241508 NR Description: pentatricopeptide (PPR) repeat-containing protein
  misc_feature (1)..(359): NCBI GI NO: 21686921 NR Description: putative reverse transcriptase
  misc_feature (1)..(262): NCBI GI NO: 15228825 NR Description: pentatricopeptide (PPR) repeat-containing protein
MWDAIRSMKQEGGGGLVSVATFASVFASYCAAGNIKDAIAALDVMDRYGLKHDAVALNSLLSAICRVEGRAQDAQDVFERTKATIPPDGDTFAILLEAWEKEGNAVRAKSVFGEMVVRIGWDAANVSAYDSFLSTLVRGGLLDEAFKFLQVMRSKGCLPGINFFSTAVDLVVRKGDYLNAVAIWHMMVSEAGLVPNFSMYSAMIGLHCNAGSIDDALGLLDEMPLNGVFANSVTYNTILEGFIKHRKAREAESFLTEMSKNEQLPTASNCAAAISLFFKEFNPSAAIDVWRCIVEHNITPAEDSAKELIAGLLDFGRFTEVTKRADEMIDMRVELSRSTMENMKRAFAKAGRHQSYDNIARRLKRY

SEQ ID NO: 21225 - protein, 359 aa, Zea mays subsp. mays
  peptide (1)..(359): Ceres Seq. ID no. 15180573
  misc_feature (1)..(358): NCBI GI NO: 21741854 NR Description: OSJNBa0019D11.15
  misc_feature (1)..(356): NCBI GI NO: 14488357 NR Description: unknown protein
  misc_feature (1)..(345): NCBI GI NO: 15223926 NR Description: pentatricopeptide (PPR) repeat-containing protein
  misc_feature (1)..(358): NCBI GI NO: 15223927 NR Description: pentatricopeptide (PPR) repeat-containing protein
  misc_feature (1)..(358): NCBI GI NO: 15219049 NR Description: hypothetical protein [Arabidopsis thaliana]
  misc_feature (1)..(357): NCBI GI NO: 15228767 NR Description: pentatricopeptide (PPR) repeat-containing protein
  misc_feature (1)..(357): NCBI GI NO: 15228788 NR Description: pentatricopeptide (PPR) repeat-containing protein
  misc_feature (1)..(357): NCBI GI NO: 15241508 NR Description: pentatricopeptide (PPR) repeat-containing protein
  misc_feature (1)..(352): NCBI GI NO: 21686921 NR Description: putative reverse transcriptase
  misc_feature (1)..(255): NCBI GI NO: 15228825 NR Description: pentatricopeptide (PPR) repeat-containing protein
MKQEGGGGLVSVATFASVFASYCAAGNIKDAIAALDVMDRYGLKHDAVALNSLLSAICRVEGRAQDAQDVFERTKATIPPDGDTFAILLEAWEKEGNAVRAKSVFGEMVVRIGWDAANVSAYDSFLSTLVRGGLLDEAFKFLQVMRSKGCLPGINFFSTAVDLVVRKGDYLNAVAIWHMMVSEAGLVPNFSMYSAMIGLHCNAGSIDDALGLLDEMPLNGVFANSVTYNTILEGFIKHRKAREAESFLTEMSKNEQLPTASNCAAAISLFFKEFNPSAAIDVWRCIVEHNITPAEDSAKELIAGLLDFGRFTEVTKRADEMIDMRVELSRSTMENMKRAFAKAGRHQSYDNIARRLKRY

SEQ ID NO: 21226 - DNA, 1108 bp, Zea mays subsp. mays
  misc_feature (1)..(1108): Ceres Seq. ID no. 14312699
gattagccgagtcctttattgcaaaaacacgcatcacctccgtggttccgtcgccatctcgttcccgtgacccacccaccccgtcgcgtctcgacctggcttcctcctcctcgaggaccgccgtgcaggagcggagctccccgccgcttctctctccgccttccgagaggcccgacccctgataccacgctgagggcggtggtattaggagattagcgatggcgaggtggcggccggcggcgctgctggtagtggctctggcggcggttctatcggcggcgtggcgggcggatgcgctatcggttacggtgaccgacaccgagtgcatccacgagttcgtgccctatgagggcgacaccgtgtccgggaacttcgtcgtcgtcgaccacgacatcttctggagctccgaccacccaggaatcgacctcacggtaacgtcaccaggtggcaacactgtgtacacattgaagggaaaatctggtgagaaatttgagtttaaagctccaagaggtggcatgtataagttctgcttccataacccatatggagcacctgaaactgtttctttctacatccatgttgggcacatacccaatgagcacaatctgccgaaagatgagcacttggaccctatcaatgttaaaatcgcggagctgaaggaagcattagaatccgtcaccgccgagcagaagtacctaaaagcacgcgaagctcgtcaccgacacactaatgagagcaccagaaagcgtgtcatgttctatacgatggcggagtacctggctttcatggctgctagcgcgttgcaggtcctctacatccgccgcttgttcagtaaaaatgtgggatacaacagagtgtaggatagaaatctacttcaaaggcgacagtggaagcaccgcatatgatggtcggagcgggaaacattctctgccagtttgacaaattgtagttctgcaccctcctttttttgttagtttataagaaacactttaatttatcatcatgtacttttagcaacacttgtgatatgttaagtgcatttggtgctgaacattgttccataactaatcttcagaggtttgttatgaaagttagtatcgctctgccg

SEQ ID NO: 21227 - protein, 213 aa, Zea mays subsp. mays
  peptide (1)..(213): Ceres Seq. ID no. 14312700
  misc_feature (17)..(210): Pfam Name: Pfam Description:  emp24/gp25L/p24 family
  misc_feature (4)..(213): NCBI GI NO: 30017578 NR Description: putative cop-coated vesicle membrane protein
  misc_feature (5)..(213): NCBI GI NO: 17979492 NR Description: AT3g22845/MWI23_22 [Arabidopsis thaliana]
  misc_feature (100)..(213): NCBI GI NO: 22331264 NR Description: expressed protein [Arabidopsis thaliana]
  misc_feature (13)..(213): NCBI GI NO: 21595553 NR Description: putative coated vesicle membrane protein
  misc_feature (17)..(213): NCBI GI NO: 15231496 NR Description: emp24/gp25L/p24 family [Arabidopsis thaliana]
  misc_feature (9)..(204): NCBI GI NO: 40056982 NR Description: emp24/gp25L/p24 family protein
  misc_feature (8)..(204): NCBI GI NO: 13929014 NR Description: coated vesicle membrane protein
  misc_feature (10)..(204): NCBI GI NO: 29477153 NR Description: Similar to coated vesicle membrane protein
  misc_feature (8)..(204): NCBI GI NO: 5803149 NR Description: coated vesicle membrane protein [Homo sapiens]
  misc_feature (8)..(204): NCBI GI NO: 9790015 NR Description: coated vesicle membrane protein; Sid394p
MARWRPAALLVVALAAVLSAAWRADALSVTVTDTECIHEFVPYEGDTVSGNFVVVDHDIFWSSDHPGIDLTVTSPGGNTVYTLKGKSGEKFEFKAPRGGMYKFCFHNPYGAPETVSFYIHVGHIPNEHNLPKDEHLDPINVKIAELKEALESVTAEQKYLKAREARHRHTNESTRKRVMFYTMAEYLAFMAASALQVLYIRRLFSKNVGYNRV

SEQ ID NO: 21228 - protein, 114 aa, Zea mays subsp. mays
  peptide (1)..(114): Ceres Seq. ID no. 14312701
  misc_feature (1)..(111): Pfam Name: Pfam Description:  emp24/gp25L/p24 family
  misc_feature (1)..(114): NCBI GI NO: 30017578 NR Description: putative cop-coated vesicle membrane protein
  misc_feature (1)..(114): NCBI GI NO: 17979492 NR Description: AT3g22845/MWI23_22 [Arabidopsis thaliana]
  misc_feature (1)..(114): NCBI GI NO: 22331264 NR Description: expressed protein [Arabidopsis thaliana]
  misc_feature (1)..(114): NCBI GI NO: 21595553 NR Description: putative coated vesicle membrane protein
  misc_feature (1)..(114): NCBI GI NO: 15231496 NR Description: emp24/gp25L/p24 family [Arabidopsis thaliana]
  misc_feature (1)..(105): NCBI GI NO: 40056982 NR Description: emp24/gp25L/p24 family protein
  misc_feature (1)..(105): NCBI GI NO: 13929014 NR Description: coated vesicle membrane protein
  misc_feature (1)..(105): NCBI GI NO: 29477153 NR Description: Similar to coated vesicle membrane protein
  misc_feature (1)..(105): NCBI GI NO: 5803149 NR Description: coated vesicle membrane protein [Homo sapiens]
  misc_feature (1)..(105): NCBI GI NO: 9790015 NR Description: coated vesicle membrane protein; Sid394p
MYKFCFHNPYGAPETVSFYIHVGHIPNEHNLPKDEHLDPINVKIAELKEALESVTAEQKYLKAREARHRHTNESTRKRVMFYTMAEYLAFMAASALQVLYIRRLFSKNVGYNRV

SEQ ID NO: 21229 - DNA, 2625 bp, Zea mays subsp. mays
  misc_feature (1)..(2625): Ceres Seq. ID no. 13586013
gcagcgaagcaggcctccttcttcacaagcgcttctgctaacaggcatcgtcgcatctctgtataggtatttctgaaaccagccgtcgtacgtccatcccaccgggagcaccggcgacgatgccgccgcgaacggtgtccgatgggggagacgacaacggcaccgacgttgctagccgaacgtcgtcgcaccgccgcacggagcacgggcatgggtacaaagtcggcgtcccaccggagaagaacctcctcgccgagatctctgacgcggtgaaggagacgttcttcgccgacgacccgctgcggcagtacaaggaccagcccaggtccaagaagatctggctcggcctgcagcacatcttcccggtgctcgactggagcaggcattactccctcggcaagttcaagggtgacttcatcgctgggctcaccattgccagcctctgcataccccaggacatcgggtattctaagcttgctaacttgccagcagaggtgggactatacagtagcttcgtgccgcctctgatatacgcagtgatgggcagctccagggacatagccatcggcccagtggccgtggtgtcgctgctgctcggtactctccttcagaatgagatcgaccccaagacacacccgctcgagtacaggcgcctagccttcacagcaacctttttcgcaggggtcactcaggcagccctcggattcttcaggctagggtttatcatagagttcttgtctcatgctgccattgtcggattcatggccggcgctgccatcaccattgcgcttcagcagctgaaaggattccttggaattgcaaacttcaccaagaaatccgatattgtatctgttatgaaatcagtttggggaaatgttcaccatgggtggaattggcagacaatactgataggagcgaccttcctggcattccttctggttgccaagtacattgggaaaaggaataaaaagctcttctgggtgtccgcaatcgcacctctcacttcggtgatcatatccacattttttgtgtacatcactcgtgcagataagcatggcgttgcaattgtcaagaacataaggaaaggcatcaacccaccttcagctagtctaatatacttcaccggcccatacttggcgacaggattcaaaattgggatagtagctggaatgataggcctaacggaagcgattgcaattggaagaacatttgcagccctcaaggattaccggatagatgggaacaaagaaatgatggctctagggaccatgaacattgttggttcactgacttcttgctacgtagccacaggttctttctcgcggtcagcagttaattacatggctggctgcaaaacagcagtgtcaaacgttgttatgtcaattgtcgtaatgcttactttgctactgatcaccccattgttcaagtacactccaaatgccatcctttcctcgatcatcatatcagcagtgcttggtttaattgactatgaatcggcttaccttatctggaaagttgacaaactggactttctagcatgcatgggagcattttttggagtcatattttcatcggtggagtatggcttgctcattgcggttgcaatatctcttgctaaaattcttctccaagtaacacggccaagaacagttttacttggaaaccttccacaaacaactatatacaggaatgtagaacagtatcctgatgctaccaaggttccaggggtgctgattgttagagtggactcagctatatacttcacaaactctaactatgttaaagagagaatcctgaggtggctaagagatgaggaggagcaacaacaggaccagaagttaacaaaaactgagtttctaattgttgacctgtctcctgtaattgatatcgacacaagtggaatccatgctttggaggagttggcgaaagctcttgaaaaacgcaaaattcagctggttcttaccaatcccgggccggcggtgatccagaagctccgctcagcgaaattcacggacatgattggtgaagacaacatattcctcacggtcggcgacgctgtgaagaaatttgctcctaagatggtcgataatgtctgatggagtttctgggtcatgacagtacgagcgagaagtctatctattttgtggcaaagttcagtggcaattatggatttatagagcagaaacaaaacagaacagaacgggagtaaataacatggttcgcggaatggtaaataaagaagatgctccggagttggagtgcatcacgtttgcgaggtgtggttggatagaaaacagatggtggcctagttgggcgtctatgtcagtccttgtggttgtggagtctgttccgcgttggcaagcactcagtgatggagatcaaatgcttcatggatcagcagatatgggtgcctgatgattaacatatcatcattgatcgtgaaagaagagttacctcgttggggtttcaggctttgtgtatatcttacagtacttagcccctttccttgtagtttatgtttttatgacgagcttttacatttggcttatatatgtatattctgtaatgttgatgcattgttaactgttaagtgttcctgaccaaaaaaaagggatgcaaaaacgt

SEQ ID NO: 21230 - protein, 658 aa, Zea mays subsp. mays
  peptide (1)..(658): Ceres Seq. ID no. 13586014
  misc_feature (194)..(505): Pfam Name: Pfam Description:  Sulfate transporter family
  misc_feature (3)..(658): NCBI GI NO: 1217967 NR Description: high affinity sulphate transporter
  misc_feature (3)..(658): NCBI GI NO: 24414264 NR Description: Putative sulfate transporter
  misc_feature (3)..(658): NCBI GI NO: 20162445 NR Description: putative sulphate transporter [Oryza sativa]
  misc_feature (3)..(658): NCBI GI NO: 7489442 NR Description: sulfate transport protein ST1
  misc_feature (3)..(658): NCBI GI NO: 4850271 NR Description: putative high affinity sulfate transporter
  misc_feature (3)..(658): NCBI GI NO: 24421075 NR Description: sulphate transporter [Aegilops speltoides]
  misc_feature (3)..(658): NCBI GI NO: 24421089 NR Description: sulphate transporter [Triticum aestivum]
  misc_feature (3)..(658): NCBI GI NO: 24421087 NR Description: sulphate transporter [Triticum aestivum]
  misc_feature (4)..(658): NCBI GI NO: 24421085 NR Description: sulphate transporter [Triticum aestivum]
  misc_feature (1)..(656): NCBI GI NO: 16197732 NR Description: sulfate transporter [Brassica napus]
MPPRTVSDGGDDNGTDVASRTSSHRRTEHGHGYKVGVPPEKNLLAEISDAVKETFFADDPLRQYKDQPRSKKIWLGLQHIFPVLDWSRHYSLGKFKGDFIAGLTIASLCIPQDIGYSKLANLPAEVGLYSSFVPPLIYAVMGSSRDIAIGPVAVVSLLLGTLLQNEIDPKTHPLEYRRLAFTATFFAGVTQAALGFFRLGFIIEFLSHAAIVGFMAGAAITIALQQLKGFLGIANFTKKSDIVSVMKSVWGNVHHGWNWQTILIGATFLAFLLVAKYIGKRNKKLFWVSAIAPLTSVIISTFFVYITRADKHGVAIVKNIRKGINPPSASLIYFTGPYLATGFKIGIVAGMIGLTEAIAIGRTFAALKDYRIDGNKEMMALGTMNIVGSLTSCYVATGSFSRSAVNYMAGCKTAVSNVVMSIVVMLTLLLITPLFKYTPNAILSSIIISAVLGLIDYESAYLIWKVDKLDFLACMGAFFGVIFSSVEYGLLIAVAISLAKILLQVTRPRTVLLGNLPQTTIYRNVEQYPDATKVPGVLIVRVDSAIYFTNSNYVKERILRWLRDEEEQQQDQKLTKTEFLIVDLSPVIDIDTSGIHALEELAKALEKRKIQLVLTNPGPAVIQKLRSAKFTDMIGEDNIFLTVGDAVKKFAPKMVDNV

SEQ ID NO: 21231 - protein, 518 aa, Zea mays subsp. mays
  peptide (1)..(518): Ceres Seq. ID no. 13586015
  misc_feature (54)..(365): Pfam Name: Pfam Description:  Sulfate transporter family
  misc_feature (1)..(518): NCBI GI NO: 1217967 NR Description: high affinity sulphate transporter
  misc_feature (1)..(518): NCBI GI NO: 24414264 NR Description: Putative sulfate transporter
  misc_feature (1)..(518): NCBI GI NO: 20162445 NR Description: putative sulphate transporter [Oryza sativa]
  misc_feature (1)..(518): NCBI GI NO: 7489442 NR Description: sulfate transport protein ST1
  misc_feature (1)..(518): NCBI GI NO: 4850271 NR Description: putative high affinity sulfate transporter
  misc_feature (1)..(518): NCBI GI NO: 24421075 NR Description: sulphate transporter [Aegilops speltoides]
  misc_feature (1)..(518): NCBI GI NO: 24421089 NR Description: sulphate transporter [Triticum aestivum]
  misc_feature (1)..(518): NCBI GI NO: 24421087 NR Description: sulphate transporter [Triticum aestivum]
  misc_feature (1)..(518): NCBI GI NO: 24421085 NR Description: sulphate transporter [Triticum aestivum]
  misc_feature (1)..(516): NCBI GI NO: 16197732 NR Description: sulfate transporter [Brassica napus]
MGSSRDIAIGPVAVVSLLLGTLLQNEIDPKTHPLEYRRLAFTATFFAGVTQAALGFFRLGFIIEFLSHAAIVGFMAGAAITIALQQLKGFLGIANFTKKSDIVSVMKSVWGNVHHGWNWQTILIGATFLAFLLVAKYIGKRNKKLFWVSAIAPLTSVIISTFFVYITRADKHGVAIVKNIRKGINPPSASLIYFTGPYLATGFKIGIVAGMIGLTEAIAIGRTFAALKDYRIDGNKEMMALGTMNIVGSLTSCYVATGSFSRSAVNYMAGCKTAVSNVVMSIVVMLTLLLITPLFKYTPNAILSSIIISAVLGLIDYESAYLIWKVDKLDFLACMGAFFGVIFSSVEYGLLIAVAISLAKILLQVTRPRTVLLGNLPQTTIYRNVEQYPDATKVPGVLIVRVDSAIYFTNSNYVKERILRWLRDEEEQQQDQKLTKTEFLIVDLSPVIDIDTSGIHALEELAKALEKRKIQLVLTNPGPAVIQKLRSAKFTDMIGEDNIFLTVGDAVKKFAPKMVDNV

SEQ ID NO: 21232 - protein, 444 aa, Zea mays subsp. mays
  peptide (1)..(444): Ceres Seq. ID no. 13586016
  misc_feature (1)..(291): Pfam Name: Pfam Description:  Sulfate transporter family
  misc_feature (1)..(444): NCBI GI NO: 1217967 NR Description: high affinity sulphate transporter
  misc_feature (1)..(444): NCBI GI NO: 24414264 NR Description: Putative sulfate transporter
  misc_feature (1)..(444): NCBI GI NO: 20162445 NR Description: putative sulphate transporter [Oryza sativa]
  misc_feature (1)..(444): NCBI GI NO: 7489442 NR Description: sulfate transport protein ST1
  misc_feature (1)..(444): NCBI GI NO: 4850271 NR Description: putative high affinity sulfate transporter
  misc_feature (1)..(444): NCBI GI NO: 24421075 NR Description: sulphate transporter [Aegilops speltoides]
  misc_feature (1)..(444): NCBI GI NO: 24421089 NR Description: sulphate transporter [Triticum aestivum]
  misc_feature (1)..(444): NCBI GI NO: 24421087 NR Description: sulphate transporter [Triticum aestivum]
  misc_feature (1)..(444): NCBI GI NO: 24421085 NR Description: sulphate transporter [Triticum aestivum]
  misc_feature (1)..(442): NCBI GI NO: 16197732 NR Description: sulfate transporter [Brassica napus]
MAGAAITIALQQLKGFLGIANFTKKSDIVSVMKSVWGNVHHGWNWQTILIGATFLAFLLVAKYIGKRNKKLFWVSAIAPLTSVIISTFFVYITRADKHGVAIVKNIRKGINPPSASLIYFTGPYLATGFKIGIVAGMIGLTEAIAIGRTFAALKDYRIDGNKEMMALGTMNIVGSLTSCYVATGSFSRSAVNYMAGCKTAVSNVVMSIVVMLTLLLITPLFKYTPNAILSSIIISAVLGLIDYESAYLIWKVDKLDFLACMGAFFGVIFSSVEYGLLIAVAISLAKILLQVTRPRTVLLGNLPQTTIYRNVEQYPDATKVPGVLIVRVDSAIYFTNSNYVKERILRWLRDEEEQQQDQKLTKTEFLIVDLSPVIDIDTSGIHALEELAKALEKRKIQLVLTNPGPAVIQKLRSAKFTDMIGEDNIFLTVGDAVKKFAPKMVDNV

SEQ ID NO: 21233 - DNA, 429 bp, Zea mays subsp. mays
  misc_feature (1)..(429): Ceres Seq. ID no. 14312687
cacacccacacagcaagccagcagagcagaaagcagccgcagccccagcccccacaagacgaggcaacaatggcgctagaagcagccaccgccccccgcgcactcctcgccgcgtgcctcgtcctgctggtcctcggcggcggcaccggcccgtcgtcggtgctgcgcggcgccggggcgcaggccggcgggcagtgcctgccgcagctgaaccgcctcctggcgtgccgcgcgtacctggtgcccggcgcgccggaccccagcgcggactgctgcagcgcgctgagcgccgtgtcgcacgagtgcgcggggggcggtggctgcttatatggctgtggctgccttgtgactcgtgtgggtctgtgggctgcggggtggttctaaagctctgcagccccgagtgtttatttattaattattgttgaggtt

SEQ ID NO: 21234 - protein, 140 aa, Zea mays subsp. mays
  peptide (1)..(140): Ceres Seq. ID no. 14312688
HPHSKPAEQKAAAAPAPTRRGNNGARSSHRPPRTPRRVPRPAGPRRRHRPVVGAARRRGAGRRAVPAAAEPPPGVPRVPGARRAGPQRGLLQRAERRVARVRGGRWLLIWLWLPCDSCGSVGCGVVLKLCSPECLFINYC

SEQ ID NO: 21235 - protein, 127 aa, Zea mays subsp. mays
  peptide (1)..(127): Ceres Seq. ID no. 14312689
  misc_feature (24)..(103): NCBI GI NO: 6689676 NR Description: LTP-like protein; anther specific protein
  misc_feature (24)..(98): NCBI GI NO: 400249 NR Description: MFS14 PROTEIN PRECURSOR
  misc_feature (28)..(99): NCBI GI NO: 736716 NR Description: rice anther specific protein
  misc_feature (28)..(99): NCBI GI NO: 283005 NR Description: osc4 protein - rice
  misc_feature (38)..(105): NCBI GI NO: 6137299 NR Description: YY1 protein precursor
HTHTASQQSRKQPQPQPPQDEATMALEAATAPRALLAACLVLLVLGGGTGPSSVLRGAGAQAGGQCLPQLNRLLACRAYLVPGAPDPSADCCSALSAVSHECAGGGGCLYGCGCLVTRVGLWAAGWF

SEQ ID NO: 21236 - protein, 104 aa, Zea mays subsp. mays
  peptide (1)..(104): Ceres Seq. ID no. 14312690
  misc_feature (1)..(80): NCBI GI NO: 6689676 NR Description: LTP-like protein; anther specific protein
  misc_feature (1)..(75): NCBI GI NO: 400249 NR Description: MFS14 PROTEIN PRECURSOR
  misc_feature (5)..(76): NCBI GI NO: 736716 NR Description: rice anther specific protein
  misc_feature (5)..(76): NCBI GI NO: 283005 NR Description: osc4 protein - rice
  misc_feature (15)..(82): NCBI GI NO: 6137299 NR Description: YY1 protein precursor
MALEAATAPRALLAACLVLLVLGGGTGPSSVLRGAGAQAGGQCLPQLNRLLACRAYLVPGAPDPSADCCSALSAVSHECAGGGGCLYGCGCLVTRVGLWAAGWF

SEQ ID NO: 21237 - DNA, 565 bp, Zea mays subsp. mays
  misc_feature (1)..(565): Ceres Seq. ID no. 15175817
actacacacaaacacacaatggcaccagaaaggatgctcctcggcgtctgtgccgtgctgatggtggtcggcgtcacgaacgcggcggagggccaggtggcgtcggtcgtcgtgggcctggcgaggtgcgccgacatcacgaggaagaacatgaaggctgaggccggtttcaagggtcttcaggtggcgatcaagtgcaagaacagcaacggcgagtacgagacaaaggccgtgagtgagatccaaagctccggagccttcagcgtcccactcgccgccgacctccacggcgccgactgccacgcgcagctccacagctttggatctctcttttttgttccataaaattgttagatctttcacttcagattgattttgttcgacatgtgcgtgttcttcttactagttacattctttctgtttctgtggaccattggactgtattctgtcgtgcaataattgttgggaggcctgagtttgttagtcgttccattctgaaaactggtatctgttctgtaatggttgtccctatcaataatgaaataattgcgtttgatccttgaat

SEQ ID NO: 21238 - protein, 114 aa, Zea mays subsp. mays
  peptide (1)..(114): Ceres Seq. ID no. 15175818
  misc_feature (12)..(106): NCBI GI NO: 6689616 NR Description: proline-rich protein [Zea mays]
  misc_feature (8)..(106): NCBI GI NO: 37531090 NR Description: putative proline-rich protein
  misc_feature (8)..(106): NCBI GI NO: 37531088 NR Description: putative proline-rich protein
  misc_feature (9)..(109): NCBI GI NO: 37531058 NR Description: putative proline-rich protein
  misc_feature (8)..(106): NCBI GI NO: 37531092 NR Description: putative proline-rich protein
  misc_feature (8)..(105): NCBI GI NO: 18676394 NR Description: proline-rich protein [Oryza sativa]
  misc_feature (8)..(105): NCBI GI NO: 37531094 NR Description: putative proline-rich protein
  misc_feature (7)..(106): NCBI GI NO: 37531086 NR Description: putative proline-rich protein
  misc_feature (16)..(109): NCBI GI NO: 37531074 NR Description: putative proline-rich protein
  misc_feature (16)..(106): NCBI GI NO: 37531076 NR Description: putative proline-rich protein
TTHKHTMAPERMLLGVCAVLMVVGVTNAAEGQVASVVVGLARCADITRKNMKAEAGFKGLQVAIKCKNSNGEYETKAVSEIQSSGAFSVPLAADLHGADCHAQLHSFGSLFFVP

SEQ ID NO: 21239 - protein, 108 aa, Zea mays subsp. mays
  peptide (1)..(108): Ceres Seq. ID no. 15175819
  misc_feature (6)..(100): NCBI GI NO: 6689616 NR Description: proline-rich protein [Zea mays]
  misc_feature (2)..(100): NCBI GI NO: 37531090 NR Description: putative proline-rich protein
  misc_feature (2)..(100): NCBI GI NO: 37531088 NR Description: putative proline-rich protein
  misc_feature (3)..(103): NCBI GI NO: 37531058 NR Description: putative proline-rich protein
  misc_feature (2)..(100): NCBI GI NO: 37531092 NR Description: putative proline-rich protein
  misc_feature (2)..(99): NCBI GI NO: 18676394 NR Description: proline-rich protein [Oryza sativa]
  misc_feature (2)..(99): NCBI GI NO: 37531094 NR Description: putative proline-rich protein
  misc_feature (1)..(100): NCBI GI NO: 37531086 NR Description: putative proline-rich protein
  misc_feature (10)..(103): NCBI GI NO: 37531074 NR Description: putative proline-rich protein
  misc_feature (10)..(100): NCBI GI NO: 37531076 NR Description: putative proline-rich protein
MAPERMLLGVCAVLMVVGVTNAAEGQVASVVVGLARCADITRKNMKAEAGFKGLQVAIKCKNSNGEYETKAVSEIQSSGAFSVPLAADLHGADCHAQLHSFGSLFFVP

SEQ ID NO: 21240 - protein, 103 aa, Zea mays subsp. mays
  peptide (1)..(103): Ceres Seq. ID no. 15175820
  misc_feature (1)..(95): NCBI GI NO: 6689616 NR Description: proline-rich protein [Zea mays]
  misc_feature (1)..(95): NCBI GI NO: 37531090 NR Description: putative proline-rich protein
  misc_feature (1)..(95): NCBI GI NO: 37531088 NR Description: putative proline-rich protein
  misc_feature (1)..(98): NCBI GI NO: 37531058 NR Description: putative proline-rich protein
  misc_feature (1)..(95): NCBI GI NO: 37531092 NR Description: putative proline-rich protein
  misc_feature (1)..(94): NCBI GI NO: 18676394 NR Description: proline-rich protein [Oryza sativa]
  misc_feature (1)..(94): NCBI GI NO: 37531094 NR Description: putative proline-rich protein
  misc_feature (1)..(95): NCBI GI NO: 37531086 NR Description: putative proline-rich protein
  misc_feature (5)..(98): NCBI GI NO: 37531074 NR Description: putative proline-rich protein
  misc_feature (5)..(95): NCBI GI NO: 37531076 NR Description: putative proline-rich protein
MLLGVCAVLMVVGVTNAAEGQVASVVVGLARCADITRKNMKAEAGFKGLQVAIKCKNSNGEYETKAVSEIQSSGAFSVPLAADLHGADCHAQLHSFGSLFFVP

SEQ ID NO: 21241 - DNA, 1014 bp, Zea mays subsp. mays
  misc_feature (1)..(1014): Ceres Seq. ID no. 15180055
gtcggtagccgtcggttcacttctccaggtaaggaaagggttcgtactcatggcgccgccgcagccaaagtcgggccttttcgttggcatcaacaagggtcatgtcgtcaccaagcgcgagctgcctccccgcccgtgccaccgcaaggggaaatcaacgaagagggtgtctatggtcaggggcctgatcagagaggttgctgggtttgctccttatgagaagcgtatcactgagcagcggcgcttgcgcgagcggagccatggcggacgacgactacaacgaaattgacatggggtatgaggatgagcccccagaaccggagattgaggaaggagctgaagaagagcctgagaacaacgaagatgcccctgatgacgtcataggtggtgagggtgaagataaggaacaggaaaagaccaagcgtgaacgcaaaacaacaaaatacatgacgaagtacgaacgtgcgcgcatcctgggtacacgagccttgcagataagcatgaatgctccagtcatggttgagcttgagggagaaactgaccctcttgagattgcaatgaaggagctgagagcgcgcaagatacccttcacgatcagacggtacttacctgatggaagctatgaagactggggagtagacgagctcattgtggaggactcctggaaacgccaggttggtggagactgaagacggatctacttggcatggaaagggtatgtggtgcagtgggtgtttcctgtagttacaagtcttcgttgccactatgagtggatactgtggcgaatgaaccaagacgaaatgatgttatgttaacgtctgtggttgccttgaactctggaaccgtaatgctagcatggttgttggttgcgctatgcttgttttgtttgtttcagtttcagacatgcagttgcagcgtagccaaatgcgtgctttgtgtgcctaatatctgacactggatgtgatcagtgttgtttatgccaaaggttgagagctgggctccggtggttcctgg

SEQ ID NO: 21242 - protein, 157 aa, Zea mays subsp. mays
  peptide (1)..(157): Ceres Seq. ID no. 15180056
  misc_feature (76)..(129): Pfam Name: Pfam Description:  RNA polymerase Rpb6
  misc_feature (16)..(156): NCBI GI NO: 22093730 NR Description: putative DNA-directed RNA polymerase Iib
  misc_feature (16)..(156): NCBI GI NO: 4960150 NR Description: DNA-directed RNA polymerase IIa
  misc_feature (16)..(157): NCBI GI NO: 15242235 NR Description: DNA-directed RNA polymerase II subunit-relatedprotein
  misc_feature (16)..(157): NCBI GI NO: 15224039 NR Description: DNA-directed RNA polymerase II subunit -related
  misc_feature (39)..(117): NCBI GI NO: 34905016 NR Description: P0456B03.16
  misc_feature (16)..(38): NCBI GI NO: 34905016 NR Description: P0456B03.16
  misc_feature (16)..(150): NCBI GI NO: 17531543 NR Description: gene producing two messages overlaping 3' 5'
  misc_feature (19)..(148): NCBI GI NO: 13786166 NR Description: polymerase II [Rattus norvegicus]
  misc_feature (19)..(148): NCBI GI NO: 6573580 NR Description: Chain A, Hrpabc14
  misc_feature (19)..(148): NCBI GI NO: 11527390 NR Description: DNA directed RNA polymerase II polypeptide F
MRSVSLSSGACASGAMADDDYNEIDMGYEDEPPEPEIEEGAEEEPENNEDAPDDVIGGEGEDKEQEKTKRERKTTKYMTKYERARILGTRALQISMNAPVMVELEGETDPLEIAMKELRARKIPFTIRRYLPDGSYEDWGVDELIVEDSWKRQVGGD

SEQ ID NO: 21243 - protein, 142 aa, Zea mays subsp. mays
  peptide (1)..(142): Ceres Seq. ID no. 15180057
  misc_feature (61)..(114): Pfam Name: Pfam Description:  RNA polymerase Rpb6
  misc_feature (1)..(141): NCBI GI NO: 22093730 NR Description: putative DNA-directed RNA polymerase Iib
  misc_feature (1)..(141): NCBI GI NO: 4960150 NR Description: DNA-directed RNA polymerase IIa
  misc_feature (1)..(142): NCBI GI NO: 15242235 NR Description: DNA-directed RNA polymerase II subunit-relatedprotein
  misc_feature (1)..(142): NCBI GI NO: 15224039 NR Description: DNA-directed RNA polymerase II subunit -related
  misc_feature (24)..(102): NCBI GI NO: 34905016 NR Description: P0456B03.16
  misc_feature (1)..(23): NCBI GI NO: 34905016 NR Description: P0456B03.16
  misc_feature (1)..(135): NCBI GI NO: 17531543 NR Description: gene producing two messages overlaping 3' 5'
  misc_feature (4)..(133): NCBI GI NO: 13786166 NR Description: polymerase II [Rattus norvegicus]
  misc_feature (4)..(133): NCBI GI NO: 6573580 NR Description: Chain A, Hrpabc14
  misc_feature (4)..(133): NCBI GI NO: 11527390 NR Description: DNA directed RNA polymerase II polypeptide F
MADDDYNEIDMGYEDEPPEPEIEEGAEEEPENNEDAPDDVIGGEGEDKEQEKTKRERKTTKYMTKYERARILGTRALQISMNAPVMVELEGETDPLEIAMKELRARKIPFTIRRYLPDGSYEDWGVDELIVEDSWKRQVGGD

SEQ ID NO: 21244 - protein, 132 aa, Zea mays subsp. mays
  peptide (1)..(132): Ceres Seq. ID no. 15180058
  misc_feature (51)..(104): Pfam Name: Pfam Description:  RNA polymerase Rpb6
  misc_feature (1)..(131): NCBI GI NO: 22093730 NR Description: putative DNA-directed RNA polymerase Iib
  misc_feature (1)..(131): NCBI GI NO: 4960150 NR Description: DNA-directed RNA polymerase IIa
  misc_feature (1)..(132): NCBI GI NO: 15242235 NR Description: DNA-directed RNA polymerase II subunit-relatedprotein
  misc_feature (1)..(132): NCBI GI NO: 15224039 NR Description: DNA-directed RNA polymerase II subunit -related
  misc_feature (14)..(92): NCBI GI NO: 34905016 NR Description: P0456B03.16
  misc_feature (1)..(13): NCBI GI NO: 34905016 NR Description: P0456B03.16
  misc_feature (1)..(125): NCBI GI NO: 17531543 NR Description: gene producing two messages overlaping 3' 5'
  misc_feature (1)..(123): NCBI GI NO: 13786166 NR Description: polymerase II [Rattus norvegicus]
  misc_feature (1)..(123): NCBI GI NO: 6573580 NR Description: Chain A, Hrpabc14
  misc_feature (1)..(123): NCBI GI NO: 11527390 NR Description: DNA directed RNA polymerase II polypeptide F
MGYEDEPPEPEIEEGAEEEPENNEDAPDDVIGGEGEDKEQEKTKRERKTTKYMTKYERARILGTRALQISMNAPVMVELEGETDPLEIAMKELRARKIPFTIRRYLPDGSYEDWGVDELIVEDSWKRQVGGD

SEQ ID NO: 21245 - DNA, 1515 bp, Zea mays subsp. mays
  misc_feature (1)..(1515): Ceres Seq. ID no. 12566239
gataatagttccttgaaaaccggtgcctttttctagcggcgaggaggcaggcggtagcggaatctggcaccggccatcacgtcccctcccgccgcttcctcctccctgccctacctttccccagatccgaatccattaaaccagcggatcttgcatcggggcgcgtccacggcatccgggcaagcgagtggtggagccagcagccatgagatggtatgcatcggtagcctcctgagggcgctggtgctgcgtgcggcgtcgtctgcgggcaggcgccgggggcccaggattctgtgtggccgcgcgacggatgtgcgcgtgacgccacggcacggacacggctggcgcgggttccgggcggtcacgggaaggatgatgctggactcctctgagtctgcctcttccgccgccgccgccgccgcggaggcgggagctggggcggtggcaggccaggcgcagccgcagcgccgcgcggtgggggccgtgccccaggcgcacgatggtggctacgccagcggcggatgggagagagaagatggtaaactgagttgtggatactcaagttttagagggaagagagctacaatggaggatttctatgatgtaaaactaactgaaattgatggacaagctattagcctgttcggtgtttttgacggtcatggtggatcacgtgctgctgagtatttgagggagcacttgtttgagaaccttctcaagcaccctgatttcttgacggatacaaagcttgctataagcgaaacatatcagaaaaccgatacagatttcttggaatcggaagcaagtgctttcagagatgatggttcaacagcttcaactgcaattttggtgggtgaccgtctgtatgttgcaaatgttggtgattctcgtgctgttatttcaaaagctggcaaagctatggcactttcagaagatcacaaacctaacaggattgatgagcgaaagagaatagaaaatgctggtggtattgtcatttgggctggtacttggagggtaggtggtgtattggcgatgtctcgtgcatttggcaatcgtttactgaagccatatgtggtggcggaacctgaaattcaggaagaacagttcagtgatgagctggaatgcctggttctcgctagtgacgggctttgggatgttgtggaaaatgaggaagccgtttcccttggcaaatcagaggacacgccagagtctgcagctcggaaattgacagagatcgcttattctcgtggcagcgctgacaatatcacgtgtatcgtggttcaatttcaccatgacaaaaccggatgagccatgtggcggccaatttcagttgtaccctgcttcaggctattattatcctgcaagccgggtggtggggcttctctcagatttatcgctcttgtagcaacttccaagaactcgtccattgattcttttgttgtcttgtaggaaacatttgttccaacaggtgtaatagatattttcaatgggttaatttctaataaaactatgttt

SEQ ID NO: 21246 - protein, 365 aa, Zea mays subsp. mays
  peptide (1)..(365): Ceres Seq. ID no. 12566240
  misc_feature (112)..(352): Pfam Name: Pfam Description:  Protein phosphatase 2C
  misc_feature (1)..(364): NCBI GI NO: 18423476 NR Description: protein phosphatase 2C
  misc_feature (1)..(364): NCBI GI NO: 18086420 NR Description: AT5g53140/MFH8_8 [Arabidopsis thaliana]
  misc_feature (126)..(364): NCBI GI NO: 9757995 NR Description: protein phosphatase 2C-like [Arabidopsis thaliana]
  misc_feature (126)..(365): NCBI GI NO: 34912708 NR Description: putative protein phosphatase 2C-like protein
  misc_feature (94)..(365): NCBI GI NO: 30689144 NR Description: protein phosphatase 2C (PP2C), putative
  misc_feature (101)..(364): NCBI GI NO: 15238651 NR Description: Protein phosphatase 2C-like protein
  misc_feature (101)..(364): NCBI GI NO: 18416366 NR Description: protein phosphatase 2C -like protein
  misc_feature (102)..(359): NCBI GI NO: 20146110 NR Description: protein phosphatase 2C
  misc_feature (97)..(361): NCBI GI NO: 38345197 NR Description: OSJNBa0015K02.7
  misc_feature (101)..(364): NCBI GI NO: 11358728 NR Description: protein phosphatase 2C-like protein
MVCIGSLLRALVLRAASSAGRRRGPRILCGRATDVRVTPRHGHGWRGFRAVTGRMMLDSSESASSAAAAAAEAGAGAVAGQAQPQRRAVGAVPQAHDGGYASGGWEREDGKLSCGYSSFRGKRATMEDFYDVKLTEIDGQAISLFGVFDGHGGSRAAEYLREHLFENLLKHPDFLTDTKLAISETYQKTDTDFLESEASAFRDDGSTASTAILVGDRLYVANVGDSRAVISKAGKAMALSEDHKPNRIDERKRIENAGGIVIWAGTWRVGGVLAMSRAFGNRLLKPYVVAEPEIQEEQFSDELECLVLASDGLWDVVENEEAVSLGKSEDTPESAARKLTEIAYSRGSADNITCIVVQFHHDKTG

SEQ ID NO: 21247 - protein, 311 aa, Zea mays subsp. mays
  peptide (1)..(311): Ceres Seq. ID no. 12566241
  misc_feature (58)..(298): Pfam Name: Pfam Description:  Protein phosphatase 2C
  misc_feature (1)..(310): NCBI GI NO: 18423476 NR Description: protein phosphatase 2C
  misc_feature (1)..(310): NCBI GI NO: 18086420 NR Description: AT5g53140/MFH8_8 [Arabidopsis thaliana]
  misc_feature (72)..(310): NCBI GI NO: 9757995 NR Description: protein phosphatase 2C-like [Arabidopsis thaliana]
  misc_feature (72)..(311): NCBI GI NO: 34912708 NR Description: putative protein phosphatase 2C-like protein
  misc_feature (40)..(311): NCBI GI NO: 30689144 NR Description: protein phosphatase 2C (PP2C), putative
  misc_feature (47)..(310): NCBI GI NO: 15238651 NR Description: Protein phosphatase 2C-like protein
  misc_feature (47)..(310): NCBI GI NO: 18416366 NR Description: protein phosphatase 2C -like protein
  misc_feature (48)..(305): NCBI GI NO: 20146110 NR Description: protein phosphatase 2C
  misc_feature (43)..(307): NCBI GI NO: 38345197 NR Description: OSJNBa0015K02.7
  misc_feature (47)..(310): NCBI GI NO: 11358728 NR Description: protein phosphatase 2C-like protein
MMLDSSESASSAAAAAAEAGAGAVAGQAQPQRRAVGAVPQAHDGGYASGGWEREDGKLSCGYSSFRGKRATMEDFYDVKLTEIDGQAISLFGVFDGHGGSRAAEYLREHLFENLLKHPDFLTDTKLAISETYQKTDTDFLESEASAFRDDGSTASTAILVGDRLYVANVGDSRAVISKAGKAMALSEDHKPNRIDERKRIENAGGIVIWAGTWRVGGVLAMSRAFGNRLLKPYVVAEPEIQEEQFSDELECLVLASDGLWDVVENEEAVSLGKSEDTPESAARKLTEIAYSRGSADNITCIVVQFHHDKTG

SEQ ID NO: 21248 - protein, 310 aa, Zea mays subsp. mays
  peptide (1)..(310): Ceres Seq. ID no. 12566242
  misc_feature (57)..(297): Pfam Name: Pfam Description:  Protein phosphatase 2C
  misc_feature (1)..(309): NCBI GI NO: 18423476 NR Description: protein phosphatase 2C
  misc_feature (1)..(309): NCBI GI NO: 18086420 NR Description: AT5g53140/MFH8_8 [Arabidopsis thaliana]
  misc_feature (71)..(309): NCBI GI NO: 9757995 NR Description: protein phosphatase 2C-like [Arabidopsis thaliana]
  misc_feature (71)..(310): NCBI GI NO: 34912708 NR Description: putative protein phosphatase 2C-like protein
  misc_feature (39)..(310): NCBI GI NO: 30689144 NR Description: protein phosphatase 2C (PP2C), putative
  misc_feature (46)..(309): NCBI GI NO: 15238651 NR Description: Protein phosphatase 2C-like protein
  misc_feature (46)..(309): NCBI GI NO: 18416366 NR Description: protein phosphatase 2C -like protein
  misc_feature (47)..(304): NCBI GI NO: 20146110 NR Description: protein phosphatase 2C
  misc_feature (42)..(306): NCBI GI NO: 38345197 NR Description: OSJNBa0015K02.7
  misc_feature (46)..(309): NCBI GI NO: 11358728 NR Description: protein phosphatase 2C-like protein
MLDSSESASSAAAAAAEAGAGAVAGQAQPQRRAVGAVPQAHDGGYASGGWEREDGKLSCGYSSFRGKRATMEDFYDVKLTEIDGQAISLFGVFDGHGGSRAAEYLREHLFENLLKHPDFLTDTKLAISETYQKTDTDFLESEASAFRDDGSTASTAILVGDRLYVANVGDSRAVISKAGKAMALSEDHKPNRIDERKRIENAGGIVIWAGTWRVGGVLAMSRAFGNRLLKPYVVAEPEIQEEQFSDELECLVLASDGLWDVVENEEAVSLGKSEDTPESAARKLTEIAYSRGSADNITCIVVQFHHDKTG

SEQ ID NO: 21249 - DNA, 1346 bp, Zea mays subsp. mays
  misc_feature (1)..(1346): Ceres Seq. ID no. 12633565
aatcccattttcggtgcccgcgcccgtgccgtaccgtccctatcacaccggatcgccactcgctcccccccaccccactccgccccacctccgcgcctcagatccatccccaaccggcaaccctagcgccgggttcctcctcctcggatccgcccgccgccgcgcggactccattgccagaggtgatcgagggggagagatagagcttgggtggtcggattagggagagagggaggggaggatgtccagacggtcgttgaacccgagccggcgggtggcggacgggggtctgccgacagtcggaggcctgttccaccccaagtcacgctcgcctcccgtgcttactattgccctagtcgtcctgggtgtcattcttctcgtcgcctacttcaacagcggctcaggtcggttaaagattctcggtgtaactgttacaagcagagagtctgtgaccaggtctgaaggttcttgcacatcagaagttatgcgggtgcttccatatcttaaaaaggcatatggaaatgccatgcaaaaggttctccatgtaggccctgatagttgtacagtagtttctaatttgttgaaagaaggaaaggttgaagcttggggagtggagccttatgatttggaagatactgacagtacttgcaaaagcctcgtgcgcaagggctttgtccgtatgtctgatattaagttcccccttccgtaccgtccagattcttttaatcttgttgtggtgtcagatgctttagattatctgaccccaaggtatctgaacaaaacacttccagatttagcaagggtttccacagatggccttgttatttttgctggcaacccaggtcagcagaaagctaaggtctcagaactaccaaaatttggaagaccggcaaagttgcggagttcttcatggtggacacggtactttgtccagaccggcttgacagagaacgaagggccgctgaagaaattcgaagaggctacatccaagaacaaatacaaaccaggttgtcagatcttccacctgagttcgccaaggtgatgcgcatccatagcaccttgaattgttgtcacaccccctgccctcctccggttggcttgctcattgttcgtgtggaggaaatcgtcgcaaaaaaagccatcaggaataggttagcttatgtagagaggctccgacacttgttgctagaaattcactctggaaattaaattgtgtccccaatgattgcaaactggagccccgctgggatatatatgttagaactttcacgctgttgtaccgctgtgctatccatgtattgagcagtttgaaatgtaaagctcttgatgatcaaaaaaaaaaaaaa

SEQ ID NO: 21250 - protein, 266 aa, Zea mays subsp. mays
  peptide (1)..(266): Ceres Seq. ID no. 12633566
  misc_feature (1)..(264): NCBI GI NO: 34895744 NR Description: P0019D06.30
  misc_feature (1)..(262): NCBI GI NO: 18408931 NR Description: expressed protein; protein id: At3g49720
  misc_feature (1)..(262): NCBI GI NO: 21593192 NR Description: unknown [Arabidopsis thaliana]
  misc_feature (1)..(262): NCBI GI NO: 18424995 NR Description: putative protein; protein id: At5g65810
  misc_feature (96)..(262): NCBI GI NO: 16649137 NR Description: Unknown protein [Arabidopsis thaliana]
  misc_feature (1)..(216): NCBI GI NO: 9758568 NR Description: emb|CAB66910
MSRRSLNPSRRVADGGLPTVGGLFHPKSRSPPVLTIALVVLGVILLVAYFNSGSGRLKILGVTVTSRESVTRSEGSCTSEVMRVLPYLKKAYGNAMQKVLHVGPDSCTVVSNLLKEGKVEAWGVEPYDLEDTDSTCKSLVRKGFVRMSDIKFPLPYRPDSFNLVVVSDALDYLTPRYLNKTLPDLARVSTDGLVIFAGNPGQQKAKVSELPKFGRPAKLRSSSWWTRYFVQTGLTENEGPLKKFEEATSKNKYKPGCQIFHLSSPR

SEQ ID NO: 21251 - protein, 185 aa, Zea mays subsp. mays
  peptide (1)..(185): Ceres Seq. ID no. 12633567
  misc_feature (1)..(183): NCBI GI NO: 34895744 NR Description: P0019D06.30
  misc_feature (1)..(181): NCBI GI NO: 18408931 NR Description: expressed protein; protein id: At3g49720
  misc_feature (1)..(181): NCBI GI NO: 21593192 NR Description: unknown [Arabidopsis thaliana]
  misc_feature (1)..(181): NCBI GI NO: 18424995 NR Description: putative protein; protein id: At5g65810
  misc_feature (15)..(181): NCBI GI NO: 16649137 NR Description: Unknown protein [Arabidopsis thaliana]
  misc_feature (1)..(135): NCBI GI NO: 9758568 NR Description: emb|CAB66910
MRVLPYLKKAYGNAMQKVLHVGPDSCTVVSNLLKEGKVEAWGVEPYDLEDTDSTCKSLVRKGFVRMSDIKFPLPYRPDSFNLVVVSDALDYLTPRYLNKTLPDLARVSTDGLVIFAGNPGQQKAKVSELPKFGRPAKLRSSSWWTRYFVQTGLTENEGPLKKFEEATSKNKYKPGCQIFHLSSPR

SEQ ID NO: 21252 - protein, 171 aa, Zea mays subsp. mays
  peptide (1)..(171): Ceres Seq. ID no. 12633568
  misc_feature (1)..(169): NCBI GI NO: 34895744 NR Description: P0019D06.30
  misc_feature (1)..(167): NCBI GI NO: 18408931 NR Description: expressed protein; protein id: At3g49720
  misc_feature (1)..(167): NCBI GI NO: 21593192 NR Description: unknown [Arabidopsis thaliana]
  misc_feature (1)..(167): NCBI GI NO: 18424995 NR Description: putative protein; protein id: At5g65810
  misc_feature (1)..(167): NCBI GI NO: 16649137 NR Description: Unknown protein [Arabidopsis thaliana]
  misc_feature (1)..(121): NCBI GI NO: 9758568 NR Description: emb|CAB66910
MQKVLHVGPDSCTVVSNLLKEGKVEAWGVEPYDLEDTDSTCKSLVRKGFVRMSDIKFPLPYRPDSFNLVVVSDALDYLTPRYLNKTLPDLARVSTDGLVIFAGNPGQQKAKVSELPKFGRPAKLRSSSWWTRYFVQTGLTENEGPLKKFEEATSKNKYKPGCQIFHLSSPR

SEQ ID NO: 21253 - DNA, 836 bp, Zea mays subsp. mays
  misc_feature (1)..(836): Ceres Seq. ID no. 13586031
aaaccaaaataatcgccaccgctctccgcaccgaaccgaagcagcggcgatgtcggcggagaagccggctcccgtgcgcgtgctctactgcggcgtctgcggcctcccggccgagtactgcgagttcggccccgacttcgagcgctgcaagccctggctgcgcgcgcacgcgcccggcgtctaccccgacgaccttgtcgccgcctcctcctcacccggcggcggcgacaaggacgtcgacaaggtcggggatcgcctccagggcgtcgggatctccgacggctccaccggcgccgcaggggatgcttccgcgtctaagccccaagaggcgaaacgcctgcctggtggtaagctcaagaaaaaggagaagcaagaagtggtcattgagaagattgtccgtaacaagcgcaaatgtgttactgtggtgaaagggcttgaattgtttggtgtaaagcttagtgatgcttcgaagaagcttgggaagaagtttgcaaccggagcttctgttgttaagggccctacggagaaggagcaaatcgacgtacaaggggacatctcatatgatattgtggagttcattacagatacatggcctgatgtacctgagtcggccattttcttcattgaagatggaaggaaggttcctgctgcttgatgccatatggtttataaggcacgagaccaggcatatagggccataccagctcgtctcttgtccgaagtcatgaactgttgttccggtttttaggcctacttcacaagtggcatttttttttaccaccgtcacctgcttccatgtatgaaatcaaatctatacagttaccaatttactgttt

SEQ ID NO: 21254 - protein, 217 aa, Zea mays subsp. mays
  peptide (1)..(217): Ceres Seq. ID no. 13586032
  misc_feature (9)..(208): NCBI GI NO: 34903554 NR Description: P0001B06.29
  misc_feature (19)..(216): NCBI GI NO: 22326739 NR Description: expressed protein [Arabidopsis thaliana]
  misc_feature (105)..(216): NCBI GI NO: 11357422 NR Description: hypothetical protein F14F18
  misc_feature (19)..(108): NCBI GI NO: 11357422 NR Description: hypothetical protein F14F18
  misc_feature (27)..(210): NCBI GI NO: 19113595 NR Description: hypothetical protein [Schizosaccharomyces pombe]
  misc_feature (24)..(205): NCBI GI NO: 34872329 NR Description: similar to density-regulated protein
  misc_feature (27)..(193): NCBI GI NO: 6322474 NR Description: Hypothetical ORF; Yjr014wp
  misc_feature (24)..(191): NCBI GI NO: 4755083 NR Description: density regulated protein drp1 [Homo sapiens]
  misc_feature (24)..(191): NCBI GI NO: 13386092 NR Description: density-regulated protein [Mus musculus]
  misc_feature (87)..(205): NCBI GI NO: 4755083 NR Description: density regulated protein drp1 [Homo sapiens]
NQNNRHRSPHRTEAAAMSAEKPAPVRVLYCGVCGLPAEYCEFGPDFERCKPWLRAHAPGVYPDDLVAASSSPGGGDKDVDKVGDRLQGVGISDGSTGAAGDASASKPQEAKRLPGGKLKKKEKQEVVIEKIVRNKRKCVTVVKGLELFGVKLSDASKKLGKKFATGASVVKGPTEKEQIDVQGDISYDIVEFITDTWPDVPESAIFFIEDGRKVPAA

SEQ ID NO: 21255 - protein, 201 aa, Zea mays subsp. mays
  peptide (1)..(201): Ceres Seq. ID no. 13586033
  misc_feature (1)..(192): NCBI GI NO: 34903554 NR Description: P0001B06.29
  misc_feature (3)..(200): NCBI GI NO: 22326739 NR Description: expressed protein [Arabidopsis thaliana]
  misc_feature (89)..(200): NCBI GI NO: 11357422 NR Description: hypothetical protein F14F18
  misc_feature (3)..(92): NCBI GI NO: 11357422 NR Description: hypothetical protein F14F18
  misc_feature (11)..(194): NCBI GI NO: 19113595 NR Description: hypothetical protein [Schizosaccharomyces pombe]
  misc_feature (8)..(189): NCBI GI NO: 34872329 NR Description: similar to density-regulated protein
  misc_feature (11)..(177): NCBI GI NO: 6322474 NR Description: Hypothetical ORF; Yjr014wp
  misc_feature (8)..(175): NCBI GI NO: 4755083 NR Description: density regulated protein drp1 [Homo sapiens]
  misc_feature (8)..(175): NCBI GI NO: 13386092 NR Description: density-regulated protein [Mus musculus]
  misc_feature (71)..(189): NCBI GI NO: 4755083 NR Description: density regulated protein drp1 [Homo sapiens]
MSAEKPAPVRVLYCGVCGLPAEYCEFGPDFERCKPWLRAHAPGVYPDDLVAASSSPGGGDKDVDKVGDRLQGVGISDGSTGAAGDASASKPQEAKRLPGGKLKKKEKQEVVIEKIVRNKRKCVTVVKGLELFGVKLSDASKKLGKKFATGASVVKGPTEKEQIDVQGDISYDIVEFITDTWPDVPESAIFFIEDGRKVPAA

SEQ ID NO: 21256 - protein, 141 aa, Zea mays subsp. mays
  peptide (1)..(141): Ceres Seq. ID no. 13586034
TKIIATALRTEPKQRRCRRRSRLPCACSTAASAASRPSTASSAPTSSAASPGCARTRPASTPTTLSPPPPHPAAATRTSTRSGIASRASGSPTAPPAPQGMLPRLSPKRRNACLVVSSRKRRSKKWSLRRLSVTSANVLLW

SEQ ID NO: 21257 - DNA, 1138 bp, Zea mays subsp. mays
  misc_feature (1)..(1138): Ceres Seq. ID no. 15180067
aaaaacactttccgtcagctgcaagaaaggagaaccaattctccctcgaaaaaaaagtcccgtcgttttcctcacagttccttcggcctccgcttccactcccacccgccccgccgtcgcgatgcacaagacggctcaggcatggttcaccggcgggaccgccgcctcctccggcgccgctgccgagtcgcagccgtccctgctcgctgactggaactcgtacgcccccacccgctccgacgcctcctcctcctccccgctccccttcgacatcgaagccgccgtccgctccgccaacgacaccgtctccggcaccttaagctcggtgaccaagggcgtgcgggagctgccggggagcttccagagcgccaccagcagcttcccctccggaaaggctctcatgtacttcggcctcttcctcgccaccggcatcttcttcgtcttcatcgccttcgcgctcttcctccccgtcatggtgctcatgccacagaagttcgccatctccttcacgctcgggtgcgcgctcatcattgcctcgctcttcgcgcttaaggggccagccaaccagctcgcccacatgacttccaaggagaggctaccgttttcagttggatttattggatgcatggtcggtacaatttatgtttctatggtgcttcacagctatttcctctctgtgatcttctcagtccttcaggttctggcccttgcatattacaccatatcctacttccctggaggatctagtggactgaaattcatctcgtctggtctgttgtcctcggcaacaagttgttttggtcgatgaccttcctttgtcaattgtcatacatttatttgatcataccatgttatcgctttaagatttttgtatgtagctgctgatcatccctttgaggctttgtttggtactctagtattgactcatctacatgtgttgaggtggattgatgtgtaaattagtttaagttacatcccatgatcccaatccacctcaatacatgtggattgtggtcaatactagagtacccaaactaggtctgatagagattccatggtgtttcctctcctgtcatcctgtttgtttgtctagacttggactggtgttgaatatataattatatagattatagagtgg

SEQ ID NO: 21258 - protein, 268 aa, Zea mays subsp. mays
  peptide (1)..(268): Ceres Seq. ID no. 15180068
  misc_feature (45)..(268): NCBI GI NO: 18416771 NR Description: expressed protein [Arabidopsis thaliana]
  misc_feature (41)..(268): NCBI GI NO: 15241114 NR Description: expressed protein [Arabidopsis thaliana]
  misc_feature (109)..(268): NCBI GI NO: 7486785 NR Description: hypothetical protein M3E9
  misc_feature (43)..(107): NCBI GI NO: 7486785 NR Description: hypothetical protein M3E9
  misc_feature (131)..(254): NCBI GI NO: 40746734 NR Description: hypothetical protein AN1297.2
  misc_feature (121)..(268): NCBI GI NO: 23619167 NR Description: hypothetical protein, conserved
  misc_feature (133)..(262): NCBI GI NO: 6319366 NR Description: similar to mammalian syntaxin 5; Sft2p
  misc_feature (99)..(256): NCBI GI NO: 39597537 NR Description: Hypothetical protein CBG03219
  misc_feature (114)..(256): NCBI GI NO: 17532001 NR Description: mammalian syntaxin 5 like (25.7 kD) (2J246)
  misc_feature (152)..(262): NCBI GI NO: 19571762 NR Description: similar to C18E9.10 [Tetraodon nigroviridis]
KTLSVSCKKGEPILPRKKSPVVFLTVPSASASTPTRPAVAMHKTAQAWFTGGTAASSGAAAESQPSLLADWNSYAPTRSDASSSSPLPFDIEAAVRSANDTVSGTLSSVTKGVRELPGSFQSATSSFPSGKALMYFGLFLATGIFFVFIAFALFLPVMVLMPQKFAISFTLGCALIIASLFALKGPANQLAHMTSKERLPFSVGFIGCMVGTIYVSMVLHSYFLSVIFSVLQVLALAYYTISYFPGGSSGLKFISSGLLSSATSCFGR

SEQ ID NO: 21259 - protein, 228 aa, Zea mays subsp. mays
  peptide (1)..(228): Ceres Seq. ID no. 15180069
  misc_feature (5)..(228): NCBI GI NO: 18416771 NR Description: expressed protein [Arabidopsis thaliana]
  misc_feature (1)..(228): NCBI GI NO: 15241114 NR Description: expressed protein [Arabidopsis thaliana]
  misc_feature (69)..(228): NCBI GI NO: 7486785 NR Description: hypothetical protein M3E9
  misc_feature (3)..(67): NCBI GI NO: 7486785 NR Description: hypothetical protein M3E9
  misc_feature (91)..(214): NCBI GI NO: 40746734 NR Description: hypothetical protein AN1297.2
  misc_feature (81)..(228): NCBI GI NO: 23619167 NR Description: hypothetical protein, conserved
  misc_feature (93)..(222): NCBI GI NO: 6319366 NR Description: similar to mammalian syntaxin 5; Sft2p
  misc_feature (59)..(216): NCBI GI NO: 39597537 NR Description: Hypothetical protein CBG03219
  misc_feature (74)..(216): NCBI GI NO: 17532001 NR Description: mammalian syntaxin 5 like (25.7 kD) (2J246)
  misc_feature (112)..(222): NCBI GI NO: 19571762 NR Description: similar to C18E9.10 [Tetraodon nigroviridis]
MHKTAQAWFTGGTAASSGAAAESQPSLLADWNSYAPTRSDASSSSPLPFDIEAAVRSANDTVSGTLSSVTKGVRELPGSFQSATSSFPSGKALMYFGLFLATGIFFVFIAFALFLPVMVLMPQKFAISFTLGCALIIASLFALKGPANQLAHMTSKERLPFSVGFIGCMVGTIYVSMVLHSYFLSVIFSVLQVLALAYYTISYFPGGSSGLKFISSGLLSSATSCFGR

SEQ ID NO: 21260 - protein, 135 aa, Zea mays subsp. mays
  peptide (1)..(135): Ceres Seq. ID no. 15180070
  misc_feature (1)..(135): NCBI GI NO: 18416771 NR Description: expressed protein [Arabidopsis thaliana]
  misc_feature (1)..(135): NCBI GI NO: 15241114 NR Description: expressed protein [Arabidopsis thaliana]
  misc_feature (1)..(135): NCBI GI NO: 7486785 NR Description: hypothetical protein M3E9
  misc_feature (1)..(121): NCBI GI NO: 40746734 NR Description: hypothetical protein AN1297.2
  misc_feature (1)..(135): NCBI GI NO: 23619167 NR Description: hypothetical protein, conserved
  misc_feature (1)..(129): NCBI GI NO: 6319366 NR Description: similar to mammalian syntaxin 5; Sft2p
  misc_feature (1)..(123): NCBI GI NO: 39597537 NR Description: Hypothetical protein CBG03219
  misc_feature (1)..(123): NCBI GI NO: 17532001 NR Description: mammalian syntaxin 5 like (25.7 kD) (2J246)
  misc_feature (19)..(129): NCBI GI NO: 19571762 NR Description: similar to C18E9.10 [Tetraodon nigroviridis]
  misc_feature (12)..(119): NCBI GI NO: 40786408 NR Description: hypothetical protein LOC375035 [Homo sapiens]
MYFGLFLATGIFFVFIAFALFLPVMVLMPQKFAISFTLGCALIIASLFALKGPANQLAHMTSKERLPFSVGFIGCMVGTIYVSMVLHSYFLSVIFSVLQVLALAYYTISYFPGGSSGLKFISSGLLSSATSCFGR

SEQ ID NO: 21261 - DNA, 667 bp, Zea mays subsp. mays
  misc_feature (1)..(667): Ceres Seq. ID no. 12484007
gcgccgtcccgtgctccctccgctagttctcccaattccttccccacctcctcggtcgtcgcctcccccagagagcaggagccgcctcgtccctgccggtcccgacccccatcccgtccgcgtccaacgccatgaatcccgagtacgggctcgggttcaggaggtacgacgacgccagcagcggcagcggcaggctgaggtgctttgggcactccgggatgggcggctcgaccgggttctgcgacgtggagaacggcttcgccatcgcggtgacggtgaacaagctgtctctgggcagcgtcacgcgcggcgtcgtccggctcgtcctcgaggagctgggcctgcccgtgccggacgagtactcggccaccggggagaaggggcctgacatgatgctcaacctgacgacaacgacgacgactacgccgccgcaactgagatgacggcgaaactgagattaccaggttgggttcgtaataatctgtggaacaagatatatagcgagcagaaggaaggtggggtacagggatttggtggacagtatatatacgcgtgccattttgattttgacgtggcatgtaaaactcggcaaattctggtatattacgaagctgggtgctgggaatagtggccagcagtacaagaaatggacatgctagtttgttgc

SEQ ID NO: 21262 - protein, 128 aa, Zea mays subsp. mays
  peptide (1)..(128): Ceres Seq. ID no. 12484008
RRPVLPPLVLPIPSPPPRSSPPPESRSRLVPAGPDPHPVRVQRHESRVRARVQEVRRRQQRQRQAEVLWALRDGRLDRVLRRGERLRHRGDGEQAVSGQRHARRRPARPRGAGPARAGRVLGHRGEGA

SEQ ID NO: 21263 - protein, 103 aa, Zea mays subsp. mays
  peptide (1)..(103): Ceres Seq. ID no. 12484009
  misc_feature (4)..(89): NCBI GI NO: 18420844 NR Description: putative protein; protein id: At5g24810
MNPEYGLGFRRYDDASSGSGRLRCFGHSGMGGSTGFCDVENGFAIAVTVNKLSLGSVTRGVVRLVLEELGLPVPDEYSATGEKGPDMMLNLTTTTTTTPPQLR

SEQ ID NO: 21264 - protein, 74 aa, Zea mays subsp. mays
  peptide (1)..(74): Ceres Seq. ID no. 12484010
  misc_feature (1)..(60): NCBI GI NO: 18420844 NR Description: putative protein; protein id: At5g24810
MGGSTGFCDVENGFAIAVTVNKLSLGSVTRGVVRLVLEELGLPVPDEYSATGEKGPDMMLNLTTTTTTTPPQLR

SEQ ID NO: 21265 - DNA, 1626 bp, Zea mays subsp. mays
  misc_feature (1)..(1626): Ceres Seq. ID no. 12350565
gcacgagaccattacctagaacatcctaatcgaaaaacggcctttgcatttgcatgccatgcgcacacaaacacatgacatgacatgacatgacacaccagacttgacgctctcctgtctttatatgccggcgcggcgcgcgggcgtgcgtgcgcgcgcagatggcggaggaggagcagatggcggagctggtgatggcgcagtgcggggtgccgagcggcggcgagggggggcgcgtggccgccgggattcgcgtgggacggcggcgccgcggacgcgtcgcgtgggatgtacggcgatgcggtgccgccgtcgctcagcctgttcgactgccgccggcagcgtcgcggcggacccgttccaggcggtgcagcaggcgccgggcgccggtggtggtggggtggacgacgtcgccgggtggcagtatgctgctgcggctgggagcgagctggaggcggtgcagctgcagcaggagcagcagccgcgcgatgcggactcggggtccgaggtcagcgacatgcagggggacccagaggacgacggcgacggcgacgcgcaggggcgtggcggcggcaagggcggcgggaagcggcagcagtgcaagaacctcgaggcggagcggaagcggcggaagaagctcaacgagcggctctacaagctcaggtcgctcgtcccgaacatctccaagatggaccgcgcggcgatcctcggggacgccatcgactacatcgtgggcctgcagaaccaggtgaaggcgctgcaggacgagctggaggacccggcggacggcgccggcgcccccgacgtcctcctggaccacccgccgccggcgagcctggtggggctggagaacgacgagtcgccgcccacgagccaccagcacccgctcgccgggaccaagagggcccgtgcggcggcggaggaggaggaggaggagaaggggaatgacatggagccgcaggtggaggtgcggcaggtggaggccaacgagttcttcctgcagatgctgtgcgagcgccggccccgggcgcttcgtccagatcatggactccatcgccgacctgggactggaggtcaccaacgtcaacgtcacctcccacgagagcctcgtcctcaacgtcttccgcgccgccaggcgggacaatgaggtggcagtgcaggcggacagactgagggactcgctgctggaggtgatgcgggagccgtacggcgtatggtcgtcgtcggcgccgcccgtggggatgagcggcagcggcatcgccgacgtgaagcatgacagcgtggacatgaagctcgatggcatcatcgacgggcaggcggcaccgagcgtcgcagtgggggtttcagaggatcactacggcggctacaaccatctcctccaatacctcgcttgatcattatttaattgcgttcgttcatgttgaaagttcgatcaaactatcaaaggatggatcaactaataaaaacgggatccatatataagtaactgtgaattgcgatcattaattgtatgcatacaagcatatggtcgtggattaaagtttgttaattgggttttctcactgcttttctggatctttcttgtgttggttcaaacgagggcggaataataaagctatttcctcc

SEQ ID NO: 21266 - protein, 340 aa, Zea mays subsp. mays
  peptide (1)..(340): Ceres Seq. ID no. 12350566
  misc_feature (160)..(202): Pfam Name: Pfam Description:  Helix-loop-helix DNA-binding domain
  misc_feature (107)..(300): NCBI GI NO: 25411751 NR Description: bHLH transcription factor
  misc_feature (107)..(300): NCBI GI NO: 22325727 NR Description: bHLH protein; protein id: At2g16910.1
  misc_feature (113)..(300): NCBI GI NO: 27650307 NR Description: bHLH transcription factor [Brassica napus]
  misc_feature (118)..(303): NCBI GI NO: 34907076 NR Description: OSJNBa0093F16.27
  misc_feature (104)..(303): NCBI GI NO: 22331357 NR Description: bHLH protein; protein id: At3g26744
  misc_feature (113)..(250): NCBI GI NO: 25513489 NR Description: F13K23.12 protein - Arabidopsis thaliana
  misc_feature (113)..(250): NCBI GI NO: 15222101 NR Description: bHLH protein; protein id: At1g12860.1
  misc_feature (148)..(303): NCBI GI NO: 29466635 NR Description: Transcription Factor [Oryza sativa]
  misc_feature (148)..(303): NCBI GI NO: 32489775 NR Description: OSJNBb0018A10.6
  misc_feature (108)..(231): NCBI GI NO: 15223363 NR Description: bHLH protein; protein id: At1g01260
MPARRAGVRARADGGGGADGGAGDGAVRGAERRRGGARGRRDSRGTAAPRTRRVGCTAMRCRRRSACSTAAGSVAADPFQAVQQAPGAGGGGVDDVAGWQYAAAAGSELEAVQLQQEQQPRDADSGSEVSDMQGDPEDDGDGDAQGRGGGKGGGKRQQCKNLEAERKRRKKLNERLYKLRSLVPNISKMDRAAILGDAIDYIVGLQNQVKALQDELEDPADGAGAPDVLLDHPPPASLVGLENDESPPTSHQHPLAGTKRARAAAEEEEEEKGNDMEPQVEVRQVEANEFFLQMLCERRPRALRPDHGLHRRPGTGGHQRQRHLPREPRPQRLPRRQAGQ

SEQ ID NO: 21267 - protein, 282 aa, Zea mays subsp. mays
  peptide (1)..(282): Ceres Seq. ID no. 12350567
  misc_feature (102)..(144): Pfam Name: Pfam Description:  Helix-loop-helix DNA-binding domain
  misc_feature (49)..(242): NCBI GI NO: 25411751 NR Description: bHLH transcription factor
  misc_feature (49)..(242): NCBI GI NO: 22325727 NR Description: bHLH protein; protein id: At2g16910.1
  misc_feature (55)..(242): NCBI GI NO: 27650307 NR Description: bHLH transcription factor [Brassica napus]
  misc_feature (60)..(245): NCBI GI NO: 34907076 NR Description: OSJNBa0093F16.27
  misc_feature (46)..(245): NCBI GI NO: 22331357 NR Description: bHLH protein; protein id: At3g26744
  misc_feature (55)..(192): NCBI GI NO: 25513489 NR Description: F13K23.12 protein - Arabidopsis thaliana
  misc_feature (55)..(192): NCBI GI NO: 15222101 NR Description: bHLH protein; protein id: At1g12860.1
  misc_feature (90)..(245): NCBI GI NO: 29466635 NR Description: Transcription Factor [Oryza sativa]
  misc_feature (90)..(245): NCBI GI NO: 32489775 NR Description: OSJNBb0018A10.6
  misc_feature (50)..(173): NCBI GI NO: 15223363 NR Description: bHLH protein; protein id: At1g01260
MRCRRRSACSTAAGSVAADPFQAVQQAPGAGGGGVDDVAGWQYAAAAGSELEAVQLQQEQQPRDADSGSEVSDMQGDPEDDGDGDAQGRGGGKGGGKRQQCKNLEAERKRRKKLNERLYKLRSLVPNISKMDRAAILGDAIDYIVGLQNQVKALQDELEDPADGAGAPDVLLDHPPPASLVGLENDESPPTSHQHPLAGTKRARAAAEEEEEEKGNDMEPQVEVRQVEANEFFLQMLCERRPRALRPDHGLHRRPGTGGHQRQRHLPREPRPQRLPRRQAGQ

SEQ ID NO: 21268 - protein, 219 aa, Zea mays subsp. mays
  peptide (1)..(219): Ceres Seq. ID no. 12350568
  misc_feature (135)..(187): Pfam Name: 20 copies Pfam Description: Collagen triple helix repeat
  misc_feature (1)..(219): NCBI GI NO: 13562004 NR Description: major ampullate spidroin 2-like protein
  misc_feature (1)..(219): NCBI GI NO: 13562004 NR Description: major ampullate spidroin 2-like protein
  misc_feature (21)..(219): NCBI GI NO: 1263289 NR Description: fibroin-4
  misc_feature (50)..(219): NCBI GI NO: 17536359 NR Description: Predicted CDS, cuticle collagen family member
  misc_feature (1)..(219): NCBI GI NO: 13562004 NR Description: major ampullate spidroin 2-like protein
  misc_feature (1)..(219): NCBI GI NO: 13561986 NR Description: major ampullate spidroin 2 [Argiope trifasciata]
  misc_feature (1)..(204): NCBI GI NO: 28564681 NR Description: OSJNBa0039C01.4
  misc_feature (1)..(219): NCBI GI NO: 9625624 NR Description: nuclear antigen EBNA1 [Human herpesvirus 4]
  misc_feature (1)..(219): NCBI GI NO: 13562004 NR Description: major ampullate spidroin 2-like protein
  misc_feature (1)..(219): NCBI GI NO: 13562004 NR Description: major ampullate spidroin 2-like protein
MYGDAVPPSLSLFDCRRQRRGGPVPGGAAGAGRRWWWGGRRRRVAVCCCGWERAGGGAAAAGAAAARCGLGVRGQRHAGGPRGRRRRRRAGAWRRQGRREAAAVQEPRGGAEAAEEAQRAALQAQVARPEHLQDGPRGDPRGRHRLHRGPAEPGEGAAGRAGGPGGRRRRPRRPPGPPAAGEPGGAGERRVAAHEPPAPARRDQEGPCGGGGGGGGEGE

SEQ ID NO: 21269 - DNA, 807 bp, Zea mays subsp. mays
  misc_feature (1)..(807): Ceres Seq. ID no. 13586102
ggggttggcggttttgaaaaacctttttttttttttttttttttttttttttttttttttttttttttttttttttttttttttttttttttttttttttttttttttcatctagtatttaattttatataatgattaattagttctaatagcaaataattaatacaaatcatattacaccttttgcatggtattctcattcttaattttctgcaacatagttctaatagcaaacttccaaaacaggcacacagataaaagtactagtgcttcacatcatcacctcttgtgtggaactgaaggggaacatgtgatgctggcgacgaaatctcggaactagcgcagcaggaatcgaaccgcagccacggcatcacccttgtgctcacggagcgttctctccgcgatcttcttgtccagctcaagctcactagcgataatttcgacatcggcagggttgatcttgacagcagccaattctttctccctcagcctcatcgcgttccagtcagcctccttggatgaagcaagtgccgccatggcggattggacacgggatgaatcgagctgccggtcctcgacatgatcagtgagcttgtcgagcgccttgctctgctgctgaaggtccttggagtccaccgcgccctcgccctcggcggcaccggcccccgcggctgcagcggacgcagccatcgcagccttctcgtcgcccgccgcacccatcgccgtctaaaaccctaacccggatctacttttctccgatgagacgagtgtgtgcactgtgccacaggcggctgacgagatggccgt

SEQ ID NO: 21270 - protein, 52 aa, Zea mays subsp. mays
  peptide (1)..(52): Ceres Seq. ID no. 13586103
MISELVERLALLLKVLGVHRALALGGTGPRGCSGRSHRSLLVARRTHRRLKP

SEQ ID NO: 21271 - protein, 50 aa, Zea mays subsp. mays
  peptide (1)..(50): Ceres Seq. ID no. 13586104
  misc_feature (1)..(15): NCBI GI NO: 40548804 NR Description: NADH dehydrogenase subunit 6 [Dirofilaria immitis]
MVFSFLIFCNIVLIANFQNRHTDKSTSASHHHLLCGTEGEHVMLATKSRN

SEQ ID NO: 21272 - protein, 43 aa, Zea mays subsp. mays
  peptide (1)..(43): Ceres Seq. ID no. 13586105
  misc_feature (10)..(43): NCBI GI NO: 23487594 NR Description: hypothetical protein [Plasmodium yoelii yoelii]
GVGGFEKPFFFFFFFFFFFFFFFFFFFFFFFFFFFFHLVFNFI

SEQ ID NO: 21273 - DNA, 730 bp, Zea mays subsp. mays
  misc_feature (1)..(730): Ceres Seq. ID no. 12566590
accaccccacccattcactcgccttgcgcttcctcgccgccccagttccccaccccctgctcacccacccgtcccctcctgctcgcccatggctcccatcgctgtcggcgacgccctccccgacggccagctcgggtggttcgacgagaacgaccagctgcagcaggtctccgtccacgcgctcgccgccggcaagaaggtcatcctcttcggcgtccccggcgccttcaccccgacctgcagcaaccagcatgtgccaggcttcatcacacaggctgagcagctcaaagccaagggtgtagacgagatcctgcttatcagcgttaacgaccccttcgtcatgaaggcgtgggcgaagacctaccccgagaacaagcacgtgaagttcctcgccgacggatctggagcgtacaccaaggcgctcgacctcgagctcgatctcacggacaaaggtctgggcgtgcgctcgaagaggttcgctctcctggccgacgacctcacggtcaccgtcgcaaacatcgaggaaggcgggcagttcacgatctctggcgctgaggagatcctgaaggcgctttagaagccgcagcaacgatcggtctagtttgaactcgcctttgaataacttgtcgttggacaaggtctagttcggtgttgtgtatggaacggtcgtcactgagtcatgcacgatttggtatccgtgtgtttatgttcgccggtttgaggaactctc

SEQ ID NO: 21274 - protein, 191 aa, Zea mays subsp. mays
  peptide (1)..(191): Ceres Seq. ID no. 12566591
  misc_feature (35)..(189): Pfam Name: Pfam Description:  AhpC/TSA family
  misc_feature (30)..(191): NCBI GI NO: 34911078 NR Description: peroxiredoxin
  misc_feature (30)..(191): NCBI GI NO: 4928472 NR Description: type 2 peroxiredoxin
  misc_feature (30)..(191): NCBI GI NO: 15218877 NR Description: type 2 peroxiredoxin, putative
  misc_feature (30)..(191): NCBI GI NO: 15218876 NR Description: type 2 peroxiredoxin, putative
  misc_feature (30)..(191): NCBI GI NO: 18654477 NR Description: thioredoxin peroxidase [Capsicum annuum]
  misc_feature (30)..(191): NCBI GI NO: 18406870 NR Description: peroxiredoxin, putative; protein id: At1g60740
  misc_feature (30)..(191): NCBI GI NO: 21593881 NR Description: type 2 peroxiredoxin, putative
  misc_feature (30)..(191): NCBI GI NO: 30841938 NR Description: thioredoxin peroxidase 1 [Lycopersicon esculentum]
  misc_feature (30)..(191): NCBI GI NO: 19548660 NR Description: peroxiredoxin
  misc_feature (30)..(191): NCBI GI NO: 4704732 NR Description: peroxiredoxin TPx2 [Arabidopsis thaliana]
PPHPFTRLALPRRPSSPPPAHPPVPSCSPMAPIAVGDALPDGQLGWFDENDQLQQVSVHALAAGKKVILFGVPGAFTPTCSNQHVPGFITQAEQLKAKGVDEILLISVNDPFVMKAWAKTYPENKHVKFLADGSGAYTKALDLELDLTDKGLGVRSKRFALLADDLTVTVANIEEGGQFTISGAEEILKAL

SEQ ID NO: 21275 - protein, 162 aa, Zea mays subsp. mays
  peptide (1)..(162): Ceres Seq. ID no. 12566592
  misc_feature (6)..(160): Pfam Name: Pfam Description:  AhpC/TSA family
  misc_feature (1)..(162): NCBI GI NO: 34911078 NR Description: peroxiredoxin
  misc_feature (1)..(162): NCBI GI NO: 4928472 NR Description: type 2 peroxiredoxin
  misc_feature (1)..(162): NCBI GI NO: 15218877 NR Description: type 2 peroxiredoxin, putative
  misc_feature (1)..(162): NCBI GI NO: 15218876 NR Description: type 2 peroxiredoxin, putative
  misc_feature (1)..(162): NCBI GI NO: 18654477 NR Description: thioredoxin peroxidase [Capsicum annuum]
  misc_feature (1)..(162): NCBI GI NO: 18406870 NR Description: peroxiredoxin, putative; protein id: At1g60740
  misc_feature (1)..(162): NCBI GI NO: 21593881 NR Description: type 2 peroxiredoxin, putative
  misc_feature (1)..(162): NCBI GI NO: 30841938 NR Description: thioredoxin peroxidase 1 [Lycopersicon esculentum]
  misc_feature (1)..(162): NCBI GI NO: 19548660 NR Description: peroxiredoxin
  misc_feature (1)..(162): NCBI GI NO: 4704732 NR Description: peroxiredoxin TPx2 [Arabidopsis thaliana]
MAPIAVGDALPDGQLGWFDENDQLQQVSVHALAAGKKVILFGVPGAFTPTCSNQHVPGFITQAEQLKAKGVDEILLISVNDPFVMKAWAKTYPENKHVKFLADGSGAYTKALDLELDLTDKGLGVRSKRFALLADDLTVTVANIEEGGQFTISGAEEILKAL

SEQ ID NO: 21276 - protein, 99 aa, Zea mays subsp. mays
  peptide (1)..(99): Ceres Seq. ID no. 12566593
  misc_feature (23)..(99): NCBI GI NO: 34809533 NR Description: Epa5p [Candida glabrata]
  misc_feature (23)..(99): NCBI GI NO: 34809534 NR Description: Epa4p [Candida glabrata]
  misc_feature (11)..(99): NCBI GI NO: 6324372 NR Description: anchorage subunit of a-agglutinin; Aga1p
  misc_feature (33)..(99): NCBI GI NO: 34809533 NR Description: Epa5p [Candida glabrata]
  misc_feature (23)..(99): NCBI GI NO: 1082604 NR Description: mucin 5AC (clone JER58) - human (fragment)
HPTHSLALRFLAAPVPHPLLTHPSPPARPWLPSLSATPSPTASSGGSTRTTSCSRSPSTRSPPARRSSSSASPAPSPRPAATSMCQASSHRLSSSKPRV

SEQ ID NO: 21277 - DNA, 1176 bp, Zea mays subsp. mays
  misc_feature (1)..(1176): Ceres Seq. ID no. 12567026
  misc_feature (953)..(953): n is a, c, t, g, unknown, or other
  misc_feature (950)..(950): n is a, c, t, g, unknown, or other
  misc_feature (896)..(896): n is a, c, t, g, unknown, or other
gcacgagaccattacctagaacatcctaatcgaaaaacggcctcacactgcagaggcttggacggacgggatggacatggcgcggtacgagtcatgctaccggcactggatcgccgggcaggaggcaggcctcgccgagctcgaggcggcgtcggccaatgccgccgcgggccgggcaacggacgccgagctgcggaccgtggtggagcggtgcatgctcgggtaccaggactacgccacccgcaggcgcgcgctgtcgcgggaggacggcgtcgccttcttcgccccgccctggtgcaccgccttcgagaactccgtgctctggctcgggggctgccgcccttcgctcaccgtccgcctgctctacaacctctccggggagggcctggaggcgcaggtggaggagctgctcggcggcctcagccaacggcgtcatcccgaccggggccctggggatcacgtccgctcagctggtgctcatcaacgacctccacagccggacggtgcaccaggagaacgccctgtcggaccggctcgccaccctgcaggaggacatcgccgaccgcccgctcctgcccatcgtgcggcagcgcgagctcgctgccgcggcacggttgggagctgcagctgctgccagcggaagctgcgacggcgcggcgcggcggcggctcagggcggcccggctaggagccgcggacgccgaggtggacgcggcgctggacagctacaaggccgcgctgtcgcggctgctggtggaggccgacgagctgaggatggcgacggcgcgggcgctggcgacggagatcctgacgcctcggcaagcggtggagatgctggcggcaggcaagcacctgcacctctccgtccgcgactggagccgccgtagggaagcagcngctggcgcacagcaacagcttggcgggcagagcgccggaacggacaacaccgtncgnccgagcacatgaaaggcccgccattcctcgcccttgcctgcagctagttagtagcatcccgtgtgtagcttggacaccacacaacctctctagtacccgcctgtctttctatatagaccgatcgatcaccatgtgcatggcgtccattaatatgtacaaagttggtgcttggtgtttttgttcctaagaacctaaattaaataccgcagtgcttgcatgagtt

SEQ ID NO: 21278 - protein, 271 aa, Zea mays subsp. mays
  peptide (1)..(271): Ceres Seq. ID no. 12567027
  misc_feature (7)..(107): NCBI GI NO: 15233972 NR Description: putative protein; protein id: At4g18660.1
  misc_feature (7)..(114): NCBI GI NO: 15233979 NR Description: putative protein; protein id: At4g18690.1
  misc_feature (35)..(114): NCBI GI NO: 15233977 NR Description: putative protein; protein id: At4g18680.1
  misc_feature (7)..(126): NCBI GI NO: 9758930 NR Description: tumor-related protein-like [Arabidopsis thaliana]
  misc_feature (7)..(138): NCBI GI NO: 30694832 NR Description: tumor-related protein-like [Arabidopsis thaliana]
  misc_feature (6)..(118): NCBI GI NO: 688423 NR Description: tumor-related protein
  misc_feature (1)..(116): NCBI GI NO: 34896008 NR Description: ESTs AU057825
MDMARYESCYRHWIAGQEAGLAELEAASANAAAGRATDAELRTVVERCMLGYQDYATRRRALSREDGVAFFAPPWCTAFENSVLWLGGCRPSLTVRLLYNLSGEGLEAQVEELLGGLSQRRHPDRGPGDHVRSAGAHQRPPQPDGAPGERPVGPARHPAGGHRRPPAPAHRAAARARCRGTVGSCSCCQRKLRRRGAAAAQGGPARSRGRRGGRGAGQLQGRAVAAAGGGRRAEDGDGAGAGDGDPDASASGGDAGGRQAPAPLRPRLEPP

SEQ ID NO: 21279 - protein, 269 aa, Zea mays subsp. mays
  peptide (1)..(269): Ceres Seq. ID no. 12567028
  misc_feature (5)..(105): NCBI GI NO: 15233972 NR Description: putative protein; protein id: At4g18660.1
  misc_feature (5)..(112): NCBI GI NO: 15233979 NR Description: putative protein; protein id: At4g18690.1
  misc_feature (33)..(112): NCBI GI NO: 15233977 NR Description: putative protein; protein id: At4g18680.1
  misc_feature (5)..(124): NCBI GI NO: 9758930 NR Description: tumor-related protein-like [Arabidopsis thaliana]
  misc_feature (5)..(136): NCBI GI NO: 30694832 NR Description: tumor-related protein-like [Arabidopsis thaliana]
  misc_feature (4)..(116): NCBI GI NO: 688423 NR Description: tumor-related protein
  misc_feature (1)..(114): NCBI GI NO: 34896008 NR Description: ESTs AU057825
MARYESCYRHWIAGQEAGLAELEAASANAAAGRATDAELRTVVERCMLGYQDYATRRRALSREDGVAFFAPPWCTAFENSVLWLGGCRPSLTVRLLYNLSGEGLEAQVEELLGGLSQRRHPDRGPGDHVRSAGAHQRPPQPDGAPGERPVGPARHPAGGHRRPPAPAHRAAARARCRGTVGSCSCCQRKLRRRGAAAAQGGPARSRGRRGGRGAGQLQGRAVAAAGGGRRAEDGDGAGAGDGDPDASASGGDAGGRQAPAPLRPRLEPP

SEQ ID NO: 21280 - protein, 268 aa, Zea mays subsp. mays
  peptide (1)..(268): Ceres Seq. ID no. 12567029
  misc_feature (176)..(259): NCBI GI NO: 15233972 NR Description: putative protein; protein id: At4g18660.1
  misc_feature (100)..(151): NCBI GI NO: 15233972 NR Description: putative protein; protein id: At4g18660.1
  misc_feature (173)..(267): NCBI GI NO: 15233979 NR Description: putative protein; protein id: At4g18690.1
  misc_feature (100)..(138): NCBI GI NO: 15233979 NR Description: putative protein; protein id: At4g18690.1
  misc_feature (179)..(248): NCBI GI NO: 15233977 NR Description: putative protein; protein id: At4g18680.1
  misc_feature (100)..(142): NCBI GI NO: 15233977 NR Description: putative protein; protein id: At4g18680.1
  misc_feature (176)..(256): NCBI GI NO: 9758930 NR Description: tumor-related protein-like [Arabidopsis thaliana]
  misc_feature (100)..(146): NCBI GI NO: 9758930 NR Description: tumor-related protein-like [Arabidopsis thaliana]
  misc_feature (176)..(244): NCBI GI NO: 30694832 NR Description: tumor-related protein-like [Arabidopsis thaliana]
  misc_feature (100)..(146): NCBI GI NO: 30694832 NR Description: tumor-related protein-like [Arabidopsis thaliana]
  misc_feature (246)..(246): Xaa is any aa, unknown or other
  misc_feature (264)..(264): Xaa is any aa, unknown or other
  misc_feature (265)..(265): Xaa is any aa, unknown or other
MPPRAGQRTPSCGPWWSGACSGTRTTPPAGARCRGRTASPSSPRPGAPPSRTPCSGSGAAALRSPSACSTTSPGRAWRRRWRSCSAASANGVIPTGALGITSAQLVLINDLHSRTVHQENALSDRLATLQEDIADRPLLPIVRQRELAAAARLGAAAAASGSCDGAARRRLRAARLGAADAEVDAALDSYKAALSRLLVEADELRMATARALATEILTPRQAVEMLAAGKHLHLSVRDWSRRREAXAGAQQQLGGQSAGTDNTXXPST

SEQ ID NO: 21281 - DNA, 600 bp, Zea mays subsp. mays
  misc_feature (1)..(600): Ceres Seq. ID no. 13586068
atacgactgggtcgctttgacttgcgtaggacactcccgactctagcctcctgcggcttccgcatcctccgcttcgtgtcgtctgccctgctgcccaagcctccggaggttctaccggagccggctcactctcgcgacaccgccgcggcctccggctatatatggacggcgaggaggcgccccttggcgcgctcaacctggctgagtacgcccccgccggcgcccgcaccgtcgactgctacaggcgtatccgcaagatcggcgagggcacctacggtgaggtatttgaagctgtggatattattactggggaaagagcagcacttaagaaaataaaactggatgatggcaaagaagggtttccacgccaaatcttgcgtgagattaaactattaaaaaagctggatcatgagaacatcatcagattgaaagagattgtagtatctcctggttctgcacatggaacaggcggatcagatgatcacatctataggggagatatctacatggtgtttgaatacatggaccatgatttgaagaaagtattgcaccatagtgccccatcccaagtcaaggtttatatggggcagctgctaaaag

SEQ ID NO: 21282 - protein, 146 aa, Zea mays subsp. mays
  peptide (1)..(146): Ceres Seq. ID no. 13586069
  misc_feature (27)..(145): Pfam Name: Pfam Description:  Protein kinase domain
  misc_feature (6)..(145): NCBI GI NO: 17064746 NR Description: cdc2-like protein kinase [Arabidopsis thaliana]
  misc_feature (6)..(145): NCBI GI NO: 15238114 NR Description: Cyclin-dependent kinase C;1 [Arabidopsis thaliana]
  misc_feature (6)..(145): NCBI GI NO: 15238314 NR Description: Cyclin-dependent kinase C;2 [Arabidopsis thaliana]
  misc_feature (9)..(145): NCBI GI NO: 7488728 NR Description: cdc2-like protein kinase cdc2MsC - alfalfa
  misc_feature (6)..(145): NCBI GI NO: 34905748 NR Description: cell division cycle 2-like protein kinase5
  misc_feature (6)..(145): NCBI GI NO: 15215944 NR Description: cyclin dependent kinase C
  misc_feature (9)..(145): NCBI GI NO: 26190145 NR Description: putative cyclin dependent kinase
  misc_feature (20)..(145): NCBI GI NO: 28828850 NR Description: similar to Arabidopsis thaliana (Mouse-ear cress)
  misc_feature (20)..(145): NCBI GI NO: 12654861 NR Description: Similar to cell division cycle 2-like 5
  misc_feature (20)..(145): NCBI GI NO: 10719935 NR Description: Cell division cycle 2-like protein kinase 5
MDGEEAPLGALNLAEYAPAGARTVDCYRRIRKIGEGTYGEVFEAVDIITGERAALKKIKLDDGKEGFPRQILREIKLLKKLDHENIIRLKEIVVSPGSAHGTGGSDDHIYRGDIYMVFEYMDHDLKKVLHHSAPSQVKVYMGQLLK

SEQ ID NO: 21283 - protein, 111 aa, Zea mays subsp. mays
  peptide (1)..(111): Ceres Seq. ID no. 13586070
IRLGRFDLRRTLPTLASCGFRILRFVSSALLPKPPEVLPEPAHSRDTAAASGYIWTARRRPLARSTWLSTPPPAPAPSTATGVSARSARAPTVRYLKLWILLLGKEQHLRK

SEQ ID NO: 21284 - DNA, 1487 bp, Zea mays subsp. mays
  misc_feature (1)..(1487): Ceres Seq. ID no. 15180548
gttcttccgtttccaccctctctctcgtggttctcccgtgctctgtgtccctagcggcgacgactgggcgatcgccgccgccttaagccaggtgctcaggtctgccacttggcacttcgccggcgacgagcacctaacagaaatggtgcgcagaagttgcttggtatccttattgccattggagaagccgtggcgtatgttctctctggaatgtatggcagtgtgagccaacttggaactgggaatgctatcctcattatacttcagcttttctttgctggtatcattgtcatctgtctagatgaactcctacagaaaggctatggtttgggatctggcatctctctgttcattgctacgaatatctgtgagaatatcatctggaaggcgtttagcccaacaaccatcaacagtgggcgtggtgctgaatttgaaggggcagtcattgcattgttccatctattgattactcgcacagataaagtccgtgctctacgcgaggctttctaccgtcagaatcttccaaatgtgaccaatttacttgctactgtattggtcttcctcatagttatctatttccaaggtttccgtgttgtacttccagtgaggtcaaagaatgcccgtggtcaacaaggctcatacccaatcaagctgttctatacatccaacatgcctatcattctgcactctgcgctaattaccaacctctatttcatatcccagcttctctacaggaaatacagtggaaatttccttgttaaccttcttgggaaatggaaggaatctgagtactctggccattctgttccggttggtggtcttgcttactatgtgactgcgccatcaagcttggctgatgttctggcaaatccagtccatgcattgttctatgtggtctttatgctgtcagcctgtgctctcttctcaaagacatggattgaagtttctggttcatcagcgaaggacgttgctaagcagctgaaggagcaacaaatggtgatgcccggccatcgtgagtcaaacctgcaaagggaactgaacagatacatcccaactgctgcagcatttggaggagtgtgcattggcgcgctaactgtcctagctgatttcatgggcgcaattggctcaggaactggcattctgctcgctgtcactatcatataccagtactttgagacattcgagaaggaaagggcaaccgagcttggtttctttggtttctaatcttcgtcgctggggtatagactgaatcttcctgcaagtgacagtaaatgcttggccggctgtttatgtttgtaattggagagcttatagtcagtttaggttgcgggctaatttacactgggaaatttgtagcaggttctgcatgcgtttttggggccagtatgggcattaagttgtgctcaattataaccactgtcatcatctcttgggattttccgttctcctgtattgactatagaattttggatcaattttgccgtctt

SEQ ID NO: 21285 - protein, 337 aa, Zea mays subsp. mays
  peptide (1)..(337): Ceres Seq. ID no. 15180549
  misc_feature (1)..(323): Pfam Name: Pfam Description:  eubacterial secY protein
  misc_feature (1)..(337): NCBI GI NO: 8886324 NR Description: Sec61p [Triticum aestivum]
  misc_feature (1)..(337): NCBI GI NO: 15375074 NR Description: Sec61 alpha subunit [Hordeum vulgare]
  misc_feature (1)..(337): NCBI GI NO: 6581004 NR Description: putative integral membrane protein
  misc_feature (1)..(337): NCBI GI NO: 15226261 NR Description: protein transport protein SEC61 alpha subunit -related
  misc_feature (1)..(337): NCBI GI NO: 20260296 NR Description: putative protein transport protein SEC61 alpha subunit
  misc_feature (1)..(337): NCBI GI NO: 21593089 NR Description: putative protein transport protein SEC61 alpha subunit
  misc_feature (1)..(337): NCBI GI NO: 15218887 NR Description: flower pigmentation protein ATAN11
  misc_feature (1)..(336): NCBI GI NO: 15219158 NR Description: protein transport protein sec61 alpha subunit -related
  misc_feature (1)..(336): NCBI GI NO: 27882231 NR Description: SEC61, alpha subunit [Danio rerio]
  misc_feature (1)..(336): NCBI GI NO: 29124421 NR Description: Similar to SEC61, alpha subunit (S. cerevisiae)
MYGSVSQLGTGNAILIILQLFFAGIIVICLDELLQKGYGLGSGISLFIATNICENIIWKAFSPTTINSGRGAEFEGAVIALFHLLITRTDKVRALREAFYRQNLPNVTNLLATVLVFLIVIYFQGFRVVLPVRSKNARGQQGSYPIKLFYTSNMPIILHSALITNLYFISQLLYRKYSGNFLVNLLGKWKESEYSGHSVPVGGLAYYVTAPSSLADVLANPVHALFYVVFMLSACALFSKTWIEVSGSSAKDVAKQLKEQQMVMPGHRESNLQRELNRYIPTAAAFGGVCIGALTVLADFMGAIGSGTGILLAVTIIYQYFETFEKERATELGFFGF

SEQ ID NO: 21286 - protein, 184 aa, Zea mays subsp. mays
  peptide (1)..(184): Ceres Seq. ID no. 15180550
  misc_feature (1)..(170): Pfam Name: Pfam Description:  eubacterial secY protein
  misc_feature (1)..(184): NCBI GI NO: 8886324 NR Description: Sec61p [Triticum aestivum]
  misc_feature (1)..(184): NCBI GI NO: 15375074 NR Description: Sec61 alpha subunit [Hordeum vulgare]
  misc_feature (1)..(184): NCBI GI NO: 6581004 NR Description: putative integral membrane protein
  misc_feature (1)..(184): NCBI GI NO: 15226261 NR Description: protein transport protein SEC61 alpha subunit -related
  misc_feature (1)..(184): NCBI GI NO: 20260296 NR Description: putative protein transport protein SEC61 alpha subunit
  misc_feature (1)..(184): NCBI GI NO: 21593089 NR Description: putative protein transport protein SEC61 alpha subunit
  misc_feature (1)..(184): NCBI GI NO: 15218887 NR Description: flower pigmentation protein ATAN11
  misc_feature (1)..(183): NCBI GI NO: 15219158 NR Description: protein transport protein sec61 alpha subunit -related
  misc_feature (1)..(183): NCBI GI NO: 27882231 NR Description: SEC61, alpha subunit [Danio rerio]
  misc_feature (1)..(183): NCBI GI NO: 29124421 NR Description: Similar to SEC61, alpha subunit (S. cerevisiae)
MPIILHSALITNLYFISQLLYRKYSGNFLVNLLGKWKESEYSGHSVPVGGLAYYVTAPSSLADVLANPVHALFYVVFMLSACALFSKTWIEVSGSSAKDVAKQLKEQQMVMPGHRESNLQRELNRYIPTAAAFGGVCIGALTVLADFMGAIGSGTGILLAVTIIYQYFETFEKERATELGFFGF

SEQ ID NO: 21287 - DNA, 1567 bp, Zea mays subsp. mays
  misc_feature (1)..(1567): Ceres Seq. ID no. 15177742
aatccctcctcctccataagagacaagaacgaggtcgtctcgccatcgccgccactcctatttaagagctgccggaggtgggggcagatccggcgagccgttcccgctgtccagattcaggaactagactcctccggtccggtcctccccctcccgccccgtctcgctccagcggctccacgccaccgtttgccattcactgccagaatggcgctcaacaaggagtacacgtacgcggagctggagaaggagccgtactggccgttcgagaagctgcgggtctccatcaccggggccggcgggttcatcgcctcccacatcgcgcgccgcctcaagggcgagggccactacgtcgtcgcctccgactggaagaggaacgagcacatgcccgaggacatgttctgccacgagttccacctcgtggacctgagggtcatggacaactgcctcaaggtcaccacgggggttgaccacgtgttcaacctcgcggctgacatgggtgggatggggttcatccagtccaaccactccgtcatcatgtacaacaacaccatgatcagctttaacgtgcttgaggctgctagaattaacggcgtcaagaggttcttctatgcatcaagtgcctgcatctaccctgagttcaagcagctggaaactgtagttagcttgaaggagtccgatgcttggcctgccgagcctcaagatgcctatggcctggaaaaactcgcgactgaggagctgtgcaagcactatacaaaggattttggcatcgagtgccggattggtcgctttcacaacatatatggtcccttcggcacatggaaaggtggaagggagaaggcgcctgctgctttctgcaggaaggctctgacctccacagggcgctttgagatgtggggtgatggcctgcaaaccagatccttcacatttattgatgaatgtgttgaaggtgtccttaggttaacaaagtccgatttccgtgagcctgtaaacattggaagcgacgaaatggtgagcatgaacgagatggcggaaatagtcctgagctttgagaacaagcagctgcccatccaccacatccccgggccggagggcgtgcgtgggcgcaactcagacaacacgctcatcaaggagaagcttggctgggctccgactatgaggctgaaggacgggctgaggatcacgtactcctggatcaaggagcagcttgagaaggagaaggccgagggcatggatctgtcggtctacggatcatccaaggtcgtgcagacacaggccccggttcagctcggctccctccgcgccgctgatggcaaggagtgaactttggctgcgccggtcagttgcagggcatgatataccagtaatacacagctgtttcagtttccatgatttgtagtcaccatttcttgattcacatttgactccacaagagaagaccatttggacgatggatgttttgtcacaagttacgggattcagttcaaatttgaactgaatacaaaatatcctgacacgatatctgtcgtccaaacacttataataatttccacgctgttttttttcc

SEQ ID NO: 21288 - protein, 312 aa, Zea mays subsp. mays
  peptide (1)..(312): Ceres Seq. ID no. 15177743
  misc_feature (1)..(275): Pfam Name: Pfam Description:  NAD dependent epimerase/dehydratase family
  misc_feature (1)..(312): NCBI GI NO: 37534380 NR Description: putative epimerase/dehydratase
  misc_feature (1)..(312): NCBI GI NO: 15241945 NR Description: NAD-dependent epimerase/dehydratase family
  misc_feature (1)..(299): NCBI GI NO: 28170704 NR Description: Ata17 protein
  misc_feature (1)..(278): NCBI GI NO: 9937230 NR Description: sugar epimerase BlmG [Streptomyces verticillus]
  misc_feature (1)..(114): NCBI GI NO: 23008810 NR Description: hypothetical protein
  misc_feature (1)..(276): NCBI GI NO: 24212751 NR Description: dTDPglucose 4,6-dehydratase
  misc_feature (1)..(273): NCBI GI NO: 22298175 NR Description: GDP-fucose synthetase
  misc_feature (1)..(278): NCBI GI NO: 23137167 NR Description: hypothetical protein [Cytophaga hutchinsonii]
  misc_feature (1)..(278): NCBI GI NO: 23138039 NR Description: hypothetical protein [Cytophaga hutchinsonii]
  misc_feature (1)..(276): NCBI GI NO: 21326465 NR Description: UDP-glucuronate decarboxylase 1
MPEDMFCHEFHLVDLRVMDNCLKVTTGVDHVFNLAADMGGMGFIQSNHSVIMYNNTMISFNVLEAARINGVKRFFYASSACIYPEFKQLETVVSLKESDAWPAEPQDAYGLEKLATEELCKHYTKDFGIECRIGRFHNIYGPFGTWKGGREKAPAAFCRKALTSTGRFEMWGDGLQTRSFTFIDECVEGVLRLTKSDFREPVNIGSDEMVSMNEMAEIVLSFENKQLPIHHIPGPEGVRGRNSDNTLIKEKLGWAPTMRLKDGLRITYSWIKEQLEKEKAEGMDLSVYGSSKVVQTQAPVQLGSLRAADGKE

SEQ ID NO: 21289 - protein, 440 aa, Zea mays subsp. mays
  peptide (1)..(440): Ceres Seq. ID no. 15177744
  misc_feature (94)..(403): Pfam Name: Pfam Description:  NAD dependent epimerase/dehydratase family
  misc_feature (75)..(440): NCBI GI NO: 37534380 NR Description: putative epimerase/dehydratase
  misc_feature (76)..(440): NCBI GI NO: 15241945 NR Description: NAD-dependent epimerase/dehydratase family
  misc_feature (88)..(427): NCBI GI NO: 28170704 NR Description: Ata17 protein
  misc_feature (96)..(406): NCBI GI NO: 9937230 NR Description: sugar epimerase BlmG [Streptomyces verticillus]
  misc_feature (96)..(242): NCBI GI NO: 23008810 NR Description: hypothetical protein
  misc_feature (90)..(404): NCBI GI NO: 24212751 NR Description: dTDPglucose 4,6-dehydratase
  misc_feature (93)..(401): NCBI GI NO: 22298175 NR Description: GDP-fucose synthetase
  misc_feature (91)..(406): NCBI GI NO: 23137167 NR Description: hypothetical protein [Cytophaga hutchinsonii]
  misc_feature (91)..(406): NCBI GI NO: 23138039 NR Description: hypothetical protein [Cytophaga hutchinsonii]
  misc_feature (90)..(404): NCBI GI NO: 21326465 NR Description: UDP-glucuronate decarboxylase 1
NPSSSIRDKNEVVSPSPPLLFKSCRRWGQIRRAVPAVQIQELDSSGPVLPLPPRLAPAAPRHRLPFTARMALNKEYTYAELEKEPYWPFEKLRVSITGAGGFIASHIARRLKGEGHYVVASDWKRNEHMPEDMFCHEFHLVDLRVMDNCLKVTTGVDHVFNLAADMGGMGFIQSNHSVIMYNNTMISFNVLEAARINGVKRFFYASSACIYPEFKQLETVVSLKESDAWPAEPQDAYGLEKLATEELCKHYTKDFGIECRIGRFHNIYGPFGTWKGGREKAPAAFCRKALTSTGRFEMWGDGLQTRSFTFIDECVEGVLRLTKSDFREPVNIGSDEMVSMNEMAEIVLSFENKQLPIHHIPGPEGVRGRNSDNTLIKEKLGWAPTMRLKDGLRITYSWIKEQLEKEKAEGMDLSVYGSSKVVQTQAPVQLGSLRAADGKE

SEQ ID NO: 21290 - protein, 371 aa, Zea mays subsp. mays
  peptide (1)..(371): Ceres Seq. ID no. 15177745
  misc_feature (25)..(334): Pfam Name: Pfam Description:  NAD dependent epimerase/dehydratase family
  misc_feature (6)..(371): NCBI GI NO: 37534380 NR Description: putative epimerase/dehydratase
  misc_feature (7)..(371): NCBI GI NO: 15241945 NR Description: NAD-dependent epimerase/dehydratase family
  misc_feature (19)..(358): NCBI GI NO: 28170704 NR Description: Ata17 protein
  misc_feature (27)..(337): NCBI GI NO: 9937230 NR Description: sugar epimerase BlmG [Streptomyces verticillus]
  misc_feature (27)..(173): NCBI GI NO: 23008810 NR Description: hypothetical protein
  misc_feature (21)..(335): NCBI GI NO: 24212751 NR Description: dTDPglucose 4,6-dehydratase
  misc_feature (24)..(332): NCBI GI NO: 22298175 NR Description: GDP-fucose synthetase
  misc_feature (22)..(337): NCBI GI NO: 23137167 NR Description: hypothetical protein [Cytophaga hutchinsonii]
  misc_feature (22)..(337): NCBI GI NO: 23138039 NR Description: hypothetical protein [Cytophaga hutchinsonii]
  misc_feature (21)..(335): NCBI GI NO: 21326465 NR Description: UDP-glucuronate decarboxylase 1
MALNKEYTYAELEKEPYWPFEKLRVSITGAGGFIASHIARRLKGEGHYVVASDWKRNEHMPEDMFCHEFHLVDLRVMDNCLKVTTGVDHVFNLAADMGGMGFIQSNHSVIMYNNTMISFNVLEAARINGVKRFFYASSACIYPEFKQLETVVSLKESDAWPAEPQDAYGLEKLATEELCKHYTKDFGIECRIGRFHNIYGPFGTWKGGREKAPAAFCRKALTSTGRFEMWGDGLQTRSFTFIDECVEGVLRLTKSDFREPVNIGSDEMVSMNEMAEIVLSFENKQLPIHHIPGPEGVRGRNSDNTLIKEKLGWAPTMRLKDGLRITYSWIKEQLEKEKAEGMDLSVYGSSKVVQTQAPVQLGSLRAADGKE

SEQ ID NO: 21291 - DNA, 1320 bp, Zea mays subsp. mays
  misc_feature (1)..(1320): Ceres Seq. ID no. 15179110
agccagctactccatctcccacccaacctccttggcaactggcattgccacccccacagtagagacagacagccacgcgcgcgaggcgctccactcaagctcaggccactctacctcgctctcggccatggcgtcaggggaagcagagccgctgcagtacacgaccaccgcgctgcgggtgtccatccactgcgagggctgcaggaagaaggtcaagaaggtgctccacagcatcgaaggcgtgtacaaggtgacggtggacgcggcgcagcacaaggtgaccgtcacaggcagcgtggaagcggccgcgctcgtccggcggctgcacaaggccggcaagcaggcggcgccgtggccttcgccggcgccggcaaacgtcgaggccaacaaggccgcgcctgctgcacccggggagggcggcgccaaggaggccgcggacacgaaggcggctgaggccgacgccaaggagaagaaaccggccaaggacaagggctcgggcaagaatgccggaacgggcgaggccgccgacgcgaaacccggcaaggacgtggccagcagcgacgccgccgaggtgatcgcggggcccaaggaggcggaaaaggcctcctcccctgagcctgtggccgcgaagccagacgccgccgaggagcccaaggacggcggcgagggcggcaggaagaagggcaagaagagtaagaagaacaagcccaaggacggcggcgagggggatgtcccggccccggccgcaaccccggcggcacctcccgagaagaaggcgccgcagcagccctcggctgtgccagcgccggcgcctggtcccgagcgcccgcacggcggcggcggcgcgttcccgtgctacgctgcgcagccggtgcttagctacaacgtggcgcacccgagctccagcgtgtcgtactgcgcgcccacggcagccgtgcccatgcccccgccgccgccgcagatggtgtcgtactggtacccgccatacccggccatggtgccggtgccggcggagtttgtgtacggcccgccgggcggcgtgcggtcgttcccgccgcacgagtcgtacaacaacatgttcaacgaggacaacgccaactcgtgcagcctcatgtgatgtcacgacgcgccggcgtggtgtccccgggccgtctacggtggctctcgtgaaccacaagcctccccgatggtgtctcgtgccgtcaaattaggcggacagcgctccagattttaattttttttactgtaccctcggctataaattgctcctcggcgcatcgtgtaatcagatggtggtggtattcttccacttgcaagctg

SEQ ID NO: 21292 - protein, 371 aa, Zea mays subsp. mays
  peptide (1)..(371): Ceres Seq. ID no. 15179111
  misc_feature (113)..(276): Pfam Name: BASP1 protein Pfam Description: Brain acid soluble protein 1
  misc_feature (115)..(371): NCBI GI NO: 33146848 NR Description: copper chaperone
  misc_feature (43)..(357): NCBI GI NO: 12083536 NR Description: hypothetical protein [Oryza sativa]
  misc_feature (43)..(328): NCBI GI NO: 33146848 NR Description: copper chaperone
  misc_feature (50)..(371): NCBI GI NO: 27754505 NR Description: putative copper chaperone (CCH) protein
  misc_feature (50)..(371): NCBI GI NO: 18405728 NR Description: copper chaperone (CCH)-related
  misc_feature (50)..(371): NCBI GI NO: 21536659 NR Description: unknown [Arabidopsis thaliana]
  misc_feature (49)..(371): NCBI GI NO: 15241025 NR Description: heavy-metal-associated domain-containing protein
  misc_feature (51)..(249): NCBI GI NO: 15219992 NR Description: heavy-metal-associated domain-containing protein
  misc_feature (58)..(210): NCBI GI NO: 38344257 NR Description: OSJNBa0008M17.10
  misc_feature (49)..(183): NCBI GI NO: 18397481 NR Description: heavy-metal-associated domain-containing protein
ASYSISHPTSLATGIATPTVETDSHAREALHSSSGHSTSLSAMASGEAEPLQYTTTALRVSIHCEGCRKKVKKVLHSIEGVYKVTVDAAQHKVTVTGSVEAAALVRRLHKAGKQAAPWPSPAPANVEANKAAPAAPGEGGAKEAADTKAAEADAKEKKPAKDKGSGKNAGTGEAADAKPGKDVASSDAAEVIAGPKEAEKASSPEPVAAKPDAAEEPKDGGEGGRKKGKKSKKNKPKDGGEGDVPAPAATPAAPPEKKAPQQPSAVPAPAPGPERPHGGGGAFPCYAAQPVLSYNVAHPSSSVSYCAPTAAVPMPPPPPQMVSYWYPPYPAMVPVPAEFVYGPPGGVRSFPPHESYNNMFNEDNANSCSLM

SEQ ID NO: 21293 - protein, 329 aa, Zea mays subsp. mays
  peptide (1)..(329): Ceres Seq. ID no. 15179112
  misc_feature (71)..(234): Pfam Name: BASP1 protein Pfam Description: Brain acid soluble protein 1
  misc_feature (73)..(329): NCBI GI NO: 33146848 NR Description: copper chaperone
  misc_feature (1)..(315): NCBI GI NO: 12083536 NR Description: hypothetical protein [Oryza sativa]
  misc_feature (1)..(286): NCBI GI NO: 33146848 NR Description: copper chaperone
  misc_feature (8)..(329): NCBI GI NO: 27754505 NR Description: putative copper chaperone (CCH) protein
  misc_feature (8)..(329): NCBI GI NO: 18405728 NR Description: copper chaperone (CCH)-related
  misc_feature (8)..(329): NCBI GI NO: 21536659 NR Description: unknown [Arabidopsis thaliana]
  misc_feature (7)..(329): NCBI GI NO: 15241025 NR Description: heavy-metal-associated domain-containing protein
  misc_feature (9)..(207): NCBI GI NO: 15219992 NR Description: heavy-metal-associated domain-containing protein
  misc_feature (16)..(168): NCBI GI NO: 38344257 NR Description: OSJNBa0008M17.10
  misc_feature (7)..(141): NCBI GI NO: 18397481 NR Description: heavy-metal-associated domain-containing protein
MASGEAEPLQYTTTALRVSIHCEGCRKKVKKVLHSIEGVYKVTVDAAQHKVTVTGSVEAAALVRRLHKAGKQAAPWPSPAPANVEANKAAPAAPGEGGAKEAADTKAAEADAKEKKPAKDKGSGKNAGTGEAADAKPGKDVASSDAAEVIAGPKEAEKASSPEPVAAKPDAAEEPKDGGEGGRKKGKKSKKNKPKDGGEGDVPAPAATPAAPPEKKAPQQPSAVPAPAPGPERPHGGGGAFPCYAAQPVLSYNVAHPSSSVSYCAPTAAVPMPPPPPQMVSYWYPPYPAMVPVPAEFVYGPPGGVRSFPPHESYNNMFNEDNANSCSLM

SEQ ID NO: 21294 - DNA, 634 bp, Zea mays subsp. mays
  misc_feature (1)..(634): Ceres Seq. ID no. 14305547
gaaaaacacacccagattctttcgattctttcacggttccacctctcccctccctctcgtgctcgatccatcgccgctgcctaatccccatggcctcagcgaacaacgacaaccgcgaggcggcgggcatcctgcggctgctgatggggatggcggcggcggcgcccgcctcggcattgcctcgggggggcggcggcggcggcggcggcggcctgatggtggtgcagcacgtcatcctcgacgtcgacggggaattgttctcgggcggggtcggcggcggcggcgtgccgccggcgtcgaaggccgcgatcgccgcgctgaaggaggtgaaggccggggagggcgagggcgagggcgaggacgcgctgggcgagtgcgccatctgcctggacgcggtggagggcaccggcaaggagatgccgtgcgggcaccgcttccacgggcgctgcctggagcggtggctcggcgtgcacggcaactgccccgtctgccgccgcgagctgccagcgccggccaaggaggaggaggaggacagcgcggcgtcggcggagggcggcgaggaggagagggtttaactgtttttgagatcaaatttgacaagctctagaatgaacatatctattttgtttgcgac

SEQ ID NO: 21295 - protein, 201 aa, Zea mays subsp. mays
  peptide (1)..(201): Ceres Seq. ID no. 14305548
  misc_feature (122)..(188): Pfam Name: Pfam Description:  TT viral ORF2
  misc_feature (25)..(190): NCBI GI NO: 93144 NR Description: hypothetical protein - suid herpesvirus 1
  misc_feature (39)..(190): NCBI GI NO: 465445 NR Description: PROBABLE NUCLEAR ANTIGEN
  misc_feature (42)..(190): NCBI GI NO: 93144 NR Description: hypothetical protein - suid herpesvirus 1
  misc_feature (40)..(193): NCBI GI NO: 9453859 NR Description: EBNA-1 [Cynomolgus Epstein-Barr Virus Si-IIA]
  misc_feature (39)..(190): NCBI GI NO: 22960369 NR Description: hypothetical protein [Rhodobacter sphaeroides]
  misc_feature (40)..(190): NCBI GI NO: 22093662 NR Description: putative zwille protein
  misc_feature (31)..(190): NCBI GI NO: 27378597 NR Description: blr3486 [Bradyrhizobium japonicum]
  misc_feature (40)..(189): NCBI GI NO: 465445 NR Description: PROBABLE NUCLEAR ANTIGEN
  misc_feature (42)..(190): NCBI GI NO: 465445 NR Description: PROBABLE NUCLEAR ANTIGEN
  misc_feature (40)..(189): NCBI GI NO: 93144 NR Description: hypothetical protein - suid herpesvirus 1
KNTPRFFRFFHGSTSPLPLVLDPSPLPNPHGLSEQRQPRGGGHPAAADGDGGGGARLGIASGGRRRRRRRPDGGAARHPRRRRGIVLGRGRRRRRAAGVEGRDRRAEGGEGRGGRGRGRGRAGRVRHLPGRGGGHRQGDAVRAPLPRALPGAVARRARQLPRLPPRAASAGQGGGGGQRGVGGGRRGGEGLTVFEIKFDKL

SEQ ID NO: 21296 - protein, 190 aa, Zea mays subsp. mays
  peptide (1)..(190): Ceres Seq. ID no. 14305549
  misc_feature (125)..(163): Pfam Name: RING finger Pfam Description: Zinc finger, C3HC4 type
  misc_feature (30)..(189): NCBI GI NO: 34913258 NR Description: P0519E12.4
  misc_feature (27)..(182): NCBI GI NO: 18921323 NR Description: putative zinc finger protein [Oryza sativa]
  misc_feature (91)..(190): NCBI GI NO: 18071374 NR Description: putative zinc finger protein [Oryza sativa]
  misc_feature (75)..(184): NCBI GI NO: 18071392 NR Description: putative zinc finger protein [Oryza sativa]
  misc_feature (30)..(181): NCBI GI NO: 40882686 NR Description: hypothetical protein
  misc_feature (88)..(177): NCBI GI NO: 15238295 NR Description: COP1-interacting protein CIP8
  misc_feature (94)..(173): NCBI GI NO: 18396059 NR Description: zinc finger
  misc_feature (94)..(173): NCBI GI NO: 21554312 NR Description: unknown [Arabidopsis thaliana]
  misc_feature (51)..(185): NCBI GI NO: 34903272 NR Description: unnamed protein product
  misc_feature (84)..(180): NCBI GI NO: 15232595 NR Description: expressed protein [Arabidopsis thaliana]
KTHPDSFDSFTVPPLPSLSCSIHRRCLIPMASANNDNREAAGILRLLMGMAAAAPASALPRGGGGGGGGGLMVVQHVILDVDGELFSGGVGGGGVPPASKAAIAALKEVKAGEGEGEGEDALGECAICLDAVEGTGKEMPCGHRFHGRCLERWLGVHGNCPVCRRELPAPAKEEEEDSAASAEGGEEERV

SEQ ID NO: 21297 - protein, 161 aa, Zea mays subsp. mays
  peptide (1)..(161): Ceres Seq. ID no. 14305550
  misc_feature (96)..(134): Pfam Name: RING finger Pfam Description: Zinc finger, C3HC4 type
  misc_feature (1)..(160): NCBI GI NO: 34913258 NR Description: P0519E12.4
  misc_feature (1)..(153): NCBI GI NO: 18921323 NR Description: putative zinc finger protein [Oryza sativa]
  misc_feature (62)..(161): NCBI GI NO: 18071374 NR Description: putative zinc finger protein [Oryza sativa]
  misc_feature (46)..(155): NCBI GI NO: 18071392 NR Description: putative zinc finger protein [Oryza sativa]
  misc_feature (1)..(152): NCBI GI NO: 40882686 NR Description: hypothetical protein
  misc_feature (59)..(148): NCBI GI NO: 15238295 NR Description: COP1-interacting protein CIP8
  misc_feature (65)..(144): NCBI GI NO: 18396059 NR Description: zinc finger
  misc_feature (65)..(144): NCBI GI NO: 21554312 NR Description: unknown [Arabidopsis thaliana]
  misc_feature (22)..(156): NCBI GI NO: 34903272 NR Description: unnamed protein product
  misc_feature (55)..(151): NCBI GI NO: 15232595 NR Description: expressed protein [Arabidopsis thaliana]
MASANNDNREAAGILRLLMGMAAAAPASALPRGGGGGGGGGLMVVQHVILDVDGELFSGGVGGGGVPPASKAAIAALKEVKAGEGEGEGEDALGECAICLDAVEGTGKEMPCGHRFHGRCLERWLGVHGNCPVCRRELPAPAKEEEEDSAASAEGGEEERV

SEQ ID NO: 21298 - DNA, 1704 bp, Zea mays subsp. mays
  misc_feature (1)..(1704): Ceres Seq. ID no. 15179117
aaaaaaaaacgtaagcagacttggccatagtccactgtccaccgcagctccgtcgaccgtcgtacagacgctgccggcgacgcgcgaagaagaggccgcgaagatggccgactcgccaacgatcgatgccgtctttcacaacgcggtcatcgtcaccatggatgatgcgttccgcgtcctccaggacggcgcggtcgccgtcgccggcgaccgcatcgccgctgtgggcccctccgctgatgtcctcgccgccttcccctgcgccgtgcagaccctcgacctgggtggccgcattgtccttccagagctcgtaaacacacacgtgcacacatcgcagcagctggcgcgagggatcgccgacgacgttgatctgatgacgtggctgcacgggaggatctggccctatgagtcacacatgacggaggaagactcctatgcctccaccctcctctgcggcattgaactcatccggtctggggtgacatgctttgcagaagcaggtgggcagtttgtttcagaaatggcacgtgcagtggagttattaggctttagagcgtgtttgacaaagtcaacaatggattgtggtgatggtttgcctccaaattggagttgctgctccactgatgattgcattcagtcacagaaggaactatatgaaaagcatcataatacagctgatgggcgtatcaggatatggtttgggttgagacagataatgaatgcaaccgatcgtttactgcttgaaacaagagatattgcccagaagctaaatactggaatccatatgcatattgcagaaataccatatgaaaatcaacttatacttcggaccaaaggaattgatcatggcacagtgacatatttagagaaaattgatttcctgaggagtaatttactggctgcccattctgtttggttgaatgtacctgagataggctttttttcaaaggctggtgttaaggtttctcactgtcctgcatctgccatgcgtatgttggggtttgctcctattagagaaatgctggattctggtgtttgtgtctctcttggtacagatggagcaccaagcaataatagaatgagcattgtggatgagatgtacttagcgtccctaattaacaaaggtcgtgaggcatatatcagtggaacaacaaacccaactgctcttcctgctgagacggtgctgaagatggctactattaatggtgcaaaagcagttctgtgggacaatgaaataggttcgctggaggttggcaaaaaggcggacttggtggtggtgaatccatttacatggtccatggtccccttacatgacagcattgccaacattgtctactgcatgcggacagagaatattgagtctgttatgtgcaatggtcggtggatcatgaaggatcataaaatcatgaatctcaatgaggaggaggtaatttcttcagctgtgaaaagagcgaacgacctccttgcacgagcaggcataaatctccccagacggatgaactacgtatagttattctcttgctattttgtcatgtatttgccagtttccaccatgccgcgctaatcctagtgctgcaagcttgcatgttggcccggagacatgtttgcaggatcgtagtcatcgcttgcagtttctaccagtgttgaatagaaaataatgtgcagttgtacatgtggcttcagtaataaaagcaccatggaagc

SEQ ID NO: 21299 - protein, 502 aa, Zea mays subsp. mays
  peptide (1)..(502): Ceres Seq. ID no. 15179118
  misc_feature (99)..(427): Pfam Name: Pfam Description:  Amidohydrolase family
  misc_feature (44)..(502): NCBI GI NO: 23474809 NR Description: hypothetical protein
  misc_feature (44)..(493): NCBI GI NO: 40743771 NR Description: hypothetical protein AN3194.2
  misc_feature (44)..(498): NCBI GI NO: 19113705 NR Description: putative chlorohydrolase/deaminase
  misc_feature (90)..(490): NCBI GI NO: 15613309 NR Description: N-ethylammeline chlorohydrolase
  misc_feature (42)..(406): NCBI GI NO: 21228381 NR Description: Chlorohydrolase family protein
  misc_feature (42)..(406): NCBI GI NO: 23051073 NR Description: hypothetical protein [Methanosarcina barkeri]
  misc_feature (97)..(488): NCBI GI NO: 20808022 NR Description: Cytosine deaminase and related metal-dependenthydrolases
  misc_feature (41)..(488): NCBI GI NO: 29653861 NR Description: chlorohydrolase family protein
  misc_feature (50)..(490): NCBI GI NO: 34496487 NR Description: probable atrazine chlorohydrolase
  misc_feature (50)..(480): NCBI GI NO: 23061120 NR Description: hypothetical protein
KKNVSRLGHSPLSTAAPSTVVQTLPATREEEAAKMADSPTIDAVFHNAVIVTMDDAFRVLQDGAVAVAGDRIAAVGPSADVLAAFPCAVQTLDLGGRIVLPELVNTHVHTSQQLARGIADDVDLMTWLHGRIWPYESHMTEEDSYASTLLCGIELIRSGVTCFAEAGGQFVSEMARAVELLGFRACLTKSTMDCGDGLPPNWSCCSTDDCIQSQKELYEKHHNTADGRIRIWFGLRQIMNATDRLLLETRDIAQKLNTGIHMHIAEIPYENQLILRTKGIDHGTVTYLEKIDFLRSNLLAAHSVWLNVPEIGFFSKAGVKVSHCPASAMRMLGFAPIREMLDSGVCVSLGTDGAPSNNRMSIVDEMYLASLINKGREAYISGTTNPTALPAETVLKMATINGAKAVLWDNEIGSLEVGKKADLVVVNPFTWSMVPLHDSIANIVYCMRTENIESVMCNGRWIMKDHKIMNLNEEEVISSAVKRANDLLARAGINLPRRMNYV

SEQ ID NO: 21300 - protein, 468 aa, Zea mays subsp. mays
  peptide (1)..(468): Ceres Seq. ID no. 15179119
  misc_feature (65)..(393): Pfam Name: Pfam Description:  Amidohydrolase family
  misc_feature (10)..(468): NCBI GI NO: 23474809 NR Description: hypothetical protein
  misc_feature (10)..(459): NCBI GI NO: 40743771 NR Description: hypothetical protein AN3194.2
  misc_feature (10)..(464): NCBI GI NO: 19113705 NR Description: putative chlorohydrolase/deaminase
  misc_feature (56)..(456): NCBI GI NO: 15613309 NR Description: N-ethylammeline chlorohydrolase
  misc_feature (8)..(372): NCBI GI NO: 21228381 NR Description: Chlorohydrolase family protein
  misc_feature (8)..(372): NCBI GI NO: 23051073 NR Description: hypothetical protein [Methanosarcina barkeri]
  misc_feature (63)..(454): NCBI GI NO: 20808022 NR Description: Cytosine deaminase and related metal-dependenthydrolases
  misc_feature (7)..(454): NCBI GI NO: 29653861 NR Description: chlorohydrolase family protein
  misc_feature (16)..(456): NCBI GI NO: 34496487 NR Description: probable atrazine chlorohydrolase
  misc_feature (16)..(446): NCBI GI NO: 23061120 NR Description: hypothetical protein
MADSPTIDAVFHNAVIVTMDDAFRVLQDGAVAVAGDRIAAVGPSADVLAAFPCAVQTLDLGGRIVLPELVNTHVHTSQQLARGIADDVDLMTWLHGRIWPYESHMTEEDSYASTLLCGIELIRSGVTCFAEAGGQFVSEMARAVELLGFRACLTKSTMDCGDGLPPNWSCCSTDDCIQSQKELYEKHHNTADGRIRIWFGLRQIMNATDRLLLETRDIAQKLNTGIHMHIAEIPYENQLILRTKGIDHGTVTYLEKIDFLRSNLLAAHSVWLNVPEIGFFSKAGVKVSHCPASAMRMLGFAPIREMLDSGVCVSLGTDGAPSNNRMSIVDEMYLASLINKGREAYISGTTNPTALPAETVLKMATINGAKAVLWDNEIGSLEVGKKADLVVVNPFTWSMVPLHDSIANIVYCMRTENIESVMCNGRWIMKDHKIMNLNEEEVISSAVKRANDLLARAGINLPRRMNYV

SEQ ID NO: 21301 - protein, 450 aa, Zea mays subsp. mays
  peptide (1)..(450): Ceres Seq. ID no. 15179120
  misc_feature (47)..(375): Pfam Name: Pfam Description:  Amidohydrolase family
  misc_feature (1)..(450): NCBI GI NO: 23474809 NR Description: hypothetical protein
  misc_feature (1)..(441): NCBI GI NO: 40743771 NR Description: hypothetical protein AN3194.2
  misc_feature (1)..(446): NCBI GI NO: 19113705 NR Description: putative chlorohydrolase/deaminase
  misc_feature (38)..(438): NCBI GI NO: 15613309 NR Description: N-ethylammeline chlorohydrolase
  misc_feature (1)..(354): NCBI GI NO: 21228381 NR Description: Chlorohydrolase family protein
  misc_feature (1)..(354): NCBI GI NO: 23051073 NR Description: hypothetical protein [Methanosarcina barkeri]
  misc_feature (45)..(436): NCBI GI NO: 20808022 NR Description: Cytosine deaminase and related metal-dependenthydrolases
  misc_feature (1)..(436): NCBI GI NO: 29653861 NR Description: chlorohydrolase family protein
  misc_feature (1)..(438): NCBI GI NO: 34496487 NR Description: probable atrazine chlorohydrolase
  misc_feature (1)..(428): NCBI GI NO: 23061120 NR Description: hypothetical protein
MDDAFRVLQDGAVAVAGDRIAAVGPSADVLAAFPCAVQTLDLGGRIVLPELVNTHVHTSQQLARGIADDVDLMTWLHGRIWPYESHMTEEDSYASTLLCGIELIRSGVTCFAEAGGQFVSEMARAVELLGFRACLTKSTMDCGDGLPPNWSCCSTDDCIQSQKELYEKHHNTADGRIRIWFGLRQIMNATDRLLLETRDIAQKLNTGIHMHIAEIPYENQLILRTKGIDHGTVTYLEKIDFLRSNLLAAHSVWLNVPEIGFFSKAGVKVSHCPASAMRMLGFAPIREMLDSGVCVSLGTDGAPSNNRMSIVDEMYLASLINKGREAYISGTTNPTALPAETVLKMATINGAKAVLWDNEIGSLEVGKKADLVVVNPFTWSMVPLHDSIANIVYCMRTENIESVMCNGRWIMKDHKIMNLNEEEVISSAVKRANDLLARAGINLPRRMNYV

SEQ ID NO: 21302 - DNA, 1787 bp, Zea mays subsp. mays
  misc_feature (1)..(1787): Ceres Seq. ID no. 12372734
atcagtgggtgggtgggtggttcgcctcctcatcctctcctccccgcacgtccacggcgatggcgcccgcgcccccgcactgctgacccacccccgccgcgcactctcatgaccgtggtttggtaggtggggcggaggttggtaggccgggacgtgccggcaggcggttacgggaggcgcggccgcgatcccgggccggatctggacgccgcgatggaggacgccgttgccgctgagaatgggatcgagggggagggctacgtcgtcgtcaaggcggcggcggccgcggaggcggagggggactccggcgccagcgatcgtggggatctcgccgcccccgctgaggacgcggcgccggccggatctgaggacgccccggccccggcggtgacgccggacgagaccgcggcacctgccaaggcgccggccaggaagggtggatccggggacgccgccggggtccggaaggcgaggccgcagaacggcagggtgcccgccgccgccgccaccgccgcgccgagggtgaagaagcccggggtcctctcgcagagcgcctccttcccggcgcggggtgccgccgccaagaaggcctcggcggttgctactcccaagcaggccaagggcgtcgtgaccaatggatcagaggcggcagcaggccgggcagccgagaagaaggcgaattcagcgcggacacctgtcgctcgccggtcgatgcctgtcaagtctggatcagcggatgcggccgcccccaaatgacgcaattcccgctgtccaagagccacatgaaaacaccgacaagccattgaaacaaatgcagccagggaaaacagaggatgatgtgcgctccaccacatcaagtaccaatactccgcgtgcagcagctcgcaagagtgctgctgttgctgctggttttagtttcagattggaggagcgtgctgagaagagaaaggagttcttccaaaagcttgaagagaaaatccacgcaaaggagctggaaaaaacaaatctgcaggagaaatctaaggagagccaagaggctgagatcaaactgctgaggaagagcctaacatttaaagccacacctatgccaagcttttacaaggagcagccacccaaagttgagttgaaaaagattcccccaacacgcgctaggtcgccaaagctcggccggcacaagccagccaattctgccactgctgcttctgcggatggttctgtatcatgtgagagcccacggagcactgcaaattcgggcaaggtaaatgaagcgatggaaaacaacaaacctcatgcccctgctagaaaacctgttcagaggccagtcatgaaagctccatcacaggcgtctgccaccacaaaggctgaagcaagacccgtggtcacaaggccaaagatctcaaactcgaaacctaaggcttcaagggcgaaggttgcgcgagcgcaagaaaccccaggctgaagcccctccttcagaacctgctgctccagaagatttcacggttgaacatggcattggagacgccacaggtcctgatctgaccgcgcaattggttgcttcgaacgaagtcccagtccatggttgatcagctgagcattttgcatatttattcccttcttgcagttctgtgaatagcgagggtgtgtgcttcattggaagttgaatcgctcgaagtgtcatggtttatcgtttccggagtagacatccattttgtttttcagcttgtcattgggcatgccatgtatattgcttggtattgtgttcttgtttaaaattcccagtcttgtgc

SEQ ID NO: 21303 - protein, 274 aa, Zea mays subsp. mays
  peptide (1)..(274): Ceres Seq. ID no. 12372735
  misc_feature (38)..(88): Pfam Name: Pfam Description:  Treacher Collins syndrome protein Treacle
  misc_feature (51)..(261): NCBI GI NO: 18403980 NR Description: expressed protein; protein id: At2g35880
  misc_feature (51)..(261): NCBI GI NO: 25408425 NR Description: hypothetical protein At2g35880
  misc_feature (40)..(272): NCBI GI NO: 18417986 NR Description: putative protein; protein id: At4g32330
  misc_feature (49)..(265): NCBI GI NO: 15224733 NR Description: unknown protein; protein id: At2g25480.1
  misc_feature (1)..(230): NCBI GI NO: 34897180 NR Description: unknown protein
  misc_feature (53)..(190): NCBI GI NO: 9294199 NR Description: gb|AAF04893
  misc_feature (53)..(190): NCBI GI NO: 15228950 NR Description: unknown protein; protein id: At3g23090.1
  misc_feature (41)..(243): NCBI GI NO: 34393229 NR Description: putative seed specific protein
  misc_feature (55)..(217): NCBI GI NO: 21618286 NR Description: unknown [Arabidopsis thaliana]
  misc_feature (55)..(217): NCBI GI NO: 6175167 NR Description: unknown protein [Arabidopsis thaliana]
MDQRRQQAGQPRRRRIQRGHLSLAGRCLSSLDQRMRPPPNDAIPAVQEPHENTDKPLKQMQPGKTEDDVRSTTSSTNTPRAAARKSAAVAAGFSFRLEERAEKRKEFFQKLEEKIHAKELEKTNLQEKSKESQEAEIKLLRKSLTFKATPMPSFYKEQPPKVELKKIPPTRARSPKLGRHKPANSATAASADGSVSCESPRSTANSGKVNEAMENNKPHAPARKPVQRPVMKAPSQASATTKAEARPVVTRPKISNSKPKASRAKVARAQETPG

SEQ ID NO: 21304 - protein, 240 aa, Zea mays subsp. mays
  peptide (1)..(240): Ceres Seq. ID no. 12372736
  misc_feature (4)..(54): Pfam Name: Pfam Description:  Treacher Collins syndrome protein Treacle
  misc_feature (17)..(227): NCBI GI NO: 18403980 NR Description: expressed protein; protein id: At2g35880
  misc_feature (17)..(227): NCBI GI NO: 25408425 NR Description: hypothetical protein At2g35880
  misc_feature (6)..(238): NCBI GI NO: 18417986 NR Description: putative protein; protein id: At4g32330
  misc_feature (15)..(231): NCBI GI NO: 15224733 NR Description: unknown protein; protein id: At2g25480.1
  misc_feature (1)..(196): NCBI GI NO: 34897180 NR Description: unknown protein
  misc_feature (19)..(156): NCBI GI NO: 9294199 NR Description: gb|AAF04893
  misc_feature (19)..(156): NCBI GI NO: 15228950 NR Description: unknown protein; protein id: At3g23090.1
  misc_feature (7)..(209): NCBI GI NO: 34393229 NR Description: putative seed specific protein
  misc_feature (21)..(183): NCBI GI NO: 21618286 NR Description: unknown [Arabidopsis thaliana]
  misc_feature (21)..(183): NCBI GI NO: 6175167 NR Description: unknown protein [Arabidopsis thaliana]
MRPPPNDAIPAVQEPHENTDKPLKQMQPGKTEDDVRSTTSSTNTPRAAARKSAAVAAGFSFRLEERAEKRKEFFQKLEEKIHAKELEKTNLQEKSKESQEAEIKLLRKSLTFKATPMPSFYKEQPPKVELKKIPPTRARSPKLGRHKPANSATAASADGSVSCESPRSTANSGKVNEAMENNKPHAPARKPVQRPVMKAPSQASATTKAEARPVVTRPKISNSKPKASRAKVARAQETPG

SEQ ID NO: 21305 - protein, 215 aa, Zea mays subsp. mays
  peptide (1)..(215): Ceres Seq. ID no. 12372737
  misc_feature (1)..(202): NCBI GI NO: 18403980 NR Description: expressed protein; protein id: At2g35880
  misc_feature (1)..(202): NCBI GI NO: 25408425 NR Description: hypothetical protein At2g35880
  misc_feature (1)..(213): NCBI GI NO: 18417986 NR Description: putative protein; protein id: At4g32330
  misc_feature (1)..(206): NCBI GI NO: 15224733 NR Description: unknown protein; protein id: At2g25480.1
  misc_feature (1)..(171): NCBI GI NO: 34897180 NR Description: unknown protein
  misc_feature (1)..(131): NCBI GI NO: 9294199 NR Description: gb|AAF04893
  misc_feature (1)..(131): NCBI GI NO: 15228950 NR Description: unknown protein; protein id: At3g23090.1
  misc_feature (1)..(184): NCBI GI NO: 34393229 NR Description: putative seed specific protein
  misc_feature (1)..(158): NCBI GI NO: 21618286 NR Description: unknown [Arabidopsis thaliana]
  misc_feature (1)..(158): NCBI GI NO: 6175167 NR Description: unknown protein [Arabidopsis thaliana]
MQPGKTEDDVRSTTSSTNTPRAAARKSAAVAAGFSFRLEERAEKRKEFFQKLEEKIHAKELEKTNLQEKSKESQEAEIKLLRKSLTFKATPMPSFYKEQPPKVELKKIPPTRARSPKLGRHKPANSATAASADGSVSCESPRSTANSGKVNEAMENNKPHAPARKPVQRPVMKAPSQASATTKAEARPVVTRPKISNSKPKASRAKVARAQETPG

SEQ ID NO: 21306 - DNA, 1180 bp, Zea mays subsp. mays
  misc_feature (1)..(1180): Ceres Seq. ID no. 12407937
attatccgcactccgaccggtgccacctccaagctgagcccgctcctagactcccagtcccctccgcagtccgcaccgccgcctcgccatggaggcagctgccgccgccttcttgtcccctccccgcgtcgccctcgacgtccgcacactcttctccccgccccgttgcctccccgtctcgccctcatcccagctccgcctcgctgcccgcccccgcgcgctcgccggcgccaagccgcgggttcctgagcccccatcgagaacccgccgtcgacggcggtcgcggcgccagggatgtcgtcgcgatggtggtgccgttcctgaggggggccgcgtgggagcagccaccgccggacttggcctcgttcctgtacaagaaccggatcgtgtacttggggatgtgcctcgttccgtcggtcacggagctcatgctcgccgagtttctctacctccagtatgacgacgccgagaagccaatctacatgtacatcaattccactggcaccaccaagaatggcgagaagttaggctatgagacagaagctcttgcagtatatgatgctatgaggtatgttaaagttcctattttcactctgtgtgtcggtaatgcatggggagaagctgctttactcttagctgctggcgctaaaggtaaccgtgccgcacttccatcatcgacaataatgataaaacagccaattggtcgctttcaaggtcaggcaacagacgttgacattgcaagaaaagagattcgaaatgtcaagatagaaatggttaagctgctggcaagacacattggtaaaccaatggaagagattgctcgggacatcaggcgtcctaaatactttagccccagtgaagctgtggattatggcatcatcgacaaggtgatatacaacgagaaaatccaggaagatggcggtgttgtgtcagaactcaaaagatcaaatttgatatagcgttctttttccacaagtagacacgtctttgtatgtttagtggtcattcacgtgtgtttgagtattgagtagttaccactcgatcactcagtacctggttgtagaggcgtagagcacatagccaatgcattgaacaagcatttccttcccccctctgccgtttcaacgctgtattgcccttacccaacgggcgtgctgaaagatgaattttggtaggttgt

SEQ ID NO: 21307 - protein, 318 aa, Zea mays subsp. mays
  peptide (1)..(318): Ceres Seq. ID no. 12407938
  misc_feature (108)..(300): Pfam Name: Pfam Description:  Clp protease
  misc_feature (97)..(318): NCBI GI NO: 18414804 NR Description: ATP-dependent Clp protease proteolytic subunit
  misc_feature (97)..(318): NCBI GI NO: 19698857 NR Description: unknown protein [Arabidopsis thaliana]
  misc_feature (50)..(233): NCBI GI NO: 34903202 NR Description: unnamed protein product
  misc_feature (97)..(238): NCBI GI NO: 7488077 NR Description: probable Clp proteinase - Arabidopsis thaliana
  misc_feature (284)..(318): NCBI GI NO: 7488077 NR Description: probable Clp proteinase - Arabidopsis thaliana
  misc_feature (115)..(306): NCBI GI NO: 13812146 NR Description: ATP-dependent Clp protease proteolytic subunit
  misc_feature (99)..(302): NCBI GI NO: 22299302 NR Description: ATP-dependent Clp protease proteolytic subunit 3
  misc_feature (99)..(302): NCBI GI NO: 17231850 NR Description: ATP-dependent Clp protease proteolytic subunit
  misc_feature (99)..(302): NCBI GI NO: 23126723 NR Description: hypothetical protein [Nostoc punctiforme]
  misc_feature (99)..(301): NCBI GI NO: 18203214 NR Description: Putative ATP-dependent Clp protease proteolytic subunit-like
YPHSDRCHLQAEPAPRLPVPSAVRTAASPWRQLPPPSCPLPASPSTSAHSSPRPVASPSRPHPSSASLPAPARSPAPSRGFLSPHREPAVDGGRGARDVVAMVVPFLRGAAWEQPPPDLASFLYKNRIVYLGMCLVPSVTELMLAEFLYLQYDDAEKPIYMYINSTGTTKNGEKLGYETEALAVYDAMRYVKVPIFTLCVGNAWGEAALLLAAGAKGNRAALPSSTIMIKQPIGRFQGQATDVDIARKEIRNVKIEMVKLLARHIGKPMEEIARDIRRPKYFSPSEAVDYGIIDKVIYNEKIQEDGGVVSELKRSNLI

SEQ ID NO: 21308 - protein, 217 aa, Zea mays subsp. mays
  peptide (1)..(217): Ceres Seq. ID no. 12407939
  misc_feature (7)..(199): Pfam Name: Pfam Description:  Clp protease
  misc_feature (1)..(217): NCBI GI NO: 18414804 NR Description: ATP-dependent Clp protease proteolytic subunit
  misc_feature (1)..(217): NCBI GI NO: 19698857 NR Description: unknown protein [Arabidopsis thaliana]
  misc_feature (1)..(132): NCBI GI NO: 34903202 NR Description: unnamed protein product
  misc_feature (1)..(137): NCBI GI NO: 7488077 NR Description: probable Clp proteinase - Arabidopsis thaliana
  misc_feature (183)..(217): NCBI GI NO: 7488077 NR Description: probable Clp proteinase - Arabidopsis thaliana
  misc_feature (14)..(205): NCBI GI NO: 13812146 NR Description: ATP-dependent Clp protease proteolytic subunit
  misc_feature (1)..(201): NCBI GI NO: 22299302 NR Description: ATP-dependent Clp protease proteolytic subunit 3
  misc_feature (1)..(201): NCBI GI NO: 17231850 NR Description: ATP-dependent Clp protease proteolytic subunit
  misc_feature (1)..(201): NCBI GI NO: 23126723 NR Description: hypothetical protein [Nostoc punctiforme]
  misc_feature (1)..(200): NCBI GI NO: 18203214 NR Description: Putative ATP-dependent Clp protease proteolytic subunit-like
MVVPFLRGAAWEQPPPDLASFLYKNRIVYLGMCLVPSVTELMLAEFLYLQYDDAEKPIYMYINSTGTTKNGEKLGYETEALAVYDAMRYVKVPIFTLCVGNAWGEAALLLAAGAKGNRAALPSSTIMIKQPIGRFQGQATDVDIARKEIRNVKIEMVKLLARHIGKPMEEIARDIRRPKYFSPSEAVDYGIIDKVIYNEKIQEDGGVVSELKRSNLI

SEQ ID NO: 21309 - protein, 186 aa, Zea mays subsp. mays
  peptide (1)..(186): Ceres Seq. ID no. 12407940
  misc_feature (1)..(168): Pfam Name: Pfam Description:  Clp protease
  misc_feature (1)..(186): NCBI GI NO: 18414804 NR Description: ATP-dependent Clp protease proteolytic subunit
  misc_feature (1)..(186): NCBI GI NO: 19698857 NR Description: unknown protein [Arabidopsis thaliana]
  misc_feature (1)..(101): NCBI GI NO: 34903202 NR Description: unnamed protein product
  misc_feature (1)..(106): NCBI GI NO: 7488077 NR Description: probable Clp proteinase - Arabidopsis thaliana
  misc_feature (152)..(186): NCBI GI NO: 7488077 NR Description: probable Clp proteinase - Arabidopsis thaliana
  misc_feature (1)..(174): NCBI GI NO: 13812146 NR Description: ATP-dependent Clp protease proteolytic subunit
  misc_feature (1)..(170): NCBI GI NO: 22299302 NR Description: ATP-dependent Clp protease proteolytic subunit 3
  misc_feature (1)..(170): NCBI GI NO: 17231850 NR Description: ATP-dependent Clp protease proteolytic subunit
  misc_feature (1)..(170): NCBI GI NO: 23126723 NR Description: hypothetical protein [Nostoc punctiforme]
  misc_feature (1)..(169): NCBI GI NO: 18203214 NR Description: Putative ATP-dependent Clp protease proteolytic subunit-like
MCLVPSVTELMLAEFLYLQYDDAEKPIYMYINSTGTTKNGEKLGYETEALAVYDAMRYVKVPIFTLCVGNAWGEAALLLAAGAKGNRAALPSSTIMIKQPIGRFQGQATDVDIARKEIRNVKIEMVKLLARHIGKPMEEIARDIRRPKYFSPSEAVDYGIIDKVIYNEKIQEDGGVVSELKRSNLI

SEQ ID NO: 21310 - DNA, 589 bp, Zea mays subsp. mays
  misc_feature (1)..(589): Ceres Seq. ID no. 15175545
atccagtcgcatctccctctccgaaatcaaggtagcgtacaccgctgcagtttctagagccctctctgccactcgtgatcccactagtcacaatgcctgccctcgccaagcccgcctcccgcaccgccaagcccgccgcggctccgaagccgaagcctgccgccgccaagccgaaggcggccaccgctggtgcctcccacccgccttacttcgagatgatcaaggaggctatcacggcgctcaaggagaggaccggctccagctcgcaagcgatcgccaagtatgtgggggacaagcacggcgcgtctctgccggccaacttcaagaagatgctttccatccagctccgtgggtccgggagcagtaccagaagaagaggacgtcgtccaagtgagctgcaatgtgtcaattgtgatgtaggagcactgctactctctgttctgatctttcttagtgaagcccattagaggaacaggtttttctcttgggtggagactcttcttggacgctttggttcctttggatggtgagcttgtaagccgctggccttttttttcattattatgccagactagtatgatttttgcac

SEQ ID NO: 21311 - protein, 130 aa, Zea mays subsp. mays
  peptide (1)..(130): Ceres Seq. ID no. 15175546
SSRISLSEIKVAYTAAVSRALSATRDPTSHNACPRQARLPHRQARRGSEAEACRRQAEGGHRWCLPPALLRDDQGGYHGAQGEDRLQLASDRQVCGGQARRVSAGQLQEDAFHPAPWVREQYQKKRTSSK

SEQ ID NO: 21312 - protein, 124 aa, Zea mays subsp. mays
  peptide (1)..(124): Ceres Seq. ID no. 15175547
  misc_feature (35)..(90): Pfam Name: Pfam Description:  linker histone H1 and H5 family
  misc_feature (1)..(90): NCBI GI NO: 22135471 NR Description: histone H1-like protein HON101 [Zea mays]
  misc_feature (4)..(90): NCBI GI NO: 32489126 NR Description: OSJNBb0018J12.6
  misc_feature (1)..(93): NCBI GI NO: 5230785 NR Description: histone H1 WH1B.1 [Triticum aestivum]
  misc_feature (1)..(93): NCBI GI NO: 18463959 NR Description: histone H1-like protein [Zea mays]
  misc_feature (1)..(86): NCBI GI NO: 6474950 NR Description: variant of histone H1 [Lilium longiflorum]
  misc_feature (1)..(90): NCBI GI NO: 7439658 NR Description: histone H1, stress-inducible - tomato
  misc_feature (1)..(90): NCBI GI NO: 729668 NR Description: Histone H1
  misc_feature (1)..(86): NCBI GI NO: 121950 NR Description: HISTONE H1
  misc_feature (2)..(86): NCBI GI NO: 15281578 NR Description: histone-like protein [Fritillaria liliacea]
  misc_feature (2)..(86): NCBI GI NO: 15281584 NR Description: histone-like protein [Fritillaria liliacea]
MPALAKPASRTAKPAAAPKPKPAAAKPKAATAGASHPPYFEMIKEAITALKERTGSSSQAIAKYVGDKHGASLPANFKKMLSIQLRGSGSSTRRRGRRPSELQCVNCDVGALLLSVLIFLSEAH

SEQ ID NO: 21313 - protein, 83 aa, Zea mays subsp. mays
  peptide (1)..(83): Ceres Seq. ID no. 15175548
  misc_feature (1)..(49): NCBI GI NO: 22135471 NR Description: histone H1-like protein HON101 [Zea mays]
  misc_feature (1)..(49): NCBI GI NO: 32489126 NR Description: OSJNBb0018J12.6
  misc_feature (1)..(52): NCBI GI NO: 5230785 NR Description: histone H1 WH1B.1 [Triticum aestivum]
  misc_feature (1)..(52): NCBI GI NO: 18463959 NR Description: histone H1-like protein [Zea mays]
  misc_feature (1)..(45): NCBI GI NO: 6474950 NR Description: variant of histone H1 [Lilium longiflorum]
  misc_feature (1)..(49): NCBI GI NO: 7439658 NR Description: histone H1, stress-inducible - tomato
  misc_feature (1)..(49): NCBI GI NO: 729668 NR Description: Histone H1
  misc_feature (1)..(45): NCBI GI NO: 121950 NR Description: HISTONE H1
  misc_feature (1)..(45): NCBI GI NO: 15281578 NR Description: histone-like protein [Fritillaria liliacea]
  misc_feature (1)..(45): NCBI GI NO: 15281584 NR Description: histone-like protein [Fritillaria liliacea]
MIKEAITALKERTGSSSQAIAKYVGDKHGASLPANFKKMLSIQLRGSGSSTRRRGRRPSELQCVNCDVGALLLSVLIFLSEAH

SEQ ID NO: 21314 - DNA, 1571 bp, Zea mays subsp. mays
  misc_feature (1)..(1571): Ceres Seq. ID no. 13586135
attaatttagtcagcatcacatcgcaatcacaagactcctatacccaaacccacgccccccgcccccctattattctatatatataatacacacactagtgtggagtagtacttcaattggcgttggccgaagaagaggagaagcgaagcaagcaggcttcgagaacaagactgcagggggagggggaggaccaagcgaaaggggaactagagcaagatgggcggcgcactgctgcttgcgctcctcctcgtctctgctgctgccgcccctcaggtacttggagttggcaatggagacaatcacatgagaatcatccaggaggacatcatcgagacagtcaacaaccatcccagtgctgggtggacagcctcacgtaatccttacttttcaaactataccattgcgcaatttaagcacatacttggagtgaaaccagcaccacagaatgcactaagcaatgttcctgtcaaaacttattcaagatcactggaacttccaaaagagtttgacgctagatctgcatggtcccgttgcagcacaattgggaacatacttgatcaaggtcactgtggctcttgttgggcttttggtgctgtggagtgcctccaggaccgtttttgcattcacctcaacatgagcattttactttcagtcaatgacctactggcatgctgcggttttatgtgcggcgatgggtgtgatggaggctatcctatagaggcatggcgctactttgttcaaaatggtgttgttacggatgagtgtgatccatacttcgacccggtcggttgcaagcatcctggatgcgaacctgcttatcctacaccaaagtgtgaaaagaaatgcaaggagcagaaccaagtttggcaggaaaagaagcatttcagcattgatgcgtacagaataaattcagatccacatgacataatggcagaggtctacaaaaatggtcctgtagaagttgctttcacagtttacgaggatttcgcacactacaaatctggagtgtacaagcacatcaccggtggcattatgggtggccatgccgtcaagttgattggatggggaaccagtgatgctggagaagattactggcttctggcaaatcagtggaatagaggctggggcgatgatggatacttcaagatcataaggggcaaaaatgaatgtggcatcgaggagggcgttgttgctggaatgccatccacaaagaatatggttccaaacttcggcggtgccgttggaagagctatagtttaatggttacgtttgcatggcctcaaatgctgttggaattagctaaagtaattttaaaatgcaattgttaaagggccacgatggtgtatgtattttgtacactagctcatttcaaaggtcgttatgttgctggtgccacatcactttggtcaagtggaataatattaataagaactagaatttcgattcgaaaaaaaaaaaaaaaaaaaaaaaaaaaaaaaaaaaaaaaaaaaaaaaaaaaaaaaaaaaaaaaaaaaaaaaaaaaaaaaaaaaaaaaaaaaaaaaaaaaaaaaaaaaaaaaaaattttttttt

SEQ ID NO: 21315 - protein, 347 aa, Zea mays subsp. mays
  peptide (1)..(347): Ceres Seq. ID no. 15220786
  misc_feature (93)..(328): Pfam Name: Pfam Description:  Papain family cysteine protease
  misc_feature (1)..(334): NCBI GI NO: 40643250 NR Description: cathepsin B [Hordeum vulgare subsp. vulgare]
  misc_feature (4)..(347): NCBI GI NO: 7435782 NR Description: cathepsin B-like cysteine proteinase (EC 3
  misc_feature (37)..(334): NCBI GI NO: 7435783 NR Description: cathepsin B-like cysteine proteinase (EC 3
  misc_feature (4)..(304): NCBI GI NO: 21695 NR Description: cathepsin B [Triticum aestivum]
  misc_feature (5)..(334): NCBI GI NO: 609175 NR Description: cathepsin B-like cysteine proteinase
  misc_feature (3)..(334): NCBI GI NO: 14582576 NR Description: cathepsin B-like cysteine proteinase
  misc_feature (5)..(334): NCBI GI NO: 2129942 NR Description: cathepsin B-like cysteine proteinase (EC 3
  misc_feature (3)..(342): NCBI GI NO: 38639325 NR Description: cathepsin B-like cysteine proteinase
  misc_feature (3)..(334): NCBI GI NO: 6165885 NR Description: cathepsin B-like cysteine proteinase
  misc_feature (32)..(335): NCBI GI NO: 18378947 NR Description: expressed protein [Arabidopsis thaliana]
MGGALLLALLLVSAAAAPQVLGVGNGDNHMRIIQEDIIETVNNHPSAGWTASRNPYFSNYTIAQFKHILGVKPAPQNALSNVPVKTYSRSLELPKEFDARSAWSRCSTIGNILDQGHCGSCWAFGAVECLQDRFCIHLNMSILLSVNDLLACCGFMCGDGCDGGYPIEAWRYFVQNGVVTDECDPYFDPVGCKHPGCEPAYPTPKCEKKCKEQNQVWQEKKHFSIDAYRINSDPHDIMAEVYKNGPVEVAFTVYEDFAHYKSGVYKHITGGIMGGHAVKLIGWGTSDAGEDYWLLANQWNRGWGDDGYFKIIRGKNECGIEEGVVAGMPSTKNMVPNFGGAVGRAIV

SEQ ID NO: 21316 - protein, 318 aa, Zea mays subsp. mays
  peptide (1)..(318): Ceres Seq. ID no. 15220787
  misc_feature (64)..(299): Pfam Name: Pfam Description:  Papain family cysteine protease
  misc_feature (1)..(305): NCBI GI NO: 40643250 NR Description: cathepsin B [Hordeum vulgare subsp. vulgare]
  misc_feature (1)..(318): NCBI GI NO: 7435782 NR Description: cathepsin B-like cysteine proteinase (EC 3
  misc_feature (8)..(305): NCBI GI NO: 7435783 NR Description: cathepsin B-like cysteine proteinase (EC 3
  misc_feature (1)..(275): NCBI GI NO: 21695 NR Description: cathepsin B [Triticum aestivum]
  misc_feature (1)..(305): NCBI GI NO: 609175 NR Description: cathepsin B-like cysteine proteinase
  misc_feature (1)..(305): NCBI GI NO: 14582576 NR Description: cathepsin B-like cysteine proteinase
  misc_feature (1)..(305): NCBI GI NO: 2129942 NR Description: cathepsin B-like cysteine proteinase (EC 3
  misc_feature (1)..(313): NCBI GI NO: 38639325 NR Description: cathepsin B-like cysteine proteinase
  misc_feature (1)..(305): NCBI GI NO: 6165885 NR Description: cathepsin B-like cysteine proteinase
  misc_feature (3)..(306): NCBI GI NO: 18378947 NR Description: expressed protein [Arabidopsis thaliana]
MRIIQEDIIETVNNHPSAGWTASRNPYFSNYTIAQFKHILGVKPAPQNALSNVPVKTYSRSLELPKEFDARSAWSRCSTIGNILDQGHCGSCWAFGAVECLQDRFCIHLNMSILLSVNDLLACCGFMCGDGCDGGYPIEAWRYFVQNGVVTDECDPYFDPVGCKHPGCEPAYPTPKCEKKCKEQNQVWQEKKHFSIDAYRINSDPHDIMAEVYKNGPVEVAFTVYEDFAHYKSGVYKHITGGIMGGHAVKLIGWGTSDAGEDYWLLANQWNRGWGDDGYFKIIRGKNECGIEEGVVAGMPSTKNMVPNFGGAVGRAIV

SEQ ID NO: 21317 - protein, 208 aa, Zea mays subsp. mays
  peptide (1)..(208): Ceres Seq. ID no. 15220788
  misc_feature (1)..(189): Pfam Name: Pfam Description:  Papain family cysteine protease
  misc_feature (1)..(195): NCBI GI NO: 40643250 NR Description: cathepsin B [Hordeum vulgare subsp. vulgare]
  misc_feature (1)..(208): NCBI GI NO: 7435782 NR Description: cathepsin B-like cysteine proteinase (EC 3
  misc_feature (1)..(195): NCBI GI NO: 7435783 NR Description: cathepsin B-like cysteine proteinase (EC 3
  misc_feature (1)..(165): NCBI GI NO: 21695 NR Description: cathepsin B [Triticum aestivum]
  misc_feature (1)..(195): NCBI GI NO: 609175 NR Description: cathepsin B-like cysteine proteinase
  misc_feature (1)..(195): NCBI GI NO: 14582576 NR Description: cathepsin B-like cysteine proteinase
  misc_feature (1)..(195): NCBI GI NO: 2129942 NR Description: cathepsin B-like cysteine proteinase (EC 3
  misc_feature (1)..(203): NCBI GI NO: 38639325 NR Description: cathepsin B-like cysteine proteinase
  misc_feature (1)..(195): NCBI GI NO: 6165885 NR Description: cathepsin B-like cysteine proteinase
  misc_feature (1)..(196): NCBI GI NO: 18378947 NR Description: expressed protein [Arabidopsis thaliana]
MSILLSVNDLLACCGFMCGDGCDGGYPIEAWRYFVQNGVVTDECDPYFDPVGCKHPGCEPAYPTPKCEKKCKEQNQVWQEKKHFSIDAYRINSDPHDIMAEVYKNGPVEVAFTVYEDFAHYKSGVYKHITGGIMGGHAVKLIGWGTSDAGEDYWLLANQWNRGWGDDGYFKIIRGKNECGIEEGVVAGMPSTKNMVPNFGGAVGRAIV

SEQ ID NO: 21318 - DNA, 1225 bp, Zea mays subsp. mays
  misc_feature (1)..(1225): Ceres Seq. ID no. 15179121
agaatcttctctcttgacaaggagcaagcctaatcccagaaccccacggtcgtgagaccctagctgccgtcgccgccgccgctgaccggcgacggcgatctagatgggggcgtcggcctccgtgctctcgttcccaacggccgccgcgttcccagcagccgccaccgccgtcgccggggccgccggctgcttcgcgctcggctacctcctggccttcacccgcctcccgcgccacgccgccggcccaggttcgggagggacctccgatgacgattccgaggatgactcggaagaagatgatgacgaaaactccggccgcagtcgcgcggcgaagcgggcgggagggcagaagagggccgggctccggctgctctactgggcacggaacgtggtgaccaagtccgactctgccagggaggcggaaaggtcccggtctcaggccgcggccagtcccctggagatcgagaaccttgctgagataatagaagatttcaaaatggtgttggttgtgaggaatgatctgaagatggggaaggggaagattgccgcacagtgcagtcatgcaactcttgggctattcaaaaaactccaacagagagctccaaaatcactaagaaggtgggagcggtgtgggcaagttaaagtggttgtgaaaatagaaagcgaggaagacatgctagttttacaagggagagcaaagtctttaaatctgccaactcacataaccatagacgctggaagaacacagattgctccaaattcaaggacagtcatggctattctggggccagctgatatggttgatgatgttactggcggtctgaagcttttgtagaaaaccaccttgtcagcattttcaacttgggtcttcatagagcagtgctgggactttgcaggccacagtggtctctgcacttgtactgatgtgcggcagaagaatgaaccttggccccgttggttgacctgagtttcttgtccatgaatttatttggaaggagagcttgcattcttttttcacttgtaccgaccgttatctttggagttgtgatgttagcagttcgaattctggtgttgacaacttatagaccatcatttcttctgtaacatagataagaaaatactatttgactattgtccatttccccttttttattttctttttaataattcgtgcagtagtggacacaatactgagttgctttggagaagtcatcttgattgcggc

SEQ ID NO: 21319 - protein, 243 aa, Zea mays subsp. mays
  peptide (1)..(243): Ceres Seq. ID no. 15179122
  misc_feature (139)..(229): Pfam Name: Pfam Description:  Domain of unknown function UPF0099
  misc_feature (1)..(243): NCBI GI NO: 38345901 NR Description: OSJNBa0060D06.11
  misc_feature (110)..(243): NCBI GI NO: 18418110 NR Description: expressed protein [Arabidopsis thaliana]
  misc_feature (110)..(243): NCBI GI NO: 21592675 NR Description: unknown [Arabidopsis thaliana]
  misc_feature (94)..(243): NCBI GI NO: 15228442 NR Description: expressed protein [Arabidopsis thaliana]
  misc_feature (110)..(243): NCBI GI NO: 11357729 NR Description: hypothetical protein F2K13_20 - Arabidopsisthaliana
  misc_feature (110)..(242): NCBI GI NO: 7706351 NR Description: CGI-147 protein [Homo sapiens]
  misc_feature (110)..(242): NCBI GI NO: 11359891 NR Description: hypothetical protein DKFZp434A1535
  misc_feature (129)..(242): NCBI GI NO: 40889414 NR Description: Chain A, Crystal Structure Of Bit1
  misc_feature (81)..(243): NCBI GI NO: 40744736 NR Description: hypothetical protein AN1991.2
  misc_feature (95)..(243): NCBI GI NO: 9438135 NR Description: unknown [Ochlerotatus triseriatus]
MGASASVLSFPTAAAFPAAATAVAGAAGCFALGYLLAFTRLPRHAAGPGSGGTSDDDSEDDSEEDDDENSGRSRAAKRAGGQKRAGLRLLYWARNVVTKSDSAREAERSRSQAAASPLEIENLAEIIEDFKMVLVVRNDLKMGKGKIAAQCSHATLGLFKKLQQRAPKSLRRWERCGQVKVVVKIESEEDMLVLQGRAKSLNLPTHITIDAGRTQIAPNSRTVMAILGPADMVDDVTGGLKLL

SEQ ID NO: 21320 - DNA, 1231 bp, Zea mays subsp. mays
  misc_feature (1)..(1231): Ceres Seq. ID no. 13586122
ataatggcaaatttctcgtcgaataggtcagtgtgcacgcgtgaccgcgaaaagttgtttcgacctcctcggctgctgctttccgctgacctcgccgtgccattgagatgtcatagaacctgccgagccggtcgcaggcgcgaggagaatggggacggaggccgacgccgcagccgtggattcgcttcggtcgcagatcccgttccagaccgacggggagctcatcctcccgcgccgcgatgtggggctcgtcctcgtcgacctctgcaacggcttctgcaccgtcggcgccgggaacctcgctcctgttgcgccaaataagcagataagtaaaatggtggaagaggccgctaggctctctaagctgttctgtgatagaaacctgccgatctttgcattcctggatacccattatccagataagccggagccaccgtatcctcctcactgtatcattggtactggggaggagaacttcgttccagacctggagtggttggaaaaggagccaaatgtgactataaagaggaaaagttgtattgacggttacatcagctgcatagaggaggacgggtctagtgtttttgttgactgggtgggaaaatatcagatcaaaactgtcttggtactcgggatatgcacggacatctgtgttttggattttgcaagctcaactctggctgctcgaaatattgaccgagtgcctccattacgagatgtcgtgatttattcagaggggtgtgctacatatgaccttcctgttgagatcgctatgaatatcaaaggagctcttgcccatcctcaggacctgatgcatcatattggactctatatggccaaaggaaggggtgcaaaggttgttgacagggtggttattgaaccttgaataaaaaaaacttccctcatcgtagtgatgttgctagagtttcctgtcttctcatccttccattgtaacaatcagatatatatgcgtcttagcataaagttgttgagatactaatgctagcgacaactatgttgacttgtcgagtatgtagagatgggctcatcatttttttggtgagcttgtacataatttcctgaaaaaaaaaaaaaaaaaaaaaaaaaaaaaaaaaaaaaaaaaaaaaaaaaaaaaaaaaaaaaaaaaaaaaaaaaaaaaaaaaaaaaaaaaatttccccccccccccccssggggggggssssscmcccmccccccccaaaaagggggggg

SEQ ID NO: 21321 - protein, 245 aa, Zea mays subsp. mays
  peptide (1)..(245): Ceres Seq. ID no. 15220784
  misc_feature (31)..(220): Pfam Name: Pfam Description:  Isochorismatase family
  misc_feature (11)..(244): NCBI GI NO: 18400020 NR Description: isochorismatase hydrolase family
  misc_feature (11)..(244): NCBI GI NO: 21537016 NR Description: unknown [Arabidopsis thaliana]
  misc_feature (1)..(220): NCBI GI NO: 15144508 NR Description: unknown [Lycopersicon esculentum]
  misc_feature (11)..(219): NCBI GI NO: 25412119 NR Description: hypothetical protein At2g22570
  misc_feature (12)..(241): NCBI GI NO: 23042463 NR Description: hypothetical protein
MGTEADAAAVDSLRSQIPFQTDGELILPRRDVGLVLVDLCNGFCTVGAGNLAPVAPNKQISKMVEEAARLSKLFCDRNLPIFAFLDTHYPDKPEPPYPPHCIIGTGEENFVPDLEWLEKEPNVTIKRKSCIDGYISCIEEDGSSVFVDWVGKYQIKTVLVLGICTDICVLDFASSTLAARNIDRVPPLRDVVIYSEGCATYDLPVEIAMNIKGALAHPQDLMHHIGLYMAKGRGAKVVDRVVIEP

SEQ ID NO: 21322 - protein, 183 aa, Zea mays subsp. mays
  peptide (1)..(183): Ceres Seq. ID no. 15220785
  misc_feature (1)..(158): Pfam Name: Pfam Description:  Isochorismatase family
  misc_feature (1)..(182): NCBI GI NO: 18400020 NR Description: isochorismatase hydrolase family
  misc_feature (1)..(182): NCBI GI NO: 21537016 NR Description: unknown [Arabidopsis thaliana]
  misc_feature (1)..(158): NCBI GI NO: 15144508 NR Description: unknown [Lycopersicon esculentum]
  misc_feature (1)..(157): NCBI GI NO: 25412119 NR Description: hypothetical protein At2g22570
  misc_feature (1)..(179): NCBI GI NO: 23042463 NR Description: hypothetical protein
MVEEAARLSKLFCDRNLPIFAFLDTHYPDKPEPPYPPHCIIGTGEENFVPDLEWLEKEPNVTIKRKSCIDGYISCIEEDGSSVFVDWVGKYQIKTVLVLGICTDICVLDFASSTLAARNIDRVPPLRDVVIYSEGCATYDLPVEIAMNIKGALAHPQDLMHHIGLYMAKGRGAKVVDRVVIEP

SEQ ID NO: 21323 - DNA, 1626 bp, Zea mays subsp. mays; identical to SEQ ID NO: 21265
  misc_feature (1)..(1626): Ceres Seq. ID no. 12350565

SEQ ID NO: 21324 - protein, 340 aa, Zea mays subsp. mays; identical to SEQ ID NO: 21266
  peptide (1)..(340): Ceres Seq. ID no. 12350566
  misc_feature (160)..(202): Pfam Name: Pfam Description:  Helix-loop-helix DNA-binding domain
  misc_feature (107)..(300): NCBI GI NO: 25411751 NR Description: bHLH transcription factor
  misc_feature (107)..(300): NCBI GI NO: 22325727 NR Description: bHLH protein; protein id: At2g16910.1
  misc_feature (113)..(300): NCBI GI NO: 27650307 NR Description: bHLH transcription factor [Brassica napus]
  misc_feature (118)..(303): NCBI GI NO: 34907076 NR Description: OSJNBa0093F16.27
  misc_feature (104)..(303): NCBI GI NO: 22331357 NR Description: bHLH protein; protein id: At3g26744
  misc_feature (113)..(250): NCBI GI NO: 25513489 NR Description: F13K23.12 protein - Arabidopsis thaliana
  misc_feature (113)..(250): NCBI GI NO: 15222101 NR Description: bHLH protein; protein id: At1g12860.1
  misc_feature (148)..(303): NCBI GI NO: 29466635 NR Description: Transcription Factor [Oryza sativa]
  misc_feature (148)..(303): NCBI GI NO: 32489775 NR Description: OSJNBb0018A10.6
  misc_feature (108)..(231): NCBI GI NO: 15223363 NR Description: bHLH protein; protein id: At1g01260

SEQ ID NO: 21325 - protein, 282 aa, Zea mays subsp. mays; identical to SEQ ID NO: 21267
  peptide (1)..(282): Ceres Seq. ID no. 12350567
  misc_feature (102)..(144): Pfam Name: Pfam Description:  Helix-loop-helix DNA-binding domain
  misc_feature (49)..(242): NCBI GI NO: 25411751 NR Description: bHLH transcription factor
  misc_feature (49)..(242): NCBI GI NO: 22325727 NR Description: bHLH protein; protein id: At2g16910.1
  misc_feature (55)..(242): NCBI GI NO: 27650307 NR Description: bHLH transcription factor [Brassica napus]
  misc_feature (60)..(245): NCBI GI NO: 34907076 NR Description: OSJNBa0093F16.27
  misc_feature (46)..(245): NCBI GI NO: 22331357 NR Description: bHLH protein; protein id: At3g26744
  misc_feature (55)..(192): NCBI GI NO: 25513489 NR Description: F13K23.12 protein - Arabidopsis thaliana
  misc_feature (55)..(192): NCBI GI NO: 15222101 NR Description: bHLH protein; protein id: At1g12860.1
  misc_feature (90)..(245): NCBI GI NO: 29466635 NR Description: Transcription Factor [Oryza sativa]
  misc_feature (90)..(245): NCBI GI NO: 32489775 NR Description: OSJNBb0018A10.6
  misc_feature (50)..(173): NCBI GI NO: 15223363 NR Description: bHLH protein; protein id: At1g01260

SEQ ID NO: 21326 - protein, 219 aa, Zea mays subsp. mays; identical to SEQ ID NO: 21268
  peptide (1)..(219): Ceres Seq. ID no. 12350568
  misc_feature (135)..(187): Pfam Name: 20 copies Pfam Description: Collagen triple helix repeat
  misc_feature (1)..(219): NCBI GI NO: 13562004 NR Description: major ampullate spidroin 2-like protein
  misc_feature (1)..(219): NCBI GI NO: 13562004 NR Description: major ampullate spidroin 2-like protein
  misc_feature (21)..(219): NCBI GI NO: 1263289 NR Description: fibroin-4
  misc_feature (50)..(219): NCBI GI NO: 17536359 NR Description: Predicted CDS, cuticle collagen family member
  misc_feature (1)..(219): NCBI GI NO: 13562004 NR Description: major ampullate spidroin 2-like protein
  misc_feature (1)..(219): NCBI GI NO: 13561986 NR Description: major ampullate spidroin 2 [Argiope trifasciata]
  misc_feature (1)..(204): NCBI GI NO: 28564681 NR Description: OSJNBa0039C01.4
  misc_feature (1)..(219): NCBI GI NO: 9625624 NR Description: nuclear antigen EBNA1 [Human herpesvirus 4]
  misc_feature (1)..(219): NCBI GI NO: 13562004 NR Description: major ampullate spidroin 2-like protein
  misc_feature (1)..(219): NCBI GI NO: 13562004 NR Description: major ampullate spidroin 2-like protein

SEQ ID NO: 21327 - DNA, 1208 bp, Zea mays subsp. mays
  misc_feature (1)..(1208): Ceres Seq. ID no. 12356503
atctaccgtgcggagggggaagagggagaggccaggagaggaaagcctgcagccaccatggattccgacctctggatctcgcgtctcacggccgccaagcggcagtttgcgctgcagcgcgcgcagcgccagcacgccgccccggcatcccatcacgatcgatttgggtatgatgatatcgaacctgaggatgatttgcactcagacttcccatgcccttactgttatgaagatcatgatgttgcttctctctgcgcccatttggaggacgagcaccctttcgagtctaaaattgtgtcttgcccagtttgctcagctaggatttcgaaggacttggtggatcatataacccttcagcatggctacctatttaaattgcagaaacatcaaagagtacgcagagttactggtaatggcaaccacaatctctcctatgcagggagagatcttcaactgcaagagacctacttaaaggtgcttcttggaaatagcagtcgaagcagcagtaccaatgcatcaagtacagtcaccgattcactgctaccctcactagttttaaatttatcatcaccagaagtagaagacgcatcaaagttttcagctcctgctgtggtggaaaataattggtttaaacgatcactgccttcaaaaacttggaaattaagaactgttgattccacccttagtcatgaagagagggagcgtaggaggaggagagctgctgtgagatcagcttttgtccagcatctccttgtcaccaccatttttgaagactagcagatcaagcacagctcatgcaaaggaatcttgtgggcgggccttttgcccactcatttatctggatggataaggcactaattatcttggataccatcacgctgttcatccggtctgctgggtaaccatgacaggaaaaatgaagcagcgggcgtcttaccttatatatgctctctggaagcagctgacatttgttttctggatcatattcataattctatgtaggctgtgacaggaatctctatagtagagccatgatgttttttttgggttgggtttcatcctgcgttggagaatgtgcccaaatttttttttttggagaatatgccttatctggatggataaggcactaaacatttgaagattatatttcggaggttggagaatatgacaatttgatttatatcactaaacatttgaagattatgttg

SEQ ID NO: 21328 - protein, 258 aa, Zea mays subsp. mays
  peptide (1)..(258): Ceres Seq. ID no. 12356504
  misc_feature (56)..(255): Pfam Name: Di19 Pfam Description: Drought induced 19 protein
  misc_feature (56)..(258): NCBI GI NO: 18377875 NR Description: AT3g06760/F3E22_10 [Arabidopsis thaliana]
  misc_feature (20)..(258): NCBI GI NO: 25992529 NR Description: fiber protein Fb2 [Gossypium barbadense]
  misc_feature (20)..(258): NCBI GI NO: 15240426 NR Description: drought-induced protein - like
  misc_feature (20)..(258): NCBI GI NO: 28393233 NR Description: unknown protein [Arabidopsis thaliana]
  misc_feature (56)..(240): NCBI GI NO: 15028023 NR Description: unknown protein [Arabidopsis thaliana]
  misc_feature (56)..(240): NCBI GI NO: 1076316 NR Description: drought-induced protein Di19
  misc_feature (56)..(251): NCBI GI NO: 15230782 NR Description: unknown protein; protein id: At3g06760.1
  misc_feature (20)..(185): NCBI GI NO: 13937216 NR Description: AT5g49230/K21P3_11 [Arabidopsis thaliana]
  misc_feature (20)..(185): NCBI GI NO: 15239827 NR Description: drought-induced protein Di19-like protein
  misc_feature (56)..(206): NCBI GI NO: 30696095 NR Description: drought-induced protein -related
IYRAEGEEGEARRGKPAATMDSDLWISRLTAAKRQFALQRAQRQHAAPASHHDRFGYDDIEPEDDLHSDFPCPYCYEDHDVASLCAHLEDEHPFESKIVSCPVCSARISKDLVDHITLQHGYLFKLQKHQRVRRVTGNGNHNLSYAGRDLQLQETYLKVLLGNSSRSSSTNASSTVTDSLLPSLVLNLSSPEVEDASKFSAPAVVENNWFKRSLPSKTWKLRTVDSTLSHEERERRRRRAAVRSAFVQHLLVTTIFED

SEQ ID NO: 21329 - protein, 239 aa, Zea mays subsp. mays
  peptide (1)..(239): Ceres Seq. ID no. 12356505
  misc_feature (37)..(236): Pfam Name: Di19 Pfam Description: Drought induced 19 protein
  misc_feature (37)..(239): NCBI GI NO: 18377875 NR Description: AT3g06760/F3E22_10 [Arabidopsis thaliana]
  misc_feature (1)..(239): NCBI GI NO: 25992529 NR Description: fiber protein Fb2 [Gossypium barbadense]
  misc_feature (1)..(239): NCBI GI NO: 15240426 NR Description: drought-induced protein - like
  misc_feature (1)..(239): NCBI GI NO: 28393233 NR Description: unknown protein [Arabidopsis thaliana]
  misc_feature (37)..(221): NCBI GI NO: 15028023 NR Description: unknown protein [Arabidopsis thaliana]
  misc_feature (37)..(221): NCBI GI NO: 1076316 NR Description: drought-induced protein Di19
  misc_feature (37)..(232): NCBI GI NO: 15230782 NR Description: unknown protein; protein id: At3g06760.1
  misc_feature (1)..(166): NCBI GI NO: 13937216 NR Description: AT5g49230/K21P3_11 [Arabidopsis thaliana]
  misc_feature (1)..(166): NCBI GI NO: 15239827 NR Description: drought-induced protein Di19-like protein
  misc_feature (37)..(187): NCBI GI NO: 30696095 NR Description: drought-induced protein -related
MDSDLWISRLTAAKRQFALQRAQRQHAAPASHHDRFGYDDIEPEDDLHSDFPCPYCYEDHDVASLCAHLEDEHPFESKIVSCPVCSARISKDLVDHITLQHGYLFKLQKHQRVRRVTGNGNHNLSYAGRDLQLQETYLKVLLGNSSRSSSTNASSTVTDSLLPSLVLNLSSPEVEDASKFSAPAVVENNWFKRSLPSKTWKLRTVDSTLSHEERERRRRRAAVRSAFVQHLLVTTIFED

SEQ ID NO: 21330 - DNA, 1006 bp, Zea mays subsp. mays
  misc_feature (1)..(1006): Ceres Seq. ID no. 15180555
acacgttccctcgtcttttgtcagttggacaatccgcagctcctccatctcattcttccccccatcccatccccaaggttgaccggcgaaatcagcagtccgagaaccgcgagcttctgcctgatccagcctcatcccgccatggacgaatctgaggagcacagcaacggcggcgggcacccccacccgcaccacgggtacgagtggaagttcccggcggcgctgagcgcgaacacgacgagcgtgcacgtgacggcgctggacggcgtggtgaacgtgaactcgctgttcacggtggccgtgttcgtggggctgtcgctggcgaccccggggcagctgcggagcctggcgggggacccgcggtgcgacgccggcccgggcgtggcgcggtcgctgctggtgctggaggtggtggccttctcgtccttcctcttctccagcctggtggcgcagggcctgaagctggcgctcaacctcatcaactccaaggacccgcacgacgcggcgcgcgcccacatcgacgcccgcgtgctccgcctcggcatgctcgcctccgccgtcggatccgtcgtcggctgcgtcttcctcatgacgtccatggtcatggtcgtgcaggtccgcctcggcacgctgagctgccccaccgaccgcgccgccgccaaggccgccgcgggcctcgtcggcctcgtcaccaccgcgctcgctttctacgtgggcaccgtcttctacaccttcacccactgatgccagttccatgcatccgtgcgctgcatcccaaatccatctagcgttgcgttgcgttgcgttgcaaagaacacatcgccatcagtggtgtcggtgtgcgaggaaattgaaaggaggacatgcaatctgcgttattactttgatctgatgcgctgttcgtttttgttcgtgactaaagtttagttagtgttggatattagttataaatattaaatataaacttaattaagtttaataaattcatctgatcttttattttgct

SEQ ID NO: 21331 - protein, 247 aa, Zea mays subsp. mays
  peptide (1)..(247): Ceres Seq. ID no. 15180556
  misc_feature (48)..(247): NCBI GI NO: 37531676 NR Description: hypothetical protein
  misc_feature (65)..(247): NCBI GI NO: 18397969 NR Description: expressed protein [Arabidopsis thaliana]
  misc_feature (76)..(247): NCBI GI NO: 6041846 NR Description: unknown protein [Arabidopsis thaliana]
  misc_feature (76)..(245): NCBI GI NO: 15226312 NR Description: expressed protein [Arabidopsis thaliana]
  misc_feature (79)..(246): NCBI GI NO: 15239293 NR Description: expressed protein [Arabidopsis thaliana]
  misc_feature (80)..(246): NCBI GI NO: 34395171 NR Description: unknown protein
  misc_feature (80)..(246): NCBI GI NO: 34900646 NR Description: hypothetical protein~similar to Arabidopsisthaliana chromosome5
  misc_feature (82)..(164): NCBI GI NO: 38345578 NR Description: OSJNBa0027H06.14
TRSLVFCQLDNPQLLHLILPPIPSPRLTGEISSPRTASFCLIQPHPAMDESEEHSNGGGHPHPHHGYEWKFPAALSANTTSVHVTALDGVVNVNSLFTVAVFVGLSLATPGQLRSLAGDPRCDAGPGVARSLLVLEVVAFSSFLFSSLVAQGLKLALNLINSKDPHDAARAHIDARVLRLGMLASAVGSVVGCVFLMTSMVMVVQVRLGTLSCPTDRAAAKAAAGLVGLVTTALAFYVGTVFYTFTH

SEQ ID NO: 21332 - protein, 200 aa, Zea mays subsp. mays
  peptide (1)..(200): Ceres Seq. ID no. 15180557
  misc_feature (1)..(200): NCBI GI NO: 37531676 NR Description: hypothetical protein
  misc_feature (18)..(200): NCBI GI NO: 18397969 NR Description: expressed protein [Arabidopsis thaliana]
  misc_feature (29)..(200): NCBI GI NO: 6041846 NR Description: unknown protein [Arabidopsis thaliana]
  misc_feature (29)..(198): NCBI GI NO: 15226312 NR Description: expressed protein [Arabidopsis thaliana]
  misc_feature (32)..(199): NCBI GI NO: 15239293 NR Description: expressed protein [Arabidopsis thaliana]
  misc_feature (33)..(199): NCBI GI NO: 34395171 NR Description: unknown protein
  misc_feature (33)..(199): NCBI GI NO: 34900646 NR Description: hypothetical protein~similar to Arabidopsisthaliana chromosome5
  misc_feature (35)..(117): NCBI GI NO: 38345578 NR Description: OSJNBa0027H06.14
MDESEEHSNGGGHPHPHHGYEWKFPAALSANTTSVHVTALDGVVNVNSLFTVAVFVGLSLATPGQLRSLAGDPRCDAGPGVARSLLVLEVVAFSSFLFSSLVAQGLKLALNLINSKDPHDAARAHIDARVLRLGMLASAVGSVVGCVFLMTSMVMVVQVRLGTLSCPTDRAAAKAAAGLVGLVTTALAFYVGTVFYTFTH

SEQ ID NO: 21333 - DNA, 946 bp, Zea mays subsp. mays
  misc_feature (1)..(946): Ceres Seq. ID no. 13598846
agcgaccagccagtgatcgaccgaggcagagactgactactaggagcagagagcagcggagatggtgaagattccgagccccaggaggctgttcaggagccggtccaggagcaccaccatcatcggcggcggcggcgcggacatctgcgccatggtcgccgagcacgagaggatcgagtgggaggtgcggcccggcgggatgctggtgcagaagcggcgctcgacggaggacgacgcggcggcggccgtggagtacatcctggtgagagtctccaccaccgggtggcagtggcacgacgtctccatcgacgccaccgcaaccttcggcgacctgaaggtgatgctgtcgctggcgaccgggctgtggcccagggagcagaggctgctgtacaggggcaaggagagggacgactgcgagcacctgcacatggtgggggtccaggacaaggacaaggtgctgctcctggaggacccggccgtcaaggagaggaagctcaggtcaaccaccttggcgcagctcatgggcgtgccctgccactccttcatccaagtgtagagagaaacccccggggaatttcttgccatttttctcccgtctctcgtcgtcgttctccagcttgcctgcgtgagcgaagggtttcagtccagtctaaccgcgtttgttcagagcctgctgagttccatctcagggcttgaattcggccaatcgaatcaagacagtcgcaaacgataggatataaagatgatgaatacatggcgtaaattactgtgaacgggtacgtaatgtcatcccagtgccagtgtgtgtgagccagtagttctttggttccttgctctgtatatattctctttttttccttcctgagatcagcaaaacagttcggaattccatagatgctgctgtaaatcccttgtcttttttccacggaatgcagcccccttttct

SEQ ID NO: 21334 - protein, 164 aa, Zea mays subsp. mays
  peptide (1)..(164): Ceres Seq. ID no. 13598847
  misc_feature (66)..(139): Pfam Name: Pfam Description:  Ubiquitin family
  misc_feature (1)..(164): NCBI GI NO: 20804881 NR Description: P0497A05.5
  misc_feature (1)..(164): NCBI GI NO: 32488469 NR Description: OSJNBa0081L15.2
  misc_feature (38)..(145): NCBI GI NO: 15241381 NR Description: ubiquitin family [Arabidopsis thaliana]
  misc_feature (35)..(144): NCBI GI NO: 15237460 NR Description: ubiquitin family [Arabidopsis thaliana]
  misc_feature (40)..(145): NCBI GI NO: 34898024 NR Description: ESTs AU082174
  misc_feature (40)..(145): NCBI GI NO: 25553557 NR Description: OSJNBa0038F22.4
  misc_feature (39)..(145): NCBI GI NO: 30697630 NR Description: BAG domain containing protein
  misc_feature (36)..(137): NCBI GI NO: 15231035 NR Description: expressed protein [Arabidopsis thaliana]
  misc_feature (39)..(145): NCBI GI NO: 21553443 NR Description: unknown [Arabidopsis thaliana]
  misc_feature (36)..(137): NCBI GI NO: 19699283 NR Description: At3g51780/ORF3 [Arabidopsis thaliana]
MVKIPSPRRLFRSRSRSTTIIGGGGADICAMVAEHERIEWEVRPGGMLVQKRRSTEDDAAAAVEYILVRVSTTGWQWHDVSIDATATFGDLKVMLSLATGLWPREQRLLYRGKERDDCEHLHMVGVQDKDKVLLLEDPAVKERKLRSTTLAQLMGVPCHSFIQV

SEQ ID NO: 21335 - protein, 134 aa, Zea mays subsp. mays
  peptide (1)..(134): Ceres Seq. ID no. 13598848
  misc_feature (36)..(109): Pfam Name: Pfam Description:  Ubiquitin family
  misc_feature (1)..(134): NCBI GI NO: 20804881 NR Description: P0497A05.5
  misc_feature (1)..(134): NCBI GI NO: 32488469 NR Description: OSJNBa0081L15.2
  misc_feature (8)..(115): NCBI GI NO: 15241381 NR Description: ubiquitin family [Arabidopsis thaliana]
  misc_feature (5)..(114): NCBI GI NO: 15237460 NR Description: ubiquitin family [Arabidopsis thaliana]
  misc_feature (10)..(115): NCBI GI NO: 34898024 NR Description: ESTs AU082174
  misc_feature (10)..(115): NCBI GI NO: 25553557 NR Description: OSJNBa0038F22.4
  misc_feature (9)..(115): NCBI GI NO: 30697630 NR Description: BAG domain containing protein
  misc_feature (6)..(107): NCBI GI NO: 15231035 NR Description: expressed protein [Arabidopsis thaliana]
  misc_feature (9)..(115): NCBI GI NO: 21553443 NR Description: unknown [Arabidopsis thaliana]
  misc_feature (6)..(107): NCBI GI NO: 19699283 NR Description: At3g51780/ORF3 [Arabidopsis thaliana]
MVAEHERIEWEVRPGGMLVQKRRSTEDDAAAAVEYILVRVSTTGWQWHDVSIDATATFGDLKVMLSLATGLWPREQRLLYRGKERDDCEHLHMVGVQDKDKVLLLEDPAVKERKLRSTTLAQLMGVPCHSFIQV

SEQ ID NO: 21336 - protein, 118 aa, Zea mays subsp. mays
  peptide (1)..(118): Ceres Seq. ID no. 13598849
  misc_feature (20)..(93): Pfam Name: Pfam Description:  Ubiquitin family
  misc_feature (1)..(118): NCBI GI NO: 20804881 NR Description: P0497A05.5
  misc_feature (1)..(118): NCBI GI NO: 32488469 NR Description: OSJNBa0081L15.2
  misc_feature (1)..(99): NCBI GI NO: 15241381 NR Description: ubiquitin family [Arabidopsis thaliana]
  misc_feature (1)..(98): NCBI GI NO: 15237460 NR Description: ubiquitin family [Arabidopsis thaliana]
  misc_feature (1)..(99): NCBI GI NO: 34898024 NR Description: ESTs AU082174
  misc_feature (1)..(99): NCBI GI NO: 25553557 NR Description: OSJNBa0038F22.4
  misc_feature (1)..(99): NCBI GI NO: 30697630 NR Description: BAG domain containing protein
  misc_feature (1)..(91): NCBI GI NO: 15231035 NR Description: expressed protein [Arabidopsis thaliana]
  misc_feature (1)..(99): NCBI GI NO: 21553443 NR Description: unknown [Arabidopsis thaliana]
  misc_feature (1)..(91): NCBI GI NO: 19699283 NR Description: At3g51780/ORF3 [Arabidopsis thaliana]
MLVQKRRSTEDDAAAAVEYILVRVSTTGWQWHDVSIDATATFGDLKVMLSLATGLWPREQRLLYRGKERDDCEHLHMVGVQDKDKVLLLEDPAVKERKLRSTTLAQLMGVPCHSFIQV

SEQ ID NO: 21337 - DNA, 1168 bp, Zea mays subsp. mays
  misc_feature (1)..(1168): Ceres Seq. ID no. 15179380
gtttcgctctcagttggcggttagctagcttgcatactagcatcaggtgccccttgccgagccgtacgtgtgtcgtcgtcgacgacgatggtggcggcgcccagcaagtgccggccgtcggcggcagcgctggtggtggcaccgccgggggcccctcggcgccggctgcggtgccggtgctgcgaggacacgctgggcgtcccgcgccgccggctgcagccgcagctgcacctgaagcagcaggcacctgcggcgacgaccgcccccgccgcggcgccgccgccgaggccccggcggatcgtgctggtgcggcacggcgagagcgagggcaacgtggacgaggctgcatacacgcgcgtcccggaccccaggatcgggctcaccgccaagggctggcgcgaggccgacgactgcggccgccgcctgcgcgacctcttctcctctggatcccgcgaccaggacgactggaaggtctacttctacgcgtcgccgtaccgccgcagcctggagaccctgcgcggcatcggccacgccttcgagccccaccgcatcgccggcgtccgcgaggagccccgcctccgcgagcaggacttcggcaacttccaggaccgggagcagatgcgggtggagaaggagatccggcaacgctacggccgcttcttctaccgcttccccaacggcgagtcggcggcggacgtgtacgaccgcatcaccggcttccgggagaccctgctctccgacatcgtcctcggccgcttccagcccccgggccaccgcagcaccagcggagacatgaacatcgtgctcgtctcccacggcctcaccctccgcgtcttcctcatgcgctggtacaagtggaccgtccgccagttcgagggcctcgagaacctcgccaacggcggcgagctcgtcatgcagactggagaaggcggcaggtacagcctcctagtgcaccacacgcccgacgagctcagggcgttcggcctcaccgacgagatgctgcaggaccagatgtggcagaagacggccaggcccggcgagctcaaccaccgcttcatgacaaacggacagtccttctttgatccatttactgtaatctactagttcttgacgaccgaccacatgttatgtatgtgataagtgattaaatgtttttttttatggcggt

SEQ ID NO: 21338 - protein, 359 aa, Zea mays subsp. mays
  peptide (1)..(359): Ceres Seq. ID no. 15179381
  misc_feature (33)..(257): Pfam Name: Pfam Description:  Progesterone receptor
  misc_feature (31)..(350): NCBI GI NO: 29247944 NR Description: GLP_26_54603_52153 [Giardia lamblia ATCC 50803]
FALSWRLASLHTSIRCPLPSRTCVVVDDDGGGAQQVPAVGGSAGGGTAGGPSAPAAVPVLRGHAGRPAPPAAAAAAPEAAGTCGDDRPRRGAAAEAPADRAGAARRERGQRGRGCIHARPGPQDRAHRQGLARGRRLRPPPARPLLLWIPRPGRLEGLLLRVAVPPQPGDPARHRPRLRAPPHRRRPRGAPPPRAGLRQLPGPGADAGGEGDPATLRPLLLPLPQRRVGGGRVRPHHRLPGDPALRHRPRPLPAPGPPQHQRRHEHRARLPRPHPPRLPHALVQVDRPPVRGPREPRQRRRARHADWRRRQVQPPSAPHARRAQGVRPHRRDAAGPDVAEDGQARRAQPPLHDKRTVLL

SEQ ID NO: 21339 - protein, 338 aa, Zea mays subsp. mays
  peptide (1)..(338): Ceres Seq. ID no. 15179382
  misc_feature (69)..(288): Pfam Name: Pfam Description:  Phosphoglycerate mutase family
  misc_feature (1)..(335): NCBI GI NO: 34897810 NR Description: P0514G12.25
  misc_feature (68)..(332): NCBI GI NO: 15229917 NR Description: expressed protein [Arabidopsis thaliana]
  misc_feature (68)..(308): NCBI GI NO: 15223983 NR Description: expressed protein [Arabidopsis thaliana]
  misc_feature (67)..(286): NCBI GI NO: 29829000 NR Description: hypothetical protein
  misc_feature (67)..(286): NCBI GI NO: 21224153 NR Description: conserved hypothetical protein SC4H2.29
  misc_feature (67)..(286): NCBI GI NO: 29469213 NR Description: unknown [Streptomyces murayamaensis]
  misc_feature (67)..(286): NCBI GI NO: 32415611 NR Description: hypothetical protein [Neurospora crassa]
  misc_feature (52)..(296): NCBI GI NO: 40741871 NR Description: hypothetical protein AN4983.2
  misc_feature (158)..(286): NCBI GI NO: 6320256 NR Description: Hypothetical ORF; Ydr051cp
  misc_feature (67)..(140): NCBI GI NO: 6320256 NR Description: Hypothetical ORF; Ydr051cp
MVAAPSKCRPSAAALVVAPPGAPRRRLRCRCCEDTLGVPRRRLQPQLHLKQQAPAATTAPAAAPPPRPRRIVLVRHGESEGNVDEAAYTRVPDPRIGLTAKGWREADDCGRRLRDLFSSGSRDQDDWKVYFYASPYRRSLETLRGIGHAFEPHRIAGVREEPRLREQDFGNFQDREQMRVEKEIRQRYGRFFYRFPNGESAADVYDRITGFRETLLSDIVLGRFQPPGHRSTSGDMNIVLVSHGLTLRVFLMRWYKWTVRQFEGLENLANGGELVMQTGEGGRYSLLVHHTPDELRAFGLTDEMLQDQMWQKTARPGELNHRFMTNGQSFFDPFTVIY

SEQ ID NO: 21340 - DNA, 925 bp, Zea mays subsp. mays
  misc_feature (1)..(925): Ceres Seq. ID no. 13600485
tatgaaaaatcaagatctcctgggaggttctttgacctagtttatcatgaaaatgcccgtgttctactccatgatgagagcatataccgatttgaatgttgctcgagtccgacaaggttgtctattcagctgatggaatatggtcacgaaaagccagaagtgactgcagtatcaattgaaccaaatttttcttcgtatctttttagcgagtacttgtgtagtacgccagacaagaaattatctgaaggcgtctaccttggaaggaataagcggaaatattcaaataatgatgaaccttcagattctttgaaggcaatggatggtatcaatgttgtgaatggtcttgaatgcaagatatcctgcaagacctcgaaagtttcatatgtccttgatactgaagatttcttgttccggcttcggaagagaaggaaaattttgcggggcgggaatgtgcccgaccgtttgcagatttcatcaatatctgctgcaaaagtgcagcgcttcaataggttcctatccaaaccataggatcatttggcatacaaatgtatcgaaacctgttgctggggtcccagctgcttggcttgaacaatgattccatcgacgtcgcggagtcccctttcggaataacagatgggaagacatagggtaaatacagcaaagcgaagcgagcatgtaggccacagtagtcagtctgttgttccgaaagatgtgtatatatgtattagcagcatgattgttctgattatctttttactgattttcgatggtaggtctattccatcaagtatttaactaatcatttgttgctgttggtataggtcttttgttcttttagccgtcgttttgcattgaagatatgtagccaaaattaaaaacctgtgtcgaacagttatgtagtcttggctccattaatcaaacggac

SEQ ID NO: 21341 - protein, 175 aa, Zea mays subsp. mays
  peptide (1)..(175): Ceres Seq. ID no. 15218951
  misc_feature (1)..(126): NCBI GI NO: 34894158 NR Description: putative co-repressor protein
  misc_feature (1)..(173): NCBI GI NO: 15223031 NR Description: expressed protein [Arabidopsis thaliana]
  misc_feature (1)..(161): NCBI GI NO: 25406027 NR Description: hypothetical protein F20P5.21
  misc_feature (1)..(171): NCBI GI NO: 15218938 NR Description: expressed protein [Arabidopsis thaliana]
  misc_feature (1)..(173): NCBI GI NO: 30678317 NR Description: expressed protein [Arabidopsis thaliana]
  misc_feature (1)..(88): NCBI GI NO: 9945050 NR Description: Similar to Arabidopsis chromosome I BAC genomicsequence
  misc_feature (1)..(144): NCBI GI NO: 6094552 NR Description: unknown protein [Arabidopsis thaliana]
  misc_feature (1)..(158): NCBI GI NO: 15218525 NR Description: expressed protein [Arabidopsis thaliana]
  misc_feature (1)..(171): NCBI GI NO: 25404243 NR Description: hypothetical protein F23H11.20
  misc_feature (35)..(173): NCBI GI NO: 15242192 NR Description: transcriptional regulatory - like protein
YEKSRSPGRFFDLVYHENARVLLHDESIYRFECCSSPTRLSIQLMEYGHEKPEVTAVSIEPNFSSYLFSEYLCSTPDKKLSEGVYLGRNKRKYSNNDEPSDSLKAMDGINVVNGLECKISCKTSKVSYVLDTEDFLFRLRKRRKILRGGNVPDRLQISSISAAKVQRFNRFLSKP

SEQ ID NO: 21342 - protein, 131 aa, Zea mays subsp. mays
  peptide (1)..(131): Ceres Seq. ID no. 15218952
  misc_feature (1)..(82): NCBI GI NO: 34894158 NR Description: putative co-repressor protein
  misc_feature (1)..(129): NCBI GI NO: 15223031 NR Description: expressed protein [Arabidopsis thaliana]
  misc_feature (1)..(117): NCBI GI NO: 25406027 NR Description: hypothetical protein F20P5.21
  misc_feature (1)..(127): NCBI GI NO: 15218938 NR Description: expressed protein [Arabidopsis thaliana]
  misc_feature (1)..(129): NCBI GI NO: 30678317 NR Description: expressed protein [Arabidopsis thaliana]
  misc_feature (1)..(44): NCBI GI NO: 9945050 NR Description: Similar to Arabidopsis chromosome I BAC genomicsequence
  misc_feature (1)..(100): NCBI GI NO: 6094552 NR Description: unknown protein [Arabidopsis thaliana]
  misc_feature (1)..(114): NCBI GI NO: 15218525 NR Description: expressed protein [Arabidopsis thaliana]
  misc_feature (1)..(127): NCBI GI NO: 25404243 NR Description: hypothetical protein F23H11.20
  misc_feature (1)..(129): NCBI GI NO: 15242192 NR Description: transcriptional regulatory - like protein
MEYGHEKPEVTAVSIEPNFSSYLFSEYLCSTPDKKLSEGVYLGRNKRKYSNNDEPSDSLKAMDGINVVNGLECKISCKTSKVSYVLDTEDFLFRLRKRRKILRGGNVPDRLQISSISAAKVQRFNRFLSKP

SEQ ID NO: 21343 - DNA, 1957 bp, Zea mays subsp. mays
  misc_feature (1)..(1957): Ceres Seq. ID no. 15179123
aactgattatattttataacaataaccacaccggctaagcgccactgcacacgtcactcgctgtccgttctagcataccgcaccagacttcggcgccggtccgcgagcagatcaacagatggccacggcgacctacctctcctcctccttctcctcgccgccgccgccgtcatcacgcgcccgcctgcggcggcagacgaccagggcgggcgcgtcggcggcgacggaccgcccgcgcgaggtgctgtccccgaaacgccggctcccgctgcgggaggtgccgggtgactacggcccgccggtgctgggcgcggtccgcgaccggttcgagtacttctacgggccgggcggccgcgacggcttcttcgcctcccgcgtgcgcgcgcacggctccaccgtggtgcggctcaacatgccgccgggccccttcgtggcgcgcgacccgcgcgtggtggcgctcctggacgccgcctccttcccggtgctcttcgacacctcgctcgtcgacaagacggacctgttcacgggcaccttcatgccctccaccgacctcaccggcggctaccgcatgctctcgtacatcgaccccgccgagcccagccacggcccgctcaaggcgctcctcttctacctcctctcgcaccgtcggcagcacgtgatccccaagttccgcgaggtgtacggcgacctcttcggggtcgtggagaacgagctcgcccgggtcggcaaggccgacttcggccaccacaacgacgccgccgccttctccttcctctgccaggcgctgctggggcgcgaccccgccgagtccgcgctccatggcgacgggcccaagctgatcaccaagtgggtgctgttccagctcagcccgctgctcagcctcggcctgcccaagcacctcgaggactccctgctccactcgttccgcctcccgccggcgctggtcaggaaggactacggccggctcgccgacttcttccgcgacgcggccaggaccgtggtcgacgagggcgagcgcctcggcattgcgcgggaggaggcggtgcacaacatcctcttcgccacgtgcttcaactccttcggcggcatgaaaatcctgttcccgtcgctcgtcaagtggctgggccgcgccggcgcgcgcgcgcacggccggctggccacggaggtgcgcgacgccgtgcgcgcccacgccggcgaggtcaccatgaaggcgctggcggagatgccgctggtggagtcggccgtgtacgaggcgctgcgcatcgagccccccgtggccatgcagtacggccgcgccaagcgggacatggtggtggagagccacgactacggcttcgaggtgcgcgagggcgagatgctcttcggctaccagcccatggccaccaaggacccgcgcgtcttcgcgcgcgccgaggagtacgtgcccgacaggttcctcggggaggacggcgcgcagctgctccgccacgtcgtctggtccaacgggcccgagacggcgtcgcccacgctgcaggacaagcagtgcgccggcaaggacttcgtcgtgctcatcgcgcgccttctcgtcgccgagctcttcctccgctacgactccttcgacgtccaggtcggcgcctccgcgctggggtcgtcggtcaccatcacctcgctcaagaaagccaccttctgagttatgagctctgatcgaccgtccgtcaaagttgctagaggcgggcacgtgcaccaccgaatccctctcagaacttttttttttttgtagtgctatgctactgtgcgatcgtcaggtataacaaaatgtatattcttagtatagtgagagagcattttccccaggaacattcggtgtctggagatttgatgtcaggaaaaatttgctagcgatctgagggagacatgcacctactgttcatgttgcttatccatgacccatccatctatgtaaaatggcctgagatat

SEQ ID NO: 21344 - protein, 516 aa, Zea mays subsp. mays
  peptide (1)..(516): Ceres Seq. ID no. 15179124
  misc_feature (345)..(451): Pfam Name: Pfam Description:  Cytochrome P450
  misc_feature (1)..(516): NCBI GI NO: 31415935 NR Description: putative allene oxide synthase
  misc_feature (7)..(516): NCBI GI NO: 20160362 NR Description: allene oxide synthase [Solanum tuberosum]
  misc_feature (8)..(516): NCBI GI NO: 29373135 NR Description: allene oxide synthase [Citrus sinensis]
  misc_feature (33)..(516): NCBI GI NO: 7581989 NR Description: allene oxide synthase [Lycopersicon esculentum]
  misc_feature (1)..(514): NCBI GI NO: 16973300 NR Description: allene oxide synthase [Nicotiana attenuata]
  misc_feature (8)..(516): NCBI GI NO: 33504426 NR Description: allene oxide synthase [Medicago truncatula]
  misc_feature (30)..(516): NCBI GI NO: 21616113 NR Description: allene oxide synthase [Cucumis melo]
  misc_feature (22)..(516): NCBI GI NO: 15239032 NR Description: allene oxide synthase / cytochrome P450 74A
  misc_feature (9)..(514): NCBI GI NO: 23956572 NR Description: allene oxide synthase [Solanum tuberosum]
  misc_feature (7)..(516): NCBI GI NO: 1352186 NR Description: Allene oxide synthase, chloroplast precursor
MATATYLSSSFSSPPPPSSRARLRRQTTRAGASAATDRPREVLSPKRRLPLREVPGDYGPPVLGAVRDRFEYFYGPGGRDGFFASRVRAHGSTVVRLNMPPGPFVARDPRVVALLDAASFPVLFDTSLVDKTDLFTGTFMPSTDLTGGYRMLSYIDPAEPSHGPLKALLFYLLSHRRQHVIPKFREVYGDLFGVVENELARVGKADFGHHNDAAAFSFLCQALLGRDPAESALHGDGPKLITKWVLFQLSPLLSLGLPKHLEDSLLHSFRLPPALVRKDYGRLADFFRDAARTVVDEGERLGIAREEAVHNILFATCFNSFGGMKILFPSLVKWLGRAGARAHGRLATEVRDAVRAHAGEVTMKALAEMPLVESAVYEALRIEPPVAMQYGRAKRDMVVESHDYGFEVREGEMLFGYQPMATKDPRVFARAEEYVPDRFLGEDGAQLLRHVVWSNGPETASPTLQDKQCAGKDFVVLIARLLVAELFLRYDSFDVQVGASALGSSVTITSLKKATF

SEQ ID NO: 21345 - protein, 418 aa, Zea mays subsp. mays
  peptide (1)..(418): Ceres Seq. ID no. 15179125
  misc_feature (247)..(353): Pfam Name: Pfam Description:  Cytochrome P450
  misc_feature (1)..(418): NCBI GI NO: 31415935 NR Description: putative allene oxide synthase
  misc_feature (1)..(418): NCBI GI NO: 20160362 NR Description: allene oxide synthase [Solanum tuberosum]
  misc_feature (1)..(418): NCBI GI NO: 29373135 NR Description: allene oxide synthase [Citrus sinensis]
  misc_feature (1)..(418): NCBI GI NO: 7581989 NR Description: allene oxide synthase [Lycopersicon esculentum]
  misc_feature (1)..(416): NCBI GI NO: 16973300 NR Description: allene oxide synthase [Nicotiana attenuata]
  misc_feature (1)..(418): NCBI GI NO: 33504426 NR Description: allene oxide synthase [Medicago truncatula]
  misc_feature (1)..(418): NCBI GI NO: 21616113 NR Description: allene oxide synthase [Cucumis melo]
  misc_feature (1)..(418): NCBI GI NO: 15239032 NR Description: allene oxide synthase / cytochrome P450 74A
  misc_feature (1)..(416): NCBI GI NO: 23956572 NR Description: allene oxide synthase [Solanum tuberosum]
  misc_feature (1)..(418): NCBI GI NO: 1352186 NR Description: Allene oxide synthase, chloroplast precursor
MPPGPFVARDPRVVALLDAASFPVLFDTSLVDKTDLFTGTFMPSTDLTGGYRMLSYIDPAEPSHGPLKALLFYLLSHRRQHVIPKFREVYGDLFGVVENELARVGKADFGHHNDAAAFSFLCQALLGRDPAESALHGDGPKLITKWVLFQLSPLLSLGLPKHLEDSLLHSFRLPPALVRKDYGRLADFFRDAARTVVDEGERLGIAREEAVHNILFATCFNSFGGMKILFPSLVKWLGRAGARAHGRLATEVRDAVRAHAGEVTMKALAEMPLVESAVYEALRIEPPVAMQYGRAKRDMVVESHDYGFEVREGEMLFGYQPMATKDPRVFARAEEYVPDRFLGEDGAQLLRHVVWSNGPETASPTLQDKQCAGKDFVVLIARLLVAELFLRYDSFDVQVGASALGSSVTITSLKKATF

SEQ ID NO: 21346 - protein, 377 aa, Zea mays subsp. mays
  peptide (1)..(377): Ceres Seq. ID no. 15179126
  misc_feature (206)..(312): Pfam Name: Pfam Description:  Cytochrome P450
  misc_feature (1)..(377): NCBI GI NO: 31415935 NR Description: putative allene oxide synthase
  misc_feature (1)..(377): NCBI GI NO: 20160362 NR Description: allene oxide synthase [Solanum tuberosum]
  misc_feature (1)..(377): NCBI GI NO: 29373135 NR Description: allene oxide synthase [Citrus sinensis]
  misc_feature (1)..(377): NCBI GI NO: 7581989 NR Description: allene oxide synthase [Lycopersicon esculentum]
  misc_feature (1)..(375): NCBI GI NO: 16973300 NR Description: allene oxide synthase [Nicotiana attenuata]
  misc_feature (1)..(377): NCBI GI NO: 33504426 NR Description: allene oxide synthase [Medicago truncatula]
  misc_feature (1)..(377): NCBI GI NO: 21616113 NR Description: allene oxide synthase [Cucumis melo]
  misc_feature (1)..(377): NCBI GI NO: 15239032 NR Description: allene oxide synthase / cytochrome P450 74A
  misc_feature (1)..(375): NCBI GI NO: 23956572 NR Description: allene oxide synthase [Solanum tuberosum]
  misc_feature (1)..(377): NCBI GI NO: 1352186 NR Description: Allene oxide synthase, chloroplast precursor
MPSTDLTGGYRMLSYIDPAEPSHGPLKALLFYLLSHRRQHVIPKFREVYGDLFGVVENELARVGKADFGHHNDAAAFSFLCQALLGRDPAESALHGDGPKLITKWVLFQLSPLLSLGLPKHLEDSLLHSFRLPPALVRKDYGRLADFFRDAARTVVDEGERLGIAREEAVHNILFATCFNSFGGMKILFPSLVKWLGRAGARAHGRLATEVRDAVRAHAGEVTMKALAEMPLVESAVYEALRIEPPVAMQYGRAKRDMVVESHDYGFEVREGEMLFGYQPMATKDPRVFARAEEYVPDRFLGEDGAQLLRHVVWSNGPETASPTLQDKQCAGKDFVVLIARLLVAELFLRYDSFDVQVGASALGSSVTITSLKKATF

SEQ ID NO: 21347 - DNA, 1257 bp, Zea mays subsp. mays
  misc_feature (1)..(1257): Ceres Seq. ID no. 14303263
accagccatgactcctccgcttctcctctccctcctgctggtggcggcgaggtgctgccgctgctgccatggctggtcgtcgtttcagaagccggcggtgactgcggtgatcgctttcggagactccattgtggacccggggaacaacaacgggctgcatacggtgatcaaggccaaccatccgccctacggcaaggacttgttcaaccacgaggccaccggacgctactccaacggcctcattccaaccgacctaattgcccaggagctgggtgtgaagctgctgcttcctgcctacttgggcgtggatctgagcccggaggacctgctcaccggcgtcagcttcgcgtccggcgccaccgggttcgacccgctgactcccctcgtagtgagcgtcatctcgctggagcagcagctcgcctacttcgacgagtaccgcggcaagctggtggatatcgccggcgaggatgagacggcgaggatcatcgacggtgcgctgttcgtggtgtgcgcgggcaccgacgacgtggccaacacctacttcacgacgccgttccgcagcgcggagtacgacatcccgagctacgtggagctgctggtgggcggcgccgaggagttcctccgcaacgtcagctccaggggcgccaggaagatcggcttcgtggggatgccgcccgtggggtgcgtgccgtcgcagcggacgctgggcggtggcctcgccagggcgtgcgagcccaagcggaacgaggcggcgcagctgtacaacgccaggatccaggagatggtcgccgacgccgaccgagacttggcgacgaccatggtggtgttcctggacatctaccgcgtcctggacgacctgatggagcgcggggacaagtacggcttctctgagaccaccaggggatgctgcggcaccggcaccatcgaggtcacggggctctgcgactcccgcttcgtctccgtctgcgacaacgtctcgcagcacgtgttcttcgacagctaccaccccaccgagagagcctacaggatcatcgtcaaggacatctttgacaactacggacaagtgctcatcggatgatatatatctaccttgcttgagcgatcgagcatgcatgttcatcttcttcatctttatgtacgttcggctagctggcccaaagcctcaaggaggcccatttatcttcttcttactcctcctcgccccaagaataattaattgtaagcatgatctgcggaatcagacggggatggtctggt

SEQ ID NO: 21348 - protein, 358 aa, Zea mays subsp. mays
  peptide (1)..(358): Ceres Seq. ID no. 14303264
  misc_feature (36)..(345): Pfam Name: Pfam Description:  GDSL-like Lipase/Acylhydrolase
  misc_feature (31)..(357): NCBI GI NO: 30102970 NR Description: putative lipase/acylhydrolase
  misc_feature (9)..(353): NCBI GI NO: 37534726 NR Description: putative anter-specific proline-rich protein
  misc_feature (30)..(352): NCBI GI NO: 15222901 NR Description: family II extracellular lipase 3 (EXL3)
  misc_feature (30)..(352): NCBI GI NO: 26449364 NR Description: putative family II lipase EXL3
  misc_feature (30)..(352): NCBI GI NO: 25404994 NR Description: protein T4O12.13 [imported] - Arabidopsis thaliana
  misc_feature (35)..(351): NCBI GI NO: 21592372 NR Description: anter-specific proline-rich protein APG precursor
  misc_feature (35)..(351): NCBI GI NO: 18394825 NR Description: lipase, putative [Arabidopsis thaliana]
  misc_feature (33)..(352): NCBI GI NO: 28393626 NR Description: putative family II extracellular lipase 1 (EXL1)
  misc_feature (33)..(352): NCBI GI NO: 18410954 NR Description: family II extracellular lipase 1 (EXL1)
  misc_feature (7)..(352): NCBI GI NO: 18406327 NR Description: lipase, putative [Arabidopsis thaliana]
PAMTPPLLLSLLLVAARCCRCCHGWSSFQKPAVTAVIAFGDSIVDPGNNNGLHTVIKANHPPYGKDLFNHEATGRYSNGLIPTDLIAQELGVKLLLPAYLGVDLSPEDLLTGVSFASGATGFDPLTPLVVSVISLEQQLAYFDEYRGKLVDIAGEDETARIIDGALFVVCAGTDDVANTYFTTPFRSAEYDIPSYVELLVGGAEEFLRNVSSRGARKIGFVGMPPVGCVPSQRTLGGGLARACEPKRNEAAQLYNARIQEMVADADRDLATTMVVFLDIYRVLDDLMERGDKYGFSETTRGCCGTGTIEVTGLCDSRFVSVCDNVSQHVFFDSYHPTERAYRIIVKDIFDNYGQVLIG

SEQ ID NO: 21349 - protein, 356 aa, Zea mays subsp. mays
  peptide (1)..(356): Ceres Seq. ID no. 14303265
  misc_feature (34)..(343): Pfam Name: Pfam Description:  GDSL-like Lipase/Acylhydrolase
  misc_feature (29)..(355): NCBI GI NO: 30102970 NR Description: putative lipase/acylhydrolase
  misc_feature (7)..(351): NCBI GI NO: 37534726 NR Description: putative anter-specific proline-rich protein
  misc_feature (28)..(350): NCBI GI NO: 15222901 NR Description: family II extracellular lipase 3 (EXL3)
  misc_feature (28)..(350): NCBI GI NO: 26449364 NR Description: putative family II lipase EXL3
  misc_feature (28)..(350): NCBI GI NO: 25404994 NR Description: protein T4O12.13 [imported] - Arabidopsis thaliana
  misc_feature (33)..(349): NCBI GI NO: 21592372 NR Description: anter-specific proline-rich protein APG precursor
  misc_feature (33)..(349): NCBI GI NO: 18394825 NR Description: lipase, putative [Arabidopsis thaliana]
  misc_feature (31)..(350): NCBI GI NO: 28393626 NR Description: putative family II extracellular lipase 1 (EXL1)
  misc_feature (31)..(350): NCBI GI NO: 18410954 NR Description: family II extracellular lipase 1 (EXL1)
  misc_feature (5)..(350): NCBI GI NO: 18406327 NR Description: lipase, putative [Arabidopsis thaliana]
MTPPLLLSLLLVAARCCRCCHGWSSFQKPAVTAVIAFGDSIVDPGNNNGLHTVIKANHPPYGKDLFNHEATGRYSNGLIPTDLIAQELGVKLLLPAYLGVDLSPEDLLTGVSFASGATGFDPLTPLVVSVISLEQQLAYFDEYRGKLVDIAGEDETARIIDGALFVVCAGTDDVANTYFTTPFRSAEYDIPSYVELLVGGAEEFLRNVSSRGARKIGFVGMPPVGCVPSQRTLGGGLARACEPKRNEAAQLYNARIQEMVADADRDLATTMVVFLDIYRVLDDLMERGDKYGFSETTRGCCGTGTIEVTGLCDSRFVSVCDNVSQHVFFDSYHPTERAYRIIVKDIFDNYGQVLIG

SEQ ID NO: 21350 - DNA, 1620 bp, Zea mays subsp. mays
  misc_feature (1)..(1620): Ceres Seq. ID no. 15180736
attagaatccacctcgcaccccgcgagcggtgacttccctagggtttagtcgcgccgccgccgccgccgaaacagcacatcgctctctcgatctcagccatggcggaggtggagcagccccaggacgcggtgaagctcttcaaccgctggaccttcgacgatgtccaggtgaacgatatctcgctgaacgactacctggctgtgactgcggcgaagcacgcgacattcctgccgcactccgcggggcgctactccaagaagcggttccgcaaggcgcagtgcgccatcgtcgagcgcctcaccaactcgctcatgatgcacgggcgcaacaacggcaagaaggtcatggccgtccgcatcatgaagcacaccctggagatcatccacctgctcactgacgccaatcccatccaggtggtcgtggacgccattatcaacaggtactaccttgctctcctgtcctcacttccgatctctgtactgtcaggctaataacagctaaacttattactttatgttgatactttttgaatgcggtaacttttcgtgaaacgtttgtttttactatccaattgaattgattcctatgaaattcatgtatcttcctatgaaatttatttgtaacttctgtcttctgaaggggactgcactttgatagagctatgatgtatttccttgctgcttgttgccagttttatatatttgatatggatttaaactgattggtatgaaatcatgtataatttgtctttcaaaggtgagtgctgtttgatataagttccttgctggcccctgctattttatatctgatagcatgatcgtggacaaatgccagctgttgaaattcgaaataaatgccatgtcccaatttctcatcataccagaatgtatgtctttaagctgattatagttgatcaatgtgcccatactctgccgtttccagtttcagtcaaaacgtgaatttggtctcgtattatctcattgcttttctgcgcattcgtttgcacggctcatgctaatatctcttatatttgctatttctatgtcaagtatgctgttatctatttaattgttttcatgcccccatgcagctcaaaggtatgtgctatgagatgtcaaactataactccaactattgattacacatgttggctcttgagatgtcaaactggtgttatgtgctgatgttgtctttgcagtggaccacgtgaggatgccacccgtattggttctgctggtgttgtgagaaggcaggctgtggatatctcacccctgagaagggtgaaccaggccatctacctcctcaccactggtgccagggagagcgctttcaggaacatcaaaaccattgctgagtgccttgcagatgagttgatcaacgctgccaagggctcttccaacagctacgccatcaagaagaaggacgagattgagcgtgttgccaaggccaaccgttgagtggagcttgtatcctggtgcacttgctctagagctacgtttctggcagccgtgttttttcttgtttttacccatgtttagactttgagacctatatctaaggttttggttctcagtgaacaatgaaaattactgtgaaatgcagttgttttggtgcaaaac

SEQ ID NO: 21351 - protein, 130 aa, Zea mays subsp. mays
  peptide (1)..(130): Ceres Seq. ID no. 15180737
  misc_feature (46)..(113): Pfam Name: Pfam Description:  Ribosomal protein S7p/S5e
  misc_feature (1)..(113): NCBI GI NO: 34893994 NR Description: putative 40S ribosomal protein S5
  misc_feature (1)..(113): NCBI GI NO: 15229897 NR Description: 40S ribosomal protein S5 (RPS5B)
  misc_feature (1)..(113): NCBI GI NO: 15228111 NR Description: 40S ribosomal protein S5 (RPS5A)
  misc_feature (8)..(113): NCBI GI NO: 6831665 NR Description: 40S RIBOSOMAL PROTEIN S5
  misc_feature (1)..(113): NCBI GI NO: 21617886 NR Description: 40S ribosomal protein S5 [Arabidopsis thaliana]
  misc_feature (1)..(113): NCBI GI NO: 40748265 NR Description: 40S ribosomal protein S5 [Capsicum annuum]
  misc_feature (1)..(113): NCBI GI NO: 13904870 NR Description: ribosomal protein S5; 40S ribosomal protein S5
  misc_feature (1)..(113): NCBI GI NO: 15294021 NR Description: 40S ribosomal protein S5 [Ictalurus punctatus]
  misc_feature (2)..(113): NCBI GI NO: 3717978 NR Description: 5S ribosomal protein [Mus musculus]
  misc_feature (2)..(113): NCBI GI NO: 34854534 NR Description: similar to ribosomal protein S5
MAEVEQPQDAVKLFNRWTFDDVQVNDISLNDYLAVTAAKHATFLPHSAGRYSKKRFRKAQCAIVERLTNSLMMHGRNNGKKVMAVRIMKHTLEIIHLLTDANPIQVVVDAIINRYYLALLSSLPISVLSG

SEQ ID NO: 21352 - DNA, 1692 bp, Zea mays subsp. mays
  misc_feature (1)..(1692): Ceres Seq. ID no. 15180663
gaaaaaccatcctcctcgctcgcactgacaggcaggcagagagagagagacagagagccgaattgattgccgagggcagagcagcaacagcaacagtccacgaccgatcgcccggcccgcgcgcaggcaggcagcagccatgaaccacctgacgccggcgctccacggggcgatgcggccgccctcggcgcaggggcaggggctggcccggtacggctccgcgccgggctcgctcctagccgccatcgccgactccgtcacccgcggcgaccccgcgccgccgccgccgccgcccgtgagccggttctactccgccgagtcctcggggctcacctcctgcgagtccagctgccgcaccgactgcggacgcccgcccctcgagcgggcgtacggcggctccggcgagatccgcgtgccgccgccgctgcagcagcagcagcaccacctgctggctccccccgcggcctccccgctgttccgccacagcagctcccccgccgggctgctctcccgtctcatgaccgacccgcacggaatggcggcgaccggaggagcgatggggagctacacgcaggcgggcagcgacgccgcgctgggccacggccacgcgcagctcagctcgcagtggagcttctccaggcaggacctgccgcagatctcggagatggggatgataccggccgacatcggggagagcatcgtgggcgccggcgggtgcaacagctccagcgacgccgcgcagtcctcctcctacctctccaggaccttctccgtcggctcctgggacgacaccaactccatcatgttctcgtctgccccctgcaagaagcccaaggtggaccccgccgccggcgccgacgacatggtcaccaacttcagcaccattgacccgcagttcggcctgtccaactcatccctggagctgcccggcatggacgactacctgcagctgcagcaggactccgtcgcctgcagagtgcgtgcgaggcgtggctgcgcgactcacccgcggagcattgccgagagggaaagaaggacgaggatcagcaagaggctgaagaagctgcaagaccttgtgcccaacatggacaagcaaacgaatacgtcggacatgttggaccttgctgtggattacatcaaagagctcaaggaccaagtcgagaagctaaaacacgaccaagcaaactgctgttgcctaggcaacaagagctgctgctgatgctggagaagcagacggaggagggtttttatgccgtaacaatgtgactgttaaaccagagctgttgcttcaggagaccaggccgcgggcagaagtgcgtgacatgtggagcggcttccatgactcagcttcctcttttcttggttgttccacggactagcgacccggccggtgccaacggcttgaagactaggagataacaagtaggacgatgttgtaatttagttaccgcgacgcggtggctctggcttgcgtgtaaagaagtcctccctttcaacgcgactgggattgctgttgctggtaaaattgttgtaggaatatcatctgcgctccatttttcatcgagctcatcttttttttttttttttttttgtgtgtgtcactggattttggcaagaccgtaactcagaaaccgagcactgatcgagcgttcatgccaccccatacgaagtccaagagaattttagtatgcc

SEQ ID NO: 21353 - protein, 359 aa, Zea mays subsp. mays
  peptide (1)..(359): Ceres Seq. ID no. 15180664
  misc_feature (289)..(337): Pfam Name: Pfam Description:  Helix-loop-helix DNA-binding domain
  misc_feature (133)..(358): NCBI GI NO: 34907702 NR Description: P0035F12.11
  misc_feature (154)..(352): NCBI GI NO: 38345229 NR Description: OSJNBa0084K20.3
  misc_feature (194)..(352): NCBI GI NO: 18390573 NR Description: bHLH protein [Arabidopsis thaliana]
  misc_feature (194)..(352): NCBI GI NO: 21554238 NR Description: Contains similarity to bHLH transcription factorGBOF-1 from Tulipa gesneriana gb| AF185269
  misc_feature (19)..(71): NCBI GI NO: 18390573 NR Description: bHLH protein [Arabidopsis thaliana]
  misc_feature (19)..(71): NCBI GI NO: 21554238 NR Description: Contains similarity to bHLH transcription factorGBOF-1 from Tulipa gesneriana gb| AF185269
  misc_feature (101)..(356): NCBI GI NO: 15227914 NR Description: bHLH protein family [Arabidopsis thaliana]
  misc_feature (112)..(352): NCBI GI NO: 18403381 NR Description: bHLH protein family [Arabidopsis thaliana]
  misc_feature (252)..(352): NCBI GI NO: 19401700 NR Description: transcription factor RAU1 [Oryza sativa]
  misc_feature (93)..(341): NCBI GI NO: 15224227 NR Description: bHLH protein [Arabidopsis thaliana]
MNHLTPALHGAMRPPSAQGQGLARYGSAPGSLLAAIADSVTRGDPAPPPPPPVSRFYSAESSGLTSCESSCRTDCGRPPLERAYGGSGEIRVPPPLQQQQHHLLAPPAASPLFRHSSSPAGLLSRLMTDPHGMAATGGAMGSYTQAGSDAALGHGHAQLSSQWSFSRQDLPQISEMGMIPADIGESIVGAGGCNSSSDAAQSSSYLSRTFSVGSWDDTNSIMFSSAPCKKPKVDPAAGADDMVTNFSTIDPQFGLSNSSLELPGMDDYLQLQQDSVACRVRARRGCATHPRSIAERERRTRISKRLKKLQDLVPNMDKQTNTSDMLDLAVDYIKELKDQVEKLKHDQANCCCLGNKSCC

SEQ ID NO: 21354 - protein, 348 aa, Zea mays subsp. mays
  peptide (1)..(348): Ceres Seq. ID no. 15180665
  misc_feature (278)..(326): Pfam Name: Pfam Description:  Helix-loop-helix DNA-binding domain
  misc_feature (122)..(347): NCBI GI NO: 34907702 NR Description: P0035F12.11
  misc_feature (143)..(341): NCBI GI NO: 38345229 NR Description: OSJNBa0084K20.3
  misc_feature (183)..(341): NCBI GI NO: 18390573 NR Description: bHLH protein [Arabidopsis thaliana]
  misc_feature (183)..(341): NCBI GI NO: 21554238 NR Description: Contains similarity to bHLH transcription factorGBOF-1 from Tulipa gesneriana gb| AF185269
  misc_feature (8)..(60): NCBI GI NO: 18390573 NR Description: bHLH protein [Arabidopsis thaliana]
  misc_feature (8)..(60): NCBI GI NO: 21554238 NR Description: Contains similarity to bHLH transcription factorGBOF-1 from Tulipa gesneriana gb| AF185269
  misc_feature (90)..(345): NCBI GI NO: 15227914 NR Description: bHLH protein family [Arabidopsis thaliana]
  misc_feature (101)..(341): NCBI GI NO: 18403381 NR Description: bHLH protein family [Arabidopsis thaliana]
  misc_feature (241)..(341): NCBI GI NO: 19401700 NR Description: transcription factor RAU1 [Oryza sativa]
  misc_feature (82)..(330): NCBI GI NO: 15224227 NR Description: bHLH protein [Arabidopsis thaliana]
MRPPSAQGQGLARYGSAPGSLLAAIADSVTRGDPAPPPPPPVSRFYSAESSGLTSCESSCRTDCGRPPLERAYGGSGEIRVPPPLQQQQHHLLAPPAASPLFRHSSSPAGLLSRLMTDPHGMAATGGAMGSYTQAGSDAALGHGHAQLSSQWSFSRQDLPQISEMGMIPADIGESIVGAGGCNSSSDAAQSSSYLSRTFSVGSWDDTNSIMFSSAPCKKPKVDPAAGADDMVTNFSTIDPQFGLSNSSLELPGMDDYLQLQQDSVACRVRARRGCATHPRSIAERERRTRISKRLKKLQDLVPNMDKQTNTSDMLDLAVDYIKELKDQVEKLKHDQANCCCLGNKSCC

SEQ ID NO: 21355 - protein, 233 aa, Zea mays subsp. mays
  peptide (1)..(233): Ceres Seq. ID no. 15180666
  misc_feature (163)..(211): Pfam Name: Pfam Description:  Helix-loop-helix DNA-binding domain
  misc_feature (7)..(232): NCBI GI NO: 34907702 NR Description: P0035F12.11
  misc_feature (28)..(226): NCBI GI NO: 38345229 NR Description: OSJNBa0084K20.3
  misc_feature (68)..(226): NCBI GI NO: 18390573 NR Description: bHLH protein [Arabidopsis thaliana]
  misc_feature (68)..(226): NCBI GI NO: 21554238 NR Description: Contains similarity to bHLH transcription factorGBOF-1 from Tulipa gesneriana gb| AF185269
  misc_feature (1)..(230): NCBI GI NO: 15227914 NR Description: bHLH protein family [Arabidopsis thaliana]
  misc_feature (1)..(226): NCBI GI NO: 18403381 NR Description: bHLH protein family [Arabidopsis thaliana]
  misc_feature (126)..(226): NCBI GI NO: 19401700 NR Description: transcription factor RAU1 [Oryza sativa]
  misc_feature (1)..(215): NCBI GI NO: 15224227 NR Description: bHLH protein [Arabidopsis thaliana]
  misc_feature (107)..(226): NCBI GI NO: 15219606 NR Description: bHLH protein [Arabidopsis thaliana]
  misc_feature (145)..(227): NCBI GI NO: 15233768 NR Description: bHLH protein family [Arabidopsis thaliana]
MTDPHGMAATGGAMGSYTQAGSDAALGHGHAQLSSQWSFSRQDLPQISEMGMIPADIGESIVGAGGCNSSSDAAQSSSYLSRTFSVGSWDDTNSIMFSSAPCKKPKVDPAAGADDMVTNFSTIDPQFGLSNSSLELPGMDDYLQLQQDSVACRVRARRGCATHPRSIAERERRTRISKRLKKLQDLVPNMDKQTNTSDMLDLAVDYIKELKDQVEKLKHDQANCCCLGNKSCC

SEQ ID NO: 21356 - DNA, 1100 bp, Zea mays subsp. mays
  misc_feature (1)..(1100): Ceres Seq. ID no. 14305500
aaaacttagagagtgaaggttgaaagactcccgcgctttacgggtttggacctcacctcatacagtacgctcggctctactgggcagatgcacccatctgtttcgcggagaagcccgtcctcgtcggagactcggagtgtagaggactagaggggcgaagcgatccgaactccgagaaccccagggccagggctcagtccacagcgagagcagagaacgcagcggcctgccggcctccgcccctcactcccgcagccatggccgccgccgccgccgtggttgccgagcccaagaccaagtacgatcgccagctcaggaaagcagacatcgttttggttgctgcacgttcatatggtctaactggtttggtcagggttagcgtcaaggagcactgtgttatagaatcaaaaccagatcacttcttggatgatttgcgacttcacaatccatggactgaactaaagcaatttgcaaaatcaattgatataaatgataaagatcctgttgtccacaaacatactccatacattgttgtccttgtgagacttgctgaaaaatgggcagatgcccatgatggtaacatgccttcaactaggcaagaaaagaaggaatttaaggacctaattcgagcccacatgcttaatgtagatgaagaaaattacaaagaagctgtggactcttcatataaagtctcagtcactccaggaatcagtaatgagatccatcagataattgatgatgactctgcggaagtcaattcatcatcagaagatttctggattttagtggctgctttaaaggagtttatttccaaggagggtaatggtgagctacctctggagggaacaatacctgatatgacttcccttactgagagaagaagaggtgctccaaaggtgatgataaatttgcccaatcagcacgcatgcagtcttcaacgatggttctgctttcttttcactgagtggaggggcctcaacatagacaatgggttcaaacgtttccgtgttttgatatgtgttaattattgtaatgtcatgtatgctttcctgagaactaaaatacacggtcaaacatggtaaacccttttatttctgttc

SEQ ID NO: 21357 - protein, 274 aa, Zea mays subsp. mays
  peptide (1)..(274): Ceres Seq. ID no. 14305501
  misc_feature (14)..(206): NCBI GI NO: 29124136 NR Description: putative ubiquitin-activating enzyme
  misc_feature (14)..(206): NCBI GI NO: 29124137 NR Description: putative ubiquitin-activating enzyme
  misc_feature (2)..(20): NCBI GI NO: 29124136 NR Description: putative ubiquitin-activating enzyme
  misc_feature (2)..(20): NCBI GI NO: 29124137 NR Description: putative ubiquitin-activating enzyme
  misc_feature (1)..(216): NCBI GI NO: 15220442 NR Description: auxin-resistance protein AXR1
  misc_feature (1)..(214): NCBI GI NO: 15225241 NR Description: auxin-resistance protein, putative
  misc_feature (19)..(201): NCBI GI NO: 40889581 NR Description: Chain A
  misc_feature (19)..(201): NCBI GI NO: 4502169 NR Description: amyloid beta precursor protein-binding protein 1
  misc_feature (19)..(201): NCBI GI NO: 21450341 NR Description: amyloid beta precursor protein binding protein 1
  misc_feature (19)..(201): NCBI GI NO: 23274055 NR Description: amyloid beta precursor protein binding protein 1
MAAAAAVVAEPKTKYDRQLRKADIVLVAARSYGLTGLVRVSVKEHCVIESKPDHFLDDLRLHNPWTELKQFAKSIDINDKDPVVHKHTPYIVVLVRLAEKWADAHDGNMPSTRQEKKEFKDLIRAHMLNVDEENYKEAVDSSYKVSVTPGISNEIHQIIDDDSAEVNSSSEDFWILVAALKEFISKEGNGELPLEGTIPDMTSLTERRRGAPKVMINLPNQHACSLQRWFCFLFTEWRGLNIDNGFKRFRVLICVNYCNVMYAFLRTKIHGQTW

SEQ ID NO: 21358 - protein, 166 aa, Zea mays subsp. mays
  peptide (1)..(166): Ceres Seq. ID no. 14305502
  misc_feature (1)..(98): NCBI GI NO: 29124136 NR Description: putative ubiquitin-activating enzyme
  misc_feature (1)..(98): NCBI GI NO: 29124137 NR Description: putative ubiquitin-activating enzyme
  misc_feature (1)..(108): NCBI GI NO: 15220442 NR Description: auxin-resistance protein AXR1
  misc_feature (1)..(106): NCBI GI NO: 15225241 NR Description: auxin-resistance protein, putative
  misc_feature (1)..(93): NCBI GI NO: 40889581 NR Description: Chain A
  misc_feature (1)..(93): NCBI GI NO: 4502169 NR Description: amyloid beta precursor protein-binding protein 1
  misc_feature (1)..(93): NCBI GI NO: 21450341 NR Description: amyloid beta precursor protein binding protein 1
  misc_feature (1)..(93): NCBI GI NO: 23274055 NR Description: amyloid beta precursor protein binding protein 1
  misc_feature (1)..(93): NCBI GI NO: 14091760 NR Description: APP-binding protein 1 [Rattus norvegicus]
  misc_feature (1)..(99): NCBI GI NO: 33416343 NR Description: Unknown (protein for MGC:66148) [Danio rerio]
MPSTRQEKKEFKDLIRAHMLNVDEENYKEAVDSSYKVSVTPGISNEIHQIIDDDSAEVNSSSEDFWILVAALKEFISKEGNGELPLEGTIPDMTSLTERRRGAPKVMINLPNQHACSLQRWFCFLFTEWRGLNIDNGFKRFRVLICVNYCNVMYAFLRTKIHGQTW

SEQ ID NO: 21359 - protein, 148 aa, Zea mays subsp. mays
  peptide (1)..(148): Ceres Seq. ID no. 14305503
  misc_feature (1)..(80): NCBI GI NO: 29124136 NR Description: putative ubiquitin-activating enzyme
  misc_feature (1)..(80): NCBI GI NO: 29124137 NR Description: putative ubiquitin-activating enzyme
  misc_feature (1)..(90): NCBI GI NO: 15220442 NR Description: auxin-resistance protein AXR1
  misc_feature (1)..(88): NCBI GI NO: 15225241 NR Description: auxin-resistance protein, putative
  misc_feature (1)..(75): NCBI GI NO: 40889581 NR Description: Chain A
  misc_feature (1)..(75): NCBI GI NO: 4502169 NR Description: amyloid beta precursor protein-binding protein 1
  misc_feature (1)..(75): NCBI GI NO: 21450341 NR Description: amyloid beta precursor protein binding protein 1
  misc_feature (1)..(75): NCBI GI NO: 23274055 NR Description: amyloid beta precursor protein binding protein 1
  misc_feature (1)..(75): NCBI GI NO: 14091760 NR Description: APP-binding protein 1 [Rattus norvegicus]
  misc_feature (1)..(81): NCBI GI NO: 33416343 NR Description: Unknown (protein for MGC:66148) [Danio rerio]
MLNVDEENYKEAVDSSYKVSVTPGISNEIHQIIDDDSAEVNSSSEDFWILVAALKEFISKEGNGELPLEGTIPDMTSLTERRRGAPKVMINLPNQHACSLQRWFCFLFTEWRGLNIDNGFKRFRVLICVNYCNVMYAFLRTKIHGQTW

SEQ ID NO: 21360 - DNA, 1013 bp, Zea mays subsp. mays
  misc_feature (1)..(1013): Ceres Seq. ID no. 14305493
gaataacatgcttcatttctaggttcccttttccattttttctagcgccctctgcctccatccaccgacgcggcgcccgacgcccgacgccgcactcacctcgcctcgctgaatcgtccccgccagacgtcgggtgcccgacgctgcagcacggcagccgcacaaccgcagctcccaccgctgccgcgctcctccgcgcaacctcgatcgcgcacagaggcccattccgccgaggagtggcacgaggagagacgacaggtgcggggatggggtcagttttgctgccaacgctgcggctgaagagtgaggtcgacgccgccatccgcgacaccctcgataaggtcctcgttctccgatttggtcgcgccaccgacgccacttgcctccacctagatgacatcctggctaaatcttcttgggacatatccaagtttgctatggtagcattagttgacatggactctgaggagattcaagtttacattgactactttgacatcactttggttccagcaaccattttcttcttcaatgcccatcacatgaagatggattcagggacacctgaccacacaaaatggataggttcttttagcagcaaacaggactttatcgatgtagttgaggcaatattcagaggtgcgatgaaaggcaaactgatagtgtcttgcccccttcctcctgagaggataccaagattccagcttcttttcaaggatgtctgagaaaactccaactcatcacgtgcacacaatcagctacctagcccaaggtaactaggtaagtagaaaagctgaagcttctataagagaagcacaacagaggggacagtgcaaggcgtgttcgtgcttcgaagaaacctaattgtgctggaaacagccattttcattctcaagattgtttgcgcaaatctctgcactaatctaatgtttttcttgtccatattgcatgtttaagtttgtatttaatcacgttcatcaaatatgacgggtatagatttcttgtctggtgtt

SEQ ID NO: 21361 - protein, 240 aa, Zea mays subsp. mays
  peptide (1)..(240): Ceres Seq. ID no. 14305494
  misc_feature (93)..(227): Pfam Name: Pfam Description:  Mitosis protein DIM1
  misc_feature (91)..(240): NCBI GI NO: 15230169 NR Description: hypothetical protein [Arabidopsis thaliana]
  misc_feature (91)..(240): NCBI GI NO: 8923475 NR Description: hypothetical protein FLJ20511 [Homo sapiens]
  misc_feature (91)..(240): NCBI GI NO: 27659170 NR Description: similar to hypothetical protein FLJ20511
  misc_feature (91)..(240): NCBI GI NO: 28316734 NR Description: RIKEN cDNA D530025J19 gene [Mus musculus]
  misc_feature (89)..(222): NCBI GI NO: 40744243 NR Description: conserved hypothetical protein
  misc_feature (89)..(222): NCBI GI NO: 6325339 NR Description: Homolog of S. pombe dim1+; Dib1p
  misc_feature (91)..(224): NCBI GI NO: 37535532 NR Description: putative thioredoxin-like U5 smallribonucleoprotein particle protein
  misc_feature (89)..(221): NCBI GI NO: 32417926 NR Description: hypothetical protein [Neurospora crassa]
  misc_feature (91)..(224): NCBI GI NO: 15241574 NR Description: YLS8, Dim1 homolog [Arabidopsis thaliana]
  misc_feature (91)..(218): NCBI GI NO: 34810352 NR Description: Chain A, Dominant Negative Human Hdim1
ITCFISRFPFPFFLAPSASIHRRGARRPTPHSPRLAESSPPDVGCPTLQHGSRTTAAPTAAALLRATSIAHRGPFRRGVARGETTGAGMGSVLLPTLRLKSEVDAAIRDTLDKVLVLRFGRATDATCLHLDDILAKSSWDISKFAMVALVDMDSEEIQVYIDYFDITLVPATIFFFNAHHMKMDSGTPDHTKWIGSFSSKQDFIDVVEAIFRGAMKGKLIVSCPLPPERIPRFQLLFKDV

SEQ ID NO: 21362 - protein, 152 aa, Zea mays subsp. mays
  peptide (1)..(152): Ceres Seq. ID no. 14305495
  misc_feature (5)..(139): Pfam Name: Pfam Description:  Mitosis protein DIM1
  misc_feature (3)..(152): NCBI GI NO: 15230169 NR Description: hypothetical protein [Arabidopsis thaliana]
  misc_feature (3)..(152): NCBI GI NO: 8923475 NR Description: hypothetical protein FLJ20511 [Homo sapiens]
  misc_feature (3)..(152): NCBI GI NO: 27659170 NR Description: similar to hypothetical protein FLJ20511
  misc_feature (3)..(152): NCBI GI NO: 28316734 NR Description: RIKEN cDNA D530025J19 gene [Mus musculus]
  misc_feature (1)..(134): NCBI GI NO: 40744243 NR Description: conserved hypothetical protein
  misc_feature (1)..(134): NCBI GI NO: 6325339 NR Description: Homolog of S. pombe dim1+; Dib1p
  misc_feature (3)..(136): NCBI GI NO: 37535532 NR Description: putative thioredoxin-like U5 smallribonucleoprotein particle protein
  misc_feature (1)..(133): NCBI GI NO: 32417926 NR Description: hypothetical protein [Neurospora crassa]
  misc_feature (3)..(136): NCBI GI NO: 15241574 NR Description: YLS8, Dim1 homolog [Arabidopsis thaliana]
  misc_feature (3)..(130): NCBI GI NO: 34810352 NR Description: Chain A, Dominant Negative Human Hdim1
MGSVLLPTLRLKSEVDAAIRDTLDKVLVLRFGRATDATCLHLDDILAKSSWDISKFAMVALVDMDSEEIQVYIDYFDITLVPATIFFFNAHHMKMDSGTPDHTKWIGSFSSKQDFIDVVEAIFRGAMKGKLIVSCPLPPERIPRFQLLFKDV

SEQ ID NO: 21363 - DNA, 1259 bp, Zea mays subsp. mays
  misc_feature (1)..(1259): Ceres Seq. ID no. 15180797
ctggatgtcgcgcctcgccgccgtcgcctgtgtcgcgctcgccgccaaggtcgaggaaacgcgcgtgccgctgctcctcgacctccagctctgcgccgccgccagctccgacgctgacgcagcggacgcggacgtgttcgaggccaagacggtgcgccggatggagctgctcgttctctccgcgctagggtggcggatgcaccctgtcacgcccttctcctacctccagcctgtcctcgccgacgctgcgatgcgcctacgcaactgcgaggccgtcctgctcgcggtcatggccgattggaggtggcctcggcaccggccctcggcgtgggccgccgccgcattgctcaccacagccggcggcggcgacgacgactcggagctgctcgcgctcatcaatgcccccgaggacgagaccgcggagtgcgccaagatcatctccgaggtgacaggcatgagcttccttgtctgcgacgtcggcggcatgatcgccgggaataagcgtaagcacgcggcggcgcggatgtactcgccgccgctgagcccgagcggcgtgatcggcgcgctgtcctgcttcagctgcgagagctcgttgtccgccacagcggactcgcgcaccctcgctactacggctgcgggggtcggcccgtgggcaccgtcagcgcccgtgtccgtgtcgtcttcccctgagcccccaggtcgggcccccaagcgcgcccggcggcgggggtcccgcatccgcttccccccgacgaggagagccgcgacgcctggccgtccacctgcgccgcgtgacgcaccgtgccggaacggtgcctatggcgagatcccccgctcaggtagtcaggtggcggtggggatataaaggagcatcagaatctcgcgccggtgacgagaacgaaccattttgcccattgccgcgagagatggggggctagattgcaagaagaaaaggatgtaatgtctgcatgctcatgtatggcagcacattttgcaatgatggttctcgatcgtaactgtttggggggatcgtaactgttcggctggctacaagccgacactgttgcagctgtttggactgctgcagctgcaatccatagagagaaaaatactgtagaagccgcagccgcagccggattgcagccgcagcaagccgcagcgaacaagcttattattagttgcaattgtagtgttgctagttcttgttggttcttggcattgcttgcttggaaggccaatgacaggggccgcctttgtcc

SEQ ID NO: 21364 - protein, 287 aa, Zea mays subsp. mays
  peptide (1)..(287): Ceres Seq. ID no. 15180798
  misc_feature (1)..(67): Pfam Name: Pfam Description:  Cyclin, N-terminal domain
  misc_feature (1)..(202): NCBI GI NO: 6448482 NR Description: cyclin D3a [Antirrhinum majus]
  misc_feature (1)..(197): NCBI GI NO: 4160302 NR Description: cyclin D3.2 protein [Nicotiana tabacum]
  misc_feature (1)..(197): NCBI GI NO: 6434199 NR Description: CycD3;2 [Lycopersicon esculentum]
  misc_feature (1)..(197): NCBI GI NO: 4160300 NR Description: cyclin D3.1 protein [Nicotiana tabacum]
  misc_feature (1)..(244): NCBI GI NO: 19070615 NR Description: D-type cyclin [Zea mays]
  misc_feature (1)..(210): NCBI GI NO: 33517432 NR Description: cyclin D3-2 [Euphorbia esula]
  misc_feature (1)..(197): NCBI GI NO: 27435851 NR Description: cyclin D [Populus tremula x Populus tremuloides]
  misc_feature (1)..(216): NCBI GI NO: 4586801 NR Description: NtcycD3-1 [Nicotiana tabacum]
  misc_feature (1)..(212): NCBI GI NO: 29374148 NR Description: cyclin D [Populus alba]
  misc_feature (1)..(197): NCBI GI NO: 3608179 NR Description: cyclin D [Pisum sativum]
WMSRLAAVACVALAAKVEETRVPLLLDLQLCAAASSDADAADADVFEAKTVRRMELLVLSALGWRMHPVTPFSYLQPVLADAAMRLRNCEAVLLAVMADWRWPRHRPSAWAAAALLTTAGGGDDDSELLALINAPEDETAECAKIISEVTGMSFLVCDVGGMIAGNKRKHAAARMYSPPLSPSGVIGALSCFSCESSLSATADSRTLATTAAGVGPWAPSAPVSVSSSPEPPGRAPKRARRRGSRIRFPPTRRAATPGRPPAPRDAPCRNGAYGEIPRSGSQVAVGI

SEQ ID NO: 21365 - protein, 286 aa, Zea mays subsp. mays
  peptide (1)..(286): Ceres Seq. ID no. 15180799
  misc_feature (1)..(66): Pfam Name: Pfam Description:  Cyclin, N-terminal domain
  misc_feature (1)..(201): NCBI GI NO: 6448482 NR Description: cyclin D3a [Antirrhinum majus]
  misc_feature (1)..(196): NCBI GI NO: 4160302 NR Description: cyclin D3.2 protein [Nicotiana tabacum]
  misc_feature (1)..(196): NCBI GI NO: 6434199 NR Description: CycD3;2 [Lycopersicon esculentum]
  misc_feature (1)..(196): NCBI GI NO: 4160300 NR Description: cyclin D3.1 protein [Nicotiana tabacum]
  misc_feature (1)..(243): NCBI GI NO: 19070615 NR Description: D-type cyclin [Zea mays]
  misc_feature (1)..(209): NCBI GI NO: 33517432 NR Description: cyclin D3-2 [Euphorbia esula]
  misc_feature (1)..(196): NCBI GI NO: 27435851 NR Description: cyclin D [Populus tremula x Populus tremuloides]
  misc_feature (1)..(215): NCBI GI NO: 4586801 NR Description: NtcycD3-1 [Nicotiana tabacum]
  misc_feature (1)..(211): NCBI GI NO: 29374148 NR Description: cyclin D [Populus alba]
  misc_feature (1)..(196): NCBI GI NO: 3608179 NR Description: cyclin D [Pisum sativum]
MSRLAAVACVALAAKVEETRVPLLLDLQLCAAASSDADAADADVFEAKTVRRMELLVLSALGWRMHPVTPFSYLQPVLADAAMRLRNCEAVLLAVMADWRWPRHRPSAWAAAALLTTAGGGDDDSELLALINAPEDETAECAKIISEVTGMSFLVCDVGGMIAGNKRKHAAARMYSPPLSPSGVIGALSCFSCESSLSATADSRTLATTAAGVGPWAPSAPVSVSSSPEPPGRAPKRARRRGSRIRFPPTRRAATPGRPPAPRDAPCRNGAYGEIPRSGSQVAVGI

SEQ ID NO: 21366 - protein, 234 aa, Zea mays subsp. mays
  peptide (1)..(234): Ceres Seq. ID no. 15180800
  misc_feature (16)..(144): Pfam Name: Pfam Description:  Cyclin, C-terminal domain
  misc_feature (1)..(149): NCBI GI NO: 6448482 NR Description: cyclin D3a [Antirrhinum majus]
  misc_feature (1)..(144): NCBI GI NO: 4160302 NR Description: cyclin D3.2 protein [Nicotiana tabacum]
  misc_feature (1)..(144): NCBI GI NO: 6434199 NR Description: CycD3;2 [Lycopersicon esculentum]
  misc_feature (1)..(144): NCBI GI NO: 4160300 NR Description: cyclin D3.1 protein [Nicotiana tabacum]
  misc_feature (1)..(191): NCBI GI NO: 19070615 NR Description: D-type cyclin [Zea mays]
  misc_feature (1)..(157): NCBI GI NO: 33517432 NR Description: cyclin D3-2 [Euphorbia esula]
  misc_feature (1)..(144): NCBI GI NO: 27435851 NR Description: cyclin D [Populus tremula x Populus tremuloides]
  misc_feature (1)..(163): NCBI GI NO: 4586801 NR Description: NtcycD3-1 [Nicotiana tabacum]
  misc_feature (1)..(159): NCBI GI NO: 29374148 NR Description: cyclin D [Populus alba]
  misc_feature (1)..(144): NCBI GI NO: 3608179 NR Description: cyclin D [Pisum sativum]
MELLVLSALGWRMHPVTPFSYLQPVLADAAMRLRNCEAVLLAVMADWRWPRHRPSAWAAAALLTTAGGGDDDSELLALINAPEDETAECAKIISEVTGMSFLVCDVGGMIAGNKRKHAAARMYSPPLSPSGVIGALSCFSCESSLSATADSRTLATTAAGVGPWAPSAPVSVSSSPEPPGRAPKRARRRGSRIRFPPTRRAATPGRPPAPRDAPCRNGAYGEIPRSGSQVAVGI

SEQ ID NO: 21367 - DNA, 1059 bp, Zea mays subsp. mays
  misc_feature (1)..(1059): Ceres Seq. ID no. 12415963
cacgagaccattacctagaacatcctaatcgaaaagttttgacgtgtgttcgatcttccggatgcgccggcccactgcaggaatggcggcgaccggaggagcgatggggagctacacgcaggcgggcagcgacgccgcgctgggccccggccacggccacggccacgcgcacgtcagctcgcagtggagcttctccaggcaggacctgccgcagatctcggagatggggatgataccggccgacatcgggggagagcatcgtgggcgccggcgggtgcaacagctccagcgacgccgcgcagtcctcctcctacctctccaggaccttctccgtcggctcctgggacgacaccaactccatcatgttctcgtccgcccccagcaagaagcccaaggtggaccccgccgacgacatggtcgccagcttcagcaccattgacccgcagttcggcctttccaactcgtccctggagctgcccggcatggacgactacctgcagctgcagcaggactccgtcgcctgcagagtgcgtgcgaagcgtggctgcgcgactcaccctcggagcattgccgagagggaaagaaggacgaggatcagcaagaggctgaagaagctgcaagacctcgtgcccaacatggacaagcaaacgaatacgtcggacatgttggaccttgctgtggattacatcaaagagctcaaggaccaagtcgagaagctaaaacacgaccaagcaaactgttgttgcctaggcaacaagagctgctgctgatgctggagaagcagacggaggagggtttttacgccgtaacaatgtaacatgtggagcggcttccatgactcagcttcctcttttcttggttgttccacggactagcgacccggccggtgccaacggcttgaagactaggagataacaagtaggacgatgttgtaatttagctaccacgacgcggtggctctggcttgcgtgtaaagaagtcctccctttcaacgcgactgggattgttgttgctggtaaaattgttgtaggaatatcatctgcgctccatttttcatcc

SEQ ID NO: 21368 - protein, 135 aa, Zea mays subsp. mays
  peptide (1)..(135): Ceres Seq. ID no. 12415964
  misc_feature (65)..(113): Pfam Name: Pfam Description:  Helix-loop-helix DNA-binding domain
  misc_feature (1)..(134): NCBI GI NO: 34907702 NR Description: P0035F12.11
  misc_feature (1)..(128): NCBI GI NO: 38345229 NR Description: OSJNBa0084K20.3
  misc_feature (1)..(128): NCBI GI NO: 18390573 NR Description: bHLH protein; protein id: At1g05805
  misc_feature (1)..(128): NCBI GI NO: 21554238 NR Description: Contains similarity to bHLH transcription factorGBOF-1 from Tulipa gesneriana gb| AF185269
  misc_feature (28)..(128): NCBI GI NO: 19401700 NR Description: transcription factor RAU1 [Oryza sativa]
  misc_feature (32)..(132): NCBI GI NO: 15227914 NR Description: bHLH protein; protein id: At2g42280.1
  misc_feature (1)..(117): NCBI GI NO: 15224227 NR Description: bHLH protein; protein id: At2g43140.1
  misc_feature (36)..(128): NCBI GI NO: 18403381 NR Description: expressed protein; protein id: At1g51140
  misc_feature (1)..(128): NCBI GI NO: 15219606 NR Description: bHLH protein; protein id: At1g35460
  misc_feature (1)..(129): NCBI GI NO: 15233768 NR Description: putative protein; protein id: At4g09180.1
MFSSAPSKKPKVDPADDMVASFSTIDPQFGLSNSSLELPGMDDYLQLQQDSVACRVRAKRGCATHPRSIAERERRTRISKRLKKLQDLVPNMDKQTNTSDMLDLAVDYIKELKDQVEKLKHDQANCCCLGNKSCC

SEQ ID NO: 21369 - protein, 125 aa, Zea mays subsp. mays
  peptide (1)..(125): Ceres Seq. ID no. 12415965
  misc_feature (8)..(63): NCBI GI NO: 34907702 NR Description: P0035F12.11
MRRPTAGMAATGGAMGSYTQAGSDAALGPGHGHGHAHVSSQWSFSRQDLPQISEMGMIPADIGGEHRGRRRVQQLQRRRAVLLLPLQDLLRRLLGRHQLHHVLVRPQQEAQGGPRRRHGRQLQHH

SEQ ID NO: 21370 - protein, 118 aa, Zea mays subsp. mays
  peptide (1)..(118): Ceres Seq. ID no. 12415966
  misc_feature (48)..(96): Pfam Name: Pfam Description:  Helix-loop-helix DNA-binding domain
  misc_feature (1)..(117): NCBI GI NO: 34907702 NR Description: P0035F12.11
  misc_feature (1)..(111): NCBI GI NO: 38345229 NR Description: OSJNBa0084K20.3
  misc_feature (1)..(111): NCBI GI NO: 18390573 NR Description: bHLH protein; protein id: At1g05805
  misc_feature (1)..(111): NCBI GI NO: 21554238 NR Description: Contains similarity to bHLH transcription factorGBOF-1 from Tulipa gesneriana gb| AF185269
  misc_feature (11)..(111): NCBI GI NO: 19401700 NR Description: transcription factor RAU1 [Oryza sativa]
  misc_feature (15)..(115): NCBI GI NO: 15227914 NR Description: bHLH protein; protein id: At2g42280.1
  misc_feature (1)..(100): NCBI GI NO: 15224227 NR Description: bHLH protein; protein id: At2g43140.1
  misc_feature (19)..(111): NCBI GI NO: 18403381 NR Description: expressed protein; protein id: At1g51140
  misc_feature (1)..(111): NCBI GI NO: 15219606 NR Description: bHLH protein; protein id: At1g35460
  misc_feature (1)..(112): NCBI GI NO: 15233768 NR Description: putative protein; protein id: At4g09180.1
MVASFSTIDPQFGLSNSSLELPGMDDYLQLQQDSVACRVRAKRGCATHPRSIAERERRTRISKRLKKLQDLVPNMDKQTNTSDMLDLAVDYIKELKDQVEKLKHDQANCCCLGNKSCC

SEQ ID NO: 21371 - DNA, 1264 bp, Zea mays subsp. mays
  misc_feature (1)..(1264): Ceres Seq. ID no. 15180793
aagtcgttcggctcggcgcactgggtatagcagcactgccgcggttgattttcgagctgtggtgctggagaagtgaagagctcatgctgttctcccgttccccggctgccacaaatcagccactcgccccttcccgccggacgctgctcctatcgccatgcccgcgagccggcgcgaccccggcaccggtggccgacgctgcgctcctaccgggcgggctgcgtgcggagtcgctgccgcggcacgtggctgtggtcatggacgggaactcgcggtgggcgcgcgcgcgcgggctgccgtcagcggccgggcacgaggccgggcgccgcgcgctggaggaggtggtgcggctctcccgcgcctggggcgtccgcacgctcaccgccttcgccttctcccacgagaactggagccggcccaaggtggaggtggaattcttgatggggcagtttgagcgagcgatccgcgaaagcgtagctgaatttttgagagaaggaattcggctacgcgtaatcggcgactcctcaaggctgccggtttctcttcagaggaccgcgagagaagccgaggaggccacgcggaacaactcgcagcttgacctgacactggcaatcagctacagcgggcggagggacatagtgcaggcgtgccggaccctagcccagaaggtgcgcgacaagctgctcgagccggaggacatcgacgagtcgctgttcgccggtgagctcgagacgagccacgccaacggcaacgagctcccttatcccgacctggtcatcagaaccagcggcgaactgcggctgagcaacttcctgctgtggcagtcggcgtacgcggagctcttcttcacggacacgctgtggcccgacttcggagaggccgattacctccaagcgctggtctcgttccagagcagagacaggcggttcggcgtaaggaaattgtagcggcgcagaggcagcgccatgtggaaggcgtgcttcaatagcaactgtcaatagcaggaaagcgtcggtcaataaatcgtaacgcgagaccaagatgggtagatggagtattaaagtggtggtttgcatgcagcggtgagagtgagagtaatgtagcatatcaactcaagatggtaggtactacagctagagttcaagctcacagacagcagtcgtcgttgatgatggtggctagcagctatctgccgatggccacagatttattgttaaaaaccctttgctattgcaagagtacgtcaaatgccctttattaagtc

SEQ ID NO: 21372 - protein, 314 aa, Zea mays subsp. mays
  peptide (1)..(314): Ceres Seq. ID no. 15180794
  misc_feature (85)..(311): Pfam Name: Pfam Description:  Putative undecaprenyl diphosphate synthase
  misc_feature (28)..(314): NCBI GI NO: 34908428 NR Description: putative undecaprenyl pyrophosphate synthetase
  misc_feature (69)..(313): NCBI GI NO: 15237748 NR Description: dehydrodolichyl diphosphate synthase
  misc_feature (69)..(310): NCBI GI NO: 17230487 NR Description: undecaprenyl pyrophosphate synthetase
  misc_feature (69)..(310): NCBI GI NO: 23125792 NR Description: hypothetical protein [Nostoc punctiforme]
  misc_feature (69)..(310): NCBI GI NO: 22299306 NR Description: undecaprenyl pyrophosphate synthetase
  misc_feature (69)..(310): NCBI GI NO: 23040431 NR Description: hypothetical protein
  misc_feature (69)..(310): NCBI GI NO: 37519677 NR Description: undecaprenyl pyrophosphate synthetase
  misc_feature (69)..(310): NCBI GI NO: 23128548 NR Description: hypothetical protein [Nostoc punctiforme]
  misc_feature (73)..(312): NCBI GI NO: 18424144 NR Description: dehydrodolichyl diphosphate synthase
  misc_feature (78)..(312): NCBI GI NO: 8843800 NR Description: cis-prenyltransferase homolog-like
VVRLGALGIAALPRLIFELWCWRSEELMLFSRSPAATNQPLAPSRRTLLLSPCPRAGATPAPVADAALLPGGLRAESLPRHVAVVMDGNSRWARARGLPSAAGHEAGRRALEEVVRLSRAWGVRTLTAFAFSHENWSRPKVEVEFLMGQFERAIRESVAEFLREGIRLRVIGDSSRLPVSLQRTAREAEEATRNNSQLDLTLAISYSGRRDIVQACRTLAQKVRDKLLEPEDIDESLFAGELETSHANGNELPYPDLVIRTSGELRLSNFLLWQSAYAELFFTDTLWPDFGEADYLQALVSFQSRDRRFGVRKL

SEQ ID NO: 21373 - protein, 287 aa, Zea mays subsp. mays
  peptide (1)..(287): Ceres Seq. ID no. 15180795
  misc_feature (58)..(284): Pfam Name: Pfam Description:  Putative undecaprenyl diphosphate synthase
  misc_feature (1)..(287): NCBI GI NO: 34908428 NR Description: putative undecaprenyl pyrophosphate synthetase
  misc_feature (42)..(286): NCBI GI NO: 15237748 NR Description: dehydrodolichyl diphosphate synthase
  misc_feature (42)..(283): NCBI GI NO: 17230487 NR Description: undecaprenyl pyrophosphate synthetase
  misc_feature (42)..(283): NCBI GI NO: 23125792 NR Description: hypothetical protein [Nostoc punctiforme]
  misc_feature (42)..(283): NCBI GI NO: 22299306 NR Description: undecaprenyl pyrophosphate synthetase
  misc_feature (42)..(283): NCBI GI NO: 23040431 NR Description: hypothetical protein
  misc_feature (42)..(283): NCBI GI NO: 37519677 NR Description: undecaprenyl pyrophosphate synthetase
  misc_feature (42)..(283): NCBI GI NO: 23128548 NR Description: hypothetical protein [Nostoc punctiforme]
  misc_feature (46)..(285): NCBI GI NO: 18424144 NR Description: dehydrodolichyl diphosphate synthase
  misc_feature (51)..(285): NCBI GI NO: 8843800 NR Description: cis-prenyltransferase homolog-like
MLFSRSPAATNQPLAPSRRTLLLSPCPRAGATPAPVADAALLPGGLRAESLPRHVAVVMDGNSRWARARGLPSAAGHEAGRRALEEVVRLSRAWGVRTLTAFAFSHENWSRPKVEVEFLMGQFERAIRESVAEFLREGIRLRVIGDSSRLPVSLQRTAREAEEATRNNSQLDLTLAISYSGRRDIVQACRTLAQKVRDKLLEPEDIDESLFAGELETSHANGNELPYPDLVIRTSGELRLSNFLLWQSAYAELFFTDTLWPDFGEADYLQALVSFQSRDRRFGVRKL

SEQ ID NO: 21374 - protein, 229 aa, Zea mays subsp. mays
  peptide (1)..(229): Ceres Seq. ID no. 15180796
  misc_feature (1)..(226): Pfam Name: Pfam Description:  Putative undecaprenyl diphosphate synthase
  misc_feature (1)..(229): NCBI GI NO: 34908428 NR Description: putative undecaprenyl pyrophosphate synthetase
  misc_feature (1)..(228): NCBI GI NO: 15237748 NR Description: dehydrodolichyl diphosphate synthase
  misc_feature (1)..(225): NCBI GI NO: 17230487 NR Description: undecaprenyl pyrophosphate synthetase
  misc_feature (1)..(225): NCBI GI NO: 23125792 NR Description: hypothetical protein [Nostoc punctiforme]
  misc_feature (1)..(225): NCBI GI NO: 22299306 NR Description: undecaprenyl pyrophosphate synthetase
  misc_feature (1)..(225): NCBI GI NO: 23040431 NR Description: hypothetical protein
  misc_feature (1)..(225): NCBI GI NO: 37519677 NR Description: undecaprenyl pyrophosphate synthetase
  misc_feature (1)..(225): NCBI GI NO: 23128548 NR Description: hypothetical protein [Nostoc punctiforme]
  misc_feature (1)..(227): NCBI GI NO: 18424144 NR Description: dehydrodolichyl diphosphate synthase
  misc_feature (1)..(227): NCBI GI NO: 8843800 NR Description: cis-prenyltransferase homolog-like
MDGNSRWARARGLPSAAGHEAGRRALEEVVRLSRAWGVRTLTAFAFSHENWSRPKVEVEFLMGQFERAIRESVAEFLREGIRLRVIGDSSRLPVSLQRTAREAEEATRNNSQLDLTLAISYSGRRDIVQACRTLAQKVRDKLLEPEDIDESLFAGELETSHANGNELPYPDLVIRTSGELRLSNFLLWQSAYAELFFTDTLWPDFGEADYLQALVSFQSRDRRFGVRKL

SEQ ID NO: 21375 - DNA, 974 bp, Zea mays subsp. mays
  misc_feature (1)..(974): Ceres Seq. ID no. 15175468
atcaaggctcacctccttccctctgttcccgtctcccccggcctctctcggcaagtcggcatccgtcctcgatccacgctcagctcgcctaaggactaagccatcagcgttcagcgatgagccggggcagcagcaacggcggcgtgaggagcgccgccaggctggaggagctgcagctggacctgtccccgccgccggtggggatggaggtggacggcgccgggggcgtccacggcgacagcgactcgtcgtcgtcgtcgccgccgagctcgtgcgtgtcgtcggacgggcggagctcgagcggcggcggcggcagcagccccgggggcagtaagtcgccgatggtgatcggcgcctgcacgcggtgcctcatgtactgcatggtggccaagaaggactacccgacctgcgtcaactgcaagcagccgtgcctggtggacctgctccacggcgaggccggccgtgttggcggcggcgccaggcaggccgccgccgccgctgacgacgacgacgacgacaagaagaagcaggtgcaccgccgtgagcgcaggtgaagtgaggccgccgtaagaagctggtggtggtgcccgtgcccgtgcccgcgccgcgcgcccagtggatgctcatacggagggtcagctaagctagctagctagctagctagcccggcgaagggcgaactgactgactgccgttggatcatccactggacagctagcccgcagggtgttaggatcggaggagctaaagctagctattagtacgtgtagcagcagcttagttcactcgatggatgctgctgctgttggagtaggtggttgttgtcatggtgagccgtgagcgtgggggcgtggggttatgtgtggtggactggagacttgtggttgtggaccgtggtggtgtctccggttgtaatcccccattccgttccagctgaagagaacatttgcaagctaatggaattatattagagt

SEQ ID NO: 21376 - protein, 145 aa, Zea mays subsp. mays
  peptide (1)..(145): Ceres Seq. ID no. 15175469
  misc_feature (42)..(108): NCBI GI NO: 34908532 NR Description: P0423B08.15
  misc_feature (11)..(126): NCBI GI NO: 15239988 NR Description: B-type cyclin -related [Arabidopsis thaliana]
MSRGSSNGGVRSAARLEELQLDLSPPPVGMEVDGAGGVHGDSDSSSSSPPSSCVSSDGRSSSGGGGSSPGGSKSPMVIGACTRCLMYCMVAKKDYPTCVNCKQPCLVDLLHGEAGRVGGGARQAAAAADDDDDDKKKQVHRRERR

SEQ ID NO: 21377 - protein, 116 aa, Zea mays subsp. mays
  peptide (1)..(116): Ceres Seq. ID no. 15175470
  misc_feature (13)..(79): NCBI GI NO: 34908532 NR Description: P0423B08.15
  misc_feature (1)..(97): NCBI GI NO: 15239988 NR Description: B-type cyclin -related [Arabidopsis thaliana]
MEVDGAGGVHGDSDSSSSSPPSSCVSSDGRSSSGGGGSSPGGSKSPMVIGACTRCLMYCMVAKKDYPTCVNCKQPCLVDLLHGEAGRVGGGARQAAAAADDDDDDKKKQVHRRERR

SEQ ID NO: 21378 - protein, 110 aa, Zea mays subsp. mays
  peptide (1)..(110): Ceres Seq. ID no. 15175471
SRLTSFPLFPSPPASLGKSASVLDPRSARLRTKPSAFSDEPGQQQRRREERRQAGGAAAGPVPAAGGDGGGRRRGRPRRQRLVVVVAAELVRVVGRAELERRRRQQPRGQ

SEQ ID NO: 21379 - DNA, 898 bp, Zea mays subsp. mays
  misc_feature (1)..(898): Ceres Seq. ID no. 14312621
acttggacataacgcaacgcccgccgcgaaaagcactaccggcctgtgctgctgtggtagttagtttcaagcagcaatggaagccgtggtggccacgacgacaacgagggtgtccttccctctgctgcccaccgcggggaggcccctgctcccgccggtcctggcgcggccccgccgcggcttcgcctccgtctccgccacctccacatccggcgcaggcggcggcggggggcgctcatctgcaggcggctgcggcggcgacggtggaggggacgactccggtgccggcgcagccgcggccgccgcggctgtggcggctctgggtgagtccgagcagcaggaggacggcgactctgacgcaatcgtgctccatgtcgggggaatgacgtgcggcggatgtgcggacaaggtgaagcgaattctggagagccagcctgaggttgctgcagctacagttgatgtcgaaaaggccaccgctattgtgtggacgacacctgaagcgaaggctaccaaagactggcaaaaacaattggccgagaaacttgccaaccatctcacctcttgcgggttccagtctcatctgcaagacgaaggcgaggctgaacaaactgatgcttaacctcagcagtgcattacgtatgtatgactatgagtggccaggaagttttagcatggagggtccttgcatgaagcaatgtctcccacttcagaagttgttacatgcgggtctacgatgtacttcttttatttatttgtcgcagtttagttcaaaaatgaactcgcaggaagtttttatgccgttatattgttgttaaggacttgtggttgaacttcgaaacagctgaactgttgagtatcgaaggcgaactagcgataaaataaaatgatgaagtatcgc

SEQ ID NO: 21380 - protein, 180 aa, Zea mays subsp. mays
  peptide (1)..(180): Ceres Seq. ID no. 14312622
  misc_feature (1)..(171): NCBI GI NO: 33146620 NR Description: metal-transporting P-type ATPase-like protein
  misc_feature (17)..(167): NCBI GI NO: 18418230 NR Description: metal-transporting P-type ATPase (PAA1), putative
  misc_feature (17)..(171): NCBI GI NO: 12643855 NR Description: Potential copper-transporting ATPase PAA1
  misc_feature (27)..(171): NCBI GI NO: 3549654 NR Description: metal-transporting P-type ATPase (fragment)
  misc_feature (17)..(171): NCBI GI NO: 2668492 NR Description: metal-transporting P-type ATPase
MEAVVATTTTRVSFPLLPTAGRPLLPPVLARPRRGFASVSATSTSGAGGGGGRSSAGGCGGDGGGDDSGAGAAAAAAAVAALGESEQQEDGDSDAIVLHVGGMTCGGCADKVKRILESQPEVAAATVDVEKATAIVWTTPEAKATKDWQKQLAEKLANHLTSCGFQSHLQDEGEAEQTDA

SEQ ID NO: 21381 - protein, 127 aa, Zea mays subsp. mays
  peptide (1)..(127): Ceres Seq. ID no. 14312623
LDITQRPPRKALPACAAVVVSFKQQWKPWWPRRQRGCPSLCCPPRGGPCSRRSWRGPAAASPPSPPPPHPAQAAAGGAHLQAAAAATVEGTTPVPAQPRPPRLWRLWVSPSSRRTATLTQSCSMSGE

SEQ ID NO: 21382 - protein, 118 aa, Zea mays subsp. mays
  peptide (1)..(118): Ceres Seq. ID no. 14312624
MSKRPPLLCGRHLKRRLPKTGKNNWPRNLPTISPLAGSSLICKTKARLNKLMLNLSSALRMYDYEWPGSFSMEGPCMKQCLPLQKLLHAGLRCTSFIYLSQFSSKMNSQEVFMPLYCC

SEQ ID NO: 21383 - DNA, 1017 bp, Zea mays subsp. mays
  misc_feature (1)..(1017): Ceres Seq. ID no. 14312605
taaattaaaggagcacttctcatcgtacgggaaggtggttgagcatcagattatgcttgatcatagcactggacgttcacggggctttggatttgtcacatttgaaagcgaggatgctgttgaaagggttatgtcagaggggagaatgcatgatcttggagggaagcaggttgaaattaagaaagctgaaccaaagaaacctggcgctggtgattcaagctcaaacggaagacacagccgtggtggtggtcatcgtgattcataccgtggtagtggtgtttctgtgaacagcggtggcggctatggatatggtggtggttaccgatcagctgctgcagcatattatggcagcacagcatatggtgcctatggcagagggtatggatatggtgctacttctggctatggctcaggttatggctctgcatatggtggctccatgtatggaggtccatatggtgcctacgggtcatatggtggtgcctatggaggtggtgcgtatggtgctccaggagggtatggtgggggaggatatggcagctacggtggtgctggaggcatgggtgggggtggcagcgctggtggtcggggctccagcagataccacccttatgggaaatgatcatccattctgtgtttctctaggatctgataataaagccatacctttcctcgtttctgctactgagaaaatggaacatcccattcgtcttgttgaatcagcggcatctggacatttttttccttggaacttgcattgcacatcaaagattctatagtctatagtcgctgaaccctgaaccgcccccaccccgagctttctgtagaagctgcagctgaaattctcgtagtctggcatgagccttagaatgcccttgaaactattatctttgtggttaacattatggtgtcatggaacagatgtacgttgttgtaacattcactcactgatcagagacttgctatctctgcatatgtggagagaagctttgcaaatgattgactgatactattaat

SEQ ID NO: 21384 - protein, 206 aa, Zea mays subsp. mays
  peptide (1)..(206): Ceres Seq. ID no. 14312606
  misc_feature (1)..(59): Pfam Name: a.k.a. RRM, RBD, or RNP domain Pfam Description: RNA recognition motif.
  misc_feature (1)..(206): NCBI GI NO: 8778468 NR Description: F1L3.34 [Arabidopsis thaliana]
  misc_feature (1)..(206): NCBI GI NO: 15220810 NR Description: RNA recognition motif (RRM)-containing protein
  misc_feature (1)..(205): NCBI GI NO: 15242719 NR Description: RNA recognition motif (RRM)-containing protein
  misc_feature (1)..(197): NCBI GI NO: 35215091 NR Description: putative heterogeneous nuclear ribonucleoprotein A3homolog 1
  misc_feature (75)..(206): NCBI GI NO: 15242719 NR Description: RNA recognition motif (RRM)-containing protein
  misc_feature (4)..(75): NCBI GI NO: 15242719 NR Description: RNA recognition motif (RRM)-containing protein
  misc_feature (1)..(206): NCBI GI NO: 30682553 NR Description: RNA recognition motif (RRM)-containing protein
  misc_feature (67)..(198): NCBI GI NO: 15242719 NR Description: RNA recognition motif (RRM)-containing protein
  misc_feature (2)..(205): NCBI GI NO: 33416839 NR Description: Unknown (protein for MGC:66127) [Danio rerio]
  misc_feature (1)..(205): NCBI GI NO: 15226106 NR Description: heterogeneous nuclear ribonucleoprotein
KLKEHFSSYGKVVEHQIMLDHSTGRSRGFGFVTFESEDAVERVMSEGRMHDLGGKQVEIKKAEPKKPGAGDSSSNGRHSRGGGHRDSYRGSGVSVNSGGGYGYGGGYRSAAAAYYGSTAYGAYGRGYGYGATSGYGSGYGSAYGGSMYGGPYGAYGSYGGAYGGGAYGAPGGYGGGGYGSYGGAGGMGGGGSAGGRGSSRYHPYGK

SEQ ID NO: 21385 - protein, 189 aa, Zea mays subsp. mays
  peptide (1)..(189): Ceres Seq. ID no. 14312607
  misc_feature (66)..(184): Pfam Name: Pfam Description:  Dehydrin
  misc_feature (1)..(189): NCBI GI NO: 8778468 NR Description: F1L3.34 [Arabidopsis thaliana]
  misc_feature (1)..(189): NCBI GI NO: 15220810 NR Description: RNA recognition motif (RRM)-containing protein
  misc_feature (1)..(188): NCBI GI NO: 15242719 NR Description: RNA recognition motif (RRM)-containing protein
  misc_feature (1)..(180): NCBI GI NO: 35215091 NR Description: putative heterogeneous nuclear ribonucleoprotein A3homolog 1
  misc_feature (58)..(189): NCBI GI NO: 15242719 NR Description: RNA recognition motif (RRM)-containing protein
  misc_feature (1)..(58): NCBI GI NO: 15242719 NR Description: RNA recognition motif (RRM)-containing protein
  misc_feature (1)..(189): NCBI GI NO: 30682553 NR Description: RNA recognition motif (RRM)-containing protein
  misc_feature (50)..(181): NCBI GI NO: 15242719 NR Description: RNA recognition motif (RRM)-containing protein
  misc_feature (1)..(188): NCBI GI NO: 33416839 NR Description: Unknown (protein for MGC:66127) [Danio rerio]
  misc_feature (1)..(188): NCBI GI NO: 15226106 NR Description: heterogeneous nuclear ribonucleoprotein
MLDHSTGRSRGFGFVTFESEDAVERVMSEGRMHDLGGKQVEIKKAEPKKPGAGDSSSNGRHSRGGGHRDSYRGSGVSVNSGGGYGYGGGYRSAAAAYYGSTAYGAYGRGYGYGATSGYGSGYGSAYGGSMYGGPYGAYGSYGGAYGGGAYGAPGGYGGGGYGSYGGAGGMGGGGSAGGRGSSRYHPYGK

SEQ ID NO: 21386 - protein, 163 aa, Zea mays subsp. mays
  peptide (1)..(163): Ceres Seq. ID no. 14312608
  misc_feature (40)..(158): Pfam Name: Pfam Description:  Dehydrin
  misc_feature (1)..(163): NCBI GI NO: 8778468 NR Description: F1L3.34 [Arabidopsis thaliana]
  misc_feature (1)..(163): NCBI GI NO: 15220810 NR Description: RNA recognition motif (RRM)-containing protein
  misc_feature (1)..(162): NCBI GI NO: 15242719 NR Description: RNA recognition motif (RRM)-containing protein
  misc_feature (1)..(154): NCBI GI NO: 35215091 NR Description: putative heterogeneous nuclear ribonucleoprotein A3homolog 1
  misc_feature (32)..(163): NCBI GI NO: 15242719 NR Description: RNA recognition motif (RRM)-containing protein
  misc_feature (1)..(32): NCBI GI NO: 15242719 NR Description: RNA recognition motif (RRM)-containing protein
  misc_feature (1)..(163): NCBI GI NO: 30682553 NR Description: RNA recognition motif (RRM)-containing protein
  misc_feature (24)..(155): NCBI GI NO: 15242719 NR Description: RNA recognition motif (RRM)-containing protein
  misc_feature (1)..(162): NCBI GI NO: 33416839 NR Description: Unknown (protein for MGC:66127) [Danio rerio]
  misc_feature (1)..(162): NCBI GI NO: 15226106 NR Description: heterogeneous nuclear ribonucleoprotein
MSEGRMHDLGGKQVEIKKAEPKKPGAGDSSSNGRHSRGGGHRDSYRGSGVSVNSGGGYGYGGGYRSAAAAYYGSTAYGAYGRGYGYGATSGYGSGYGSAYGGSMYGGPYGAYGSYGGAYGGGAYGAPGGYGGGGYGSYGGAGGMGGGGSAGGRGSSRYHPYGK

SEQ ID NO: 21387 - protein, 158 aa, Zea mays subsp. mays
  peptide (1)..(158): Ceres Seq. ID no. 14312609
MDMVVVTDQLLQHIMAAQHMVPMAEGMDMVLLLAMAQVMALHMVAPCMEVHMVPTGHMVVPMEVVRMVLQEGMVGEDMAATVVLEAWVGVAALVVGAPADTTLMGNDHPFCVSLGSDNKAIPFLVSATEKMEHPIRLVESAASGHFFPWNLHCTSKIL

SEQ ID NO: 21388 - DNA, 893 bp, Zea mays subsp. mays
  misc_feature (1)..(893): Ceres Seq. ID no. 13598935
atgagcacaccacactgcacgcccacaccacggaatagacctctcaacccagaacccagcaggcaccatggccgccgccgtgcccctcctcctccagctgctgctactgccactcctggtcgcgtcagcggcgggcggcggcggcggcgagaagagcacgcacatgaagctgtactggcacgacgtggtgagcgggccgagcccgacggcggtgcaggtggcgcgggcggcggtgaccaacacctccaagaccgccttcggcgtggtggtggtgatcgacgacccgctgacggagggcccggacctcaagtcctcgaagcccctcggccgcgctcagggcacgtacatcggcgccggcaaggacgagctgtccctcatgatgagcatgaacttcgtgttccaggccggcaagtacaacggtagcaccgtggccatcatgggccggaacgcggtgttcgacgccgtccgcgagatggctgtggtgggcggcaccggcgcgttcaggatggcgcgcggctacgcgcaggcccgcacgcacgccctcgacctcaacaccggcgacgccaccgtcgagtacaacctctacatcaagcactgaagtgaactgactgatcagttggtattgggaatgatacacaataataaatgaactggaaaagaataacctgatgatttttttgcttgggaaggaccagttgttcccacgtttgtgtcgatctacagtgtggcgactgttgcggtaacactacgtaaagaataatgacctgatggctttttttgtttaggaaaaaaaaaaaaaaaaaaaaaaaaaaaaaaaaaaaaaaaaaaaaaaaaaaattaaaaaaaaaaaaaaaaaggcttatcgataccgccaacctcragggggggcccgg

SEQ ID NO: 21389 - protein, 176 aa, Zea mays subsp. mays
  peptide (1)..(176): Ceres Seq. ID no. 15222455
  misc_feature (28)..(176): Pfam Name: Pfam Description:  Dirigent-like protein
  misc_feature (28)..(176): NCBI GI NO: 15217886 NR Description: disease resistance response protein-related/dirigent protein-related
  misc_feature (5)..(176): NCBI GI NO: 15238980 NR Description: disease resistance response protein-related
  misc_feature (28)..(176): NCBI GI NO: 15218836 NR Description: disease resistance response protein-related/dirigent protein-related
  misc_feature (5)..(176): NCBI GI NO: 15238982 NR Description: disease resistance response protein-related
  misc_feature (28)..(176): NCBI GI NO: 15222673 NR Description: disease resistance response protein-related/dirigent protein-related
  misc_feature (23)..(176): NCBI GI NO: 15239779 NR Description: disease resistance response protein-related/dirigent protein-related
  misc_feature (28)..(176): NCBI GI NO: 22135914 NR Description: unknown protein [Arabidopsis thaliana]
  misc_feature (26)..(176): NCBI GI NO: 30681257 NR Description: disease resistance response protein-related/dirigent protein-related
  misc_feature (28)..(176): NCBI GI NO: 15231302 NR Description: disease resistance response protein-related/dirigent protein-related
  misc_feature (24)..(176): NCBI GI NO: 15219966 NR Description: disease resistance response protein-related
MAAAVPLLLQLLLLPLLVASAAGGGGGEKSTHMKLYWHDVVSGPSPTAVQVARAAVTNTSKTAFGVVVVIDDPLTEGPDLKSSKPLGRAQGTYIGAGKDELSLMMSMNFVFQAGKYNGSTVAIMGRNAVFDAVREMAVVGGTGAFRMARGYAQARTHALDLNTGDATVEYNLYIKH

SEQ ID NO: 21390 - protein, 144 aa, Zea mays subsp. mays
  peptide (1)..(144): Ceres Seq. ID no. 15222456
  misc_feature (1)..(144): Pfam Name: Pfam Description:  Dirigent-like protein
  misc_feature (1)..(144): NCBI GI NO: 15217886 NR Description: disease resistance response protein-related/dirigent protein-related
  misc_feature (1)..(144): NCBI GI NO: 15238980 NR Description: disease resistance response protein-related
  misc_feature (1)..(144): NCBI GI NO: 15218836 NR Description: disease resistance response protein-related/dirigent protein-related
  misc_feature (1)..(144): NCBI GI NO: 15238982 NR Description: disease resistance response protein-related
  misc_feature (1)..(144): NCBI GI NO: 15222673 NR Description: disease resistance response protein-related/dirigent protein-related
  misc_feature (1)..(144): NCBI GI NO: 15239779 NR Description: disease resistance response protein-related/dirigent protein-related
  misc_feature (1)..(144): NCBI GI NO: 22135914 NR Description: unknown protein [Arabidopsis thaliana]
  misc_feature (1)..(144): NCBI GI NO: 30681257 NR Description: disease resistance response protein-related/dirigent protein-related
  misc_feature (1)..(144): NCBI GI NO: 15231302 NR Description: disease resistance response protein-related/dirigent protein-related
  misc_feature (1)..(144): NCBI GI NO: 15219966 NR Description: disease resistance response protein-related
MKLYWHDVVSGPSPTAVQVARAAVTNTSKTAFGVVVVIDDPLTEGPDLKSSKPLGRAQGTYIGAGKDELSLMMSMNFVFQAGKYNGSTVAIMGRNAVFDAVREMAVVGGTGAFRMARGYAQARTHALDLNTGDATVEYNLYIKH

SEQ ID NO: 21391 - protein, 140 aa, Zea mays subsp. mays
  peptide (1)..(140): Ceres Seq. ID no. 15222457
MSTPHCTPTPRNRPLNPEPSRHHGRRRAPPPPAAATATPGRVSGGRRRRREEHAHEAVLARRGERAEPDGGAGGAGGGDQHLQDRLRRGGGDRRPADGGPGPQVLEAPRPRSGHVHRRRQGRAVPHDEHELRVPGRQVQR

SEQ ID NO: 21392 - DNA, 1378 bp, Zea mays subsp. mays
  misc_feature (1)..(1378): Ceres Seq. ID no. 15180805
cggcctcccaaggcataagatggctccgtcccgtgcgctccaccgcccatctctcctcgctacggcggcggcgctgctgctgctcattctccctccatcagcagcagcagcagtgccggcgcctgctctcttcatcttcggagactccctcgtggatgcgggcaacaacgactacctcgtgaccctttccaaggccaacggaccaccgtacggcatcgacttcgaatcctccggcggcaagccgacgggaaggttcacgaacgggatgaccatcgcagatatcatgggtgagtccctggggcagaaatctctcgctccacccttcctggctccgaactcgagtgctgcgatcaccagcagcgggatcaactatggctctggttcttctggcatatttgacgataccggttccttctatatcggaaggattccgctagggcagcaagtcagctacttcgcaaacaccaggtcacagatgctggagaccatggacgaggaagccgtagccgatttcttcagcaaggctctctttgttatagtagcagggtccaacgacatcttggagtttctttcgccgtcagtaccgttcctcggacgagagaagcctgatgacccatcgcacttccaggacgcactggtttccaacctgacattctatctcaaggagctgagtgagctgggggctaggaagttcgtcgtgtccgacgtcgggccgctcggctgtataccctacgtccgtgctctggagttcatgcccgcggggcagtgctcggcgccggcgaatcgagtcaccgaaggctacaacaggaagctgaggaggatggtggagaagatgaaccgggagataggtccggagagcaaattcgtgtacacggacacgtacaggatcgttatggcgatcattcagaaccaccgccagtatggtttcgacgacgcgatggacccgtgctgcggcggcagcttccctttgcctccgttcctctgcattggagctgtcgccaaccgctccagctcgacgctgtgcagcgaccgctccaagtacgtgttctgggatgcgttccacccgaccgaagccgccaacctcatcgtcgccggcaaactcctcgacggcgacgcggctgccgcctggcctatcaatgtccgcgaactgtcccagtacgagtacaaatgatcgatatcgacgacgcgcgcgatgtgcaggccggctcaacgattcattggttttgtgtcattgatgtagtttcgtcttccttgttggggttttctaggctaggcttttatttgcttcaatttcgtatggttgactaggactgcgtgcaaattggtcaatttattccatgttgacgggaagaacgcgagtgcaatttcttctttctct

SEQ ID NO: 21393 - protein, 389 aa, Zea mays subsp. mays
  peptide (1)..(389): Ceres Seq. ID no. 15180806
  misc_feature (44)..(367): Pfam Name: Pfam Description:  GDSL-like Lipase/Acylhydrolase
  misc_feature (13)..(389): NCBI GI NO: 38345537 NR Description: OSJNBa0020J04.12
  misc_feature (44)..(384): NCBI GI NO: 15238210 NR Description: GDSL-motif lipase/hydrolase protein
  misc_feature (42)..(383): NCBI GI NO: 15229742 NR Description: GDSL-motif lipase/hydrolase protein
  misc_feature (42)..(383): NCBI GI NO: 15227849 NR Description: GDSL-motif lipase/hydrolase protein
  misc_feature (19)..(383): NCBI GI NO: 34899288 NR Description: similar to GDSL-motif lipase/hydrolase
  misc_feature (194)..(384): NCBI GI NO: 15234857 NR Description: GDSL-motif lipase/hydrolase protein
  misc_feature (19)..(139): NCBI GI NO: 15234857 NR Description: GDSL-motif lipase/hydrolase protein
  misc_feature (41)..(385): NCBI GI NO: 15241626 NR Description: GDSL-motif lipase/hydrolase protein
  misc_feature (41)..(384): NCBI GI NO: 18409881 NR Description: GDSL-motif lipase/hydrolase protein
  misc_feature (32)..(383): NCBI GI NO: 7486138 NR Description: hypothetical protein F25I24
GLPRHKMAPSRALHRPSLLATAAALLLLILPPSAAAAVPAPALFIFGDSLVDAGNNDYLVTLSKANGPPYGIDFESSGGKPTGRFTNGMTIADIMGESLGQKSLAPPFLAPNSSAAITSSGINYGSGSSGIFDDTGSFYIGRIPLGQQVSYFANTRSQMLETMDEEAVADFFSKALFVIVAGSNDILEFLSPSVPFLGREKPDDPSHFQDALVSNLTFYLKELSELGARKFVVSDVGPLGCIPYVRALEFMPAGQCSAPANRVTEGYNRKLRRMVEKMNREIGPESKFVYTDTYRIVMAIIQNHRQYGFDDAMDPCCGGSFPLPPFLCIGAVANRSSSTLCSDRSKYVFWDAFHPTEAANLIVAGKLLDGDAAAAWPINVRELSQYEYK

SEQ ID NO: 21394 - protein, 383 aa, Zea mays subsp. mays
  peptide (1)..(383): Ceres Seq. ID no. 15180807
  misc_feature (38)..(361): Pfam Name: Pfam Description:  GDSL-like Lipase/Acylhydrolase
  misc_feature (7)..(383): NCBI GI NO: 38345537 NR Description: OSJNBa0020J04.12
  misc_feature (38)..(378): NCBI GI NO: 15238210 NR Description: GDSL-motif lipase/hydrolase protein
  misc_feature (36)..(377): NCBI GI NO: 15229742 NR Description: GDSL-motif lipase/hydrolase protein
  misc_feature (36)..(377): NCBI GI NO: 15227849 NR Description: GDSL-motif lipase/hydrolase protein
  misc_feature (13)..(377): NCBI GI NO: 34899288 NR Description: similar to GDSL-motif lipase/hydrolase
  misc_feature (188)..(378): NCBI GI NO: 15234857 NR Description: GDSL-motif lipase/hydrolase protein
  misc_feature (13)..(133): NCBI GI NO: 15234857 NR Description: GDSL-motif lipase/hydrolase protein
  misc_feature (35)..(379): NCBI GI NO: 15241626 NR Description: GDSL-motif lipase/hydrolase protein
  misc_feature (35)..(378): NCBI GI NO: 18409881 NR Description: GDSL-motif lipase/hydrolase protein
  misc_feature (26)..(377): NCBI GI NO: 7486138 NR Description: hypothetical protein F25I24
MAPSRALHRPSLLATAAALLLLILPPSAAAAVPAPALFIFGDSLVDAGNNDYLVTLSKANGPPYGIDFESSGGKPTGRFTNGMTIADIMGESLGQKSLAPPFLAPNSSAAITSSGINYGSGSSGIFDDTGSFYIGRIPLGQQVSYFANTRSQMLETMDEEAVADFFSKALFVIVAGSNDILEFLSPSVPFLGREKPDDPSHFQDALVSNLTFYLKELSELGARKFVVSDVGPLGCIPYVRALEFMPAGQCSAPANRVTEGYNRKLRRMVEKMNREIGPESKFVYTDTYRIVMAIIQNHRQYGFDDAMDPCCGGSFPLPPFLCIGAVANRSSSTLCSDRSKYVFWDAFHPTEAANLIVAGKLLDGDAAAAWPINVRELSQYEYK

SEQ ID NO: 21395 - protein, 301 aa, Zea mays subsp. mays
  peptide (1)..(301): Ceres Seq. ID no. 15180808
  misc_feature (1)..(279): Pfam Name: Pfam Description:  GDSL-like Lipase/Acylhydrolase
  misc_feature (1)..(301): NCBI GI NO: 38345537 NR Description: OSJNBa0020J04.12
  misc_feature (1)..(296): NCBI GI NO: 15238210 NR Description: GDSL-motif lipase/hydrolase protein
  misc_feature (1)..(295): NCBI GI NO: 15229742 NR Description: GDSL-motif lipase/hydrolase protein
  misc_feature (1)..(295): NCBI GI NO: 15227849 NR Description: GDSL-motif lipase/hydrolase protein
  misc_feature (1)..(295): NCBI GI NO: 34899288 NR Description: similar to GDSL-motif lipase/hydrolase
  misc_feature (106)..(296): NCBI GI NO: 15234857 NR Description: GDSL-motif lipase/hydrolase protein
  misc_feature (1)..(51): NCBI GI NO: 15234857 NR Description: GDSL-motif lipase/hydrolase protein
  misc_feature (1)..(297): NCBI GI NO: 15241626 NR Description: GDSL-motif lipase/hydrolase protein
  misc_feature (1)..(296): NCBI GI NO: 18409881 NR Description: GDSL-motif lipase/hydrolase protein
  misc_feature (1)..(295): NCBI GI NO: 7486138 NR Description: hypothetical protein F25I24
MTIADIMGESLGQKSLAPPFLAPNSSAAITSSGINYGSGSSGIFDDTGSFYIGRIPLGQQVSYFANTRSQMLETMDEEAVADFFSKALFVIVAGSNDILEFLSPSVPFLGREKPDDPSHFQDALVSNLTFYLKELSELGARKFVVSDVGPLGCIPYVRALEFMPAGQCSAPANRVTEGYNRKLRRMVEKMNREIGPESKFVYTDTYRIVMAIIQNHRQYGFDDAMDPCCGGSFPLPPFLCIGAVANRSSSTLCSDRSKYVFWDAFHPTEAANLIVAGKLLDGDAAAAWPINVRELSQYEYK

SEQ ID NO: 21396 - DNA, 1587 bp, Zea mays subsp. mays
  misc_feature (1)..(1587): Ceres Seq. ID no. 14309629
attaaatctttggctattaggacgcttctctcctcccaaaccccacatctcagcaagggccccgtcggctagcgccgcatccgcagaccgcagccgtcgacgcagaccctcttcggcagccgcttgcagcgcgtcccttccccgctcccggcgccatggactgcgcaaaggggagggcggtggcggacctctacgacgaggtgatggtggagatcctctcgcgcgtgcccgtcaaagacctccgccgttgcacgtgcgtgtgcaaatcttggcgcaacctcatcaccgaccccctcaaccgcaagaagctgccccagaccctggaaggcttcttccacggcgtcgtcggagggcctcacagctacggccaattcaccagcctgtcggggagcggagaacgcgtggctccggtcgacccttccttctccttcatcacggcaatgctgcctggcgtggagcgcatggtcctcttggattcttgcaacgggctcctgctcttcgggtgcacccgggaggacaagttcgggtacatcgtgacaaaccctgcgaccgaggaattgatgactgtgcccgccagctccggctcttgtccccttccacctccatttgaaagggacatggttggtggggaaagatatgcgcacacctttctgatgtttaaccctgctgtctcctcgcacttccacttggtccagatctgggagaataaggcggcgaaggaggtggaaacggtgcactcttactcgtctgaaaccaaggcatggagtgacaggtcaagcaagtgggggcgaggtgaagagggcggtgaatgggagctgtggggtgaatccgtgattggattcatgtgtggctggacattggtcgatggtctgctgcattttcttgccttcgatcttcagaaagaagagactgtgataattgcagtggatggggatggggaaactcgtaggatcatcggctggcatggtaaggatgtgagagcaattgtttttattggtgaatcccaagaccatctacactgcatcggtgtgaatgtgcaattagatcaaggctctgaagtgcgcttcacgcggatgtcgatctgggttcttgaggactatgatacacaagcatggatcttaaagcacaatgtgagctctttgcagttctttgaattactgagtcacccaatcaaagacttccatattgtggccattcatccatatcacaattcgttcatccttattcagcactggaaccagaaacttgtatcatataacatggatactcaggaactgcatggtctcggcactcttggaaagggctatgcggttattaccccttacataccctgtttcttggagtcatcggttcttgccaccaaacactgaggttgttgtttctcggggacttctctgcatgttcaacaagagcctgatcatccaagtgtggggcaaggtgatctagtatgatggtgctttaatgtccttttgtaatgctttgagaaagctgtttacagggcaacatggttagttccatgatatatcagtgagaaagctgtttacaggacagcatggttagttctatgatatatcaaattagatcacg

SEQ ID NO: 21397 - protein, 404 aa, Zea mays subsp. mays
  peptide (1)..(404): Ceres Seq. ID no. 14309630
  misc_feature (10)..(54): Pfam Name: Pfam Description:  F-box domain
  misc_feature (2)..(211): NCBI GI NO: 34898788 NR Description: OJ1131_E05.20
  misc_feature (215)..(397): NCBI GI NO: 34898788 NR Description: OJ1131_E05.20
  misc_feature (2)..(211): NCBI GI NO: 34898790 NR Description: OJ1131_E05.21
  misc_feature (215)..(397): NCBI GI NO: 34898790 NR Description: OJ1131_E05.21
  misc_feature (15)..(210): NCBI GI NO: 34898796 NR Description: OJ1131_E05.24
  misc_feature (254)..(398): NCBI GI NO: 34898796 NR Description: OJ1131_E05.24
  misc_feature (10)..(210): NCBI GI NO: 34898810 NR Description: OJ1131_E05.32
  misc_feature (166)..(397): NCBI GI NO: 33146481 NR Description: unknown protein
  misc_feature (166)..(397): NCBI GI NO: 34898810 NR Description: OJ1131_E05.32
  misc_feature (39)..(262): NCBI GI NO: 34898802 NR Description: OJ1131_E05.28
MDCAKGRAVADLYDEVMVEILSRVPVKDLRRCTCVCKSWRNLITDPLNRKKLPQTLEGFFHGVVGGPHSYGQFTSLSGSGERVAPVDPSFSFITAMLPGVERMVLLDSCNGLLLFGCTREDKFGYIVTNPATEELMTVPASSGSCPLPPPFERDMVGGERYAHTFLMFNPAVSSHFHLVQIWENKAAKEVETVHSYSSETKAWSDRSSKWGRGEEGGEWELWGESVIGFMCGWTLVDGLLHFLAFDLQKEETVIIAVDGDGETRRIIGWHGKDVRAIVFIGESQDHLHCIGVNVQLDQGSEVRFTRMSIWVLEDYDTQAWILKHNVSSLQFFELLSHPIKDFHIVAIHPYHNSFILIQHWNQKLVSYNMDTQELHGLGTLGKGYAVITPYIPCFLESSVLATKH

SEQ ID NO: 21398 - protein, 388 aa, Zea mays subsp. mays
  peptide (1)..(388): Ceres Seq. ID no. 14309631
  misc_feature (1)..(38): Pfam Name: Pfam Description:  F-box domain
  misc_feature (1)..(195): NCBI GI NO: 34898788 NR Description: OJ1131_E05.20
  misc_feature (199)..(381): NCBI GI NO: 34898788 NR Description: OJ1131_E05.20
  misc_feature (1)..(195): NCBI GI NO: 34898790 NR Description: OJ1131_E05.21
  misc_feature (199)..(381): NCBI GI NO: 34898790 NR Description: OJ1131_E05.21
  misc_feature (1)..(194): NCBI GI NO: 34898796 NR Description: OJ1131_E05.24
  misc_feature (238)..(382): NCBI GI NO: 34898796 NR Description: OJ1131_E05.24
  misc_feature (1)..(194): NCBI GI NO: 34898810 NR Description: OJ1131_E05.32
  misc_feature (150)..(381): NCBI GI NO: 33146481 NR Description: unknown protein
  misc_feature (150)..(381): NCBI GI NO: 34898810 NR Description: OJ1131_E05.32
  misc_feature (23)..(246): NCBI GI NO: 34898802 NR Description: OJ1131_E05.28
MVEILSRVPVKDLRRCTCVCKSWRNLITDPLNRKKLPQTLEGFFHGVVGGPHSYGQFTSLSGSGERVAPVDPSFSFITAMLPGVERMVLLDSCNGLLLFGCTREDKFGYIVTNPATEELMTVPASSGSCPLPPPFERDMVGGERYAHTFLMFNPAVSSHFHLVQIWENKAAKEVETVHSYSSETKAWSDRSSKWGRGEEGGEWELWGESVIGFMCGWTLVDGLLHFLAFDLQKEETVIIAVDGDGETRRIIGWHGKDVRAIVFIGESQDHLHCIGVNVQLDQGSEVRFTRMSIWVLEDYDTQAWILKHNVSSLQFFELLSHPIKDFHIVAIHPYHNSFILIQHWNQKLVSYNMDTQELHGLGTLGKGYAVITPYIPCFLESSVLATKH

SEQ ID NO: 21399 - protein, 309 aa, Zea mays subsp. mays
  peptide (1)..(309): Ceres Seq. ID no. 14309632
  misc_feature (1)..(116): NCBI GI NO: 34898788 NR Description: OJ1131_E05.20
  misc_feature (120)..(302): NCBI GI NO: 34898788 NR Description: OJ1131_E05.20
  misc_feature (1)..(116): NCBI GI NO: 34898790 NR Description: OJ1131_E05.21
  misc_feature (120)..(302): NCBI GI NO: 34898790 NR Description: OJ1131_E05.21
  misc_feature (1)..(115): NCBI GI NO: 34898796 NR Description: OJ1131_E05.24
  misc_feature (159)..(303): NCBI GI NO: 34898796 NR Description: OJ1131_E05.24
  misc_feature (1)..(115): NCBI GI NO: 34898810 NR Description: OJ1131_E05.32
  misc_feature (71)..(302): NCBI GI NO: 33146481 NR Description: unknown protein
  misc_feature (71)..(302): NCBI GI NO: 34898810 NR Description: OJ1131_E05.32
  misc_feature (1)..(167): NCBI GI NO: 34898802 NR Description: OJ1131_E05.28
MLPGVERMVLLDSCNGLLLFGCTREDKFGYIVTNPATEELMTVPASSGSCPLPPPFERDMVGGERYAHTFLMFNPAVSSHFHLVQIWENKAAKEVETVHSYSSETKAWSDRSSKWGRGEEGGEWELWGESVIGFMCGWTLVDGLLHFLAFDLQKEETVIIAVDGDGETRRIIGWHGKDVRAIVFIGESQDHLHCIGVNVQLDQGSEVRFTRMSIWVLEDYDTQAWILKHNVSSLQFFELLSHPIKDFHIVAIHPYHNSFILIQHWNQKLVSYNMDTQELHGLGTLGKGYAVITPYIPCFLESSVLATKH

SEQ ID NO: 21400 - DNA, 791 bp, Zea mays subsp. mays
  misc_feature (1)..(791): Ceres Seq. ID no. 15179107
cagctcctcctccctcctatcatcctcttcctcaacgctccctcgtcattatataacacgaggatcagttcagagctgcttgacaaacactcacacctagcgaacagctatacacccaaccaggtggagagctgcaagccaccaagaccaaagtgatcgcaacctgtgcggcggcggcggcggcgacgatgagcaggaacaacggcaaggcgtcgaagctggagctcctgaggatgggcctgtcgagggcgaggggcgggccctcggcgacggcgcggcccggcggcggggacagcggcagcaacggccgcgcgacgacgtcgccgcgccgggtgtcctcctcgtcctcgtccaccgcgtcgccgccgagctcgtgcgtgtcgtccgagggcagccccgacgcggccgccgccgcgccggcgcccatggtcctggccgggtgcccccggtgcatgatgtacgtgatgctgtcccgcgaggacccccggtgcccccggtgccacaacgccgtgctgctcgacttcagcgagggcgaccagcgccgcccgcgtcagcgccggtgaaatggaaccaccacgagcgatcgagcacgtctgagttcgtcgttgccttcaagaagtcgtcgtcgtagcttcattttcccattcgcggccggagtttgtttcgattacccaaggaattattgcatagacctgtttcttccgagcggcacggtgccaaagggatcggtctaggtaataatttcatgctttgttagacaataataataagaataataatttcgtcttctc

SEQ ID NO: 21401 - protein, 124 aa, Zea mays subsp. mays
  peptide (1)..(124): Ceres Seq. ID no. 15179108
  misc_feature (1)..(124): NCBI GI NO: 34908532 NR Description: P0423B08.15
  misc_feature (36)..(112): NCBI GI NO: 15239988 NR Description: B-type cyclin -related [Arabidopsis thaliana]
  misc_feature (49)..(112): NCBI GI NO: 18399295 NR Description: expressed protein [Arabidopsis thaliana]
  misc_feature (54)..(115): NCBI GI NO: 32488708 NR Description: OSJNBa0088H09.9
  misc_feature (41)..(116): NCBI GI NO: 32479729 NR Description: OJ991214_12.5
  misc_feature (1)..(104): NCBI GI NO: 5852085 NR Description: zwh0008.1 [Oryza sativa (indica cultivar-group)]
  misc_feature (1)..(104): NCBI GI NO: 38345608 NR Description: OSJNBa0093O08.10
  misc_feature (52)..(119): NCBI GI NO: 15242196 NR Description: expressed protein [Arabidopsis thaliana]
MSRNNGKASKLELLRMGLSRARGGPSATARPGGGDSGSNGRATTSPRRVSSSSSSTASPPSSCVSSEGSPDAAAAAPAPMVLAGCPRCMMYVMLSREDPRCPRCHNAVLLDFSEGDQRRPRQRR

SEQ ID NO: 21402 - protein, 109 aa, Zea mays subsp. mays
  peptide (1)..(109): Ceres Seq. ID no. 15179109
  misc_feature (1)..(109): NCBI GI NO: 34908532 NR Description: P0423B08.15
  misc_feature (21)..(97): NCBI GI NO: 15239988 NR Description: B-type cyclin -related [Arabidopsis thaliana]
  misc_feature (34)..(97): NCBI GI NO: 18399295 NR Description: expressed protein [Arabidopsis thaliana]
  misc_feature (39)..(100): NCBI GI NO: 32488708 NR Description: OSJNBa0088H09.9
  misc_feature (26)..(101): NCBI GI NO: 32479729 NR Description: OJ991214_12.5
  misc_feature (1)..(89): NCBI GI NO: 5852085 NR Description: zwh0008.1 [Oryza sativa (indica cultivar-group)]
  misc_feature (1)..(89): NCBI GI NO: 38345608 NR Description: OSJNBa0093O08.10
  misc_feature (37)..(104): NCBI GI NO: 15242196 NR Description: expressed protein [Arabidopsis thaliana]
MGLSRARGGPSATARPGGGDSGSNGRATTSPRRVSSSSSSTASPPSSCVSSEGSPDAAAAAPAPMVLAGCPRCMMYVMLSREDPRCPRCHNAVLLDFSEGDQRRPRQRR

SEQ ID NO: 21403 - DNA, 1432 bp, Zea mays subsp. mays
  misc_feature (1)..(1432): Ceres Seq. ID no. 15180059
aagtggcaaggaaatagaaaacgcagcgtccgtgcgctgtaggtgtgtgtgcgccaagttcctgtgtccattgtcttgtgtacagctactgttcatctctgtctatctctgttcttggcgttccatcgagtgtgtagcgctagtagattccaacatttggtatcagaggcagtttatgcccaagatcctgcgctactacctcgagtccgaagctatggcgatggttccgcacggcgccggggggagttcggtctccatgtcgtacccggtgctgtcgccggcgagctacacggcgtgggcgatcaaggtggagtcgatcctcgacgcgcaaggtctctgggaggccgtgtctccaccagatggtggcgaggtgaacgcggtgaagaacaagacggcgcgggcacaacttctccaagctctgcccgatgacatcttgatgcaggtctccaccaagaaaacggcggcggaggtgtgggcgagtctcaagactcgtttcgtcggggcggatcgggtcaagacggcgcgcctagccacgctcaagggggagttcgacaagctgtacatggaggacggggaggcattggacgactacgccggcaaaatcagcggtatggcggcgcgttacgccgggcttggcgcgacactcgacgacgctgccatggtaaaaaagctcctcgacaccgtcccggatcggctcttccccgtcgtcgcgggcatcgagcagttctgcgacgttgagacgatgccatttgaggaggcgctcggacgtctcaaggcgttcgatgagcgttctcggcggcgtactcatgccggcggcgaacgacgcgacgaccaactcctcctcacggaggccgagtggaaagctcgaaaaaagaagaagtcgacgatcggcaagtgcttcaactgcggtaaccgcggccacttcgcgcgggattgccgtaagaagaaggaggaggaggcgctgctagccagggccgatgaagaagcgacgctcctgtgagtgcgggacgcggcgctaggattagggagagtttgttagaataatcccagcgcatgtgtgtacgagtcatggcagttgtgcatgtgtgtgcatgcagtgcaactgctagctccgtgggtgtgtgcgcatggtgctggtcactagctagttgagtggtgtagtgcgtgcgttagttgcgtgcgtgcttgcatgctggaaggagtggccgagaagctagcgcctagtgacttgttcgtgtgtgtgaggaggttgcttgcatgcaaagcaacatgagttatgtggctcatggcgtgaaggctgggtagtggactagtggagttcgtagctctctgtatattcagtctataaaggcacatgtactgctcagttaaaaagtgtggcaaggaaatagaaaacgcagcgtccatgcgctgtaggtgtgtgtgcgcgaac

SEQ ID NO: 21404 - protein, 332 aa, Zea mays subsp. mays
  peptide (1)..(332): Ceres Seq. ID no. 15180060
  misc_feature (174)..(226): Pfam Name: Pfam Description:  Retrotransposon gag protein
  misc_feature (59)..(332): NCBI GI NO: 34907386 NR Description: P0471B04.27
  misc_feature (72)..(292): NCBI GI NO: 34910624 NR Description: putative copia-type polyprotein
  misc_feature (74)..(292): NCBI GI NO: 30017513 NR Description: putative gag-pol polyprotein
  misc_feature (72)..(292): NCBI GI NO: 37534104 NR Description: putative retroelement
  misc_feature (148)..(292): NCBI GI NO: 29150404 NR Description: gag-pol polyprotein
  misc_feature (85)..(332): NCBI GI NO: 37535062 NR Description: putative lectin receptor kinase
  misc_feature (85)..(310): NCBI GI NO: 38345433 NR Description: OSJNBb0046P18.1
  misc_feature (297)..(332): NCBI GI NO: 38345433 NR Description: OSJNBb0046P18.1
  misc_feature (69)..(285): NCBI GI NO: 15230839 NR Description: hypothetical protein [Arabidopsis thaliana]
  misc_feature (85)..(309): NCBI GI NO: 37535062 NR Description: putative lectin receptor kinase
SGKEIENAASVRCRCVCAKFLCPLSCVQLLFISVYLCSWRSIECVALVDSNIWYQRQFMPKILRYYLESEAMAMVPHGAGGSSVSMSYPVLSPASYTAWAIKVESILDAQGLWEAVSPPDGGEVNAVKNKTARAQLLQALPDDILMQVSTKKTAAEVWASLKTRFVGADRVKTARLATLKGEFDKLYMEDGEALDDYAGKISGMAARYAGLGATLDDAAMVKKLLDTVPDRLFPVVAGIEQFCDVETMPFEEALGRLKAFDERSRRRTHAGGERRDDQLLLTEAEWKARKKKKSTIGKCFNCGNRGHFARDCRKKKEEEALLARADEEATLL

SEQ ID NO: 21405 - protein, 274 aa, Zea mays subsp. mays
  peptide (1)..(274): Ceres Seq. ID no. 15180061
  misc_feature (116)..(168): Pfam Name: Pfam Description:  Retrotransposon gag protein
  misc_feature (1)..(274): NCBI GI NO: 34907386 NR Description: P0471B04.27
  misc_feature (14)..(234): NCBI GI NO: 34910624 NR Description: putative copia-type polyprotein
  misc_feature (16)..(234): NCBI GI NO: 30017513 NR Description: putative gag-pol polyprotein
  misc_feature (14)..(234): NCBI GI NO: 37534104 NR Description: putative retroelement
  misc_feature (90)..(234): NCBI GI NO: 29150404 NR Description: gag-pol polyprotein
  misc_feature (27)..(274): NCBI GI NO: 37535062 NR Description: putative lectin receptor kinase
  misc_feature (27)..(252): NCBI GI NO: 38345433 NR Description: OSJNBb0046P18.1
  misc_feature (239)..(274): NCBI GI NO: 38345433 NR Description: OSJNBb0046P18.1
  misc_feature (11)..(227): NCBI GI NO: 15230839 NR Description: hypothetical protein [Arabidopsis thaliana]
  misc_feature (27)..(251): NCBI GI NO: 37535062 NR Description: putative lectin receptor kinase
MPKILRYYLESEAMAMVPHGAGGSSVSMSYPVLSPASYTAWAIKVESILDAQGLWEAVSPPDGGEVNAVKNKTARAQLLQALPDDILMQVSTKKTAAEVWASLKTRFVGADRVKTARLATLKGEFDKLYMEDGEALDDYAGKISGMAARYAGLGATLDDAAMVKKLLDTVPDRLFPVVAGIEQFCDVETMPFEEALGRLKAFDERSRRRTHAGGERRDDQLLLTEAEWKARKKKKSTIGKCFNCGNRGHFARDCRKKKEEEALLARADEEATLL

SEQ ID NO: 21406 - protein, 261 aa, Zea mays subsp. mays
  peptide (1)..(261): Ceres Seq. ID no. 15180062
  misc_feature (103)..(155): Pfam Name: Pfam Description:  Retrotransposon gag protein
  misc_feature (1)..(261): NCBI GI NO: 34907386 NR Description: P0471B04.27
  misc_feature (1)..(221): NCBI GI NO: 34910624 NR Description: putative copia-type polyprotein
  misc_feature (3)..(221): NCBI GI NO: 30017513 NR Description: putative gag-pol polyprotein
  misc_feature (1)..(221): NCBI GI NO: 37534104 NR Description: putative retroelement
  misc_feature (77)..(221): NCBI GI NO: 29150404 NR Description: gag-pol polyprotein
  misc_feature (14)..(261): NCBI GI NO: 37535062 NR Description: putative lectin receptor kinase
  misc_feature (14)..(239): NCBI GI NO: 38345433 NR Description: OSJNBb0046P18.1
  misc_feature (226)..(261): NCBI GI NO: 38345433 NR Description: OSJNBb0046P18.1
  misc_feature (1)..(214): NCBI GI NO: 15230839 NR Description: hypothetical protein [Arabidopsis thaliana]
  misc_feature (14)..(238): NCBI GI NO: 37535062 NR Description: putative lectin receptor kinase
MAMVPHGAGGSSVSMSYPVLSPASYTAWAIKVESILDAQGLWEAVSPPDGGEVNAVKNKTARAQLLQALPDDILMQVSTKKTAAEVWASLKTRFVGADRVKTARLATLKGEFDKLYMEDGEALDDYAGKISGMAARYAGLGATLDDAAMVKKLLDTVPDRLFPVVAGIEQFCDVETMPFEEALGRLKAFDERSRRRTHAGGERRDDQLLLTEAEWKARKKKKSTIGKCFNCGNRGHFARDCRKKKEEEALLARADEEATLL

SEQ ID NO: 21407 - DNA, 1168 bp, Zea mays subsp. mays
  misc_feature (1)..(1168): Ceres Seq. ID no. 15180738
acaccatctctaggccgcgtctcgcctcgtctcgtcgtccgatcattatctccctgactcgcctcgtcctccagatatcggccgccaccttcacctccaccgccccggcgcacctgtgcgtctccatcgtcgccgcctctcctccttcggacacgactgaccttccactggcgccaacgaagaaaacacataggaagaagctcaccgccaaacctcatccagatccagtcgctgccctccgaaggccgcatacggaacgtctcgtctcttcctttggatccggcggtcaactccatcacccccagcttcacctcccttagtccccctccgtccgctctcacccaccgcttctatatcgccacctctctcgttgtagaagaagacactgaggatctggctttctggaatcacatttcttgagaactatctgttggagaactaaactaggctcttgttcatattatggatcagcaagctaagattgatgctgattttcttgaaccaactgtactcttagatgagacacattaccaggaggggtacaaaaatggctataatgatggtttggcatctggaaaggaagaggggaggcaggttggtttaaagatgggtttccaggtcggtgaagaactgggtttctttcagggctgtctggatgtgtggacgtctgcaattctcattgatcagaatgccttcacagctcgggtcaggaagaatatcgagcaactggctgcactggtgggcagctatccgctgtctgatccggagaatgaacaaattcaagacgtgatggagaagataaggctgaaatttagggtcatcactgcaagcttaggggtgaagttagagtatgaagggcaccccaaatcatctaaacaggatgctgaggatctatgagcagtgattgaaattacattttagtttctccgcccttgctgtttaaagctcttcaactcattggcatcacgaggaactgccgtgagacatcaatggccagagtccgaccaaaaccacatatatagttttaacaatgtctcaagttttgtgttattacctgctatctgccatatgtaatagtttcctttcagaaggcaaaagcacttccttcccattttcttgaagtacttgttgacttgtattctacatgttgggagcatatagatcttcc

SEQ ID NO: 21408 - protein, 144 aa, Zea mays subsp. mays
  peptide (1)..(144): Ceres Seq. ID no. 15180739
  misc_feature (1)..(144): NCBI GI NO: 27261030 NR Description: unknown protein
  misc_feature (7)..(142): NCBI GI NO: 25411995 NR Description: hypothetical protein At2g20830
  misc_feature (2)..(137): NCBI GI NO: 12843058 NR Description: unnamed protein product [Mus musculus]
  misc_feature (2)..(137): NCBI GI NO: 31980738 NR Description: oral cancer overexpressed 1 [Mus musculus]
  misc_feature (7)..(137): NCBI GI NO: 13905220 NR Description: 2210010N10Rik protein [Mus musculus]
  misc_feature (7)..(137): NCBI GI NO: 27448229 NR Description: hypothetical protein [Mus musculus]
  misc_feature (2)..(131): NCBI GI NO: 27661646 NR Description: similar to RIKEN cDNA 2210010N10 gene
  misc_feature (10)..(131): NCBI GI NO: 23943892 NR Description: oral cancer overexpressed 1 [Homo sapiens]
  misc_feature (23)..(127): NCBI GI NO: 28829147 NR Description: hypothetical protein [Dictyostelium discoideum]
MDQQAKIDADFLEPTVLLDETHYQEGYKNGYNDGLASGKEEGRQVGLKMGFQVGEELGFFQGCLDVWTSAILIDQNAFTARVRKNIEQLAALVGSYPLSDPENEQIQDVMEKIRLKFRVITASLGVKLEYEGHPKSSKQDAEDL

SEQ ID NO: 21409 - protein, 105 aa, Zea mays subsp. mays
  peptide (1)..(105): Ceres Seq. ID no. 15180740
TISRPRLASSRRPIIISLTRLVLQISAATFTSTAPAHLCVSIVAASPPSDTTDLPLAPTKKTHRKKLTAKPHPDPVAALRRPHTERLVSSFGSGGQLHHPQLHLP

SEQ ID NO: 21410 - protein, 96 aa, Zea mays subsp. mays
  peptide (1)..(96): Ceres Seq. ID no. 15180741
  misc_feature (1)..(96): NCBI GI NO: 27261030 NR Description: unknown protein
  misc_feature (1)..(94): NCBI GI NO: 25411995 NR Description: hypothetical protein At2g20830
  misc_feature (1)..(89): NCBI GI NO: 12843058 NR Description: unnamed protein product [Mus musculus]
  misc_feature (1)..(89): NCBI GI NO: 31980738 NR Description: oral cancer overexpressed 1 [Mus musculus]
  misc_feature (1)..(89): NCBI GI NO: 13905220 NR Description: 2210010N10Rik protein [Mus musculus]
  misc_feature (1)..(89): NCBI GI NO: 27448229 NR Description: hypothetical protein [Mus musculus]
  misc_feature (1)..(83): NCBI GI NO: 27661646 NR Description: similar to RIKEN cDNA 2210010N10 gene
  misc_feature (1)..(83): NCBI GI NO: 23943892 NR Description: oral cancer overexpressed 1 [Homo sapiens]
  misc_feature (1)..(79): NCBI GI NO: 28829147 NR Description: hypothetical protein [Dictyostelium discoideum]
MGFQVGEELGFFQGCLDVWTSAILIDQNAFTARVRKNIEQLAALVGSYPLSDPENEQIQDVMEKIRLKFRVITASLGVKLEYEGHPKSSKQDAEDL

SEQ ID NO: 21411 - DNA, 709 bp, Zea mays subsp. mays
  misc_feature (1)..(709): Ceres Seq. ID no. 12633674
aatggatgagcacggggaaaaggaagagaacaagtctcaagattcggctttggcggcggagcagcgcgaggagacggcggcggcggagggagaggacacgtctgaggaatccacggaccagcgcgaggacgggcacgggtataaagcggacgaatcggcgggcctgctgcccgaggacgacgtgggctctggagaagcctcggcggcgccacacttcgggcacccgtgctcgttgttgcgcgcctgcgccggattcctgggcctgcacggctgcggcggcgatcagaagccggcggcggctgccgttgctgcatctgcagctgaagccgccacggcggcggcggcgagctcgtcccaggatgaagaagacggcggcgtcgacatggcgaaggctaacggtttctacatgcatgaggtgatcacccgcgtatgggcggtcgcggtgaggaggccgcggccgcggccgccggatcacgcgagagaagggagcggtggcaatggaggcgtacaccactaggagtagactcgccgcgcatggttgtctaccttggctcgctcatagcctccgcctacataaatattttgcccgtcagagatctgcggccgtctactgtctacatgcacctttaaataaatccatggctatgaagcatgaatgtctgatgtaattcatgtaggcttctccgatgcggacttcaaataagacaaa

SEQ ID NO: 21412 - protein, 171 aa, Zea mays subsp. mays
  peptide (1)..(171): Ceres Seq. ID no. 12633675
  misc_feature (8)..(171): NCBI GI NO: 21741232 NR Description: OSJNBb0034I13.24
MDEHGEKEENKSQDSALAAEQREETAAAEGEDTSEESTDQREDGHGYKADESAGLLPEDDVGSGEASAAPHFGHPCSLLRACAGFLGLHGCGGDQKPAAAAVAASAAEAATAAAASSSQDEEDGGVDMAKANGFYMHEVITRVWAVAVRRPRPRPPDHAREGSGGNGGVHH

SEQ ID NO: 21413 - protein, 138 aa, Zea mays subsp. mays
  peptide (1)..(138): Ceres Seq. ID no. 12633676
WMSTGKRKRTSLKIRLWRRSSARRRRRRRERTRLRNPRTSARTGTGIKRTNRRACCPRTTWALEKPRRRHTSGTRARCCAPAPDSWACTAAAAIRSRRRLPLLHLQLKPPRRRRRARPRMKKTAASTWRRLTVSTCMR

SEQ ID NO: 21414 - protein, 137 aa, Zea mays subsp. mays
  peptide (1)..(137): Ceres Seq. ID no. 12633677
MSTGKRKRTSLKIRLWRRSSARRRRRRRERTRLRNPRTSARTGTGIKRTNRRACCPRTTWALEKPRRRHTSGTRARCCAPAPDSWACTAAAAIRSRRRLPLLHLQLKPPRRRRRARPRMKKTAASTWRRLTVSTCMR

SEQ ID NO: 21415 - DNA, 1406 bp, Zea mays subsp. mays
  misc_feature (1)..(1406): Ceres Seq. ID no. 15180785
aaaatatctggacgcagacactgggccgcgctgcttctccgtcacgctgaatcgtcgtcggctcgtcgcctagtcgccgccggccagccgcaggagctcgccgtcgcgcgttttttgaagctctcgaggaaagggggcgcgcgcaggcgcagcatgagagcggccgtgaacacgccacctccgcgctgctactcgcggcggcgcgccagcgccacgctgctggaagcgcgttatgtgttcgaccacgtgccgcagcggcgcctgccgagcctggctgcggaactccgcgcgcggcccgcgtccgtggctgcccggaggcccgcgcggcgctcgcccgcgtctgcggctgcccccacctgtggcgccgcttcagttactcgtttgtttagggcattgctgcagattccaacggcctattcttcaatttctcgcgtgcgtgtagctccggctgcattcttgccagcaagatacaactttgaaggctatatcccccgtagctgctccagttcatcgcttcagatctatagccggtcatcgatgttaaatctaccaccatcttcagctctcacggtgtcctcccagctcacctcctctgacgtagcccagcgttcagaggaatggttcactcttcgcaaggacaagctcaccacaagcaccttcagtaccgccttgggtttctgggctggcaacagaagggcagagctgtggaacgagaaagtttttggcgcgacagagaccaagctggcggacaccgcgaggtctgccatggactggggcacgcatcatgagagcgtagccatagagcagtacacgagcatcacagtaaggccggtgggcaccttcggcttcgcggtgcacgccgaggccagctccggatggctgggagcctcgcccgacggagtcctcgggtgcgggccggacggcgggatcctggaagtcaagtgccccttcaacaagggcaagcccgagctcgcgctgccctggcgcgccatgccctactactacatgccgcaggtgcagggcctgatggagatcatgggcagggactgggcggagctctactgctggacgcccagcgggagcagcctgttccgcgtgccgcgggaccgcgcgtactgggagctcctgcacgaggcgctgagcgacttctggtggggcgacgtggtgcccgcgcgggagctggcgctcctggggaagcacgacgaggcgaggtccttcgagcctcggcccaagcaccggctcacgaacctggtgctgtacaggagcaggaagctggcctccgaggccaagctgctgtggatggatgttggcggccgtgtagagttctttcagtgagacgttctgccggtggttgtactgtgcactgtgttgtgactattctttgaattaactcattgccttccgac

SEQ ID NO: 21416 - protein, 444 aa, Zea mays subsp. mays
  peptide (1)..(444): Ceres Seq. ID no. 15180786
  misc_feature (83)..(443): NCBI GI NO: 40253518 NR Description: unknown protein
  misc_feature (86)..(443): NCBI GI NO: 38345347 NR Description: OSJNBa0081L15.20
  misc_feature (172)..(443): NCBI GI NO: 10241653 NR Description: contains similarity to F12A21.16
  misc_feature (168)..(443): NCBI GI NO: 25404961 NR Description: protein F12A21.19
  misc_feature (168)..(443): NCBI GI NO: 30697546 NR Description: F12A21.19 [Arabidopsis thaliana]
  misc_feature (205)..(440): NCBI GI NO: 15222951 NR Description: hypothetical protein [Arabidopsis thaliana]
  misc_feature (205)..(440): NCBI GI NO: 25402766 NR Description: protein F16A14.4 [imported] - Arabidopsis thaliana
KISGRRHWAALLLRHAESSSARRLVAAGQPQELAVARFLKLSRKGGARRRSMRAAVNTPPPRCYSRRRASATLLEARYVFDHVPQRRLPSLAAELRARPASVAARRPARRSPASAAAPTCGAASVTRLFRALLQIPTAYSSISRVRVAPAAFLPARYNFEGYIPRSCSSSSLQIYSRSSMLNLPPSSALTVSSQLTSSDVAQRSEEWFTLRKDKLTTSTFSTALGFWAGNRRAELWNEKVFGATETKLADTARSAMDWGTHHESVAIEQYTSITVRPVGTFGFAVHAEASSGWLGASPDGVLGCGPDGGILEVKCPFNKGKPELALPWRAMPYYYMPQVQGLMEIMGRDWAELYCWTPSGSSLFRVPRDRAYWELLHEALSDFWWGDVVPARELALLGKHDEARSFEPRPKHRLTNLVLYRSRKLASEAKLLWMDVGGRVEFFQ

SEQ ID NO: 21417 - protein, 393 aa, Zea mays subsp. mays
  peptide (1)..(393): Ceres Seq. ID no. 15180787
  misc_feature (32)..(392): NCBI GI NO: 40253518 NR Description: unknown protein
  misc_feature (35)..(392): NCBI GI NO: 38345347 NR Description: OSJNBa0081L15.20
  misc_feature (121)..(392): NCBI GI NO: 10241653 NR Description: contains similarity to F12A21.16
  misc_feature (117)..(392): NCBI GI NO: 25404961 NR Description: protein F12A21.19
  misc_feature (117)..(392): NCBI GI NO: 30697546 NR Description: F12A21.19 [Arabidopsis thaliana]
  misc_feature (154)..(389): NCBI GI NO: 15222951 NR Description: hypothetical protein [Arabidopsis thaliana]
  misc_feature (154)..(389): NCBI GI NO: 25402766 NR Description: protein F16A14.4 [imported] - Arabidopsis thaliana
MRAAVNTPPPRCYSRRRASATLLEARYVFDHVPQRRLPSLAAELRARPASVAARRPARRSPASAAAPTCGAASVTRLFRALLQIPTAYSSISRVRVAPAAFLPARYNFEGYIPRSCSSSSLQIYSRSSMLNLPPSSALTVSSQLTSSDVAQRSEEWFTLRKDKLTTSTFSTALGFWAGNRRAELWNEKVFGATETKLADTARSAMDWGTHHESVAIEQYTSITVRPVGTFGFAVHAEASSGWLGASPDGVLGCGPDGGILEVKCPFNKGKPELALPWRAMPYYYMPQVQGLMEIMGRDWAELYCWTPSGSSLFRVPRDRAYWELLHEALSDFWWGDVVPARELALLGKHDEARSFEPRPKHRLTNLVLYRSRKLASEAKLLWMDVGGRVEFFQ

SEQ ID NO: 21418 - protein, 265 aa, Zea mays subsp. mays
  peptide (1)..(265): Ceres Seq. ID no. 15180788
  misc_feature (1)..(264): NCBI GI NO: 40253518 NR Description: unknown protein
  misc_feature (1)..(264): NCBI GI NO: 38345347 NR Description: OSJNBa0081L15.20
  misc_feature (1)..(264): NCBI GI NO: 10241653 NR Description: contains similarity to F12A21.16
  misc_feature (1)..(264): NCBI GI NO: 25404961 NR Description: protein F12A21.19
  misc_feature (1)..(264): NCBI GI NO: 30697546 NR Description: F12A21.19 [Arabidopsis thaliana]
  misc_feature (26)..(261): NCBI GI NO: 15222951 NR Description: hypothetical protein [Arabidopsis thaliana]
  misc_feature (26)..(261): NCBI GI NO: 25402766 NR Description: protein F16A14.4 [imported] - Arabidopsis thaliana
MLNLPPSSALTVSSQLTSSDVAQRSEEWFTLRKDKLTTSTFSTALGFWAGNRRAELWNEKVFGATETKLADTARSAMDWGTHHESVAIEQYTSITVRPVGTFGFAVHAEASSGWLGASPDGVLGCGPDGGILEVKCPFNKGKPELALPWRAMPYYYMPQVQGLMEIMGRDWAELYCWTPSGSSLFRVPRDRAYWELLHEALSDFWWGDVVPARELALLGKHDEARSFEPRPKHRLTNLVLYRSRKLASEAKLLWMDVGGRVEFFQ

SEQ ID NO: 21419 - DNA, 1097 bp, Zea mays subsp. mays
  misc_feature (1)..(1097): Ceres Seq. ID no. 15180781
aaccgccgccgaggagcagcgctgcgtctcaagagctccccggcgagatcgtccatcaccatcaaaaaggccgcaccacactgatcacaagcatcaaacttcctaaagcgctctggtcgcagcctcgcagtggccgcagctgcagcgtcccctcccctttcgccatcgagcatcacctgtgctgaccgccggcgcgtaactgcaccagggtcactgcttacgaggaagaggaggcgcaacgcaacagtgttgttgggttgtctcgtcgtgcggtgccggtgcccatgggcgtgcacgccagggcgatgagctggtacacgagccccgccggggtcgccggcgccggggagcgccgccgaggcgcagcacgcgctgagcagcagcccccggggcggcgacaccagcttcgacaccaacatggtcgtcgtccttgccgcgctgctgttcgcgctcctcttcgcgctgggcatcaactcgctcgcgcgctgcctcatccgctgggcgcgccgcgcgccggcagcggagggcggcggcggcgggttcgagaagcgcgtgctccggagcatgcccgtcgaggtgtacggcgccgcggccgtcaccgtcgccgacgtctgcgccatctgcctcggcgagttcgcggacggcgagaaggtgcgcgtgctgccgcgctgcacccacggcttccatgtccgctgcgtcgacacctggctcctgtcgcacgactcctgccccacgtgccgggcctccgtgctcgacggcgcaaaggccgccactcccgccggtgggggcagccggtggcagggcagcgaggctgctgccatcgccgttgtcattcgatgacgtggacaggaagggcccgcgtgcccattggtggtggagccacacggcaggtatgcaggagcttcgttccgtagtcgggagatatttttctgtgagagaccgaccagtgggcccagaccctttgtagcttcctcggtcgcaggcaagtcaaggttgcagctggccatgttggttgccaccatggaccgtccactgtcctgtggcaggcatgtcgaaaccgatatgattccatcaatcatgtggtctgatcttgacac

SEQ ID NO: 21420 - protein, 209 aa, Zea mays subsp. mays
  peptide (1)..(209): Ceres Seq. ID no. 15180782
MGVHARAMSWYTSPAGVAGAGERRRGAARAEQQPPGRRHQLRHQHGRRPCRAAVRAPLRAGHQLARALPHPLGAPRAGSGGRRRRVREARAPEHARRGVRRRGRHRRRRLRHLPRRVRGRREGARAAALHPRLPCPLRRHLAPVARLLPHVPGLRARRRKGRHSRRWGQPVAGQRGCCHRRCHSMTWTGRARVPIGGGATRQVCRSFVP

SEQ ID NO: 21421 - protein, 202 aa, Zea mays subsp. mays
  peptide (1)..(202): Ceres Seq. ID no. 15180783
MSWYTSPAGVAGAGERRRGAARAEQQPPGRRHQLRHQHGRRPCRAAVRAPLRAGHQLARALPHPLGAPRAGSGGRRRRVREARAPEHARRGVRRRGRHRRRRLRHLPRRVRGRREGARAAALHPRLPCPLRRHLAPVARLLPHVPGLRARRRKGRHSRRWGQPVAGQRGCCHRRCHSMTWTGRARVPIGGGATRQVCRSFVP

SEQ ID NO: 21422 - protein, 140 aa, Zea mays subsp. mays
  peptide (1)..(140): Ceres Seq. ID no. 15180784
  misc_feature (66)..(107): Pfam Name: RING finger Pfam Description: Zinc finger, C3HC4 type
  misc_feature (1)..(139): NCBI GI NO: 34907826 NR Description: P0485B12.26
  misc_feature (1)..(133): NCBI GI NO: 15239062 NR Description: RING zinc finger protein-related
  misc_feature (1)..(113): NCBI GI NO: 15241087 NR Description: expressed protein [Arabidopsis thaliana]
  misc_feature (1)..(112): NCBI GI NO: 15228395 NR Description: RING zinc finger protein -related
  misc_feature (1)..(140): NCBI GI NO: 32488364 NR Description: OSJNBb0108J11.15
  misc_feature (1)..(116): NCBI GI NO: 9293902 NR Description: contains similarity to RING zinc fingerprotein~gene_id:MVE11
  misc_feature (1)..(108): NCBI GI NO: 15222073 NR Description: RING-H2 finger protein RHA3a -related
  misc_feature (27)..(123): NCBI GI NO: 34912528 NR Description: P0410E03.2
  misc_feature (1)..(122): NCBI GI NO: 21645888 NR Description: ring-H2 zinc finger protein [Zea mays]
  misc_feature (1)..(122): NCBI GI NO: 18092342 NR Description: ring-H2 zinc finger protein [Zea mays]
MVVVLAALLFALLFALGINSLARCLIRWARRAPAAEGGGGGFEKRVLRSMPVEVYGAAAVTVADVCAICLGEFADGEKVRVLPRCTHGFHVRCVDTWLLSHDSCPTCRASVLDGAKAATPAGGGSRWQGSEAAAIAVVIR

SEQ ID NO: 21423 - DNA, 803 bp, Zea mays subsp. mays
  misc_feature (1)..(803): Ceres Seq. ID no. 14303280
atcctaatcgaaaactcgagtctggtcccccacccctcagcgcgacgaaggtaagatgttcctgcggaggatcctgaccggcgggggcggcctggcggccctgagggcggcgcgcgccgtgaaggagacgacggggatcgtgggccttgaggtggtgcctaacgcgcgagaggttctggtagggctctacgagcgcacgctcaaagagatcaaggccgtccccgaagacgagggttaccgcaaggccgttgaatccttcaccggtcaccgcctccagatctgccaggaggaggaggactggaagcgcatcgaggaccgaatcggatgcgggcaggtcgaggagctcatcgaggaggccgaggacgagctcaagctcatcgctaaaatgattgaatgggatccatggggtgttcccgatgactacgaatgtgaggtgattgaagacgacaccccaattcctaagcatgttcctcagcaccggcctgttcctcttcctgaggagttcttcaaggcactagatgctgtcaaatctgatcctgctcttcaaggcgatgctcctcctcaagtgaaggcgtaaggatggctgttcctggctaacgtcatttcacattttgccgcggtgggtagggactggtttcttgtgtcatttgccagcaatgcgcttgctctgagcagaataaatttctggtgagtaccatcaaagtgtgaatttgaacttagtgattcggcacagtaaacttgttgcccatgaaatactcgatgccctgaacatcgtttgttttgacgttataatcgatgttgac

SEQ ID NO: 21424 - protein, 173 aa, Zea mays subsp. mays
  peptide (1)..(173): Ceres Seq. ID no. 14303281
  misc_feature (35)..(91): Pfam Name: Pfam Description:  ETC complex I subunit conserved region
  misc_feature (1)..(172): NCBI GI NO: 18423437 NR Description: expressed protein [Arabidopsis thaliana]
  misc_feature (23)..(159): NCBI GI NO: 16930745 NR Description: NADH-ubiquinone oxidoreductase [Retama raetam]
  misc_feature (22)..(128): NCBI GI NO: 28829489 NR Description: similar to NADH-ubiquinone oxidoreductase 13 KD-B subunit
  misc_feature (65)..(172): NCBI GI NO: 22328992 NR Description: hypothetical protein [Arabidopsis thaliana]
  misc_feature (19)..(117): NCBI GI NO: 31213375 NR Description: ENSANGP00000017869 [Anopheles gambiae]
  misc_feature (19)..(117): NCBI GI NO: 233598 NR Description: 13 kDa-B polypeptide of iron-sulfur proteinfraction of NADH:ubiquinone oxidoreductase
  misc_feature (19)..(117): NCBI GI NO: 28461281 NR Description: NADH dehydrogenase
  misc_feature (19)..(117): NCBI GI NO: 24662306 NR Description: CG6463-PA [Drosophila melanogaster]
  misc_feature (19)..(117): NCBI GI NO: 12844779 NR Description: unnamed protein product [Mus musculus]
  misc_feature (22)..(118): NCBI GI NO: 37551400 NR Description: similar to NADH-ubiquinone oxidoreductase 13 kDa-B subunit
MFLRRILTGGGGLAALRAARAVKETTGIVGLEVVPNAREVLVGLYERTLKEIKAVPEDEGYRKAVESFTGHRLQICQEEEDWKRIEDRIGCGQVEELIEEAEDELKLIAKMIEWDPWGVPDDYECEVIEDDTPIPKHVPQHRPVPLPEEFFKALDAVKSDPALQGDAPPQVKA

SEQ ID NO: 21425 - DNA, 785 bp, Zea mays subsp. mays
  misc_feature (1)..(785): Ceres Seq. ID no. 13622409
aaaccctaatgaacctagcgccgcttcctccctcccaaacccatggcttcccaccttgacttccgctgcctggatgagggcctcggcggcgaacgcggcaagcgcaagcgccgcgaggatgcctcggcggcggccgcggactccatggacctcgatgctgacgccccccggctgtctaagctccgcgccatgccttccctctccgacccctcgaagccggcctccttcggccagcccacctacgacggcgtcatcgcagggcggttgtcggggcgccggtggaaggagccccgcacccggcggtcgtcggccgtggcggtgtcgcggaagccgatcccgctggaacagcgcgtccgggagaagtctctgaagcgcgcgtaccaggcccgcaaggcggagctcaaggaggagatccggcagaacaaggttgcgaagcggaaggcccgcgaggagcgggagaagcggaagcaggagaacgtgctccgcacgggcaccaagctgcagcgggtcaccaacccgaagacgatccagaagatcgccaagtccaagaagcgcaagcagctcaaggtcgtccccgacgagttcttcggcggcaagaagtcggaggccagccggcgcatgcaggtgcctggacttgagaattgaatctcaattctcaatctctgtttctggggtcgcgttgagttcatagtggttaattcgacgacgattttctacttgcttatggtagtttgaagtatgatcagattaagtgattacaatggtacgcaagttatcaagttctg

SEQ ID NO: 21426 - protein, 200 aa, Zea mays subsp. mays
  peptide (1)..(200): Ceres Seq. ID no. 13622410
  misc_feature (1)..(187): NCBI GI NO: 18402657 NR Description: expressed protein [Arabidopsis thaliana]
MASHLDFRCLDEGLGGERGKRKRREDASAAAADSMDLDADAPRLSKLRAMPSLSDPSKPASFGQPTYDGVIAGRLSGRRWKEPRTRRSSAVAVSRKPIPLEQRVREKSLKRAYQARKAELKEEIRQNKVAKRKAREEREKRKQENVLRTGTKLQRVTNPKTIQKIAKSKKRKQLKVVPDEFFGGKKSEASRRMQVPGLEN

SEQ ID NO: 21427 - protein, 166 aa, Zea mays subsp. mays
  peptide (1)..(166): Ceres Seq. ID no. 13622411
  misc_feature (1)..(153): NCBI GI NO: 18402657 NR Description: expressed protein [Arabidopsis thaliana]
MDLDADAPRLSKLRAMPSLSDPSKPASFGQPTYDGVIAGRLSGRRWKEPRTRRSSAVAVSRKPIPLEQRVREKSLKRAYQARKAELKEEIRQNKVAKRKAREEREKRKQENVLRTGTKLQRVTNPKTIQKIAKSKKRKQLKVVPDEFFGGKKSEASRRMQVPGLEN

SEQ ID NO: 21428 - protein, 151 aa, Zea mays subsp. mays
  peptide (1)..(151): Ceres Seq. ID no. 13622412
  misc_feature (1)..(138): NCBI GI NO: 18402657 NR Description: expressed protein [Arabidopsis thaliana]
MPSLSDPSKPASFGQPTYDGVIAGRLSGRRWKEPRTRRSSAVAVSRKPIPLEQRVREKSLKRAYQARKAELKEEIRQNKVAKRKAREEREKRKQENVLRTGTKLQRVTNPKTIQKIAKSKKRKQLKVVPDEFFGGKKSEASRRMQVPGLEN

SEQ ID NO: 21429 - DNA, 1112 bp, Zea mays subsp. mays
  misc_feature (1)..(1112): Ceres Seq. ID no. 14305465
ataatcggctcacttggccccccgcgcagcccgattccatccatgccgcggcgcccgcgtccactggtgtcgcgtcgcgctgcacgcatcggtggtgccaaggtggcgacctgacgcctacaaggaggcgtccgcgccgcgcctttcccagcttctgcgcgcggcgagatagggaggaggcggagccgcggaggagagagatggacccggagaagcagcgccagcacgacggcgcggtggatgcggacatcgagcggctccccgtcgacctcctcgctcacatcctctccctcctgtcgcccttccgcgacctgtccatggcggggggagtgagccggaggtggcgctgggcggtggagcggtcgctggcgtcgcggcggcggctgagcttcgcgggccagcgcaccggcgacgacaccgccgcgcgcctcgtccgcgccgccgtcaacctccgcgacctcgacatttcacgaagctgctggggctgccgaatcaccgacgatggcctcatcaagatttcgtccgcggattgcgtcggcaacctgacgtccatatcgctctggggattggccgggatcaccgataagggcgtggtccgtctggtttcgagggcttattctctgcagcacctgaatatcggtggaacgttcatcacagatgaatccctctacgcagtcgcaaacagctgcgcaaatcttaagagcatcatcctgtggagctgccgccacgtgacggagggcgggctggtggcgctggtgaacaagtgccggcggctggagtgcatcaacgtgggcgggatgcgggtcccgccggagagcttggtgggcctgctctccatcagccccgccctggagatcaggtccaccgcacgcatcctcaacctcaacctcaacgccggggtgcaggtctcctgatccatgtgtgtgtggcttgccatgagcccatgcatcgtcagaagggactcactcaccagacacacacacgtcatcgtgttgccataatgtttgttgtaaaaaaaaaacagatacgtcatcgtgattctatatatctcctatacatgttacacacaataaaccataaaatgaactgtacggccacagtgccttgcaagc

SEQ ID NO: 21430 - protein, 303 aa, Zea mays subsp. mays
  peptide (1)..(303): Ceres Seq. ID no. 14305466
  misc_feature (83)..(129): Pfam Name: Pfam Description:  F-box domain
  misc_feature (80)..(293): NCBI GI NO: 15240225 NR Description: F-box protein family [Arabidopsis thaliana]
  misc_feature (83)..(204): NCBI GI NO: 34898378 NR Description: Hypothetical protein
  misc_feature (232)..(296): NCBI GI NO: 34898376 NR Description: Hypothetical protein
  misc_feature (103)..(258): NCBI GI NO: 34907434 NR Description: P0018C10.44
  misc_feature (84)..(297): NCBI GI NO: 15237286 NR Description: expressed protein [Arabidopsis thaliana]
  misc_feature (138)..(264): NCBI GI NO: 27671511 NR Description: similar to hypothetical protein MGC15482
  misc_feature (102)..(303): NCBI GI NO: 30519963 NR Description: F-box and leucine-rich repeat protein 2
  misc_feature (163)..(294): NCBI GI NO: 18400846 NR Description: F-box protein family, AtFBL6
  misc_feature (102)..(303): NCBI GI NO: 5919219 NR Description: leucine-rich repeats containing F-box protein FBL3
  misc_feature (102)..(303): NCBI GI NO: 16306582 NR Description: F-box and leucine-rich repeat protein 2
NRLTWPPAQPDSIHAAAPASTGVASRCTHRWCQGGDLTPTRRRPRRAFPSFCARRDREEAEPRRREMDPEKQRQHDGAVDADIERLPVDLLAHILSLLSPFRDLSMAGGVSRRWRWAVERSLASRRRLSFAGQRTGDDTAARLVRAAVNLRDLDISRSCWGCRITDDGLIKISSADCVGNLTSISLWGLAGITDKGVVRLVSRAYSLQHLNIGGTFITDESLYAVANSCANLKSIILWSCRHVTEGGLVALVNKCRRLECINVGGMRVPPESLVGLLSISPALEIRSTARILNLNLNAGVQVS

SEQ ID NO: 21431 - protein, 237 aa, Zea mays subsp. mays
  peptide (1)..(237): Ceres Seq. ID no. 14305467
  misc_feature (17)..(63): Pfam Name: Pfam Description:  F-box domain
  misc_feature (14)..(227): NCBI GI NO: 15240225 NR Description: F-box protein family [Arabidopsis thaliana]
  misc_feature (17)..(138): NCBI GI NO: 34898378 NR Description: Hypothetical protein
  misc_feature (166)..(230): NCBI GI NO: 34898376 NR Description: Hypothetical protein
  misc_feature (37)..(192): NCBI GI NO: 34907434 NR Description: P0018C10.44
  misc_feature (18)..(231): NCBI GI NO: 15237286 NR Description: expressed protein [Arabidopsis thaliana]
  misc_feature (72)..(198): NCBI GI NO: 27671511 NR Description: similar to hypothetical protein MGC15482
  misc_feature (36)..(237): NCBI GI NO: 30519963 NR Description: F-box and leucine-rich repeat protein 2
  misc_feature (97)..(228): NCBI GI NO: 18400846 NR Description: F-box protein family, AtFBL6
  misc_feature (36)..(237): NCBI GI NO: 5919219 NR Description: leucine-rich repeats containing F-box protein FBL3
  misc_feature (36)..(237): NCBI GI NO: 6063090 NR Description: F-box protein FBL2 [Homo sapiens]
MDPEKQRQHDGAVDADIERLPVDLLAHILSLLSPFRDLSMAGGVSRRWRWAVERSLASRRRLSFAGQRTGDDTAARLVRAAVNLRDLDISRSCWGCRITDDGLIKISSADCVGNLTSISLWGLAGITDKGVVRLVSRAYSLQHLNIGGTFITDESLYAVANSCANLKSIILWSCRHVTEGGLVALVNKCRRLECINVGGMRVPPESLVGLLSISPALEIRSTARILNLNLNAGVQVS

SEQ ID NO: 21432 - protein, 198 aa, Zea mays subsp. mays
  peptide (1)..(198): Ceres Seq. ID no. 14305468
  misc_feature (1)..(188): NCBI GI NO: 15240225 NR Description: F-box protein family [Arabidopsis thaliana]
  misc_feature (1)..(99): NCBI GI NO: 34898378 NR Description: Hypothetical protein
  misc_feature (127)..(191): NCBI GI NO: 34898376 NR Description: Hypothetical protein
  misc_feature (1)..(153): NCBI GI NO: 34907434 NR Description: P0018C10.44
  misc_feature (1)..(192): NCBI GI NO: 15237286 NR Description: expressed protein [Arabidopsis thaliana]
  misc_feature (33)..(159): NCBI GI NO: 27671511 NR Description: similar to hypothetical protein MGC15482
  misc_feature (1)..(198): NCBI GI NO: 30519963 NR Description: F-box and leucine-rich repeat protein 2
  misc_feature (58)..(189): NCBI GI NO: 18400846 NR Description: F-box protein family, AtFBL6
  misc_feature (1)..(198): NCBI GI NO: 5919219 NR Description: leucine-rich repeats containing F-box protein FBL3
  misc_feature (1)..(198): NCBI GI NO: 16306582 NR Description: F-box and leucine-rich repeat protein 2
MAGGVSRRWRWAVERSLASRRRLSFAGQRTGDDTAARLVRAAVNLRDLDISRSCWGCRITDDGLIKISSADCVGNLTSISLWGLAGITDKGVVRLVSRAYSLQHLNIGGTFITDESLYAVANSCANLKSIILWSCRHVTEGGLVALVNKCRRLECINVGGMRVPPESLVGLLSISPALEIRSTARILNLNLNAGVQVS

SEQ ID NO: 21433 - DNA, 1116 bp, Zea mays subsp. mays
  misc_feature (1)..(1116): Ceres Seq. ID no. 15180098
acagcagccaggattccagaaacagagaggccaggtgccaagcaaaggcggtgcagtgcaggcagggcgtgtggagaagcagagcagcgggcggcgcacctgcacttggcagctctggccatggcggatcaccagaggattcaccctgtagacctggaggccggcaaccggccgacgacgccgctggtgccgggagcctcgttccggtcggacaagggcgacccagcgcagcgcgcgaacaaccaccaccaccaacagcaacaacgaggctacgtctacgtccccgggccgctgcctccgccgccgcgtcgcgccgcgccaccggcgccgcctctgccgccgccgaagcggcgcgggcggggctgctgctgccggttcctctgctgcgccgtgataaccgcggtcgtgctggcggtgctcgccgcggcggcggcgggcgcgctgtacctgttgctggaccccaaggcgccgcggtactcggtggaccggctctccgtgtcggcgttccaggtggacccgtcgacgtttacggcgcgggccgggttcgacgtggcggtgacggcggcgaaccccaactcgcgcatcggcatccagtacgagcccgggtccagcctgggcgtgtggtaccagtcgtaccgcctggcgcggggcgcgctgccgcccttctaccagggccaccgcaacaccacggtgctggcgctggccatggccggggaggtgcagctgggcggcgccgccgtggccgggatgcgggacgcgcggcgttcgggcgccgtgccgctcgtgttccgcgccgacgtgcccgtgcgcgtcgagctcggcaccttcaagctctggaaggtcacgtccagggtgcgctgcgacctcgtcgtcgacaggctcatggacgtcagcagccccatcaagatcaaggccagcaactgcaagttcggcctcaagctgtgatccgttcgtcgccgcgttggattcttttggctggctgagtgctggacctgcttgctggtagtatttgcgcaggtgcagacgtgcagtgcactcccgccaacctcgtcggtgttcatcccggctgtgtacagatggcagtgtatcattgctgttatagaggaataattttgc

SEQ ID NO: 21434 - protein, 326 aa, Zea mays subsp. mays
  peptide (1)..(326): Ceres Seq. ID no. 15180099
  misc_feature (8)..(304): NCBI GI NO: 23106243 NR Description: hypothetical protein [Azotobacter vinelandii]
  misc_feature (29)..(273): NCBI GI NO: 9625624 NR Description: nuclear antigen EBNA1 [Human herpesvirus 4]
SSQDSRNREARCQAKAVQCRQGVWRSRAAGGAPALGSSGHGGSPEDSPCRPGGRQPADDAAGAGSLVPVGQGRPSAAREQPPPPTATTRLRLRPRAAASAAASRRATGAASAAAEAARAGLLLPVPLLRRDNRGRAGGARRGGGGRAVPVAGPQGAAVLGGPALRVGVPGGPVDVYGAGRVRRGGDGGEPQLAHRHPVRARVQPGRVVPVVPPGAGRAAALLPGPPQHHGAGAGHGRGGAAGRRRRGRDAGRAAFGRRAARVPRRRARARRARHLQALEGHVQGALRPRRRQAHGRQQPHQDQGQQLQVRPQAVIRSSPRWILLAG

SEQ ID NO: 21435 - protein, 314 aa, Zea mays subsp. mays
  peptide (1)..(314): Ceres Seq. ID no. 15180100
  misc_feature (43)..(314): NCBI GI NO: 38344198 NR Description: OSJNBa0064G10.14
  misc_feature (97)..(314): NCBI GI NO: 18408342 NR Description: expressed protein [Arabidopsis thaliana]
  misc_feature (97)..(314): NCBI GI NO: 6686408 NR Description: F1E22.7 [Arabidopsis thaliana]
  misc_feature (102)..(314): NCBI GI NO: 15239459 NR Description: hypothetical protein [Arabidopsis thaliana]
  misc_feature (102)..(314): NCBI GI NO: 10178216 NR Description: gb|AAF23842
  misc_feature (99)..(314): NCBI GI NO: 15221846 NR Description: hypothetical protein [Arabidopsis thaliana]
  misc_feature (95)..(313): NCBI GI NO: 38636986 NR Description: unknown protein
  misc_feature (100)..(314): NCBI GI NO: 18401317 NR Description: expressed protein [Arabidopsis thaliana]
  misc_feature (100)..(309): NCBI GI NO: 34909192 NR Description: P0425G02.19
  misc_feature (116)..(314): NCBI GI NO: 15242167 NR Description: hypothetical protein [Arabidopsis thaliana]
TAARIPETERPGAKQRRCSAGRACGEAEQRAAHLHLAALAMADHQRIHPVDLEAGNRPTTPLVPGASFRSDKGDPAQRANNHHHQQQQRGYVYVPGPLPPPPRRAAPPAPPLPPPKRRGRGCCCRFLCCAVITAVVLAVLAAAAAGALYLLLDPKAPRYSVDRLSVSAFQVDPSTFTARAGFDVAVTAANPNSRIGIQYEPGSSLGVWYQSYRLARGALPPFYQGHRNTTVLALAMAGEVQLGGAAVAGMRDARRSGAVPLVFRADVPVRVELGTFKLWKVTSRVRCDLVVDRLMDVSSPIKIKASNCKFGLKL

SEQ ID NO: 21436 - protein, 274 aa, Zea mays subsp. mays
  peptide (1)..(274): Ceres Seq. ID no. 15180101
  misc_feature (3)..(274): NCBI GI NO: 38344198 NR Description: OSJNBa0064G10.14
  misc_feature (57)..(274): NCBI GI NO: 18408342 NR Description: expressed protein [Arabidopsis thaliana]
  misc_feature (57)..(274): NCBI GI NO: 6686408 NR Description: F1E22.7 [Arabidopsis thaliana]
  misc_feature (62)..(274): NCBI GI NO: 15239459 NR Description: hypothetical protein [Arabidopsis thaliana]
  misc_feature (62)..(274): NCBI GI NO: 10178216 NR Description: gb|AAF23842
  misc_feature (59)..(274): NCBI GI NO: 15221846 NR Description: hypothetical protein [Arabidopsis thaliana]
  misc_feature (55)..(273): NCBI GI NO: 38636986 NR Description: unknown protein
  misc_feature (60)..(274): NCBI GI NO: 18401317 NR Description: expressed protein [Arabidopsis thaliana]
  misc_feature (60)..(269): NCBI GI NO: 34909192 NR Description: P0425G02.19
  misc_feature (76)..(274): NCBI GI NO: 15242167 NR Description: hypothetical protein [Arabidopsis thaliana]
MADHQRIHPVDLEAGNRPTTPLVPGASFRSDKGDPAQRANNHHHQQQQRGYVYVPGPLPPPPRRAAPPAPPLPPPKRRGRGCCCRFLCCAVITAVVLAVLAAAAAGALYLLLDPKAPRYSVDRLSVSAFQVDPSTFTARAGFDVAVTAANPNSRIGIQYEPGSSLGVWYQSYRLARGALPPFYQGHRNTTVLALAMAGEVQLGGAAVAGMRDARRSGAVPLVFRADVPVRVELGTFKLWKVTSRVRCDLVVDRLMDVSSPIKIKASNCKFGLKL

SEQ ID NO: 21437 - DNA, 1433 bp, Zea mays subsp. mays
  misc_feature (1)..(1433): Ceres Seq. ID no. 13598882
agaacatcctaatcgaaaacagaacagagtctacggcgccgccgtcgcacgacaggagagggagagggagagagacgcgggctttgacttgccgccggtgcgtccgtgcgtgcctggtgggaggagtgggagacgccggtacagtacaggagccatggcgccgagctgctacgacgcggcagcgtccatgctcctctgcgccgaggagcacagcagcatcctgtggtacgacgaggaggaggaggagctggaggcggtcgggagaaggagaggccagtcgccgggctacggggacgacttcggcgcggacttgttcccgccgcagtcggaggaatgcgtggccggtctggtggagcgggaacgggaccacatgccggggccgtgctacggcgacaggctgcgcggcggcggcggctgtctctgcgtccgccgggaggccgtcgactggatttggaaggcttacacgcaccacaggttccgccctctcactgcctacttggcagtgaactacctcgatcgcttcctctcgctgtctgaggtgccggactgcaaggactggatgacgcagctcctcgcggtggcgtgcgtttctctggccgccaagatggaggaaaccgccgtcccgcagtgcctggaccttcaggaggtcggagacgcgcggtacgtgttcgaggcgaagacggtccagaggatggagctcctggttctaacaaccctcaactggaggatgcatgccgtgacgccgttctcctacgtggattacttcctgaacaagctcaacaacggcggcagcacggcgccgaggagctgctggctcttgcagtccgcggagcttatcttgcgtgcggccagaggaaccggctgcgtcgggttcaggccgtccgagatcgccgccgcggttgcagccgccgtggccggagacgtggacgacgcggacggcgtcgagaacgcctgctgcgctcacgtagataaggagcgggtgttgcggtgccaggaagcgatcgggtccatggcgtcctcggcggccattgacgacgctaccgtgccaccgaaatctgcgagacgcaggagctcccccgtgcccgtgccgcagagccctgtgggggggaacaccaccttgcacggagagccgaaacctcctccatgcagggatctggatgcctgctaggtttgcttcggagcattacgagcacgcgcataacttggctcgtactgtaaggtgtgcaaactgcacacagcggaggctgtgttatttgtattctgaagctttcttgtgtttcgtcaagaaagcttctctaacttttatcctgcactatcagataaacggtaaattgatagagaataagatgttttcgagctcatgtttagtggcaaacgctttatatttttggcaagctgtgaaggagctgaaccagtgacaactcgaagaatcc

SEQ ID NO: 21438 - protein, 388 aa, Zea mays subsp. mays
  peptide (1)..(388): Ceres Seq. ID no. 13598883
  misc_feature (111)..(244): Pfam Name: Pfam Description:  Cyclin, N-terminal domain
  misc_feature (52)..(368): NCBI GI NO: 19070615 NR Description: D-type cyclin [Zea mays]
  misc_feature (53)..(368): NCBI GI NO: 18916916 NR Description: cyclin [Oryza sativa (japonica cultivar-group)]
  misc_feature (52)..(368): NCBI GI NO: 19070611 NR Description: D-type cyclin [Zea mays]
  misc_feature (53)..(368): NCBI GI NO: 4160298 NR Description: cyclin D2.1 protein [Nicotiana tabacum]
  misc_feature (109)..(368): NCBI GI NO: 7484663 NR Description: cyclin D-like protein - red goosefoot
  misc_feature (52)..(367): NCBI GI NO: 34906810 NR Description: D-type cyclin-like protein
  misc_feature (52)..(226): NCBI GI NO: 19070617 NR Description: D-type cyclin [Zea mays]
  misc_feature (64)..(368): NCBI GI NO: 22091622 NR Description: cyclin D2 [Daucus carota]
  misc_feature (105)..(354): NCBI GI NO: 30683167 NR Description: cyclin family [Arabidopsis thaliana]
  misc_feature (108)..(339): NCBI GI NO: 15238462 NR Description: cyclin, putative [Arabidopsis thaliana]
EHPNRKQNRVYGAAVARQERERERDAGFDLPPVRPCVPGGRSGRRRYSTGAMAPSCYDAAASMLLCAEEHSSILWYDEEEEELEAVGRRRGQSPGYGDDFGADLFPPQSEECVAGLVERERDHMPGPCYGDRLRGGGGCLCVRREAVDWIWKAYTHHRFRPLTAYLAVNYLDRFLSLSEVPDCKDWMTQLLAVACVSLAAKMEETAVPQCLDLQEVGDARYVFEAKTVQRMELLVLTTLNWRMHAVTPFSYVDYFLNKLNNGGSTAPRSCWLLQSAELILRAARGTGCVGFRPSEIAAAVAAAVAGDVDDADGVENACCAHVDKERVLRCQEAIGSMASSAAIDDATVPPKSARRRSSPVPVPQSPVGGNTTLHGEPKPPPCRDLDAC

SEQ ID NO: 21439 - protein, 337 aa, Zea mays subsp. mays
  peptide (1)..(337): Ceres Seq. ID no. 13598884
  misc_feature (60)..(193): Pfam Name: Pfam Description:  Cyclin, N-terminal domain
  misc_feature (1)..(317): NCBI GI NO: 19070615 NR Description: D-type cyclin [Zea mays]
  misc_feature (2)..(317): NCBI GI NO: 18916916 NR Description: cyclin [Oryza sativa (japonica cultivar-group)]
  misc_feature (1)..(317): NCBI GI NO: 19070611 NR Description: D-type cyclin [Zea mays]
  misc_feature (2)..(317): NCBI GI NO: 4160298 NR Description: cyclin D2.1 protein [Nicotiana tabacum]
  misc_feature (58)..(317): NCBI GI NO: 7484663 NR Description: cyclin D-like protein - red goosefoot
  misc_feature (1)..(316): NCBI GI NO: 34906810 NR Description: D-type cyclin-like protein
  misc_feature (1)..(175): NCBI GI NO: 19070617 NR Description: D-type cyclin [Zea mays]
  misc_feature (13)..(317): NCBI GI NO: 22091622 NR Description: cyclin D2 [Daucus carota]
  misc_feature (54)..(303): NCBI GI NO: 30683167 NR Description: cyclin family [Arabidopsis thaliana]
  misc_feature (57)..(288): NCBI GI NO: 15238462 NR Description: cyclin, putative [Arabidopsis thaliana]
MAPSCYDAAASMLLCAEEHSSILWYDEEEEELEAVGRRRGQSPGYGDDFGADLFPPQSEECVAGLVERERDHMPGPCYGDRLRGGGGCLCVRREAVDWIWKAYTHHRFRPLTAYLAVNYLDRFLSLSEVPDCKDWMTQLLAVACVSLAAKMEETAVPQCLDLQEVGDARYVFEAKTVQRMELLVLTTLNWRMHAVTPFSYVDYFLNKLNNGGSTAPRSCWLLQSAELILRAARGTGCVGFRPSEIAAAVAAAVAGDVDDADGVENACCAHVDKERVLRCQEAIGSMASSAAIDDATVPPKSARRRSSPVPVPQSPVGGNTTLHGEPKPPPCRDLDAC

SEQ ID NO: 21440 - protein, 326 aa, Zea mays subsp. mays
  peptide (1)..(326): Ceres Seq. ID no. 13598885
  misc_feature (49)..(182): Pfam Name: Pfam Description:  Cyclin, N-terminal domain
  misc_feature (1)..(306): NCBI GI NO: 19070615 NR Description: D-type cyclin [Zea mays]
  misc_feature (1)..(306): NCBI GI NO: 18916916 NR Description: cyclin [Oryza sativa (japonica cultivar-group)]
  misc_feature (1)..(306): NCBI GI NO: 19070611 NR Description: D-type cyclin [Zea mays]
  misc_feature (1)..(306): NCBI GI NO: 4160298 NR Description: cyclin D2.1 protein [Nicotiana tabacum]
  misc_feature (47)..(306): NCBI GI NO: 7484663 NR Description: cyclin D-like protein - red goosefoot
  misc_feature (1)..(305): NCBI GI NO: 34906810 NR Description: D-type cyclin-like protein
  misc_feature (1)..(164): NCBI GI NO: 19070617 NR Description: D-type cyclin [Zea mays]
  misc_feature (2)..(306): NCBI GI NO: 22091622 NR Description: cyclin D2 [Daucus carota]
  misc_feature (43)..(292): NCBI GI NO: 30683167 NR Description: cyclin family [Arabidopsis thaliana]
  misc_feature (46)..(277): NCBI GI NO: 15238462 NR Description: cyclin, putative [Arabidopsis thaliana]
MLLCAEEHSSILWYDEEEEELEAVGRRRGQSPGYGDDFGADLFPPQSEECVAGLVERERDHMPGPCYGDRLRGGGGCLCVRREAVDWIWKAYTHHRFRPLTAYLAVNYLDRFLSLSEVPDCKDWMTQLLAVACVSLAAKMEETAVPQCLDLQEVGDARYVFEAKTVQRMELLVLTTLNWRMHAVTPFSYVDYFLNKLNNGGSTAPRSCWLLQSAELILRAARGTGCVGFRPSEIAAAVAAAVAGDVDDADGVENACCAHVDKERVLRCQEAIGSMASSAAIDDATVPPKSARRRSSPVPVPQSPVGGNTTLHGEPKPPPCRDLDAC

SEQ ID NO: 21441 - DNA, 992 bp, Zea mays subsp. mays
  misc_feature (1)..(992): Ceres Seq. ID no. 13622393
gccttccctctgaaaactcttcattctcctctcctccgccgcgccgccaacttcccctcccgtcaactccggctcccgcgcgagatcgagctagcgtttggggttctcgagaccggctgccatggcgacagagcaagaggcggagaactacacggtggaggaccttgtggccctgaatccgtacaaccccgacatcctcaacgaccttgagaagttcgtcaacgagcaagttgcgtctcaaacatataacttggatgcaaatctcagccttcttcgcctgtaccagtttgagccaggaaggatgagcatacatattgtggcccacatactgatcaaggctctcatggcaatgccggcccctgacttcagtctttgcttattcttaattcctgaacatgtgcaaatggaagagcaattcaaggcattgatagttctttctcactatctagagactgctaggttcaggcagttttgggatgacgcagcaaacaaccgccacatattggaagcagttccaggttttgagcaggcaatccaatcctatgcaattcatgtactttccttgacataccagaaagttccaaggcatattcttgcagaggcaatcaacattgaaggtctcgctttggacaagtttcttgagtaccatgctgcgaactcaggttgggtaattgagaagggtgggcagtctcaagtgattgttcttccacgcaatgagttcaatcacccccagctcaagaagaacacagctgataccgttccatttgagcacctaacacgcatattccctgttcttagctgattcaggcgtagtgagagatatacaatagaactcagagcgagtgaagcttctctaagcaattgtatcatctcctttgtggtataccgtattttaagatctcggtatacctgttcttttttatggctgaattggtacctgcaacttggttattactataacgaaatgaccagttatgagattggtcggcccc

SEQ ID NO: 21442 - protein, 226 aa, Zea mays subsp. mays
  peptide (1)..(226): Ceres Seq. ID no. 13622394
  misc_feature (1)..(226): Pfam Name: eIF-3 p25 Pfam Description: Eukaryotic translation initiation factor 3 subunit 11
  misc_feature (1)..(226): NCBI GI NO: 23396617 NR Description: Eukaryotic translation initiation factor 3 subunit11
  misc_feature (5)..(225): NCBI GI NO: 15234123 NR Description: expressed protein [Arabidopsis thaliana]
  misc_feature (15)..(221): NCBI GI NO: 21312044 NR Description: RIKEN cDNA 1200009C21 [Mus musculus]
  misc_feature (15)..(221): NCBI GI NO: 27730981 NR Description: similar to RIKEN cDNA 1200009C21
  misc_feature (15)..(221): NCBI GI NO: 10801345 NR Description: muscle specific gene [Homo sapiens]
  misc_feature (15)..(221): NCBI GI NO: 5114051 NR Description: HSPC029 [Homo sapiens]
  misc_feature (5)..(218): NCBI GI NO: 19922704 NR Description: CG10306-PA [Drosophila melanogaster]
  misc_feature (5)..(182): NCBI GI NO: 38047673 NR Description: similar to Drosophila melanogaster CG10306
  misc_feature (13)..(218): NCBI GI NO: 31201965 NR Description: ENSANGP00000015097 [Anopheles gambiae]
  misc_feature (54)..(221): NCBI GI NO: 20380678 NR Description: 1200009C21Rik protein [Mus musculus]
MATEQEAENYTVEDLVALNPYNPDILNDLEKFVNEQVASQTYNLDANLSLLRLYQFEPGRMSIHIVAHILIKALMAMPAPDFSLCLFLIPEHVQMEEQFKALIVLSHYLETARFRQFWDDAANNRHILEAVPGFEQAIQSYAIHVLSLTYQKVPRHILAEAINIEGLALDKFLEYHAANSGWVIEKGGQSQVIVLPRNEFNHPQLKKNTADTVPFEHLTRIFPVLS

SEQ ID NO: 21443 - protein, 166 aa, Zea mays subsp. mays
  peptide (1)..(166): Ceres Seq. ID no. 13622395
  misc_feature (1)..(166): Pfam Name: eIF-3 p25 Pfam Description: Eukaryotic translation initiation factor 3 subunit 11
  misc_feature (1)..(166): NCBI GI NO: 23396617 NR Description: Eukaryotic translation initiation factor 3 subunit11
  misc_feature (1)..(165): NCBI GI NO: 15234123 NR Description: expressed protein [Arabidopsis thaliana]
  misc_feature (1)..(161): NCBI GI NO: 21312044 NR Description: RIKEN cDNA 1200009C21 [Mus musculus]
  misc_feature (1)..(161): NCBI GI NO: 27730981 NR Description: similar to RIKEN cDNA 1200009C21
  misc_feature (1)..(161): NCBI GI NO: 10801345 NR Description: muscle specific gene [Homo sapiens]
  misc_feature (1)..(161): NCBI GI NO: 5114051 NR Description: HSPC029 [Homo sapiens]
  misc_feature (1)..(158): NCBI GI NO: 19922704 NR Description: CG10306-PA [Drosophila melanogaster]
  misc_feature (1)..(122): NCBI GI NO: 38047673 NR Description: similar to Drosophila melanogaster CG10306
  misc_feature (1)..(158): NCBI GI NO: 31201965 NR Description: ENSANGP00000015097 [Anopheles gambiae]
  misc_feature (1)..(161): NCBI GI NO: 20380678 NR Description: 1200009C21Rik protein [Mus musculus]
MSIHIVAHILIKALMAMPAPDFSLCLFLIPEHVQMEEQFKALIVLSHYLETARFRQFWDDAANNRHILEAVPGFEQAIQSYAIHVLSLTYQKVPRHILAEAINIEGLALDKFLEYHAANSGWVIEKGGQSQVIVLPRNEFNHPQLKKNTADTVPFEHLTRIFPVLS

SEQ ID NO: 21444 - protein, 152 aa, Zea mays subsp. mays
  peptide (1)..(152): Ceres Seq. ID no. 13622396
  misc_feature (1)..(152): Pfam Name: eIF-3 p25 Pfam Description: Eukaryotic translation initiation factor 3 subunit 11
  misc_feature (1)..(152): NCBI GI NO: 23396617 NR Description: Eukaryotic translation initiation factor 3 subunit11
  misc_feature (1)..(151): NCBI GI NO: 15234123 NR Description: expressed protein [Arabidopsis thaliana]
  misc_feature (1)..(147): NCBI GI NO: 21312044 NR Description: RIKEN cDNA 1200009C21 [Mus musculus]
  misc_feature (1)..(147): NCBI GI NO: 27730981 NR Description: similar to RIKEN cDNA 1200009C21
  misc_feature (1)..(147): NCBI GI NO: 10801345 NR Description: muscle specific gene [Homo sapiens]
  misc_feature (1)..(147): NCBI GI NO: 5114051 NR Description: HSPC029 [Homo sapiens]
  misc_feature (1)..(144): NCBI GI NO: 19922704 NR Description: CG10306-PA [Drosophila melanogaster]
  misc_feature (1)..(108): NCBI GI NO: 38047673 NR Description: similar to Drosophila melanogaster CG10306
  misc_feature (1)..(144): NCBI GI NO: 31201965 NR Description: ENSANGP00000015097 [Anopheles gambiae]
  misc_feature (1)..(147): NCBI GI NO: 20380678 NR Description: 1200009C21Rik protein [Mus musculus]
MAMPAPDFSLCLFLIPEHVQMEEQFKALIVLSHYLETARFRQFWDDAANNRHILEAVPGFEQAIQSYAIHVLSLTYQKVPRHILAEAINIEGLALDKFLEYHAANSGWVIEKGGQSQVIVLPRNEFNHPQLKKNTADTVPFEHLTRIFPVLS

SEQ ID NO: 21445 - DNA, 1671 bp, Zea mays subsp. mays
  misc_feature (1)..(1671): Ceres Seq. ID no. 13598865
aactacggtaactcgtctgctcgcatttcctcccaatccatcccgcctccaaacccgaactccaagtcgccccgcatcgatggcgcccaaggccgagaagaagcccgcggcgaagaagccggcggaggaggagtacgacgcggatgacggctttggcgacgagccaatcccaatcgcgaggccggtctcggacttcgacatcgttatagatgctcttccgccgggctcggtctctgatgttcaccagattgcccggcggatggtggacgctggctttggccgcgagtgcgccgaggcatacgcggccgcacgccgcggtttcatcgacgagagcgtcgctcgccttggcatccgttcccgtacggtcgacgaggtccactccttaccatgggaggagctcgagtttgacattgctcgctggatcccagccttcaagatggtgtttcgcatcctaatccccagcgagcgccgcctctgtgatcgtgtcttcgaaggccttgctccgtacggcgaccttgcctttgttgctgccgtgcgcacccaggcgcttcagcttatttcattcggagatgcagttgctgctgccagccgcgcgccagaacggctcttccgtgttattgacatgtatgaagcagtacgagacctcctttctgacctcgatcctgtcttctctgatccctactctgcagctctacgtgctgaggtatcagctgtatgcaacactcttggctcctcaatcaagggtatattcatggagctggaaaatctcatccgccgtgacccagcccgtgttgctgtgcctggtggtggtatacatcctatcactcggtatgtcatgaactatctccgtgctgcttgtggttcacggcaaacattggaagaggtgatggaaggtgacttgggtgctgttggcacagcggctattgctgtcgaccctgatcgccctacttcgtcgctagctgtgcacatagcttggatcatggatgtgcttcacaaaaatttggagaccaaatcaaagatatacagggatccaccacttgcttccatattcttgatgaataatgggaaatacattattcacaaggtcaatgacagtgagcttggggttttgcttggtgatgaatggatgaagcagataatgagcagggtgcgcaggtggagtgtggagtaccagcgtggggcctgggcaaaagtcatatcagtgctgcagaccggaggtcctggcgttggcagtatcactgcaaaatccatgcttcagaagatgcagatgttcaacagctacctggaggagatttgcgcggtgcagtcagattgggtgattgcagatgagcagctacgagcagatgttaagtcagcgatagtggattctgttatgcctgcatatagaggcttaattgggagattgagatcatctcctgaagctgcccgagacttgttcatcaaatacaccccagaggatgttcaggaacgcatccaacatctatttgaaggggtggccaagtgattagtctagctattttagtggatatcacaaccttagttatggtgacattttggactcaatgatgtgttgcaaaaaggctggactttgtctcagatgaggaaatgctattgtctccagctgtgtaaaatctgtaggtgtttctgtatcaagtatcaactggtaatttt

SEQ ID NO: 21446 - protein, 500 aa, Zea mays subsp. mays
  peptide (1)..(500): Ceres Seq. ID no. 13598866
  misc_feature (23)..(496): Pfam Name: Pfam Description:  Exo70 exocyst complex subunit
  misc_feature (23)..(500): NCBI GI NO: 34907918 NR Description: putative leucine zipper protein
  misc_feature (42)..(497): NCBI GI NO: 100226 NR Description: tomato leucine zipper-containing protein - tomato
  misc_feature (41)..(497): NCBI GI NO: 15237198 NR Description: leucine zipper-containing protein
  misc_feature (43)..(500): NCBI GI NO: 34907920 NR Description: putative leucine zipper protein
  misc_feature (40)..(496): NCBI GI NO: 15222266 NR Description: exocyst subunit EXO70 family
  misc_feature (13)..(497): NCBI GI NO: 30682979 NR Description: exocyst subunit EXO70 family
  misc_feature (40)..(497): NCBI GI NO: 23270388 NR Description: unknown protein [Arabidopsis thaliana]
  misc_feature (69)..(497): NCBI GI NO: 15221040 NR Description: exocyst subunit EXO70 family
  misc_feature (69)..(497): NCBI GI NO: 15218495 NR Description: exocyst subunit EXO70 family
  misc_feature (66)..(497): NCBI GI NO: 9758920 NR Description: gb|AAD25781
TTVTRLLAFPPNPSRLQTRTPSRPASMAPKAEKKPAAKKPAEEEYDADDGFGDEPIPIARPVSDFDIVIDALPPGSVSDVHQIARRMVDAGFGRECAEAYAAARRGFIDESVARLGIRSRTVDEVHSLPWEELEFDIARWIPAFKMVFRILIPSERRLCDRVFEGLAPYGDLAFVAAVRTQALQLISFGDAVAAASRAPERLFRVIDMYEAVRDLLSDLDPVFSDPYSAALRAEVSAVCNTLGSSIKGIFMELENLIRRDPARVAVPGGGIHPITRYVMNYLRAACGSRQTLEEVMEGDLGAVGTAAIAVDPDRPTSSLAVHIAWIMDVLHKNLETKSKIYRDPPLASIFLMNNGKYIIHKVNDSELGVLLGDEWMKQIMSRVRRWSVEYQRGAWAKVISVLQTGGPGVGSITAKSMLQKMQMFNSYLEEICAVQSDWVIADEQLRADVKSAIVDSVMPAYRGLIGRLRSSPEAARDLFIKYTPEDVQERIQHLFEGVAK

SEQ ID NO: 21447 - protein, 474 aa, Zea mays subsp. mays
  peptide (1)..(474): Ceres Seq. ID no. 13598867
  misc_feature (1)..(470): Pfam Name: Pfam Description:  Exo70 exocyst complex subunit
  misc_feature (1)..(474): NCBI GI NO: 34907918 NR Description: putative leucine zipper protein
  misc_feature (16)..(471): NCBI GI NO: 100226 NR Description: tomato leucine zipper-containing protein - tomato
  misc_feature (15)..(471): NCBI GI NO: 15237198 NR Description: leucine zipper-containing protein
  misc_feature (17)..(474): NCBI GI NO: 34907920 NR Description: putative leucine zipper protein
  misc_feature (14)..(470): NCBI GI NO: 15222266 NR Description: exocyst subunit EXO70 family
  misc_feature (1)..(471): NCBI GI NO: 30682979 NR Description: exocyst subunit EXO70 family
  misc_feature (14)..(471): NCBI GI NO: 23270388 NR Description: unknown protein [Arabidopsis thaliana]
  misc_feature (43)..(471): NCBI GI NO: 15221040 NR Description: exocyst subunit EXO70 family
  misc_feature (43)..(471): NCBI GI NO: 15218495 NR Description: exocyst subunit EXO70 family
  misc_feature (40)..(471): NCBI GI NO: 9758920 NR Description: gb|AAD25781
MAPKAEKKPAAKKPAEEEYDADDGFGDEPIPIARPVSDFDIVIDALPPGSVSDVHQIARRMVDAGFGRECAEAYAAARRGFIDESVARLGIRSRTVDEVHSLPWEELEFDIARWIPAFKMVFRILIPSERRLCDRVFEGLAPYGDLAFVAAVRTQALQLISFGDAVAAASRAPERLFRVIDMYEAVRDLLSDLDPVFSDPYSAALRAEVSAVCNTLGSSIKGIFMELENLIRRDPARVAVPGGGIHPITRYVMNYLRAACGSRQTLEEVMEGDLGAVGTAAIAVDPDRPTSSLAVHIAWIMDVLHKNLETKSKIYRDPPLASIFLMNNGKYIIHKVNDSELGVLLGDEWMKQIMSRVRRWSVEYQRGAWAKVISVLQTGGPGVGSITAKSMLQKMQMFNSYLEEICAVQSDWVIADEQLRADVKSAIVDSVMPAYRGLIGRLRSSPEAARDLFIKYTPEDVQERIQHLFEGVAK

SEQ ID NO: 21448 - protein, 414 aa, Zea mays subsp. mays
  peptide (1)..(414): Ceres Seq. ID no. 13598868
  misc_feature (1)..(410): Pfam Name: Pfam Description:  Exo70 exocyst complex subunit
  misc_feature (1)..(414): NCBI GI NO: 34907918 NR Description: putative leucine zipper protein
  misc_feature (1)..(411): NCBI GI NO: 100226 NR Description: tomato leucine zipper-containing protein - tomato
  misc_feature (1)..(411): NCBI GI NO: 15237198 NR Description: leucine zipper-containing protein
  misc_feature (1)..(414): NCBI GI NO: 34907920 NR Description: putative leucine zipper protein
  misc_feature (1)..(410): NCBI GI NO: 15222266 NR Description: exocyst subunit EXO70 family
  misc_feature (1)..(411): NCBI GI NO: 30682979 NR Description: exocyst subunit EXO70 family
  misc_feature (1)..(411): NCBI GI NO: 23270388 NR Description: unknown protein [Arabidopsis thaliana]
  misc_feature (1)..(411): NCBI GI NO: 15221040 NR Description: exocyst subunit EXO70 family
  misc_feature (1)..(411): NCBI GI NO: 15218495 NR Description: exocyst subunit EXO70 family
  misc_feature (1)..(411): NCBI GI NO: 9758920 NR Description: gb|AAD25781
MVDAGFGRECAEAYAAARRGFIDESVARLGIRSRTVDEVHSLPWEELEFDIARWIPAFKMVFRILIPSERRLCDRVFEGLAPYGDLAFVAAVRTQALQLISFGDAVAAASRAPERLFRVIDMYEAVRDLLSDLDPVFSDPYSAALRAEVSAVCNTLGSSIKGIFMELENLIRRDPARVAVPGGGIHPITRYVMNYLRAACGSRQTLEEVMEGDLGAVGTAAIAVDPDRPTSSLAVHIAWIMDVLHKNLETKSKIYRDPPLASIFLMNNGKYIIHKVNDSELGVLLGDEWMKQIMSRVRRWSVEYQRGAWAKVISVLQTGGPGVGSITAKSMLQKMQMFNSYLEEICAVQSDWVIADEQLRADVKSAIVDSVMPAYRGLIGRLRSSPEAARDLFIKYTPEDVQERIQHLFEGVAK

SEQ ID NO: 21449 - DNA, 1099 bp, Zea mays subsp. mays
  misc_feature (1)..(1099): Ceres Seq. ID no. 12377905
  misc_feature (613)..(613): n is a, c, t, g, unknown, or other
  misc_feature (554)..(554): n is a, c, t, g, unknown, or other
  misc_feature (959)..(959): n is a, c, t, g, unknown, or other
  misc_feature (670)..(670): n is a, c, t, g, unknown, or other
  misc_feature (525)..(525): n is a, c, t, g, unknown, or other
  misc_feature (710)..(710): n is a, c, t, g, unknown, or other
aagtcggtctctctctcactctctcttgtctccaagtttgtaaccctagccgccaagcttgaagctccagccgtgctcgtgtagggctgcaggccatccgggctccggcttccggcatccaccaggcgtccttagaatacggtgcagcgagcagcaagtcgccgagcagccgagccaccgccgagcagccgagccgccgccgagcgccgagtcttctctggtgtttgctaggggaccatggaggagcacggagcggaagacctcctgtgcgaggcgatgggatctgcggcgcaggtcgtggtggtagaggattgcgtggaggcaccgggggccttcgtcctccacctcctcctcaagcgcgcgctcgcaggctgcggctccgctgccttcctcgccctcgcgcagcccttctcccattacgaccgcgtcctgcgcaagatgggctgtaacctttccctgcataggaggaatgagaggcttcatttctttgaattgctaggattcccaggtggagcaagggaaggnaccattgctgatagctttgctctattgtncaatgaaattcaaagactggtggaggcaaacagggctggagaaaatgaaggccagttcnccatcgttatagacgacgcttccctgttggaagtcgtggcccttggttctgtaagcnatgtgctggatttcttgcactattgtttcacactcacgtntgagatgaattgcaagctagtgatcctcattcacgaggatatatacgcaaatgaggagaacatgggtctccttttacatctacgctacattgcggatcttgtgattaaagcagcacctttaagcactggtttggctgctgatgttcatggacagctggcggttgtgaacaagggtacattcagcgagcaaagggcaaaagcacagaaagtttggaacttccatttcaaaaagaaaacggtgctgacttnttctatccagggagtagacattagggaatacttgtatacagtagaaacaactctggttgtgataactgataaccagtgctgctattcttcgtgtaccttgtgctaaacacagtaaagttttgtccaatccttcatttcgc

SEQ ID NO: 21450 - protein, 275 aa, Zea mays subsp. mays
  peptide (1)..(275): Ceres Seq. ID no. 12377906
  misc_feature (1)..(236): NCBI GI NO: 24796809 NR Description: unknown protein
  misc_feature (19)..(236): NCBI GI NO: 18413296 NR Description: expressed protein; protein id: At4g10090
  misc_feature (61)..(211): NCBI GI NO: 7486308 NR Description: hypothetical protein F28M11
  misc_feature (19)..(206): NCBI GI NO: 7486308 NR Description: hypothetical protein F28M11
  misc_feature (31)..(213): NCBI GI NO: 12653677 NR Description: Similar to hypothetical protein FLJ20211
  misc_feature (31)..(210): NCBI GI NO: 8923200 NR Description: hypothetical protein FLJ20211 [Homo sapiens]
  misc_feature (31)..(234): NCBI GI NO: 34866372 NR Description: similar to hypothetical protein FLJ20211
  misc_feature (12)..(238): NCBI GI NO: 12847283 NR Description: unnamed protein product [Mus musculus]
  misc_feature (31)..(238): NCBI GI NO: 28546325 NR Description: RIKEN cDNA 2610001P13 [Mus musculus]
  misc_feature (96)..(96): Xaa is any aa, unknown or other
  misc_feature (106)..(106): Xaa is any aa, unknown or other
  misc_feature (126)..(126): Xaa is any aa, unknown or other
  misc_feature (145)..(145): Xaa is any aa, unknown or other
  misc_feature (158)..(158): Xaa is any aa, unknown or other
  misc_feature (241)..(241): Xaa is any aa, unknown or other
MEEHGAEDLLCEAMGSAAQVVVVEDCVEAPGAFVLHLLLKRALAGCGSAAFLALAQPFSHYDRVLRKMGCNLSLHRRNERLHFFELLGFPGGAREXTIADSFALLXNEIQRLVEANRAGENEGQFXIVIDDASLLEVVALGSVSXVLDFLHYCFTLTXEMNCKLVILIHEDIYANEENMGLLLHLRYIADLVIKAAPLSTGLAADVHGQLAVVNKGTFSEQRAKAQKVWNFHFKKKTVLTXSIQGVDIREYLYTVETTLVVITDNQCCYSSCTLC

SEQ ID NO: 21451 - protein, 262 aa, Zea mays subsp. mays
  peptide (1)..(262): Ceres Seq. ID no. 12377907
  misc_feature (1)..(223): NCBI GI NO: 24796809 NR Description: unknown protein
  misc_feature (6)..(223): NCBI GI NO: 18413296 NR Description: expressed protein; protein id: At4g10090
  misc_feature (48)..(198): NCBI GI NO: 7486308 NR Description: hypothetical protein F28M11
  misc_feature (6)..(193): NCBI GI NO: 7486308 NR Description: hypothetical protein F28M11
  misc_feature (18)..(200): NCBI GI NO: 12653677 NR Description: Similar to hypothetical protein FLJ20211
  misc_feature (18)..(197): NCBI GI NO: 8923200 NR Description: hypothetical protein FLJ20211 [Homo sapiens]
  misc_feature (18)..(221): NCBI GI NO: 34866372 NR Description: similar to hypothetical protein FLJ20211
  misc_feature (1)..(225): NCBI GI NO: 12847283 NR Description: unnamed protein product [Mus musculus]
  misc_feature (18)..(225): NCBI GI NO: 28546325 NR Description: RIKEN cDNA 2610001P13 [Mus musculus]
  misc_feature (83)..(83): Xaa is any aa, unknown or other
  misc_feature (93)..(93): Xaa is any aa, unknown or other
  misc_feature (113)..(113): Xaa is any aa, unknown or other
  misc_feature (132)..(132): Xaa is any aa, unknown or other
  misc_feature (145)..(145): Xaa is any aa, unknown or other
  misc_feature (228)..(228): Xaa is any aa, unknown or other
MGSAAQVVVVEDCVEAPGAFVLHLLLKRALAGCGSAAFLALAQPFSHYDRVLRKMGCNLSLHRRNERLHFFELLGFPGGAREXTIADSFALLXNEIQRLVEANRAGENEGQFXIVIDDASLLEVVALGSVSXVLDFLHYCFTLTXEMNCKLVILIHEDIYANEENMGLLLHLRYIADLVIKAAPLSTGLAADVHGQLAVVNKGTFSEQRAKAQKVWNFHFKKKTVLTXSIQGVDIREYLYTVETTLVVITDNQCCYSSCTLC

SEQ ID NO: 21452 - protein, 208 aa, Zea mays subsp. mays
  peptide (1)..(208): Ceres Seq. ID no. 12377908
  misc_feature (1)..(169): NCBI GI NO: 24796809 NR Description: unknown protein
  misc_feature (1)..(169): NCBI GI NO: 18413296 NR Description: expressed protein; protein id: At4g10090
  misc_feature (1)..(144): NCBI GI NO: 7486308 NR Description: hypothetical protein F28M11
  misc_feature (1)..(139): NCBI GI NO: 7486308 NR Description: hypothetical protein F28M11
  misc_feature (1)..(146): NCBI GI NO: 12653677 NR Description: Similar to hypothetical protein FLJ20211
  misc_feature (1)..(143): NCBI GI NO: 8923200 NR Description: hypothetical protein FLJ20211 [Homo sapiens]
  misc_feature (1)..(167): NCBI GI NO: 34866372 NR Description: similar to hypothetical protein FLJ20211
  misc_feature (1)..(171): NCBI GI NO: 12847283 NR Description: unnamed protein product [Mus musculus]
  misc_feature (1)..(171): NCBI GI NO: 28546325 NR Description: RIKEN cDNA 2610001P13 [Mus musculus]
  misc_feature (29)..(29): Xaa is any aa, unknown or other
  misc_feature (39)..(39): Xaa is any aa, unknown or other
  misc_feature (59)..(59): Xaa is any aa, unknown or other
  misc_feature (78)..(78): Xaa is any aa, unknown or other
  misc_feature (91)..(91): Xaa is any aa, unknown or other
  misc_feature (174)..(174): Xaa is any aa, unknown or other
MGCNLSLHRRNERLHFFELLGFPGGAREXTIADSFALLXNEIQRLVEANRAGENEGQFXIVIDDASLLEVVALGSVSXVLDFLHYCFTLTXEMNCKLVILIHEDIYANEENMGLLLHLRYIADLVIKAAPLSTGLAADVHGQLAVVNKGTFSEQRAKAQKVWNFHFKKKTVLTXSIQGVDIREYLYTVETTLVVITDNQCCYSSCTLC

SEQ ID NO: 21453 - DNA, 2750 bp, Zea mays subsp. mays
  misc_feature (1)..(2750): Ceres Seq. ID no. 15180362
ccgaaatcccagcgagcgagtcttttttgctcctcagcgttgaggaactcgtcgacgtttcggcgcgctggttcgagcatcttgtttgggatcccaggaagttcgttacttggaacttctgtcccgaggaagggcgcgcggttcgatgctggggcggagcagcggcttgcgacactcagatctggtgtgaggaggagatgccggtggtgacacggtcgcggctctccgccgcccgcggcgacggcgcgggcgcgctgccgtggggctcggcgtcggcggcgccggctctgaggcacgacgccggggcgccgcgggaaggcgtcgcgagcaagaaccaccaccaccaccacgggctcaaggagaagctgcgcgcactcacccaggactacgagcagcaaaagcagaagctcgccgcgtcgcagctccgccgcagcatccggtgcctcaacgcgtgggaggcgatcaacgactagaacgccgaggaggaggaggacggcggcagggtggccaagttccgctacgacgccttcgctcaggtccccgagtccgcggtgctgagggagaacgtggcgccaccgcaggcgcgagcaccgtccaacgacggcgccgtgctcgcgcggacgactgaaccgcaggcgaaggagaacgcggtgggccgcggcgccaacgccatgtcctgccccatcaagaaggcggtaccggcgctcccggtgcttccggtgccaccggcgaggaaactctctttgggaggggctgtgggcggcaagctgaaggccgccggggaggtcggggccggcactgccgaggcggcggagagccggatcctcgtgttcgtgaggctgcgccccatgtcgaggaaggagaaggaggccgggtcgaggagttgcgtcaagatcgtcaacaggaaggaggtgttcctcacggagtccgcctcagagaacgactacctccggctgaagcgtggccgcgattcccatttctgcttcgactcggttttccctgattctacgacacaggcagaagtctacagcacctcaacagcagaccttgtggagggtgttctgcaaggtaggaatgggacagtgttctgctatggagctacaggggctggcaagacctacaccatgcttgggacaatggaaaaccccggggtaatggtgcttgcaataaatgatttgttctccaaggtgacgcagaagtaccactcaattaagctgtcatacctcgagatatacaatgagacggtgagggatttgctgtctcctggtagcccccttaacctgagagaagataagcagggaattgttgctgctggtcttacccaaagaagtgtatactccacggatgaggtcatggagttacttcagaaaggcaacaagaatcgaacaactgaaccgactcgagtaaacgagacctcatcgcgttctcatgcggtactgcaggttgtcgtagaatacagatccttggatggagttaacgtaaaacgagccgggaaactatctctcatcgatcttgctggatccgaaagagctctggcaacagatcaacgcacacagaggtcgatcgaaggagcaaacattaaccgctctcttcttgcactcagcagctgcattaacgcccttgtggagggcaagaagcacataccgtatcgcaattccaagctgacccaactcctcaaggactcgcttggaggagcctgcaacaccgtcatgatcgccaacattagcccctctaacctttccttcggcgagacacagaacacgcttcactgggctgatcgtgccaaggagataaaaacaaagacgcaacaaaccactgtgaatgaggaggttctggaccaaccagactctgaaactatgcttgtactggagcttcagaaggaaaaccgcgtgctgagggagcagttggcgaagcaacaacagaaattactgactgccgaggctcagctactcgcttcaaaaacctcgccacaacgatctcctgctccctcgtctcacgtctcaactccaggatcaactcaaaggaagaccagacgatctatcttggctgctggtggggggaactacttcagcacactggactcaaagaggcatgcagccgacaacgcacaggtcagggagctgcagaggaaagtgagcacgttggagtccgagatcgagaagatgaaaaaggagcacctattgcagctgaagcggaaggacgagttcatccgtgacttgatcaacaggaaggatcctaataacaacagtgaagaaacagcaacagttgatagaagagttgtcacgagggcgagcgtgcgaaaggcacagagagacgcatcagccgcagtcgagctgaaaagccccagccgggtgttcacatcaccggcgccaactgcaaagaagcgtactttctgggacatcggaggcaacagcccttcagttcttgctgccaacggaagaaagactcgaagccatgtggcaacagagacaccgaagaaagcatcctccaagctgcttcagccaggatttgcacggcaaacatcgacccatcaaagattcacatgaaagactgcctacaactcattcattactaattggagtttaatcgaagtacattgtaatgttttttagtttttttatccatattgagttattggaactgtttttttaaaattaacttgaggcagagttttccttttcttcggaacatataagcttttttccccatcttactggtattaatcagaaaggcagcaataattttgtgct

SEQ ID NO: 21454 - protein, 624 aa, Zea mays subsp. mays
  peptide (1)..(624): Ceres Seq. ID no. 15180363
  misc_feature (1)..(610): NCBI GI NO: 34912450 NR Description: P0681B11.29
  misc_feature (9)..(610): NCBI GI NO: 15221800 NR Description: kinesin-related protein [Arabidopsis thaliana]
  misc_feature (9)..(610): NCBI GI NO: 25511722 NR Description: F25I16.11 protein - Arabidopsis thaliana
  misc_feature (45)..(548): NCBI GI NO: 28277259 NR Description: Similar to hypothetical protein FLJ37300
  misc_feature (43)..(415): NCBI GI NO: 23397458 NR Description: hypothetical protein FLJ37300 [Homo sapiens]
  misc_feature (53)..(417): NCBI GI NO: 23489919 NR Description: kinesin-like protein-related
  misc_feature (49)..(427): NCBI GI NO: 28838703 NR Description: Similar to hypothetical protein DKFZp434G2226
  misc_feature (53)..(417): NCBI GI NO: 23613466 NR Description: kinesin, putative [Plasmodium falciparum 3D7]
  misc_feature (44)..(419): NCBI GI NO: 15229185 NR Description: kinesin-related protein [Arabidopsis thaliana]
  misc_feature (96)..(495): NCBI GI NO: 29421238 NR Description: kinesin [Botryotinia fuckeliana]
MSCPIKKAVPALPVLPVPPARKLSLGGAVGGKLKAAGEVGAGTAEAAESRILVFVRLRPMSRKEKEAGSRSCVKIVNRKEVFLTESASENDYLRLKRGRDSHFCFDSVFPDSTTQAEVYSTSTADLVEGVLQGRNGTVFCYGATGAGKTYTMLGTMENPGVMVLAINDLFSKVTQKYHSIKLSYLEIYNETVRDLLSPGSPLNLREDKQGIVAAGLTQRSVYSTDEVMELLQKGNKNRTTEPTRVNETSSRSHAVLQVVVEYRSLDGVNVKRAGKLSLIDLAGSERALATDQRTQRSIEGANINRSLLALSSCINALVEGKKHIPYRNSKLTQLLKDSLGGACNTVMIANISPSNLSFGETQNTLHWADRAKEIKTKTQQTTVNEEVLDQPDSETMLVLELQKENRVLREQLAKQQQKLLTAEAQLLASKTSPQRSPAPSSHVSTPGSTQRKTRRSILAAGGGNYFSTLDSKRHAADNAQVRELQRKVSTLESEIEKMKKEHLLQLKRKDEFIRDLINRKDPNNNSEETATVDRRVVTRASVRKAQRDASAAVELKSPSRVFTSPAPTAKKRTFWDIGGNSPSVLAANGRKTRSHVATETPKKASSKLLQPGFARQTSTHQRFT

SEQ ID NO: 21455 - protein, 565 aa, Zea mays subsp. mays
  peptide (1)..(565): Ceres Seq. ID no. 15180364
  misc_feature (1)..(551): NCBI GI NO: 34912450 NR Description: P0681B11.29
  misc_feature (1)..(551): NCBI GI NO: 15221800 NR Description: kinesin-related protein [Arabidopsis thaliana]
  misc_feature (1)..(551): NCBI GI NO: 25511722 NR Description: F25I16.11 protein - Arabidopsis thaliana
  misc_feature (1)..(489): NCBI GI NO: 28277259 NR Description: Similar to hypothetical protein FLJ37300
  misc_feature (1)..(356): NCBI GI NO: 23397458 NR Description: hypothetical protein FLJ37300 [Homo sapiens]
  misc_feature (1)..(358): NCBI GI NO: 23489919 NR Description: kinesin-like protein-related
  misc_feature (1)..(368): NCBI GI NO: 28838703 NR Description: Similar to hypothetical protein DKFZp434G2226
  misc_feature (1)..(358): NCBI GI NO: 23613466 NR Description: kinesin, putative [Plasmodium falciparum 3D7]
  misc_feature (1)..(360): NCBI GI NO: 15229185 NR Description: kinesin-related protein [Arabidopsis thaliana]
  misc_feature (37)..(436): NCBI GI NO: 29421238 NR Description: kinesin [Botryotinia fuckeliana]
MSRKEKEAGSRSCVKIVNRKEVFLTESASENDYLRLKRGRDSHFCFDSVFPDSTTQAEVYSTSTADLVEGVLQGRNGTVFCYGATGAGKTYTMLGTMENPGVMVLAINDLFSKVTQKYHSIKLSYLEIYNETVRDLLSPGSPLNLREDKQGIVAAGLTQRSVYSTDEVMELLQKGNKNRTTEPTRVNETSSRSHAVLQVVVEYRSLDGVNVKRAGKLSLIDLAGSERALATDQRTQRSIEGANINRSLLALSSCINALVEGKKHIPYRNSKLTQLLKDSLGGACNTVMIANISPSNLSFGETQNTLHWADRAKEIKTKTQQTTVNEEVLDQPDSETMLVLELQKENRVLREQLAKQQQKLLTAEAQLLASKTSPQRSPAPSSHVSTPGSTQRKTRRSILAAGGGNYFSTLDSKRHAADNAQVRELQRKVSTLESEIEKMKKEHLLQLKRKDEFIRDLINRKDPNNNSEETATVDRRVVTRASVRKAQRDASAAVELKSPSRVFTSPAPTAKKRTFWDIGGNSPSVLAANGRKTRSHVATETPKKASSKLLQPGFARQTSTHQRFT

SEQ ID NO: 21456 - protein, 473 aa, Zea mays subsp. mays
  peptide (1)..(473): Ceres Seq. ID no. 15180365
  misc_feature (1)..(459): NCBI GI NO: 34912450 NR Description: P0681B11.29
  misc_feature (1)..(459): NCBI GI NO: 15221800 NR Description: kinesin-related protein [Arabidopsis thaliana]
  misc_feature (1)..(459): NCBI GI NO: 25511722 NR Description: F25I16.11 protein - Arabidopsis thaliana
  misc_feature (1)..(397): NCBI GI NO: 28277259 NR Description: Similar to hypothetical protein FLJ37300
  misc_feature (1)..(264): NCBI GI NO: 23397458 NR Description: hypothetical protein FLJ37300 [Homo sapiens]
  misc_feature (1)..(266): NCBI GI NO: 23489919 NR Description: kinesin-like protein-related
  misc_feature (1)..(276): NCBI GI NO: 28838703 NR Description: Similar to hypothetical protein DKFZp434G2226
  misc_feature (1)..(266): NCBI GI NO: 23613466 NR Description: kinesin, putative [Plasmodium falciparum 3D7]
  misc_feature (1)..(268): NCBI GI NO: 15229185 NR Description: kinesin-related protein [Arabidopsis thaliana]
  misc_feature (1)..(344): NCBI GI NO: 29421238 NR Description: kinesin [Botryotinia fuckeliana]
MLGTMENPGVMVLAINDLFSKVTQKYHSIKLSYLEIYNETVRDLLSPGSPLNLREDKQGIVAAGLTQRSVYSTDEVMELLQKGNKNRTTEPTRVNETSSRSHAVLQVVVEYRSLDGVNVKRAGKLSLIDLAGSERALATDQRTQRSIEGANINRSLLALSSCINALVEGKKHIPYRNSKLTQLLKDSLGGACNTVMIANISPSNLSFGETQNTLHWADRAKEIKTKTQQTTVNEEVLDQPDSETMLVLELQKENRVLREQLAKQQQKLLTAEAQLLASKTSPQRSPAPSSHVSTPGSTQRKTRRSILAAGGGNYFSTLDSKRHAADNAQVRELQRKVSTLESEIEKMKKEHLLQLKRKDEFIRDLINRKDPNNNSEETATVDRRVVTRASVRKAQRDASAAVELKSPSRVFTSPAPTAKKRTFWDIGGNSPSVLAANGRKTRSHVATETPKKASSKLLQPGFARQTSTHQRFT

SEQ ID NO: 21457 - DNA, 1937 bp, Zea mays subsp. mays
  misc_feature (1)..(1937): Ceres Seq. ID no. 15180366
tacaccgcgcatagatcgtgggcatcgcgacacctcacctgcccccctgcggccgccgtctctcctcgccggttaccccttgctgcccgctcccctgcgcctcgcctttctcgccctctttccacctttctcacacgtgcccgccttctccgcccctctcctcgccagcggttgcgtcgaccggcagcggcgttcaactgcgccccacgagcaggtttcttggccccgtcgacttccagtgagttcagtttagctcagtaagcatctgatcaacttcgaggtgccagacagatcctatgctgccttactgggatgaaaggtggctgtctgcataggctccttgtccacaagctatgctttggcctgagtattctcactgtgccgattattgttctgttactggaaggagccccagtactcactatcttcagcccaacaccagggcaattaaaagttctctctcaaggttttctacatcagcaggagcaggaacatcttggagatgatggagcaaccctagttggatctccaggtccagcttccaggagccgcttgcaaaaaaattgcaactacgcaaaggggaagtggatagaagatgataagcggccgctgtactctggtaatgagtgcaaacaatggctgtcaaaaatgtgggcttgtcgaatgatgcggcgcacacatttctcttatgagaattaccggtggcaaccacatgactgtgagatgcctgagtttacagggcctaagttcttaaaaaggatgagaaaccgaactcttgcttttgttggtgattcacttggcagacaacaatttcagtcaatgatgtgtatagcaactggtggcaaatacagtccagaggttgaagatgttggttggaaatatggccttgtcaaagccccaggtgctctaagacctgacgggtgggcttatagatttccgtccaccaacacaactatccttttctactggtctgctactctgtctgaattggaacctctgaatacagaacacgcggttaccagatatgcgttgcatcttgatcgaccagttacatttttgaaggagtatcttaatgactttgatgtcctagtacttaacacaggccatcactggaacagagggaaattcaatggaaatcactgggaattgcatgctgatgggaagcctgtaggcaatggtagtagacttgcagacctaaaccgtgcaaaaaatcttacattgcatagcattgctagatggatggattcagaactcgcacggcatcctaagatgaaagttttcctcaggacaatttcaccaaggcactttgtaaatggtgactggaacacaggtggaacatgtggaaataccgtcccctttactaatggaagtgaagtcttgcaggatcattcaattgatatacccgcagaaaatgctgtgaagggaactcgggttaagcttttggatatcactgctatctcaaaactacgggatgaggggcatatctcaaactctagtttcaaaaaggcttccaccggaattaatgattgcttgcactggtgcttacctggtataccagacatgtggaatgagcttctctttgtacagatttagtatcaccctcttgttaggcagatctttttcagagccccaaggatctccgctgttcatagcatagaagtaaagtttaaggaattttgggtcacccatatggaggtgttcacatgatgatactattgatttctatgaagtacgtaatttacagtgtggaacagattattccaacttcctttcggagcagagtaggagatggaggtgttgcacagcccaatctgactatcgagtattcttcaggcacgttgaactttgtttctacgtttaccttactgtaaaatcctaccacggtttaccatgtgcagcatatatccttcagaaaaatgttcatacctgttggtcgt

SEQ ID NO: 21458 - protein, 426 aa, Zea mays subsp. mays
  peptide (1)..(426): Ceres Seq. ID no. 15180367
  misc_feature (267)..(426): Pfam Name: Pfam Description:  Arabidopsis proteins of unknown function
  misc_feature (69)..(426): NCBI GI NO: 8777315 NR Description: gene_id:MBM17
  misc_feature (76)..(426): NCBI GI NO: 30697938 NR Description: expressed protein [Arabidopsis thaliana]
  misc_feature (77)..(426): NCBI GI NO: 15810385 NR Description: unknown protein [Arabidopsis thaliana]
  misc_feature (77)..(426): NCBI GI NO: 18420285 NR Description: expressed protein [Arabidopsis thaliana]
  misc_feature (83)..(426): NCBI GI NO: 15224349 NR Description: expressed protein [Arabidopsis thaliana]
  misc_feature (85)..(423): NCBI GI NO: 6862912 NR Description: unknown protein [Arabidopsis thaliana]
  misc_feature (70)..(426): NCBI GI NO: 9759321 NR Description: gb|AAF00670
  misc_feature (70)..(426): NCBI GI NO: 18415139 NR Description: expressed protein [Arabidopsis thaliana]
  misc_feature (56)..(426): NCBI GI NO: 15242021 NR Description: expressed protein [Arabidopsis thaliana]
  misc_feature (56)..(426): NCBI GI NO: 21592371 NR Description: unknown [Arabidopsis thaliana]
MKGGCLHRLLVHKLCFGLSILTVPIIVLLLEGAPVLTIFSPTPGQLKVLSQGFLHQQEQEHLGDDGATLVGSPGPASRSRLQKNCNYAKGKWIEDDKRPLYSGNECKQWLSKMWACRMMRRTHFSYENYRWQPHDCEMPEFTGPKFLKRMRNRTLAFVGDSLGRQQFQSMMCIATGGKYSPEVEDVGWKYGLVKAPGALRPDGWAYRFPSTNTTILFYWSATLSELEPLNTEHAVTRYALHLDRPVTFLKEYLNDFDVLVLNTGHHWNRGKFNGNHWELHADGKPVGNGSRLADLNRAKNLTLHSIARWMDSELARHPKMKVFLRTISPRHFVNGDWNTGGTCGNTVPFTNGSEVLQDHSIDIPAENAVKGTRVKLLDITAISKLRDEGHISNSSFKKASTGINDCLHWCLPGIPDMWNELLFVQI

SEQ ID NO: 21459 - protein, 314 aa, Zea mays subsp. mays
  peptide (1)..(314): Ceres Seq. ID no. 15180368
  misc_feature (155)..(314): Pfam Name: Pfam Description:  Arabidopsis proteins of unknown function
  misc_feature (1)..(314): NCBI GI NO: 8777315 NR Description: gene_id:MBM17
  misc_feature (1)..(314): NCBI GI NO: 30697938 NR Description: expressed protein [Arabidopsis thaliana]
  misc_feature (1)..(314): NCBI GI NO: 15810385 NR Description: unknown protein [Arabidopsis thaliana]
  misc_feature (1)..(314): NCBI GI NO: 18420285 NR Description: expressed protein [Arabidopsis thaliana]
  misc_feature (1)..(314): NCBI GI NO: 15224349 NR Description: expressed protein [Arabidopsis thaliana]
  misc_feature (1)..(311): NCBI GI NO: 6862912 NR Description: unknown protein [Arabidopsis thaliana]
  misc_feature (1)..(314): NCBI GI NO: 9759321 NR Description: gb|AAF00670
  misc_feature (1)..(314): NCBI GI NO: 18415139 NR Description: expressed protein [Arabidopsis thaliana]
  misc_feature (1)..(314): NCBI GI NO: 15242021 NR Description: expressed protein [Arabidopsis thaliana]
  misc_feature (1)..(314): NCBI GI NO: 21592371 NR Description: unknown [Arabidopsis thaliana]
MWACRMMRRTHFSYENYRWQPHDCEMPEFTGPKFLKRMRNRTLAFVGDSLGRQQFQSMMCIATGGKYSPEVEDVGWKYGLVKAPGALRPDGWAYRFPSTNTTILFYWSATLSELEPLNTEHAVTRYALHLDRPVTFLKEYLNDFDVLVLNTGHHWNRGKFNGNHWELHADGKPVGNGSRLADLNRAKNLTLHSIARWMDSELARHPKMKVFLRTISPRHFVNGDWNTGGTCGNTVPFTNGSEVLQDHSIDIPAENAVKGTRVKLLDITAISKLRDEGHISNSSFKKASTGINDCLHWCLPGIPDMWNELLFVQI

SEQ ID NO: 21460 - protein, 309 aa, Zea mays subsp. mays
  peptide (1)..(309): Ceres Seq. ID no. 15180369
  misc_feature (150)..(309): Pfam Name: Pfam Description:  Arabidopsis proteins of unknown function
  misc_feature (1)..(309): NCBI GI NO: 8777315 NR Description: gene_id:MBM17
  misc_feature (1)..(309): NCBI GI NO: 30697938 NR Description: expressed protein [Arabidopsis thaliana]
  misc_feature (1)..(309): NCBI GI NO: 15810385 NR Description: unknown protein [Arabidopsis thaliana]
  misc_feature (1)..(309): NCBI GI NO: 18420285 NR Description: expressed protein [Arabidopsis thaliana]
  misc_feature (1)..(309): NCBI GI NO: 15224349 NR Description: expressed protein [Arabidopsis thaliana]
  misc_feature (1)..(306): NCBI GI NO: 6862912 NR Description: unknown protein [Arabidopsis thaliana]
  misc_feature (1)..(309): NCBI GI NO: 9759321 NR Description: gb|AAF00670
  misc_feature (1)..(309): NCBI GI NO: 18415139 NR Description: expressed protein [Arabidopsis thaliana]
  misc_feature (1)..(309): NCBI GI NO: 15242021 NR Description: expressed protein [Arabidopsis thaliana]
  misc_feature (1)..(309): NCBI GI NO: 21592371 NR Description: unknown [Arabidopsis thaliana]
MMRRTHFSYENYRWQPHDCEMPEFTGPKFLKRMRNRTLAFVGDSLGRQQFQSMMCIATGGKYSPEVEDVGWKYGLVKAPGALRPDGWAYRFPSTNTTILFYWSATLSELEPLNTEHAVTRYALHLDRPVTFLKEYLNDFDVLVLNTGHHWNRGKFNGNHWELHADGKPVGNGSRLADLNRAKNLTLHSIARWMDSELARHPKMKVFLRTISPRHFVNGDWNTGGTCGNTVPFTNGSEVLQDHSIDIPAENAVKGTRVKLLDITAISKLRDEGHISNSSFKKASTGINDCLHWCLPGIPDMWNELLFVQI

SEQ ID NO: 21461 - DNA, 2152 bp, Zea mays subsp. mays
  misc_feature (1)..(2152): Ceres Seq. ID no. 14303276
ctcgtccacccattcctccgctcttccttaattcctcatttcctccacgtacgcgtgcatactctgcgagtccaggagatttttttccccttcttcacgatactctcgacgagagtgtctccatggccggaaaaggagacgggccggcgatcggcatcgacctcggtacgacctactcgtgcgtcggggtgtggcagcatgaccgagtcgagatcatcgccaacgaccagggcaaccgtacaacgccgtcttatgtcgcgttcaccgattcggagaggctcgtcggcgacgccgccaagaaccaggtcgccatgaaccccatcaacaccgtcttcgacgcgaagcggctcatcggccggcgcttctctgacacgtcggtgcagagtgacgccaagctatggcctttcaaagtgatcccgggctccggcgacaagcccatgatcggggtgcagttcaggggcgaggagaaacagttctcggccgaggagatcagctccatgatcctgaacaagatgaaggagacggccgaggcttacctcggcaccaccatcaagaacgctgtcgtcaccgtcccggcctacttcaacgactcccagcgccaggccaccaaggacgccggcgtcatctccggcctcaacgtcatgcgcatcatcaacgagcccaccgccgcggccatcgcatacgggctcgacaagaagtcgagcagcgacggcgagaagaacgtcctcatcttcgacctcggcggcggtacctttgacgtctcgctcctcaccatcgaggagggcatctttgaggtcaaggccaccgccggcgacacccacctgggaggcgaggacttcgacaaccggctcgtgaaccacttcgtccaggagttcaagaggaagaacaagaaggacatcactggcaaccccagggcgctccggcgactgaggaccgcctgcgagagggctaagaggacgctctcctccaccgcccaaaccaccatcgagatcgactcgctctatgagggcatcgacttctacacgaccatcacccgtgcccggttcgaggagctcaacatggacctcttccgcaagtgcatggagcccgtggagaagtgcctccgcgacgccaagatggacaagagcagcgtgcacgacgtcgttctcgtgggcggctccactcgcatcccccgcgtgcagcagctgctccaggacttcttcaacggcaaggagttgtgcaagagcatcaacccagacgaggctgtcgcgtacggagcggccgtccaggccgccatcctcactggcgagggcaatgagaaggttcaggatctgctcctgctcgacgtctcgccgctctcgctcggcctggagacggccggaggcgtcatgactgtgctcatccccaggaacaccaccatcccgacaaagaaggagcaggtcttctccacttactccgacaaccagcccggcgtgctcatccaggtgtacgaaggtgagagggccaggaccaaagacaacaatctgctcggcaagttcgagctctctggcatccctccggcgcccaggggcgtcccccagatcaccgtgtgtttcgacatggacgcgaacggcatcctcaacgtgtcagcggaggacaagaccaccggacagaagaataagatcacgatcaccaacgataagggacggctaagtaaggaggagatcgagaagatggtgcaggaggcagagaagtacaaagccgaggacgaggaacaccagaagaaggtgaacgccaagaacacgctcgagaactatgcctacaatatgcgcaacaccatcagagacgacaagatcgcctccaagctaccggtggacgacaagaaaaagatcgatgacgccgtcgagggggccatcaattggctcgacaacaaccagctcgccgaggttgatgagtttgaggacaagatgaaggagctggagggcatttgcaaccccatcatcgcgaagatgtatcagggcgccgctggtcctgacatggccggtggcatggatcgggatgcttcgccggctggtggcagcggtgctggacccaagatcgaagaagtcgactaaatgaggaaattcttatatatgtagttttgcttaaataattgcgtcaattacaaagtggatcttattattatttttatgcg

SEQ ID NO: 21462 - protein, 689 aa, Zea mays subsp. mays
  peptide (1)..(689): Ceres Seq. ID no. 14303277
  misc_feature (49)..(658): Pfam Name: Pfam Description:  Hsp70 protein
  misc_feature (44)..(689): NCBI GI NO: 2827002 NR Description: HSP70 [Triticum aestivum]
  misc_feature (41)..(689): NCBI GI NO: 26985219 NR Description: non-cell-autonomous heat shock cognate protein 70
  misc_feature (41)..(689): NCBI GI NO: 6969976 NR Description: high molecular weight heat shock protein
  misc_feature (40)..(689): NCBI GI NO: 629875 NR Description: dnaK-type molecular chaperone LIM18 - trumpet lily
  misc_feature (47)..(672): NCBI GI NO: 21263753 NR Description: Heat shock cognate 71 kDa protein (Hsc70.1)
  misc_feature (27)..(668): NCBI GI NO: 15241844 NR Description: luminal binding protein 1 precursor
  misc_feature (16)..(670): NCBI GI NO: 32405376 NR Description: 78 KDA GLUCOSE-REGULATED PROTEIN HOMOLOG PRECURSOR
  misc_feature (43)..(667): NCBI GI NO: 1037176 NR Description: immunoglobulin heavy chain binding protein
  misc_feature (37)..(673): NCBI GI NO: 29539338 NR Description: Heat shock 70 kDa protein
  misc_feature (46)..(673): NCBI GI NO: 23480384 NR Description: heat shock protein [Plasmodium yoelii yoelii]
RPPIPPLFLNSSFPPRTRAYSASPGDFFPLLHDTLDESVSMAGKGDGPAIGIDLGTTYSCVGVWQHDRVEIIANDQGNRTTPSYVAFTDSERLVGDAAKNQVAMNPINTVFDAKRLIGRRFSDTSVQSDAKLWPFKVIPGSGDKPMIGVQFRGEEKQFSAEEISSMILNKMKETAEAYLGTTIKNAVVTVPAYFNDSQRQATKDAGVISGLNVMRIINEPTAAAIAYGLDKKSSSDGEKNVLIFDLGGGTFDVSLLTIEEGIFEVKATAGDTHLGGEDFDNRLVNHFVQEFKRKNKKDITGNPRALRRLRTACERAKRTLSSTAQTTIEIDSLYEGIDFYTTITRARFEELNMDLFRKCMEPVEKCLRDAKMDKSSVHDVVLVGGSTRIPRVQQLLQDFFNGKELCKSINPDEAVAYGAAVQAAILTGEGNEKVQDLLLLDVSPLSLGLETAGGVMTVLIPRNTTIPTKKEQVFSTYSDNQPGVLIQVYEGERARTKDNNLLGKFELSGIPPAPRGVPQITVCFDMDANGILNVSAEDKTTGQKNKITITNDKGRLSKEEIEKMVQEAEKYKAEDEEHQKKVNAKNTLENYAYNMRNTIRDDKIASKLPVDDKKKIDDAVEGAINWLDNNQLAEVDEFEDKMKELEGICNPIIAKMYQGAAGPDMAGGMDRDASPAGGSGAGPKIEEVD

SEQ ID NO: 21463 - protein, 649 aa, Zea mays subsp. mays
  peptide (1)..(649): Ceres Seq. ID no. 14303278
  misc_feature (9)..(618): Pfam Name: Pfam Description:  Hsp70 protein
  misc_feature (4)..(649): NCBI GI NO: 2827002 NR Description: HSP70 [Triticum aestivum]
  misc_feature (1)..(649): NCBI GI NO: 26985219 NR Description: non-cell-autonomous heat shock cognate protein 70
  misc_feature (1)..(649): NCBI GI NO: 6969976 NR Description: high molecular weight heat shock protein
  misc_feature (1)..(649): NCBI GI NO: 629875 NR Description: dnaK-type molecular chaperone LIM18 - trumpet lily
  misc_feature (7)..(632): NCBI GI NO: 21263753 NR Description: Heat shock cognate 71 kDa protein (Hsc70.1)
  misc_feature (1)..(628): NCBI GI NO: 15241844 NR Description: luminal binding protein 1 precursor
  misc_feature (1)..(630): NCBI GI NO: 32405376 NR Description: 78 KDA GLUCOSE-REGULATED PROTEIN HOMOLOG PRECURSOR
  misc_feature (3)..(627): NCBI GI NO: 1037176 NR Description: immunoglobulin heavy chain binding protein
  misc_feature (1)..(633): NCBI GI NO: 29539338 NR Description: Heat shock 70 kDa protein
  misc_feature (6)..(633): NCBI GI NO: 23480384 NR Description: heat shock protein [Plasmodium yoelii yoelii]
MAGKGDGPAIGIDLGTTYSCVGVWQHDRVEIIANDQGNRTTPSYVAFTDSERLVGDAAKNQVAMNPINTVFDAKRLIGRRFSDTSVQSDAKLWPFKVIPGSGDKPMIGVQFRGEEKQFSAEEISSMILNKMKETAEAYLGTTIKNAVVTVPAYFNDSQRQATKDAGVISGLNVMRIINEPTAAAIAYGLDKKSSSDGEKNVLIFDLGGGTFDVSLLTIEEGIFEVKATAGDTHLGGEDFDNRLVNHFVQEFKRKNKKDITGNPRALRRLRTACERAKRTLSSTAQTTIEIDSLYEGIDFYTTITRARFEELNMDLFRKCMEPVEKCLRDAKMDKSSVHDVVLVGGSTRIPRVQQLLQDFFNGKELCKSINPDEAVAYGAAVQAAILTGEGNEKVQDLLLLDVSPLSLGLETAGGVMTVLIPRNTTIPTKKEQVFSTYSDNQPGVLIQVYEGERARTKDNNLLGKFELSGIPPAPRGVPQITVCFDMDANGILNVSAEDKTTGQKNKITITNDKGRLSKEEIEKMVQEAEKYKAEDEEHQKKVNAKNTLENYAYNMRNTIRDDKIASKLPVDDKKKIDDAVEGAINWLDNNQLAEVDEFEDKMKELEGICNPIIAKMYQGAAGPDMAGGMDRDASPAGGSGAGPKIEEVD

SEQ ID NO: 21464 - protein, 586 aa, Zea mays subsp. mays
  peptide (1)..(586): Ceres Seq. ID no. 14303279
  misc_feature (1)..(555): Pfam Name: Pfam Description:  Hsp70 protein
  misc_feature (1)..(586): NCBI GI NO: 2827002 NR Description: HSP70 [Triticum aestivum]
  misc_feature (1)..(586): NCBI GI NO: 26985219 NR Description: non-cell-autonomous heat shock cognate protein 70
  misc_feature (1)..(586): NCBI GI NO: 6969976 NR Description: high molecular weight heat shock protein
  misc_feature (1)..(586): NCBI GI NO: 629875 NR Description: dnaK-type molecular chaperone LIM18 - trumpet lily
  misc_feature (1)..(569): NCBI GI NO: 21263753 NR Description: Heat shock cognate 71 kDa protein (Hsc70.1)
  misc_feature (1)..(565): NCBI GI NO: 15241844 NR Description: luminal binding protein 1 precursor
  misc_feature (1)..(567): NCBI GI NO: 32405376 NR Description: 78 KDA GLUCOSE-REGULATED PROTEIN HOMOLOG PRECURSOR
  misc_feature (1)..(564): NCBI GI NO: 1037176 NR Description: immunoglobulin heavy chain binding protein
  misc_feature (1)..(570): NCBI GI NO: 29539338 NR Description: Heat shock 70 kDa protein
  misc_feature (1)..(570): NCBI GI NO: 23480384 NR Description: heat shock protein [Plasmodium yoelii yoelii]
MNPINTVFDAKRLIGRRFSDTSVQSDAKLWPFKVIPGSGDKPMIGVQFRGEEKQFSAEEISSMILNKMKETAEAYLGTTIKNAVVTVPAYFNDSQRQATKDAGVISGLNVMRIINEPTAAAIAYGLDKKSSSDGEKNVLIFDLGGGTFDVSLLTIEEGIFEVKATAGDTHLGGEDFDNRLVNHFVQEFKRKNKKDITGNPRALRRLRTACERAKRTLSSTAQTTIEIDSLYEGIDFYTTITRARFEELNMDLFRKCMEPVEKCLRDAKMDKSSVHDVVLVGGSTRIPRVQQLLQDFFNGKELCKSINPDEAVAYGAAVQAAILTGEGNEKVQDLLLLDVSPLSLGLETAGGVMTVLIPRNTTIPTKKEQVFSTYSDNQPGVLIQVYEGERARTKDNNLLGKFELSGIPPAPRGVPQITVCFDMDANGILNVSAEDKTTGQKNKITITNDKGRLSKEEIEKMVQEAEKYKAEDEEHQKKVNAKNTLENYAYNMRNTIRDDKIASKLPVDDKKKIDDAVEGAINWLDNNQLAEVDEFEDKMKELEGICNPIIAKMYQGAAGPDMAGGMDRDASPAGGSGAGPKIEEVD

SEQ ID NO: 21465 - DNA, 659 bp, Zea mays subsp. mays
  misc_feature (1)..(659): Ceres Seq. ID no. 14305425
aggcctactaccaaccagcctccgcgtccaagatctccctcccacggcccgctcggactccccggcgcaatggcgaccgacgcgatcctggagacgatcaagccgcggcggagcgaggagcagctcccggtgaccacggcggccgccgccgccggcaccaggctgcggcggcgcgtgtcctcgttctcggcgcacgtgaggccgccgccggggctgtcgtcctcggcggcagcggcgttccggcgcgcgaggtcgatgccgtccgccaaggcgctggcggcggcgggagcgctgcggcggtggtgggagtgggtgacggcgccgttcgcgccccgcggcggcggcgacgacgacgacgacgaggcaaggccgctgggcgggtgccgctgcgcctgcgccggcggaccgggcgggtggcgccacgtcctggtcaggctccgcgccggcgcgcgccgcctgctgggccgcgacggccgcccgctcaaggccgccgcgccgccggacttcggctacgactccgtcagctacgcgcgcaacttcgacgacggcgaggcgtgatgcgcgggtgatgccgagccgaggtggtggcgggacggccgtggcggtggcggccgggcgtggatcacaggatcagcagtggtccagctgtcgcaataaag

SEQ ID NO: 21466 - protein, 188 aa, Zea mays subsp. mays
  peptide (1)..(188): Ceres Seq. ID no. 14305426
  misc_feature (5)..(153): NCBI GI NO: 34903620 NR Description: B1046G12.17
AYYQPASASKISLPRPARTPRRNGDRRDPGDDQAAAERGAAPGDHGGRRRRHQAAAARVLVLGAREAAAGAVVLGGSGVPAREVDAVRQGAGGGGSAAAVVGVGDGAVRAPRRRRRRRRRGKAAGRVPLRLRRRTGRVAPRPGQAPRRRAPPAGPRRPPAQGRRAAGLRLRLRQLRAQLRRRRGVMRG

SEQ ID NO: 21467 - protein, 185 aa, Zea mays subsp. mays
  peptide (1)..(185): Ceres Seq. ID no. 14305427
  misc_feature (24)..(185): NCBI GI NO: 28411879 NR Description: OSJNBa0016N23.32
RPTTNQPPRPRSPSHGPLGLPGAMATDAILETIKPRRSEEQLPVTTAAAAAGTRLRRRVSSFSAHVRPPPGLSSSAAAAFRRARSMPSAKALAAAGALRRWWEWVTAPFAPRGGGDDDDDEARPLGGCRCACAGGPGGWRHVLVRLRAGARRLLGRDGRPLKAAAPPDFGYDSVSYARNFDDGEA

SEQ ID NO: 21468 - protein, 162 aa, Zea mays subsp. mays
  peptide (1)..(162): Ceres Seq. ID no. 14305428
  misc_feature (1)..(162): NCBI GI NO: 28411879 NR Description: OSJNBa0016N23.32
MATDAILETIKPRRSEEQLPVTTAAAAAGTRLRRRVSSFSAHVRPPPGLSSSAAAAFRRARSMPSAKALAAAGALRRWWEWVTAPFAPRGGGDDDDDEARPLGGCRCACAGGPGGWRHVLVRLRAGARRLLGRDGRPLKAAAPPDFGYDSVSYARNFDDGEA

SEQ ID NO: 21469 - DNA, 1919 bp, Zea mays subsp. mays
  misc_feature (1)..(1919): Ceres Seq. ID no. 15180350
aaatctatcgtccgcaccagcagcgagtgaaggaggagcctgcccgcgcctgcgcctggttgtaattgtagctcacgctcacccttcagttgaccaccgctgcggcagcaatggcggcgagtcgccggcagcaccgccgcggcttcccgctggtcccgctgctgctgtcgctcctggcggccgccgcgtacggccgcctcatctccgacggcggcccgcccgcgccgctcctcccggtcatccgcctcgcggcgccgccggccgaggccgagtgcgagcagacctacggcttcctcccctgcaccaccaccgtgctcggcaacctcttcctggtgctggcctacggcttcctcatgttcaaggcggccacgttcctgtcggcgggcagcgagctgctgctagagatcatggggcccggcctcgtcggcggcctcctcctccccatcctaggcgccctccccgacgcgctcctcgtcctagtgtccggcctctccgggagcaaagaggaggcgcagagccaggtgctgatcgggatggggctgctcgccggttccaccgtcttcctcctcaccctgctctggggaacctgtgtggtcgttggcaagtgtgacctcgggccaggccgtgaggcagtagatgtgacagacaccaagggcttcagcttgactggcactggtgttacgaccgacgtgcagaccagctacgcggcacggatcatggggctatctgtcatccccttcatcatcgctcagttccccaagatgttgaagacgcaccacgggcagcgcctcgccatgctgctggcccttgtcgtgtcgttcgcgctcgtgcttgcctactgcctgtaccaggttttccagccttggattcagaggaggaagctcgcgtacgcgaagcacaagcacgtgatctccgggatactgaggcacgcccagatgcagtcgctcggccgcctgctgaacgacgacggcacgcccaatgaacaagtcatcagaaagctgttccgcaagatcgacatggacgagagccggtccctgtcccgcgccgagctccacgccctcatcgtcggcatcaacttcgaggaggtcgacttcgacaggacggacgcggtggacaaggtcatggacgacttcgacacgtcccgcaacgacgtcgtcgaggaggaggagttcgtgcaggggatgaggaagtggctggacgaggccaggcgcagcgtgcccgtgggcggcgccttctccagcaagttcatccacgagtaccacgagaggacgaggcaggagcacgacgagctggtcgacaggtccgacgaggcggtggagagcgtggagaaccccgggtggtgcatagccaaggccgtggcgctgctgctgctgggctccgccgccgccgccgcgttcgccgacccgctcgtggacgccgtccacggcttctccaacgccacgcgcatcccgtccttcttcatctccttcatcgccctcccgctcgccaccaactccagcgaggccgtctccgccatcatcttcgccagcaggaagaagcagaggacctgctccctcaccttctccgaggtgtacggcggcgtgacgatgaacaacacgctgtgcctcggcgtgttcctggcgctcatctacttcaggaacctgacgtgggacttctcgtcggaggtgctcatcatcctgctggtctgcgtcgtcatggccctcttcaccagcttccggaccacgttcccgctctggacctgcctcgtcgcctacatgctctacccgctctcgctgatcatcgtctacatcctcgactatgtcttcggctggtcatagacctgattggctcaagtgaacacctggttttcagacagccgccggtgtttctgtttgacctccttgtaattttaactatatgtccagactttttctcaaatc

SEQ ID NO: 21470 - protein, 568 aa, Zea mays subsp. mays
  peptide (1)..(568): Ceres Seq. ID no. 15180351
  misc_feature (424)..(558): Pfam Name: Pfam Description:  Sodium/calcium exchanger protein
  misc_feature (132)..(568): NCBI GI NO: 34903912 NR Description: unnamed protein product
  misc_feature (1)..(123): NCBI GI NO: 34903912 NR Description: unnamed protein product
  misc_feature (9)..(36): NCBI GI NO: 34903912 NR Description: unnamed protein product
  misc_feature (30)..(568): NCBI GI NO: 30695448 NR Description: expressed protein [Arabidopsis thaliana]
  misc_feature (30)..(568): NCBI GI NO: 25405975 NR Description: protein F12M16.12
  misc_feature (82)..(568): NCBI GI NO: 13605639 NR Description: At1g53210/F12M16_12 [Arabidopsis thaliana]
  misc_feature (30)..(533): NCBI GI NO: 15218787 NR Description: calcium-binding EF-hand family protein
  misc_feature (229)..(559): NCBI GI NO: 15218787 NR Description: calcium-binding EF-hand family protein
  misc_feature (30)..(217): NCBI GI NO: 15218787 NR Description: calcium-binding EF-hand family protein
  misc_feature (184)..(568): NCBI GI NO: 26449859 NR Description: unknown protein [Arabidopsis thaliana]
MAASRRQHRRGFPLVPLLLSLLAAAAYGRLISDGGPPAPLLPVIRLAAPPAEAECEQTYGFLPCTTTVLGNLFLVLAYGFLMFKAATFLSAGSELLLEIMGPGLVGGLLLPILGALPDALLVLVSGLSGSKEEAQSQVLIGMGLLAGSTVFLLTLLWGTCVVVGKCDLGPGREAVDVTDTKGFSLTGTGVTTDVQTSYAARIMGLSVIPFIIAQFPKMLKTHHGQRLAMLLALVVSFALVLAYCLYQVFQPWIQRRKLAYAKHKHVISGILRHAQMQSLGRLLNDDGTPNEQVIRKLFRKIDMDESRSLSRAELHALIVGINFEEVDFDRTDAVDKVMDDFDTSRNDVVEEEEFVQGMRKWLDEARRSVPVGGAFSSKFIHEYHERTRQEHDELVDRSDEAVESVENPGWCIAKAVALLLLGSAAAAAFADPLVDAVHGFSNATRIPSFFISFIALPLATNSSEAVSAIIFASRKKQRTCSLTFSEVYGGVTMNNTLCLGVFLALIYFRNLTWDFSSEVLIILLVCVVMALFTSFRTTFPLWTCLVAYMLYPLSLIIVYILDYVFGWS

SEQ ID NO: 21471 - protein, 487 aa, Zea mays subsp. mays
  peptide (1)..(487): Ceres Seq. ID no. 15180352
  misc_feature (343)..(477): Pfam Name: Pfam Description:  Sodium/calcium exchanger protein
  misc_feature (51)..(487): NCBI GI NO: 34903912 NR Description: unnamed protein product
  misc_feature (1)..(42): NCBI GI NO: 34903912 NR Description: unnamed protein product
  misc_feature (1)..(487): NCBI GI NO: 30695448 NR Description: expressed protein [Arabidopsis thaliana]
  misc_feature (1)..(487): NCBI GI NO: 25405975 NR Description: protein F12M16.12
  misc_feature (1)..(487): NCBI GI NO: 13605639 NR Description: At1g53210/F12M16_12 [Arabidopsis thaliana]
  misc_feature (1)..(452): NCBI GI NO: 15218787 NR Description: calcium-binding EF-hand family protein
  misc_feature (148)..(478): NCBI GI NO: 15218787 NR Description: calcium-binding EF-hand family protein
  misc_feature (1)..(136): NCBI GI NO: 15218787 NR Description: calcium-binding EF-hand family protein
  misc_feature (103)..(487): NCBI GI NO: 26449859 NR Description: unknown protein [Arabidopsis thaliana]
  misc_feature (173)..(413): NCBI GI NO: 15226193 NR Description: calcium-binding EF-hand family protein
MFKAATFLSAGSELLLEIMGPGLVGGLLLPILGALPDALLVLVSGLSGSKEEAQSQVLIGMGLLAGSTVFLLTLLWGTCVVVGKCDLGPGREAVDVTDTKGFSLTGTGVTTDVQTSYAARIMGLSVIPFIIAQFPKMLKTHHGQRLAMLLALVVSFALVLAYCLYQVFQPWIQRRKLAYAKHKHVISGILRHAQMQSLGRLLNDDGTPNEQVIRKLFRKIDMDESRSLSRAELHALIVGINFEEVDFDRTDAVDKVMDDFDTSRNDVVEEEEFVQGMRKWLDEARRSVPVGGAFSSKFIHEYHERTRQEHDELVDRSDEAVESVENPGWCIAKAVALLLLGSAAAAAFADPLVDAVHGFSNATRIPSFFISFIALPLATNSSEAVSAIIFASRKKQRTCSLTFSEVYGGVTMNNTLCLGVFLALIYFRNLTWDFSSEVLIILLVCVVMALFTSFRTTFPLWTCLVAYMLYPLSLIIVYILDYVFGWS

SEQ ID NO: 21472 - protein, 469 aa, Zea mays subsp. mays
  peptide (1)..(469): Ceres Seq. ID no. 15180353
  misc_feature (325)..(459): Pfam Name: Pfam Description:  Sodium/calcium exchanger protein
  misc_feature (33)..(469): NCBI GI NO: 34903912 NR Description: unnamed protein product
  misc_feature (1)..(24): NCBI GI NO: 34903912 NR Description: unnamed protein product
  misc_feature (1)..(469): NCBI GI NO: 30695448 NR Description: expressed protein [Arabidopsis thaliana]
  misc_feature (1)..(469): NCBI GI NO: 25405975 NR Description: protein F12M16.12
  misc_feature (1)..(469): NCBI GI NO: 13605639 NR Description: At1g53210/F12M16_12 [Arabidopsis thaliana]
  misc_feature (1)..(434): NCBI GI NO: 15218787 NR Description: calcium-binding EF-hand family protein
  misc_feature (130)..(460): NCBI GI NO: 15218787 NR Description: calcium-binding EF-hand family protein
  misc_feature (1)..(118): NCBI GI NO: 15218787 NR Description: calcium-binding EF-hand family protein
  misc_feature (85)..(469): NCBI GI NO: 26449859 NR Description: unknown protein [Arabidopsis thaliana]
  misc_feature (155)..(395): NCBI GI NO: 15226193 NR Description: calcium-binding EF-hand family protein
MGPGLVGGLLLPILGALPDALLVLVSGLSGSKEEAQSQVLIGMGLLAGSTVFLLTLLWGTCVVVGKCDLGPGREAVDVTDTKGFSLTGTGVTTDVQTSYAARIMGLSVIPFIIAQFPKMLKTHHGQRLAMLLALVVSFALVLAYCLYQVFQPWIQRRKLAYAKHKHVISGILRHAQMQSLGRLLNDDGTPNEQVIRKLFRKIDMDESRSLSRAELHALIVGINFEEVDFDRTDAVDKVMDDFDTSRNDVVEEEEFVQGMRKWLDEARRSVPVGGAFSSKFIHEYHERTRQEHDELVDRSDEAVESVENPGWCIAKAVALLLLGSAAAAAFADPLVDAVHGFSNATRIPSFFISFIALPLATNSSEAVSAIIFASRKKQRTCSLTFSEVYGGVTMNNTLCLGVFLALIYFRNLTWDFSSEVLIILLVCVVMALFTSFRTTFPLWTCLVAYMLYPLSLIIVYILDYVFGWS

SEQ ID NO: 21473 - DNA, 938 bp, Zea mays subsp. mays
  misc_feature (1)..(938): Ceres Seq. ID no. 14306355
actgctcgagctcagctcaagtaaccacagaaaatggcgtcacttctccgccctctcgtcctcgtgctcctgatcgcctcctgcacagcgcagcagtcaccgccggcgcagcccccgccaacgccgaacgcgccaccggccaactcgccgccccaggcgcctccagccggcaacccgccgccggcaggcaacccgccacccgcgcccaccgccactccacctccggccccgaccactccgcccccggccccgaccactcctcccccggctcccacaacgccgcccccggcgccgacaactccacctccggcccccaccacgccgcctccgtccccaccagcgtcgccaccgcccgctcccaccactccgccaccgtctcccccggcaagcccgccgcccgctcccgccaccccgccaccgtctccgcccatggcgccacctcccgccacgccccctccacccgccaccccgccgccaccggccgcgcccacgccggccccgagcgtgggtacggtggtggccgtggaggcggcggctacggcggtggcgggcgccgtgatggcggcggcggctacggcggtggcggcggcggctacggtggcggcggcggctacggtggtggtggcggcggctacggcggtggcaaccgtggcggcggctacggcaactccgacgggaactggaggaactgagcggtggggcccgcgcggccaagttatcctgttcgctaccgtgttgtttaccctagtccagagggtttatcttcgttcgtctcatgtttgttgttgcccatctgtgtttttgattgcaaggtcgctttgtgtcagttttagtgctgtgttcatcctcggctccagcagacccatgcatcaaccagcatggactgcggatcgatggatgctgttacccccgtcaggctttatcctaagttaatcttc

SEQ ID NO: 21474 - protein, 299 aa, Zea mays subsp. mays
  peptide (1)..(299): Ceres Seq. ID no. 14306356
  misc_feature (21)..(156): Pfam Name: Pfam Description:  Formin Homology 2 Domain
  misc_feature (23)..(157): NCBI GI NO: 6523547 NR Description: hydroxyproline-rich glycoprotein DZ-HRGP
  misc_feature (22)..(157): NCBI GI NO: 6523547 NR Description: hydroxyproline-rich glycoprotein DZ-HRGP
  misc_feature (23)..(156): NCBI GI NO: 21322711 NR Description: pherophorin-dz1 protein
  misc_feature (23)..(156): NCBI GI NO: 21322711 NR Description: pherophorin-dz1 protein
  misc_feature (23)..(156): NCBI GI NO: 21322711 NR Description: pherophorin-dz1 protein
  misc_feature (23)..(156): NCBI GI NO: 21322711 NR Description: pherophorin-dz1 protein
  misc_feature (23)..(156): NCBI GI NO: 21322711 NR Description: pherophorin-dz1 protein
  misc_feature (23)..(156): NCBI GI NO: 21322711 NR Description: pherophorin-dz1 protein
  misc_feature (23)..(156): NCBI GI NO: 21322711 NR Description: pherophorin-dz1 protein
  misc_feature (23)..(156): NCBI GI NO: 21322711 NR Description: pherophorin-dz1 protein
MASLLRPLVLVLLIASCTAQQSPPAQPPPTPNAPPANSPPQAPPAGNPPPAGNPPPAPTATPPPAPTTPPPAPTTPPPAPTTPPPAPTTPPPAPTTPPPSPPASPPPAPTTPPPSPPASPPPAPATPPPSPPMAPPPATPPPPATPPPPAAPTPAPSVGTVVAVEAAATAVAGAVMAAAATAVAAAATVAAAATVVVAAATAVATVAAATATPTGTGGTERWGPRGQVILFATVLFTLVQRVYLRSSHVCCCPSVFLIARSLCVSFSAVFILGSSRPMHQPAWTADRWMLLPPSGFILS

SEQ ID NO: 21475 - protein, 229 aa, Zea mays subsp. mays
  peptide (1)..(229): Ceres Seq. ID no. 14306357
  misc_feature (61)..(225): Pfam Name: Pfam Description:  Herpesvirus large structural phospho protein UL32
  misc_feature (160)..(229): NCBI GI NO: 82696 NR Description: glycine-rich protein - maize
  misc_feature (166)..(229): NCBI GI NO: 34809540 NR Description: Epa3p [Candida glabrata]
  misc_feature (29)..(226): NCBI GI NO: 15805485 NR Description: hypothetical protein [Deinococcus radiodurans]
  misc_feature (4)..(226): NCBI GI NO: 15805485 NR Description: hypothetical protein [Deinococcus radiodurans]
  misc_feature (2)..(219): NCBI GI NO: 15805485 NR Description: hypothetical protein [Deinococcus radiodurans]
CSSSAQVTTENGVTSPPSRPRAPDRLLHSAAVTAGAAPANAERATGQLAAPGASSRQPAAGRQPATRAHRHSTSGPDHSAPGPDHSSPGSHNAAPGADNSTSGPHHAASVPTSVATARSHHSATVSPGKPAARSRHPATVSAHGATSRHAPSTRHPAATGRAHAGPERGYGGGRGGGGYGGGGRRDGGGGYGGGGGGYGGGGGYGGGGGGYGGGNRGGGYGNSDGNWRN

SEQ ID NO: 21476 - protein, 167 aa, Zea mays subsp. mays
  peptide (1)..(167): Ceres Seq. ID no. 14306358
  misc_feature (1)..(87): Pfam Name: Pfam Description:  Equine herpesvirus glycoprotein gp2
  misc_feature (1)..(25): NCBI GI NO: 6523547 NR Description: hydroxyproline-rich glycoprotein DZ-HRGP
  misc_feature (1)..(25): NCBI GI NO: 6523547 NR Description: hydroxyproline-rich glycoprotein DZ-HRGP
  misc_feature (1)..(24): NCBI GI NO: 21322711 NR Description: pherophorin-dz1 protein
  misc_feature (1)..(24): NCBI GI NO: 21322711 NR Description: pherophorin-dz1 protein
  misc_feature (1)..(24): NCBI GI NO: 21322711 NR Description: pherophorin-dz1 protein
  misc_feature (1)..(24): NCBI GI NO: 21322711 NR Description: pherophorin-dz1 protein
  misc_feature (1)..(24): NCBI GI NO: 21322711 NR Description: pherophorin-dz1 protein
  misc_feature (1)..(24): NCBI GI NO: 21322711 NR Description: pherophorin-dz1 protein
  misc_feature (1)..(24): NCBI GI NO: 21322711 NR Description: pherophorin-dz1 protein
  misc_feature (1)..(24): NCBI GI NO: 21322711 NR Description: pherophorin-dz1 protein
MAPPPATPPPPATPPPPAAPTPAPSVGTVVAVEAAATAVAGAVMAAAATAVAAAATVAAAATVVVAAATAVATVAAATATPTGTGGTERWGPRGQVILFATVLFTLVQRVYLRSSHVCCCPSVFLIARSLCVSFSAVFILGSSRPMHQPAWTADRWMLLPPSGFILS

SEQ ID NO: 21477 - DNA, 2139 bp, Zea mays subsp. mays
  misc_feature (1)..(2139): Ceres Seq. ID no. 15180181
gttttctcagtctcctccttctccacgcacgtcatctcctaactccccagccgctccctctagccctcatctcgtcggccctggctgctggtcgtcgtcggccgcgagctctccaacacaggccggcttcctcttcctcccctgcccaagctctccactcgacgcctaggtatccatggcgtctcctccccttcctttactctgccatggacgcgagttccaagctcctgctcgtccaggcccccttcccaggcgcccctgcagagcccctggccgagcttccccatggtgtctcccccaactatggcgccctctgctcctccaagccggtgacccctcctctctggttctgcgcagggaactccctccatggctggcgtccctgtgctcgcgcccttgatccccatgcccgagctcctctccatcgtctttagctcgccatggtacagcgccactgtcaaatccggtctccagctcaccagcaacttccccttccttgcccttgcacacctctggtgcagcccttccctggtgctcgatgaaatggtcatgtggagctctttattgtgtgcagccccatctgcaacaccgtagaccccggtgaggtcctgttctcgccctgtcgttttagcgctcgatgtcgattactaatgtgtgaatttgtgtgttgatgagggagttaactggtaaagaagcgaggtccgtgagacgtttgccaagtgtttgatggaaggttcgaactgggaacctcgccgttctcgcggatcttcgggtcggtttgtgaattgcgcaagcatatggtgtgtcgactttcagattcattgctgtccatatgtgtgatatagttggtgaatgaacatgtcaaaggagagtaaattctttaggcatatgagaaaggattgatgattgcggtcataccattcacttcaaagatccttgaaccttgccagtcaagtatcgcatatcgacctccaaatccctggaccatgggaattctaagtctacttgctgaaatttataatcttccaaacctcaagatgaatctgaaatttgatattgaggtgctatttaagaaccttactgttgacataaaggatgtgaaaccaacttccctgctcaaagatcgtctgcgcgaagtcgagggaaatccagatttttcaaataaagatgttactgcatctcaaacccctgtggttgcagaagtcccttcagggaccatcccttcactaactcatatggaacaacaacctgagatcaatatcacatcccgagctatgagccttccaaatatacttaatgagtatgctgctcctgtccgtctacctacaaacaacacggtagaagatgacaaagttgctctgatgatgcctgagcaagtgccctcgttgacccaggtttcgccagcacaaacacaatcaacatcaccatctccattttctgttaaccagcttatggcggctattccacgtgaagagatacgtttcaaaataaatccaaagctcggctcccttgatccacaactgtaatatagcaaaattatggatttggttttggataaggctaacagggagataatactccctgttattcaaagaagtgtgaccatagcaagccgaactacaaaagaacttattctgaaggattatgcactggagtctgataacaatacgataactcgatccgcacatttgatggttggaacattagccggaagtctgacacatgttatttgcaaggaacctcttcgtgttgcactatattctaatcttcggaatctcattcagaaccttatgagcggcagtgaaactatcgagcaacttattcacacgctaatcaatgataacttggatcttggctgtgccatcattgagatttaaaagcttaaggtttacaattgttgggactatgcttcgtcgccgctcataaggttctgaatgagattccgaagattagaatatagtgcaacacgaagaggttccttgcaaataacttgtgcccgtatacttcgatctgttaaaatctattggttgtgtgccctgtgtctgttgtttgggtatctatactgttattttgagacatggttgacttgcatggtcatctggattgggttcgcttttctgagtcatttgtcttgacatg

SEQ ID NO: 21478 - protein, 207 aa, Zea mays subsp. mays
  peptide (1)..(207): Ceres Seq. ID no. 15180182
  misc_feature (34)..(207): NCBI GI NO: 37536772 NR Description: putative transcription regulatory protein
  misc_feature (1)..(12): NCBI GI NO: 37536772 NR Description: putative transcription regulatory protein
  misc_feature (1)..(207): NCBI GI NO: 30678237 NR Description: expressed protein [Arabidopsis thaliana]
  misc_feature (1)..(207): NCBI GI NO: 32398785 NR Description: putative transcription regulatory protein
  misc_feature (196)..(207): NCBI GI NO: 23508245 NR Description: hypothetical protein, conserved
  misc_feature (1)..(85): NCBI GI NO: 23508245 NR Description: hypothetical protein, conserved
  misc_feature (1)..(207): NCBI GI NO: 24652110 NR Description: CG1884-PB [Drosophila melanogaster]
  misc_feature (1)..(207): NCBI GI NO: 24652112 NR Description: CG1884-PA [Drosophila melanogaster]
  misc_feature (157)..(207): NCBI GI NO: 32407043 NR Description: hypothetical protein [Neurospora crassa]
  misc_feature (1)..(90): NCBI GI NO: 32407043 NR Description: hypothetical protein [Neurospora crassa]
MIAVIPFTSKILEPCQSSIAYRPPNPWTMGILSLLAEIYNLPNLKMNLKFDIEVLFKNLTVDIKDVKPTSLLKDRLREVEGNPDFSNKDVTASQTPVVAEVPSGTIPSLTHMEQQPEINITSRAMSLPNILNEYAAPVRLPTNNTVEDDKVALMMPEQVPSLTQVSPAQTQSTSPSPFSVNQLMAAIPREEIRFKINPKLGSLDPQL

SEQ ID NO: 21479 - protein, 179 aa, Zea mays subsp. mays
  peptide (1)..(179): Ceres Seq. ID no. 15180183
  misc_feature (6)..(179): NCBI GI NO: 37536772 NR Description: putative transcription regulatory protein
  misc_feature (1)..(179): NCBI GI NO: 30678237 NR Description: expressed protein [Arabidopsis thaliana]
  misc_feature (1)..(179): NCBI GI NO: 32398785 NR Description: putative transcription regulatory protein
  misc_feature (168)..(179): NCBI GI NO: 23508245 NR Description: hypothetical protein, conserved
  misc_feature (1)..(57): NCBI GI NO: 23508245 NR Description: hypothetical protein, conserved
  misc_feature (1)..(179): NCBI GI NO: 24652110 NR Description: CG1884-PB [Drosophila melanogaster]
  misc_feature (1)..(179): NCBI GI NO: 24652112 NR Description: CG1884-PA [Drosophila melanogaster]
  misc_feature (129)..(179): NCBI GI NO: 32407043 NR Description: hypothetical protein [Neurospora crassa]
  misc_feature (1)..(62): NCBI GI NO: 32407043 NR Description: hypothetical protein [Neurospora crassa]
  misc_feature (168)..(179): NCBI GI NO: 23478681 NR Description: hypothetical protein [Plasmodium yoelii yoelii]
MGILSLLAEIYNLPNLKMNLKFDIEVLFKNLTVDIKDVKPTSLLKDRLREVEGNPDFSNKDVTASQTPVVAEVPSGTIPSLTHMEQQPEINITSRAMSLPNILNEYAAPVRLPTNNTVEDDKVALMMPEQVPSLTQVSPAQTQSTSPSPFSVNQLMAAIPREEIRFKINPKLGSLDPQL

SEQ ID NO: 21480 - protein, 162 aa, Zea mays subsp. mays
  peptide (1)..(162): Ceres Seq. ID no. 15180184
  misc_feature (1)..(162): NCBI GI NO: 37536772 NR Description: putative transcription regulatory protein
  misc_feature (1)..(162): NCBI GI NO: 30678237 NR Description: expressed protein [Arabidopsis thaliana]
  misc_feature (1)..(162): NCBI GI NO: 32398785 NR Description: putative transcription regulatory protein
  misc_feature (151)..(162): NCBI GI NO: 23508245 NR Description: hypothetical protein, conserved
  misc_feature (1)..(40): NCBI GI NO: 23508245 NR Description: hypothetical protein, conserved
  misc_feature (1)..(162): NCBI GI NO: 24652110 NR Description: CG1884-PB [Drosophila melanogaster]
  misc_feature (1)..(162): NCBI GI NO: 24652112 NR Description: CG1884-PA [Drosophila melanogaster]
  misc_feature (112)..(162): NCBI GI NO: 32407043 NR Description: hypothetical protein [Neurospora crassa]
  misc_feature (1)..(45): NCBI GI NO: 32407043 NR Description: hypothetical protein [Neurospora crassa]
  misc_feature (151)..(162): NCBI GI NO: 23478681 NR Description: hypothetical protein [Plasmodium yoelii yoelii]
MNLKFDIEVLFKNLTVDIKDVKPTSLLKDRLREVEGNPDFSNKDVTASQTPVVAEVPSGTIPSLTHMEQQPEINITSRAMSLPNILNEYAAPVRLPTNNTVEDDKVALMMPEQVPSLTQVSPAQTQSTSPSPFSVNQLMAAIPREEIRFKINPKLGSLDPQL

SEQ ID NO: 21481 - DNA, 1036 bp, Zea mays subsp. mays
  misc_feature (1)..(1036): Ceres Seq. ID no. 15180175
aaagacggagaagaagaagaagagtcgcgaaggaatggggaagggtaaggtgcatccctcgccgccgccagctgccgcggccgcggccgcgggcagcggagccggggagacgacggcggaggcggtgctgatgcggctgctgccggcggcggtgctcgcggccgcggcgccgctcggggccgaggggaaggaggtgctggcgtacctggtgctggcgtcgcttcggtcctcggccccgccgacgccgacgccgaccccggcgcgcggggacgggcaccgcccggagctcgggtgcggctgcttcgggtgctacacggcctactggtcccgctgggacgggtccccctagggcgaccgcgaggccatccaccgcgccatcgaggcgttcgaggagcacctggcggaggaggagaagggccgcgggaagggaggcgggccccgccgcggacggaagaagcgcgccgagggcaaggggaggtggaaggtgaagaaggaaaaggaggtggaggtcggcgtcgattcactcccgcccccgtccgatctccccgccccggaggaggcccccaaggcggaggacggcgcggagtacctgacggcggaggacgagaaggaggaggacgctccgaccgcggccgccggccccgaggatgagaagcggcggcgctggtggggctccgtgctgagctggaaggcgtggggcctctgggggtcccactagtcaggtccctcccctcgctacgcttcgccctgttcaattagttaggtttggtgctttctttgcttgctgctatcgctggggtttagctgctgctgctgctgctgcaggtggattagttggtgatggttagtactcctacgctatttggcagtctggatggggatgttgtgttttagtatctgttggtgcggtgtgtcacgtgttaggctcttctcttgtgtactgtacatacacgcaggcatggagtgtgtggtttggttggtgtaaattatcattgtaatgtactcctactaatgtaaatgcggcagtagttgtgat

SEQ ID NO: 21482 - protein, 115 aa, Zea mays subsp. mays
  peptide (1)..(115): Ceres Seq. ID no. 15180176
  misc_feature (13)..(115): NCBI GI NO: 32488390 NR Description: OSJNBa0043A12.20
  misc_feature (14)..(115): NCBI GI NO: 13430564 NR Description: unknown protein [Arabidopsis thaliana]
  misc_feature (14)..(115): NCBI GI NO: 21554382 NR Description: unknown [Arabidopsis thaliana]
  misc_feature (14)..(115): NCBI GI NO: 9955553 NR Description: putative protein [Arabidopsis thaliana]
  misc_feature (14)..(115): NCBI GI NO: 18416955 NR Description: expressed protein [Arabidopsis thaliana]
  misc_feature (1)..(115): NCBI GI NO: 15221709 NR Description: hypothetical protein [Arabidopsis thaliana]
  misc_feature (1)..(115): NCBI GI NO: 7486369 NR Description: hypothetical protein F3I6
  misc_feature (14)..(115): NCBI GI NO: 15221172 NR Description: expressed protein [Arabidopsis thaliana]
  misc_feature (14)..(115): NCBI GI NO: 7486149 NR Description: hypothetical protein F25O1
  misc_feature (14)..(115): NCBI GI NO: 7940288 NR Description: F2401.15 [Arabidopsis thaliana]
KTEKKKKSREGMGKGKVHPSPPPAAAAAAAGSGAGETTAEAVLMRLLPAAVLAAAAPLGAEGKEVLAYLVLASLRSSAPPTPTPTPARGDGHRPELGCGCFGCYTAYWSRWDGSP

SEQ ID NO: 21483 - protein, 104 aa, Zea mays subsp. mays
  peptide (1)..(104): Ceres Seq. ID no. 15180177
  misc_feature (2)..(104): NCBI GI NO: 32488390 NR Description: OSJNBa0043A12.20
  misc_feature (3)..(104): NCBI GI NO: 13430564 NR Description: unknown protein [Arabidopsis thaliana]
  misc_feature (3)..(104): NCBI GI NO: 21554382 NR Description: unknown [Arabidopsis thaliana]
  misc_feature (3)..(104): NCBI GI NO: 9955553 NR Description: putative protein [Arabidopsis thaliana]
  misc_feature (3)..(104): NCBI GI NO: 18416955 NR Description: expressed protein [Arabidopsis thaliana]
  misc_feature (1)..(104): NCBI GI NO: 15221709 NR Description: hypothetical protein [Arabidopsis thaliana]
  misc_feature (1)..(104): NCBI GI NO: 7486369 NR Description: hypothetical protein F3I6
  misc_feature (3)..(104): NCBI GI NO: 15221172 NR Description: expressed protein [Arabidopsis thaliana]
  misc_feature (3)..(104): NCBI GI NO: 7486149 NR Description: hypothetical protein F25O1
  misc_feature (3)..(104): NCBI GI NO: 7940288 NR Description: F2401.15 [Arabidopsis thaliana]
MGKGKVHPSPPPAAAAAAAGSGAGETTAEAVLMRLLPAAVLAAAAPLGAEGKEVLAYLVLASLRSSAPPTPTPTPARGDGHRPELGCGCFGCYTAYWSRWDGSP

SEQ ID NO: 21484 - protein, 72 aa, Zea mays subsp. mays
  peptide (1)..(72): Ceres Seq. ID no. 15180178
  misc_feature (1)..(72): NCBI GI NO: 32488390 NR Description: OSJNBa0043A12.20
  misc_feature (1)..(72): NCBI GI NO: 13430564 NR Description: unknown protein [Arabidopsis thaliana]
  misc_feature (1)..(72): NCBI GI NO: 21554382 NR Description: unknown [Arabidopsis thaliana]
  misc_feature (1)..(72): NCBI GI NO: 9955553 NR Description: putative protein [Arabidopsis thaliana]
  misc_feature (1)..(72): NCBI GI NO: 18416955 NR Description: expressed protein [Arabidopsis thaliana]
  misc_feature (1)..(72): NCBI GI NO: 15221709 NR Description: hypothetical protein [Arabidopsis thaliana]
  misc_feature (1)..(72): NCBI GI NO: 7486369 NR Description: hypothetical protein F3I6
  misc_feature (1)..(72): NCBI GI NO: 15221172 NR Description: expressed protein [Arabidopsis thaliana]
  misc_feature (1)..(72): NCBI GI NO: 7486149 NR Description: hypothetical protein F25O1
  misc_feature (1)..(72): NCBI GI NO: 7940288 NR Description: F2401.15 [Arabidopsis thaliana]
MRLLPAAVLAAAAPLGAEGKEVLAYLVLASLRSSAPPTPTPTPARGDGHRPELGCGCFGCYTAYWSRWDGSP

SEQ ID NO: 21485 - DNA, 1204 bp, Zea mays subsp. mays
  misc_feature (1)..(1204): Ceres Seq. ID no. 15225677
tcttctcccctgtctgcttctgtggactgtggatgtgctcactgcttagtttggtgggttctgctcaccaatctcgctcgcagtatacgaagcctccatagtccatcatcctactgcactcggagaccacggacttggaataccaccctcgcccacagtcccacaccaggaaccatgaggaccatcatggcgaagagcccccacgactcctccttctcccggaggaacttcaagtggccggttcttgtcaagagcagcagccatggcgccgcagccggcggcggggaggacagctccggcaagggcgcggaggacgccgacgaggacgaggcgaccatggcgttctcctccagctgcccgtcgttccactcggaggacttcgtatccccgccgcccaatcccaaggcgccacctccaccgaagcagcggggcaagaggtgccgcgcggcggtctcccggctgcgcgcggcgcttgccgcggccatcgccggacggcaccgacaggtcgggctcggagcgcggatcacgggcacgctctacggccgccgccgcggccacgtgcacctcgcgttccaggtggacccgcgcgcgtgccccgcgctgctgctcgagctcgccgcgcccacggcgtcgctggtgcgcgagatggcctcgggcctcgtccgcatcgcgctagagtgcgaccgcgccaagggcgcctgcgccttcccgagcgccgcggccgcaaccaatggcggcgccggtgggtgcaggaagctggtcgaggagaaggcgtggcgcgcgtactgcaacggcaagggctgcgggtacgcggtgcggcgcgagtgcggtgccgcagacctgcgcgtgctgcgcgcgctggagcccgtctctatgggcgcgggcgtcataccggcggcgtgcggtggcggcgagggggacgtcatgtacatgcgcgctcgctttgagcgcgtcgtgggctcccgcgactcggaggcattctacatgatgaaccctgacagcagcaccggcggcaatggcggcccggagcttagcatctacctccttagagtttgattgcacatttaacttcgcggcgcatgcgtcagacaccgtgatcttgcatgctaacctgctgtctttctagtacatttgatttcttcgtgcttattattgctctggtggttgtgaaaaatgcttgtcagtttagactgcagaacgaaac

SEQ ID NO: 21486 - protein, 351 aa, Zea mays subsp. mays
  peptide (1)..(351): Ceres Seq. ID no. 15225678
  misc_feature (174)..(351): Pfam Name: Pfam Description:  Protein of unknown function, DUF617
  misc_feature (59)..(351): NCBI GI NO: 34911646 NR Description: P0039G05.26
  misc_feature (150)..(351): NCBI GI NO: 15237221 NR Description: expressed protein [Arabidopsis thaliana]
  misc_feature (104)..(351): NCBI GI NO: 11994755 NR Description: gb|AAB84348
  misc_feature (104)..(351): NCBI GI NO: 15230862 NR Description: expressed protein [Arabidopsis thaliana]
  misc_feature (171)..(351): NCBI GI NO: 18405770 NR Description: expressed protein [Arabidopsis thaliana]
  misc_feature (171)..(351): NCBI GI NO: 21593037 NR Description: unknown [Arabidopsis thaliana]
  misc_feature (172)..(351): NCBI GI NO: 15240220 NR Description: hypothetical protein [Arabidopsis thaliana]
  misc_feature (159)..(351): NCBI GI NO: 32129319 NR Description: hypothetical protein
  misc_feature (149)..(351): NCBI GI NO: 34909066 NR Description: P0702B09.30
  misc_feature (173)..(351): NCBI GI NO: 15235158 NR Description: expressed protein [Arabidopsis thaliana]
SSPLSASVDCGCAHCLVWWVLLTNLARSIRSLHSPSSYCTRRPRTWNTTLAHSPTPGTMRTIMAKSPHDSSFSRRNFKWPVLVKSSSHGAAAGGGEDSSGKGAEDADEDEATMAFSSSCPSFHSEDFVSPPPNPKAPPPPKQRGKRCRAAVSRLRAALAAAIAGRHRQVGLGARITGTLYGRRRGHVHLAFQVDPRACPALLLELAAPTASLVREMASGLVRIALECDRAKGACAFPSAAAATNGGAGGCRKLVEEKAWRAYCNGKGCGYAVRRECGAADLRVLRALEPVSMGAGVIPAACGGGEGDVMYMRARFERVVGSRDSEAFYMMNPDSSTGGNGGPELSIYLLRV

SEQ ID NO: 21487 - protein, 293 aa, Zea mays subsp. mays
  peptide (1)..(293): Ceres Seq. ID no. 15225679
  misc_feature (116)..(293): Pfam Name: Pfam Description:  Protein of unknown function, DUF617
  misc_feature (1)..(293): NCBI GI NO: 34911646 NR Description: P0039G05.26
  misc_feature (92)..(293): NCBI GI NO: 15237221 NR Description: expressed protein [Arabidopsis thaliana]
  misc_feature (46)..(293): NCBI GI NO: 11994755 NR Description: gb|AAB84348
  misc_feature (46)..(293): NCBI GI NO: 15230862 NR Description: expressed protein [Arabidopsis thaliana]
  misc_feature (113)..(293): NCBI GI NO: 18405770 NR Description: expressed protein [Arabidopsis thaliana]
  misc_feature (113)..(293): NCBI GI NO: 21593037 NR Description: unknown [Arabidopsis thaliana]
  misc_feature (114)..(293): NCBI GI NO: 15240220 NR Description: hypothetical protein [Arabidopsis thaliana]
  misc_feature (101)..(293): NCBI GI NO: 32129319 NR Description: hypothetical protein
  misc_feature (91)..(293): NCBI GI NO: 34909066 NR Description: P0702B09.30
  misc_feature (115)..(293): NCBI GI NO: 15235158 NR Description: expressed protein [Arabidopsis thaliana]
MRTIMAKSPHDSSFSRRNFKWPVLVKSSSHGAAAGGGEDSSGKGAEDADEDEATMAFSSSCPSFHSEDFVSPPPNPKAPPPPKQRGKRCRAAVSRLRAALAAAIAGRHRQVGLGARITGTLYGRRRGHVHLAFQVDPRACPALLLELAAPTASLVREMASGLVRIALECDRAKGACAFPSAAAATNGGAGGCRKLVEEKAWRAYCNGKGCGYAVRRECGAADLRVLRALEPVSMGAGVIPAACGGGEGDVMYMRARFERVVGSRDSEAFYMMNPDSSTGGNGGPELSIYLLRV

SEQ ID NO: 21488 - protein, 289 aa, Zea mays subsp. mays
  peptide (1)..(289): Ceres Seq. ID no. 15225680
  misc_feature (112)..(289): Pfam Name: Pfam Description:  Protein of unknown function, DUF617
  misc_feature (1)..(289): NCBI GI NO: 34911646 NR Description: P0039G05.26
  misc_feature (88)..(289): NCBI GI NO: 15237221 NR Description: expressed protein [Arabidopsis thaliana]
  misc_feature (42)..(289): NCBI GI NO: 11994755 NR Description: gb|AAB84348
  misc_feature (42)..(289): NCBI GI NO: 15230862 NR Description: expressed protein [Arabidopsis thaliana]
  misc_feature (109)..(289): NCBI GI NO: 18405770 NR Description: expressed protein [Arabidopsis thaliana]
  misc_feature (109)..(289): NCBI GI NO: 21593037 NR Description: unknown [Arabidopsis thaliana]
  misc_feature (110)..(289): NCBI GI NO: 15240220 NR Description: hypothetical protein [Arabidopsis thaliana]
  misc_feature (97)..(289): NCBI GI NO: 32129319 NR Description: hypothetical protein
  misc_feature (87)..(289): NCBI GI NO: 34909066 NR Description: P0702B09.30
  misc_feature (111)..(289): NCBI GI NO: 15235158 NR Description: expressed protein [Arabidopsis thaliana]
MAKSPHDSSFSRRNFKWPVLVKSSSHGAAAGGGEDSSGKGAEDADEDEATMAFSSSCPSFHSEDFVSPPPNPKAPPPPKQRGKRCRAAVSRLRAALAAAIAGRHRQVGLGARITGTLYGRRRGHVHLAFQVDPRACPALLLELAAPTASLVREMASGLVRIALECDRAKGACAFPSAAAATNGGAGGCRKLVEEKAWRAYCNGKGCGYAVRRECGAADLRVLRALEPVSMGAGVIPAACGGGEGDVMYMRARFERVVGSRDSEAFYMMNPDSSTGGNGGPELSIYLLRV

SEQ ID NO: 21489 - DNA, 2689 bp, Zea mays subsp. mays
  misc_feature (1)..(2689): Ceres Seq. ID no. 15180386
tcacagcgtcgtgacgtcgtcctctgcttcgcaagcgcccgagccgcgcgccgccgaacccgccgcctcctccagcctccgggcacatcggagcacccagccaatcgcacctcgacacggcggcaccggaggaacccctccttcttggtcgtagcctccgtggcctccctcccctcaccccttccggtgttggattgagggtggagcggagatccgccacggcttggattgatccctggatcgatacgccatataatttgggattctaaggtcccggtgcagcttcttctcgcagaagtttaccctctatgcccctctctaagcccacccttgtgattccgccgtgacgcctcatccacgggagaaacgccatgatgtcaaggtttgcccacttggggaagagcagaaaactcgctgaaacccttttggttgcctcaaagcccaatactgctagtggccaaaacattgcttcaagctttgcattcggcttgggttattccagcaggacatttttgcatgggaaggttcataatggtccaaacacctcctacatgctgggaagagcaaatgatagcttacattggagcactggtgtgaggaaattctcaattctttcatcttgtagccagaatgcatttcagaatcagattgcttggaagcgacttgtagcactgggttctcgtgcaccaaaagcatctccaatttttagtaaggttgcttgtgccattggcttggctgtgagtaggtctaatataactccttaccttgtcgcttttattgcgggagaggtaatgctagctcagaagacatctgcagatggagaatactacccaatacgtgagcgagctcaggatggccgtatttacgttacctctctaatatattcggcagtagaattggtaattataatcttcagatcaatatatttggcattgctgttcactccaagtatactgatggccccatttgcagagactcttggcagtaagtataggaaaacatggcttcgacttgtccatcgtactttggagcttgcaggtcctgcgtttatcaaatggggccaatgggctgcaacacgccctgatctgtttccaagtgacctttgtactgaattgtcaaagctgcacacaaaagcaccagctcacagctttacctatactaagaaaactgttgagaaagcttttggtcgaaagctatcagacatttttgaaaattttgaagaggaccctgttgcatctggaagtgttgctcaagtgcatcgggctgttctacgattccggtatcctaatcggcagacaaagcgtgtaactgttgcagtaaaagtaaggcatcctggtgtaggggactcgataagaagagatttcaatatcatcaatgccgtagcaaaaatatctagatatatccccacgctgaattggttgcgcctagatgagagtgtacaacagtttgctgtcttcatgatgtctcaagttgaccttgcaagggaagctgctcatctgagccggtttatctacaacttccgaaggtggaaggatgtatctttcccaagacctctctatccacttgttcatcctgctgttttagttgagacttacgagcatggggagagtgtttcacactatgttgatgaccttgaaggacatgatcgaattaaaagtgctctggcccatattggtactcacgcgctcctgaaaatgctactggttgataatttcgtccatgcagatatgcacccaggaaatattttagtccgtgtcgcacaaccaaagaactcaaataacacccttataaagtcaaggccacatgtagtcttcctggatgtaggaatgactgctgaactttcaagtaatgaccgtgtgaatttacttgagttcttcaaggctgttgctcgccgagatggtcgtacagctgcagaaagtactctaaagttgtcaaaacaacagaattgtccaaatccaaaagcttttattgaggaagttgaacgatcattctctttttggggcactgctgaaggtgatgctatccacccagctgagtgtatgcaccaactgcttgagcaagttcgatgtcataaagtgaatatcgatggcaatgtttgtactgtcatggtgactacattagttcttgagggctggcaacgtaagttggatccagattataatgttatgaagactctgcaaactttactttttaaggaagactgggcgaagtctcttcaatacactatccaagggctcatggcgccttagggtcgtccgcaatcctttctaaagttttgatctggtttgtgttcgaccggaggatcctcttctctcaccatcacgattctggcttcttttctacttaatttcacgtttcgtttctctgtacctgtcctggcgttgtgctgctaaagcagccttgatgataaagtaataactgcagtaaaaattttcagaagctaccagagtactatgctgctcagctctgggctgtcttcttatatgttcttgaagggccaaagaattaggtccttttcccccctcctaccaacacttttgacaatagctcttagatgatgtagcaaaaggcgttctgttctgatgatctttttgtaactggagaggttgtatccgtggactggagagttgcttatgtacagacagagatactgttaatctcgaaggaatccacttgtcaactgacaatc

SEQ ID NO: 21490 - protein, 625 aa, Zea mays subsp. mays
  peptide (1)..(625): Ceres Seq. ID no. 15180387
  misc_feature (269)..(395): Pfam Name: Pfam Description:  ABC1 family
  misc_feature (1)..(625): NCBI GI NO: 19387282 NR Description: putative 62.8 kDa protein
  misc_feature (1)..(625): NCBI GI NO: 32488318 NR Description: OSJNBa0015K02.12
  misc_feature (196)..(625): NCBI GI NO: 30682208 NR Description: hypethetical 62
  misc_feature (1)..(625): NCBI GI NO: 30696591 NR Description: expressed protein [Arabidopsis thaliana]
  misc_feature (44)..(610): NCBI GI NO: 34394005 NR Description: putative ubiquinone biosynthesis protein AarF
  misc_feature (196)..(625): NCBI GI NO: 25404331 NR Description: hypothetical protein T25B24.1
  misc_feature (286)..(477): NCBI GI NO: 32409949 NR Description: hypothetical protein [Neurospora crassa]
  misc_feature (476)..(606): NCBI GI NO: 32409949 NR Description: hypothetical protein [Neurospora crassa]
  misc_feature (182)..(301): NCBI GI NO: 32409949 NR Description: hypothetical protein [Neurospora crassa]
  misc_feature (290)..(536): NCBI GI NO: 32261307 NR Description: aarF domain containing kinase 2
MMSRFAHLGKSRKLAETLLVASKPNTASGQNIASSFAFGLGYSSRTFLHGKVHNGPNTSYMLGRANDSLHWSTGVRKFSILSSCSQNAFQNQIAWKRLVALGSRAPKASPIFSKVACAIGLAVSRSNITPYLVAFIAGEVMLAQKTSADGEYYPIRERAQDGRIYVTSLIYSAVELVIIIFRSIYLALLFTPSILMAPFAETLGSKYRKTWLRLVHRTLELAGPAFIKWGQWAATRPDLFPSDLCTELSKLHTKAPAHSFTYTKKTVEKAFGRKLSDIFENFEEDPVASGSVAQVHRAVLRFRYPNRQTKRVTVAVKVRHPGVGDSIRRDFNIINAVAKISRYIPTLNWLRLDESVQQFAVFMMSQVDLAREAAHLSRFIYNFRRWKDVSFPRPLYPLVHPAVLVETYEHGESVSHYVDDLEGHDRIKSALAHIGTHALLKMLLVDNFVHADMHPGNILVRVAQPKNSNNTLIKSRPHVVFLDVGMTAELSSNDRVNLLEFFKAVARRDGRTAAESTLKLSKQQNCPNPKAFIEEVERSFSFWGTAEGDAIHPAECMHQLLEQVRCHKVNIDGNVCTVMVTTLVLEGWQRKLDPDYNVMKTLQTLLFKEDWAKSLQYTIQGLMAP

SEQ ID NO: 21491 - protein, 624 aa, Zea mays subsp. mays
  peptide (1)..(624): Ceres Seq. ID no. 15180388
  misc_feature (268)..(394): Pfam Name: Pfam Description:  ABC1 family
  misc_feature (1)..(624): NCBI GI NO: 19387282 NR Description: putative 62.8 kDa protein
  misc_feature (1)..(624): NCBI GI NO: 32488318 NR Description: OSJNBa0015K02.12
  misc_feature (195)..(624): NCBI GI NO: 30682208 NR Description: hypethetical 62
  misc_feature (1)..(624): NCBI GI NO: 30696591 NR Description: expressed protein [Arabidopsis thaliana]
  misc_feature (43)..(609): NCBI GI NO: 34394005 NR Description: putative ubiquinone biosynthesis protein AarF
  misc_feature (195)..(624): NCBI GI NO: 25404331 NR Description: hypothetical protein T25B24.1
  misc_feature (285)..(476): NCBI GI NO: 32409949 NR Description: hypothetical protein [Neurospora crassa]
  misc_feature (475)..(605): NCBI GI NO: 32409949 NR Description: hypothetical protein [Neurospora crassa]
  misc_feature (181)..(300): NCBI GI NO: 32409949 NR Description: hypothetical protein [Neurospora crassa]
  misc_feature (289)..(535): NCBI GI NO: 32261307 NR Description: aarF domain containing kinase 2
MSRFAHLGKSRKLAETLLVASKPNTASGQNIASSFAFGLGYSSRTFLHGKVHNGPNTSYMLGRANDSLHWSTGVRKFSILSSCSQNAFQNQIAWKRLVALGSRAPKASPIFSKVACAIGLAVSRSNITPYLVAFIAGEVMLAQKTSADGEYYPIRERAQDGRIYVTSLIYSAVELVIIIFRSIYLALLFTPSILMAPFAETLGSKYRKTWLRLVHRTLELAGPAFIKWGQWAATRPDLFPSDLCTELSKLHTKAPAHSFTYTKKTVEKAFGRKLSDIFENFEEDPVASGSVAQVHRAVLRFRYPNRQTKRVTVAVKVRHPGVGDSIRRDFNIINAVAKISRYIPTLNWLRLDESVQQFAVFMMSQVDLAREAAHLSRFIYNFRRWKDVSFPRPLYPLVHPAVLVETYEHGESVSHYVDDLEGHDRIKSALAHIGTHALLKMLLVDNFVHADMHPGNILVRVAQPKNSNNTLIKSRPHVVFLDVGMTAELSSNDRVNLLEFFKAVARRDGRTAAESTLKLSKQQNCPNPKAFIEEVERSFSFWGTAEGDAIHPAECMHQLLEQVRCHKVNIDGNVCTVMVTTLVLEGWQRKLDPDYNVMKTLQTLLFKEDWAKSLQYTIQGLMAP

SEQ ID NO: 21492 - protein, 565 aa, Zea mays subsp. mays
  peptide (1)..(565): Ceres Seq. ID no. 15180389
  misc_feature (209)..(335): Pfam Name: Pfam Description:  ABC1 family
  misc_feature (1)..(565): NCBI GI NO: 19387282 NR Description: putative 62.8 kDa protein
  misc_feature (1)..(565): NCBI GI NO: 32488318 NR Description: OSJNBa0015K02.12
  misc_feature (136)..(565): NCBI GI NO: 30682208 NR Description: hypethetical 62
  misc_feature (1)..(565): NCBI GI NO: 30696591 NR Description: expressed protein [Arabidopsis thaliana]
  misc_feature (1)..(550): NCBI GI NO: 34394005 NR Description: putative ubiquinone biosynthesis protein AarF
  misc_feature (136)..(565): NCBI GI NO: 25404331 NR Description: hypothetical protein T25B24.1
  misc_feature (226)..(417): NCBI GI NO: 32409949 NR Description: hypothetical protein [Neurospora crassa]
  misc_feature (416)..(546): NCBI GI NO: 32409949 NR Description: hypothetical protein [Neurospora crassa]
  misc_feature (122)..(241): NCBI GI NO: 32409949 NR Description: hypothetical protein [Neurospora crassa]
  misc_feature (230)..(476): NCBI GI NO: 32261307 NR Description: aarF domain containing kinase 2
MLGRANDSLHWSTGVRKFSILSSCSQNAFQNQIAWKRLVALGSRAPKASPIFSKVACAIGLAVSRSNITPYLVAFIAGEVMLAQKTSADGEYYPIRERAQDGRIYVTSLIYSAVELVIIIFRSIYLALLFTPSILMAPFAETLGSKYRKTWLRLVHRTLELAGPAFIKWGQWAATRPDLFPSDLCTELSKLHTKAPAHSFTYTKKTVEKAFGRKLSDIFENFEEDPVASGSVAQVHRAVLRFRYPNRQTKRVTVAVKVRHPGVGDSIRRDFNIINAVAKISRYIPTLNWLRLDESVQQFAVFMMSQVDLAREAAHLSRFIYNFRRWKDVSFPRPLYPLVHPAVLVETYEHGESVSHYVDDLEGHDRIKSALAHIGTHALLKMLLVDNFVHADMHPGNILVRVAQPKNSNNTLIKSRPHVVFLDVGMTAELSSNDRVNLLEFFKAVARRDGRTAAESTLKLSKQQNCPNPKAFIEEVERSFSFWGTAEGDAIHPAECMHQLLEQVRCHKVNIDGNVCTVMVTTLVLEGWQRKLDPDYNVMKTLQTLLFKEDWAKSLQYTIQGLMAP

SEQ ID NO: 21493 - DNA, 1268 bp, Zea mays subsp. mays
  misc_feature (1)..(1268): Ceres Seq. ID no. 15180309
acctctctcctcccttccctcgcctcgctcctctctatcctcatcgagcagcagcggccgagaagcacgcattcagcagatccggggacacctcagctagggacgcagtggtacaagaaggcgccgtcgagtgccttgtctgggcgctcgacccctcctcctcctcgtcgtcgtcgaaggtgcgggaggtggccctccgcgccatcgacgtgttgtgcctgtcgccgcccaactctaccgggcgtctcctcgccgccgggttcctcgaccgcgtcctctccctcctccgcaatggcgacaacacgctgctgcggcactgcgcgctgaaggccgcgcaccgcctgtgctaggtgtcggaggaggtgaagaaggcgatgagcgacgccgggttcatgccggagctggtgggcgtcctcggcgcgtccagtaagtccctcgaggcacgggagatggcgggcgagtcgctgtgcgccctggttaccgtgccccgcaaccggaagcggttcgtccaggaggaccgcgacgtggcgcgggtgctgcagctgctgggccccgacgaggagaaggagaagcccgcgccggcgaggcggttcctgctttcgacggtggcgcacctcacggacagcagctccggccggaggaagatcatgtcctcggagcacatcaggaatctcgagaagcttgcggaggcctatgtcccagacgccaaacggatcgtgaagaggcttggcgggagcaggctgaggagcattttccatggcatttggagcctgtaatgttgtgttgtaacccttggaggcaagacaagcagtcaagcacgcagtagtagtgtctctggctaacacatacagtactattgttccttgcatcgtttgttactgtgaaggaatcaaagaatgagtcacccagtgatttgcggaacatggcggccgggatgatgatgagcccgccgaggctcagccccaacaacggctgggattagatggttggatgatcggatgacaggcaattgaaaaagagaattgatcttttttatgggcgaagtgttgaagatggctttggtgaaggaaatgtcttgttagcatcaagtaagtggcgatatcacaacccctacaagcttgtgccttaaaacaagaggatacaagaagttggagtgcttttgtgaaggcttttgcgaatcacttgaagcgttagtacttttgtgaatgattttgtaaagtgtttgcaaatatgtgcaaaacataataacatgtgtaggttttgtgaat

SEQ ID NO: 21494 - protein, 133 aa, Zea mays subsp. mays
  peptide (1)..(133): Ceres Seq. ID no. 15180310
  misc_feature (1)..(133): NCBI GI NO: 34394021 NR Description: arm repeat containing protein-like
  misc_feature (1)..(131): NCBI GI NO: 18407140 NR Description: expressed protein [Arabidopsis thaliana]
  misc_feature (1)..(131): NCBI GI NO: 16209658 NR Description: At1g61350/T1F9_16 [Arabidopsis thaliana]
  misc_feature (1)..(127): NCBI GI NO: 14532770 NR Description: unknown protein [Arabidopsis thaliana]
  misc_feature (1)..(127): NCBI GI NO: 15241309 NR Description: expressed protein [Arabidopsis thaliana]
  misc_feature (1)..(127): NCBI GI NO: 15224987 NR Description: expressed protein [Arabidopsis thaliana]
  misc_feature (1)..(127): NCBI GI NO: 15225552 NR Description: expressed protein [Arabidopsis thaliana]
  misc_feature (1)..(128): NCBI GI NO: 18378889 NR Description: armadillo repeat containing protein
  misc_feature (1)..(128): NCBI GI NO: 25518344 NR Description: hypothetical protein T1N6.25
MSDAGFMPELVGVLGASSKSLEAREMAGESLCALVTVPRNRKRFVQEDRDVARVLQLLGPDEEKEKPAPARRFLLSTVAHLTDSSSGRRKIMSSEHIRNLEKLAEAYVPDAKRIVKRLGGSRLRSIFHGIWSL

SEQ ID NO: 21495 - protein, 127 aa, Zea mays subsp. mays
  peptide (1)..(127): Ceres Seq. ID no. 15180311
  misc_feature (1)..(127): NCBI GI NO: 34394021 NR Description: arm repeat containing protein-like
  misc_feature (1)..(125): NCBI GI NO: 18407140 NR Description: expressed protein [Arabidopsis thaliana]
  misc_feature (1)..(125): NCBI GI NO: 16209658 NR Description: At1g61350/T1F9_16 [Arabidopsis thaliana]
  misc_feature (1)..(121): NCBI GI NO: 14532770 NR Description: unknown protein [Arabidopsis thaliana]
  misc_feature (1)..(121): NCBI GI NO: 15241309 NR Description: expressed protein [Arabidopsis thaliana]
  misc_feature (1)..(121): NCBI GI NO: 15224987 NR Description: expressed protein [Arabidopsis thaliana]
  misc_feature (1)..(121): NCBI GI NO: 15225552 NR Description: expressed protein [Arabidopsis thaliana]
  misc_feature (1)..(122): NCBI GI NO: 18378889 NR Description: armadillo repeat containing protein
  misc_feature (1)..(122): NCBI GI NO: 25518344 NR Description: hypothetical protein T1N6.25
MPELVGVLGASSKSLEAREMAGESLCALVTVPRNRKRFVQEDRDVARVLQLLGPDEEKEKPAPARRFLLSTVAHLTDSSSGRRKIMSSEHIRNLEKLAEAYVPDAKRIVKRLGGSRLRSIFHGIWSL

SEQ ID NO: 21496 - protein, 115 aa, Zea mays subsp. mays
  peptide (1)..(115): Ceres Seq. ID no. 15180312
  misc_feature (29)..(72): Pfam Name: Pfam Description:  Armadillo/beta-catenin-like repeat
  misc_feature (18)..(115): NCBI GI NO: 34394021 NR Description: arm repeat containing protein-like
  misc_feature (29)..(115): NCBI GI NO: 18407140 NR Description: expressed protein [Arabidopsis thaliana]
  misc_feature (29)..(115): NCBI GI NO: 16209658 NR Description: At1g61350/T1F9_16 [Arabidopsis thaliana]
  misc_feature (27)..(115): NCBI GI NO: 14532770 NR Description: unknown protein [Arabidopsis thaliana]
  misc_feature (27)..(115): NCBI GI NO: 15241309 NR Description: expressed protein [Arabidopsis thaliana]
  misc_feature (25)..(115): NCBI GI NO: 15224987 NR Description: expressed protein [Arabidopsis thaliana]
  misc_feature (33)..(115): NCBI GI NO: 18378889 NR Description: armadillo repeat containing protein
  misc_feature (33)..(115): NCBI GI NO: 25518344 NR Description: hypothetical protein T1N6.25
LSPPFPRLAPLYPHRAAAAEKHAFSRSGDTSARDAVVQEGAVECLVWALDPSSSSSSSKVREVALRAIDVLCLSPPNSTGRLLAAGFLDRVLSLLRNGDNTLLRHCALKAAHRLC

SEQ ID NO: 21497 - DNA, 1241 bp, Zea mays subsp. mays
  misc_feature (1)..(1241): Ceres Seq. ID no. 14302142
atgtaaggctgcaagggttaagttgttccttgttgagccttgcaaggaattgaccgtgtccagctctccatctactccacccttcaaaagtaaagatggttcagttggcagacctggcaagttagaaggtcaccactagtcattcccaaaaatgatcgccacatcgcactgagtccaagtaccggagcaggatgatgtattcccctccacgcaccgatcctgacagagaggatgagcagtgcttcgcaattggagctaacctgctttcttcactagatcatactatgaagtttgatgagcctatcgcctttccaatgaacaatgtaggcatgcaagagaaggttcagctctacaattctactggagatgctcaactaagtagaaatgtgaacacagggaagtgttcaaagggtggcaaaaggaagggttctggagagaacaattcatcactgcattctctagacgaagccagggcattgttgcagcgagaagtcagcatggagtgtgctgatgagaaggctgctggagccaagagagaggactacgcggcgcatgtccgggcaaagcgaggccaagccaccaacagccacagccttgcagaaagatttcgaagggaaaagataaatgtaaggatgaagcttcttcaggaccttgtcccgggttgcaacaagattacaggcaaggccatgatgcttgacgagatcataaactatgtgcaatctctgcagcgtcaggttgagttcctttcgatgaagctctcagcgatcagaccagggttcaaccgtgacctcgacctgcaagatatcctttgcgcacaagatgccagctccggttttccaggatacagcctgcaagcgagcgatgtgcatcttaatctgtatatagcatctgaagaaagtttctcacacaggatcatccctaatcctgcaaatgttcatgtgacaagaaacggccagctatctgcatttcctcagagaggagttatctggaacgaggaacttcgcagcgttgctccacatactttcgcttcagataccgttgctggttcaatggaagtggagtgacaaactgacaagtcggcagtttaatggtaaatcttgacaagtttagtctgttgggttgctactggtcaactggtgtgcctttgtaagttgcaatggtggcgcggatgagctagtcaactttggtctttggtgcccacacaccatgtacagttataataactaatcaaaggagcacag

SEQ ID NO: 21498 - protein, 290 aa, Zea mays subsp. mays
  peptide (1)..(290): Ceres Seq. ID no. 14302143
  misc_feature (129)..(179): Pfam Name: Pfam Description:  Helix-loop-helix DNA-binding domain
  misc_feature (2)..(261): NCBI GI NO: 27311243 NR Description: Hypothetical protein
  misc_feature (98)..(276): NCBI GI NO: 28273388 NR Description: putative Helix-loop-helix DNA-binding domaincontaining protein
  misc_feature (42)..(254): NCBI GI NO: 15222679 NR Description: bHLH protein [Arabidopsis thaliana]
  misc_feature (40)..(205): NCBI GI NO: 15231450 NR Description: bHLH protein family [Arabidopsis thaliana]
  misc_feature (40)..(205): NCBI GI NO: 20127064 NR Description: putative bHLH transcription factor
  misc_feature (77)..(213): NCBI GI NO: 30681559 NR Description: expressed protein [Arabidopsis thaliana]
  misc_feature (76)..(264): NCBI GI NO: 7487656 NR Description: hypothetical protein T4L20
  misc_feature (76)..(264): NCBI GI NO: 22329164 NR Description: bHLH protein [Arabidopsis thaliana]
  misc_feature (76)..(264): NCBI GI NO: 20127066 NR Description: putative bHLH transcription factor
  misc_feature (76)..(264): NCBI GI NO: 21539493 NR Description: unknown protein [Arabidopsis thaliana]
MMYSPPRTDPDREDEQCFAIGANLLSSLDHTMKFDEPIAFPMNNVGMQEKVQLYNSTGDAQLSRNVNTGKCSKGGKRKGSGENNSSLHSLDEARALLQREVSMECADEKAAGAKREDYAAHVRAKRGQATNSHSLAERFRREKINVRMKLLQDLVPGCNKITGKAMMLDEIINYVQSLQRQVEFLSMKLSAIRPGFNRDLDLQDILCAQDASSGFPGYSLQASDVHLNLYIASEESFSHRIIPNPANVHVTRNGQLSAFPQRGVIWNEELRSVAPHTFASDTVAGSMEVE

SEQ ID NO: 21499 - protein, 289 aa, Zea mays subsp. mays
  peptide (1)..(289): Ceres Seq. ID no. 14302144
  misc_feature (128)..(178): Pfam Name: Pfam Description:  Helix-loop-helix DNA-binding domain
  misc_feature (1)..(260): NCBI GI NO: 27311243 NR Description: Hypothetical protein
  misc_feature (97)..(275): NCBI GI NO: 28273388 NR Description: putative Helix-loop-helix DNA-binding domaincontaining protein
  misc_feature (41)..(253): NCBI GI NO: 15222679 NR Description: bHLH protein [Arabidopsis thaliana]
  misc_feature (39)..(204): NCBI GI NO: 15231450 NR Description: bHLH protein family [Arabidopsis thaliana]
  misc_feature (39)..(204): NCBI GI NO: 20127064 NR Description: putative bHLH transcription factor
  misc_feature (76)..(212): NCBI GI NO: 30681559 NR Description: expressed protein [Arabidopsis thaliana]
  misc_feature (75)..(263): NCBI GI NO: 7487656 NR Description: hypothetical protein T4L20
  misc_feature (75)..(263): NCBI GI NO: 20127066 NR Description: putative bHLH transcription factor
  misc_feature (75)..(263): NCBI GI NO: 22329164 NR Description: bHLH protein [Arabidopsis thaliana]
  misc_feature (75)..(263): NCBI GI NO: 21539493 NR Description: unknown protein [Arabidopsis thaliana]
MYSPPRTDPDREDEQCFAIGANLLSSLDHTMKFDEPIAFPMNNVGMQEKVQLYNSTGDAQLSRNVNTGKCSKGGKRKGSGENNSSLHSLDEARALLQREVSMECADEKAAGAKREDYAAHVRAKRGQATNSHSLAERFRREKINVRMKLLQDLVPGCNKITGKAMMLDEIINYVQSLQRQVEFLSMKLSAIRPGFNRDLDLQDILCAQDASSGFPGYSLQASDVHLNLYIASEESFSHRIIPNPANVHVTRNGQLSAFPQRGVIWNEELRSVAPHTFASDTVAGSMEVE

SEQ ID NO: 21500 - protein, 259 aa, Zea mays subsp. mays
  peptide (1)..(259): Ceres Seq. ID no. 14302145
  misc_feature (98)..(148): Pfam Name: Pfam Description:  Helix-loop-helix DNA-binding domain
  misc_feature (1)..(230): NCBI GI NO: 27311243 NR Description: Hypothetical protein
  misc_feature (67)..(245): NCBI GI NO: 28273388 NR Description: putative Helix-loop-helix DNA-binding domaincontaining protein
  misc_feature (11)..(223): NCBI GI NO: 15222679 NR Description: bHLH protein [Arabidopsis thaliana]
  misc_feature (9)..(174): NCBI GI NO: 15231450 NR Description: bHLH protein family [Arabidopsis thaliana]
  misc_feature (9)..(174): NCBI GI NO: 20127064 NR Description: putative bHLH transcription factor
  misc_feature (46)..(182): NCBI GI NO: 30681559 NR Description: expressed protein [Arabidopsis thaliana]
  misc_feature (45)..(233): NCBI GI NO: 7487656 NR Description: hypothetical protein T4L20
  misc_feature (45)..(233): NCBI GI NO: 20127066 NR Description: putative bHLH transcription factor
  misc_feature (45)..(233): NCBI GI NO: 21539493 NR Description: unknown protein [Arabidopsis thaliana]
  misc_feature (45)..(233): NCBI GI NO: 22329164 NR Description: bHLH protein [Arabidopsis thaliana]
MKFDEPIAFPMNNVGMQEKVQLYNSTGDAQLSRNVNTGKCSKGGKRKGSGENNSSLHSLDEARALLQREVSMECADEKAAGAKREDYAAHVRAKRGQATNSHSLAERFRREKINVRMKLLQDLVPGCNKITGKAMMLDEIINYVQSLQRQVEFLSMKLSAIRPGFNRDLDLQDILCAQDASSGFPGYSLQASDVHLNLYIASEESFSHRIIPNPANVHVTRNGQLSAFPQRGVIWNEELRSVAPHTFASDTVAGSMEVE

SEQ ID NO: 21501 - DNA, 1560 bp, Zea mays subsp. mays
  misc_feature (1)..(1560): Ceres Seq. ID no. 14303305
gatacaaatgaaacggatctgtgaccgcctacgacagtgtagtatatatatacactacacagtgtagctagtatacctcgcccactctaaagcgaagcagcaagcgctctgtgaccgactgtgatcacacaccacgcgtccatggtcgtcatgggcaagcacgatgacgatgagaagcagcagcaccagcagatggagatggaggacgtacatgaagtaggagccgtcgaggtgctgccgctggagaatgaggcggaggcggcgctggtgcgcaagatctccggcctggccgccgccatcgcgaagctgccgtcgctgagcccgtcgccggaggtgaacgcgctgttcacggacctggtcacggcctgcatcccgcgcagcaccgtggacgtggagcgcctgggcccggagctgcagcgcatgcgcgcggggctcatccgccgctgcgccgacgccgaggcccagctggaggcgcactactcggacctgctggcggccttggaggacaacccgctggaccacctgccgctcttcccctacttgggcaactacctgctgctgggcgagctggagcacggcctgctggcgcgccacgtcccgggcccgccgcccgcccgcgtcgccttcgtggggtccggcccgctcccgctcagctccctcgtgctcgccgcgcgccacctccccgccgccgccttcgacaactacgacatctgcgcggaggccaacggccgggcgcgccgcctcgtgcgcgccgacgccgcgctcgccgcgcgcatggcgttccgcacctccgacgtggcccacgtcacgcgggacctggccgcctacgacgtcgtcttcctggcggcgctcgtgggcatggcggccgaggagaaggcgcgcgtggtggaccacctcgggaggcacatggcgcctggcgccgccctggtggtgcgcagcgcgcacggcgcgcgcgccttcctgtaccccgtcgtcgaccccgacgagatccgccgcgccggcttcgacgtgctcgccgtgcaccacccggagggggaggtgatcaactccgtcatcgtcgcgcgtaagcccgtgcccgtccccgtcgccggagtggggcacgcgcacgcgcacgcccacgggcacggcgccgtgctcagccggccctgctgcctctgctgcgagatggaggcccggacgcaccagaagatggaggaggtggccatggagcagctgccgtcctaggcaggcaggcacacggcacacaccacaagcatggatgccagttttacatctatctgatcgatctagtaaatagtaatcccctactacgtctatgtgcccacaccgcatggatatggtaataatccgcacagggtgcgcctaatttatatccgctagctaagggcatgtacagtagagagacaccaaaacggttctccaagcacaggagacaactaagagactttattgtacaatgaagtgtctataaacgtagtctattaataaatacagaattaaatgtatttgttaaaaaaaaaaaaaaaaaaaaaaaaaaaaaaaaaaaaaaaaaaaaaaaag

SEQ ID NO: 21502 - protein, 360 aa, Zea mays subsp. mays
  peptide (1)..(360): Ceres Seq. ID no. 14303306
  misc_feature (35)..(313): Pfam Name: Pfam Description:  Nicotianamine synthase protein
  misc_feature (1)..(360): NCBI GI NO: 20387260 NR Description: nicotianamine synthase 1 [Zea mays]
  misc_feature (28)..(360): NCBI GI NO: 34898148 NR Description: nicotianamine synthase 3
  misc_feature (28)..(360): NCBI GI NO: 11176988 NR Description: nicotianamine synthase 3
  misc_feature (39)..(358): NCBI GI NO: 27151636 NR Description: Nicotianamine synthase 9
  misc_feature (35)..(354): NCBI GI NO: 19911064 NR Description: ZmNAS2 [Zea mays]
  misc_feature (36)..(354): NCBI GI NO: 20387262 NR Description: ZmNAS3 [Zea mays]
  misc_feature (35)..(358): NCBI GI NO: 27151642 NR Description: Nicotianamine synthase 1
  misc_feature (35)..(354): NCBI GI NO: 27151634 NR Description: Probable nicotianamine synthase 1
  misc_feature (35)..(358): NCBI GI NO: 27151630 NR Description: Probable nicotianamine synthase 2
  misc_feature (36)..(354): NCBI GI NO: 27151641 NR Description: Probable nicotianamine synthase 3
MVVMGKHDDDEKQQHQQMEMEDVHEVGAVEVLPLENEAEAALVRKISGLAAAIAKLPSLSPSPEVNALFTDLVTACIPRSTVDVERLGPELQRMRAGLIRRCADAEAQLEAHYSDLLAALEDNPLDHLPLFPYLGNYLLLGELEHGLLARHVPGPPPARVAFVGSGPLPLSSLVLAARHLPAAAFDNYDICAEANGRARRLVRADAALAARMAFRTSDVAHVTRDLAAYDVVFLAALVGMAAEEKARVVDHLGRHMAPGAALVVRSAHGARAFLYPVVDPDEIRRAGFDVLAVHHPEGEVINSVIVARKPVPVPVAGVGHAHAHAHGHGAVLSRPCCLCCEMEARTHQKMEEVAMEQLPS

SEQ ID NO: 21503 - protein, 357 aa, Zea mays subsp. mays
  peptide (1)..(357): Ceres Seq. ID no. 14303307
  misc_feature (32)..(310): Pfam Name: Pfam Description:  Nicotianamine synthase protein
  misc_feature (1)..(357): NCBI GI NO: 20387260 NR Description: nicotianamine synthase 1 [Zea mays]
  misc_feature (25)..(357): NCBI GI NO: 34898148 NR Description: nicotianamine synthase 3
  misc_feature (25)..(357): NCBI GI NO: 11176988 NR Description: nicotianamine synthase 3
  misc_feature (36)..(355): NCBI GI NO: 27151636 NR Description: Nicotianamine synthase 9
  misc_feature (32)..(351): NCBI GI NO: 19911064 NR Description: ZmNAS2 [Zea mays]
  misc_feature (33)..(351): NCBI GI NO: 20387262 NR Description: ZmNAS3 [Zea mays]
  misc_feature (32)..(355): NCBI GI NO: 27151642 NR Description: Nicotianamine synthase 1
  misc_feature (32)..(351): NCBI GI NO: 27151634 NR Description: Probable nicotianamine synthase 1
  misc_feature (32)..(355): NCBI GI NO: 27151630 NR Description: Probable nicotianamine synthase 2
  misc_feature (33)..(351): NCBI GI NO: 27151641 NR Description: Probable nicotianamine synthase 3
MGKHDDDEKQQHQQMEMEDVHEVGAVEVLPLENEAEAALVRKISGLAAAIAKLPSLSPSPEVNALFTDLVTACIPRSTVDVERLGPELQRMRAGLIRRCADAEAQLEAHYSDLLAALEDNPLDHLPLFPYLGNYLLLGELEHGLLARHVPGPPPARVAFVGSGPLPLSSLVLAARHLPAAAFDNYDICAEANGRARRLVRADAALAARMAFRTSDVAHVTRDLAAYDVVFLAALVGMAAEEKARVVDHLGRHMAPGAALVVRSAHGARAFLYPVVDPDEIRRAGFDVLAVHHPEGEVINSVIVARKPVPVPVAGVGHAHAHAHGHGAVLSRPCCLCCEMEARTHQKMEEVAMEQLPS

SEQ ID NO: 21504 - protein, 343 aa, Zea mays subsp. mays
  peptide (1)..(343): Ceres Seq. ID no. 14303308
  misc_feature (18)..(296): Pfam Name: Pfam Description:  Nicotianamine synthase protein
  misc_feature (1)..(343): NCBI GI NO: 20387260 NR Description: nicotianamine synthase 1 [Zea mays]
  misc_feature (11)..(343): NCBI GI NO: 34898148 NR Description: nicotianamine synthase 3
  misc_feature (11)..(343): NCBI GI NO: 11176988 NR Description: nicotianamine synthase 3
  misc_feature (22)..(341): NCBI GI NO: 27151636 NR Description: Nicotianamine synthase 9
  misc_feature (18)..(337): NCBI GI NO: 19911064 NR Description: ZmNAS2 [Zea mays]
  misc_feature (19)..(337): NCBI GI NO: 20387262 NR Description: ZmNAS3 [Zea mays]
  misc_feature (18)..(341): NCBI GI NO: 27151642 NR Description: Nicotianamine synthase 1
  misc_feature (18)..(337): NCBI GI NO: 27151634 NR Description: Probable nicotianamine synthase 1
  misc_feature (18)..(341): NCBI GI NO: 27151630 NR Description: Probable nicotianamine synthase 2
  misc_feature (19)..(337): NCBI GI NO: 27151641 NR Description: Probable nicotianamine synthase 3
MEMEDVHEVGAVEVLPLENEAEAALVRKISGLAAAIAKLPSLSPSPEVNALFTDLVTACIPRSTVDVERLGPELQRMRAGLIRRCADAEAQLEAHYSDLLAALEDNPLDHLPLFPYLGNYLLLGELEHGLLARHVPGPPPARVAFVGSGPLPLSSLVLAARHLPAAAFDNYDICAEANGRARRLVRADAALAARMAFRTSDVAHVTRDLAAYDVVFLAALVGMAAEEKARVVDHLGRHMAPGAALVVRSAHGARAFLYPVVDPDEIRRAGFDVLAVHHPEGEVINSVIVARKPVPVPVAGVGHAHAHAHGHGAVLSRPCCLCCEMEARTHQKMEEVAMEQLPS

SEQ ID NO: 21505 - DNA, 950 bp, Zea mays subsp. mays
  misc_feature (1)..(950): Ceres Seq. ID no. 14305363
agacctagaccctccaaaaacaactcaacaacaatgctcctcctcctcctcctgctcgtcgcctcctcctccctgtcccaggagggtgtcctcgccgacgtgccgccgtccaacaagctggtcttcatcctggcggggcagtccaacatggccggccgcggcggggtggtggcgaaccgctgggacggcgtggtgccgggcgactgcgcgccgtcccccgcggtgctgcgtctctcgcccgacctgcgctgggaggaggcgcgggagccgctgcacgccggcatcgacgccgccaaccacgccgtcggggtgggccccgggatggcgtttgccaacgcgctgctgcgctcgggccgcgcggggggcgccgtggtagggctcgtcccctgcgccgtgggaggcacgcggatggcagagtggggcaggggcaccgagctctacgccgagatgctgcgccgggccagggtcgccgtcgagacgggggggcgcatcggtgcgctgttgtggtaccagggggagagtgacaccgtccgctggtccgacgccaccgagtacggccgccggatggggatgctcgtccgtgatctccgcgccgatcttggcatcccgcacctcctcgtcatccaggtcgggttagcatcgggcctaggacagtatactcaagtcgtgagagacgctcagaaagggatcaaacttcgcaacgtcagattcgttgatgcgatggggttgccattgcaagacggccatctgcatctaagcacccaagctcaggtccagcttgggcgtatgttggctcagtcctatctaaattatggtacatcccaactctagctagtacttgtgagatagaaattcctgccctgtttggacgattcattgagaacccattcttataattattgttgtatggaatcaacttgttacagctcgatgcaatatcttcatcatct

SEQ ID NO: 21506 - protein, 276 aa, Zea mays subsp. mays
  peptide (1)..(276): Ceres Seq. ID no. 14305364
  misc_feature (12)..(276): NCBI GI NO: 30102980 NR Description: unknown protein
  misc_feature (13)..(270): NCBI GI NO: 30102977 NR Description: hypothetical protein
  misc_feature (30)..(270): NCBI GI NO: 21594009 NR Description: unknown [Arabidopsis thaliana]
  misc_feature (30)..(270): NCBI GI NO: 18418402 NR Description: expressed protein [Arabidopsis thaliana]
  misc_feature (9)..(275): NCBI GI NO: 38345580 NR Description: OSJNBa0027H06.16
  misc_feature (41)..(270): NCBI GI NO: 38347110 NR Description: OSJNBa0009K15.7
  misc_feature (30)..(213): NCBI GI NO: 7488258 NR Description: protein kinase homolog F28A23
  misc_feature (38)..(210): NCBI GI NO: 30693749 NR Description: expressed protein [Arabidopsis thaliana]
  misc_feature (50)..(210): NCBI GI NO: 11357879 NR Description: hypothetical protein F8J2
  misc_feature (32)..(268): NCBI GI NO: 32473459 NR Description: probable acetyl xylan esterase AxeA
RPRPSKNNSTTMLLLLLLLVASSSLSQEGVLADVPPSNKLVFILAGQSNMAGRGGVVANRWDGVVPGDCAPSPAVLRLSPDLRWEEAREPLHAGIDAANHAVGVGPGMAFANALLRSGRAGGAVVGLVPCAVGGTRMAEWGRGTELYAEMLRRARVAVETGGRIGALLWYQGESDTVRWSDATEYGRRMGMLVRDLRADLGIPHLLVIQVGLASGLGQYTQVVRDAQKGIKLRNVRFVDAMGLPLQDGHLHLSTQAQVQLGRMLAQSYLNYGTSQL

SEQ ID NO: 21507 - protein, 265 aa, Zea mays subsp. mays
  peptide (1)..(265): Ceres Seq. ID no. 14305365
  misc_feature (1)..(265): NCBI GI NO: 30102980 NR Description: unknown protein
  misc_feature (2)..(259): NCBI GI NO: 30102977 NR Description: hypothetical protein
  misc_feature (19)..(259): NCBI GI NO: 21594009 NR Description: unknown [Arabidopsis thaliana]
  misc_feature (19)..(259): NCBI GI NO: 18418402 NR Description: expressed protein [Arabidopsis thaliana]
  misc_feature (1)..(264): NCBI GI NO: 38345580 NR Description: OSJNBa0027H06.16
  misc_feature (30)..(259): NCBI GI NO: 38347110 NR Description: OSJNBa0009K15.7
  misc_feature (19)..(202): NCBI GI NO: 7488258 NR Description: protein kinase homolog F28A23
  misc_feature (27)..(199): NCBI GI NO: 30693749 NR Description: expressed protein [Arabidopsis thaliana]
  misc_feature (39)..(199): NCBI GI NO: 11357879 NR Description: hypothetical protein F8J2
  misc_feature (21)..(257): NCBI GI NO: 32473459 NR Description: probable acetyl xylan esterase AxeA
MLLLLLLLVASSSLSQEGVLADVPPSNKLVFILAGQSNMAGRGGVVANRWDGVVPGDCAPSPAVLRLSPDLRWEEAREPLHAGIDAANHAVGVGPGMAFANALLRSGRAGGAVVGLVPCAVGGTRMAEWGRGTELYAEMLRRARVAVETGGRIGALLWYQGESDTVRWSDATEYGRRMGMLVRDLRADLGIPHLLVIQVGLASGLGQYTQVVRDAQKGIKLRNVRFVDAMGLPLQDGHLHLSTQAQVQLGRMLAQSYLNYGTSQL

SEQ ID NO: 21508 - protein, 227 aa, Zea mays subsp. mays
  peptide (1)..(227): Ceres Seq. ID no. 14305366
  misc_feature (1)..(227): NCBI GI NO: 30102980 NR Description: unknown protein
  misc_feature (1)..(221): NCBI GI NO: 30102977 NR Description: hypothetical protein
  misc_feature (1)..(221): NCBI GI NO: 21594009 NR Description: unknown [Arabidopsis thaliana]
  misc_feature (1)..(221): NCBI GI NO: 18418402 NR Description: expressed protein [Arabidopsis thaliana]
  misc_feature (1)..(226): NCBI GI NO: 38345580 NR Description: OSJNBa0027H06.16
  misc_feature (1)..(221): NCBI GI NO: 38347110 NR Description: OSJNBa0009K15.7
  misc_feature (1)..(164): NCBI GI NO: 7488258 NR Description: protein kinase homolog F28A23
  misc_feature (1)..(161): NCBI GI NO: 30693749 NR Description: expressed protein [Arabidopsis thaliana]
  misc_feature (1)..(161): NCBI GI NO: 11357879 NR Description: hypothetical protein F8J2
  misc_feature (1)..(219): NCBI GI NO: 32473459 NR Description: probable acetyl xylan esterase AxeA
MAGRGGVVANRWDGVVPGDCAPSPAVLRLSPDLRWEEAREPLHAGIDAANHAVGVGPGMAFANALLRSGRAGGAVVGLVPCAVGGTRMAEWGRGTELYAEMLRRARVAVETGGRIGALLWYQGESDTVRWSDATEYGRRMGMLVRDLRADLGIPHLLVIQVGLASGLGQYTQVVRDAQKGIKLRNVRFVDAMGLPLQDGHLHLSTQAQVQLGRMLAQSYLNYGTSQL

SEQ ID NO: 21509 - DNA, 1083 bp, Zea mays subsp. mays
  misc_feature (1)..(1083): Ceres Seq. ID no. 15180294
cttcccacccacccccgcgcctgcctgctccccgacaccgggggcgccacggcggcgacagcaagccgggacatggcgcgcggcggcctcgcccgcctgctcgccacgctcatcctcttcctcctgctcgccgccggaccttccctcgccgagtcagaggcggacctcgcgcggggcgcgtccgaggcggcgccggacgcgcagcagcacctcctgccgcgcccgctcgtcatcgagctcccgtcggcgcgggccggggccgagctcgacgccgacgccgacgccgacgccgtggtaacggtcgacgtgcgctgcgccagctggcggctcgcggccgaggccaacaacctcgcgccgtgggcggcggtgccgcccgaatgcgcgccgcacgtgcgggactacgtcaccggctccgcctaccgctccgacctcgacctcgtggcgcgggagtcggccgcctacgcgcgcgccgccgcgccggccggcgccgccgacggacgcgacgcctgggtgttcgacgtcgacgagacgctgctctccaatctcccatactacgccgagcacggctacggggccgagttgttcgaccaccacaagttcgacgagtgggtggaaaggggcgaggcggccgccatcccttccagcttgaagctctacaacgaggtccgcgggctgggattcaagaccttcctgctcacgggcagaagcgaggcgcaccgaggagtcacggtggagaacctcacaaagcaggggttccatgactgggagaagctcatactcagggcagcaggtgaccgcgagaaaacagcgacagtctacaaatcagagaagagggacgaaatggaacaggagggttacaggatcctaggcaactccggcgaccaatggagcgacctgctgggatcttccatgagcgctcgctctttcaagctccctaacccaatgtactatatcccgtgacagaaagaaactggagaacagggcgggtgaaaggtgctctgcgtttactggatgcacattctaccaggccctcggctgatgatggaaaatgaaaaataattttgcaatggaattaaactgtac

SEQ ID NO: 21510 - protein, 319 aa, Zea mays subsp. mays
  peptide (1)..(319): Ceres Seq. ID no. 15180295
  misc_feature (101)..(319): Pfam Name: Acid phosphatase Pfam Description: HAD superfamily, subfamily IIIB
  misc_feature (77)..(319): NCBI GI NO: 15241412 NR Description: acid phosphatase [Arabidopsis thaliana]
  misc_feature (70)..(318): NCBI GI NO: 130718 NR Description: Acid phosphatase precursor 1
  misc_feature (101)..(319): NCBI GI NO: 15234949 NR Description: acid phosphatase - like protein
  misc_feature (70)..(318): NCBI GI NO: 445113 NR Description: acid phosphatase 1
  misc_feature (105)..(318): NCBI GI NO: 15233526 NR Description: acid phosphatase-related protein
  misc_feature (105)..(319): NCBI GI NO: 15233504 NR Description: acid phosphatase-related protein
  misc_feature (102)..(318): NCBI GI NO: 7442053 NR Description: acid phosphatase (EC 3.1.3.-) - soybean
  misc_feature (113)..(285): NCBI GI NO: 7705154 NR Description: acid phosphatase-1(1); Apase-1(1)
  misc_feature (96)..(317): NCBI GI NO: 2627233 NR Description: pod storage protein [Phaseolus vulgaris]
  misc_feature (100)..(318): NCBI GI NO: 134145 NR Description: STEM 28 kDa glycoprotein precursor
LPTHPRACLLPDTGGATAATASRDMARGGLARLLATLILFLLLAAGPSLAESEADLARGASEAAPDAQQHLLPRPLVIELPSARAGAELDADADADAVVTVDVRCASWRLAAEANNLAPWAAVPPECAPHVRDYVTGSAYRSDLDLVARESAAYARAAAPAGAADGRDAWVFDVDETLLSNLPYYAEHGYGAELFDHHKFDEWVERGEAAAIPSSLKLYNEVRGLGFKTFLLTGRSEAHRGVTVENLTKQGFHDWEKLILRAAGDREKTATVYKSEKRDEMEQEGYRILGNSGDQWSDLLGSSMSARSFKLPNPMYYIP

SEQ ID NO: 21511 - protein, 295 aa, Zea mays subsp. mays
  peptide (1)..(295): Ceres Seq. ID no. 15180296
  misc_feature (77)..(295): Pfam Name: Acid phosphatase Pfam Description: HAD superfamily, subfamily IIIB
  misc_feature (53)..(295): NCBI GI NO: 15241412 NR Description: acid phosphatase [Arabidopsis thaliana]
  misc_feature (46)..(294): NCBI GI NO: 130718 NR Description: Acid phosphatase precursor 1
  misc_feature (77)..(295): NCBI GI NO: 15234949 NR Description: acid phosphatase - like protein
  misc_feature (46)..(294): NCBI GI NO: 445113 NR Description: acid phosphatase 1
  misc_feature (81)..(294): NCBI GI NO: 15233526 NR Description: acid phosphatase-related protein
  misc_feature (81)..(295): NCBI GI NO: 15233504 NR Description: acid phosphatase-related protein
  misc_feature (78)..(294): NCBI GI NO: 7442053 NR Description: acid phosphatase (EC 3.1.3.-) - soybean
  misc_feature (89)..(261): NCBI GI NO: 7705154 NR Description: acid phosphatase-1(1); Apase-1(1)
  misc_feature (72)..(293): NCBI GI NO: 2627233 NR Description: pod storage protein [Phaseolus vulgaris]
  misc_feature (76)..(294): NCBI GI NO: 134145 NR Description: STEM 28 kDa glycoprotein precursor
MARGGLARLLATLILFLLLAAGPSLAESEADLARGASEAAPDAQQHLLPRPLVIELPSARAGAELDADADADAVVTVDVRCASWRLAAEANNLAPWAAVPPECAPHVRDYVTGSAYRSDLDLVARESAAYARAAAPAGAADGRDAWVFDVDETLLSNLPYYAEHGYGAELFDHHKFDEWVERGEAAAIPSSLKLYNEVRGLGFKTFLLTGRSEAHRGVTVENLTKQGFHDWEKLILRAAGDREKTATVYKSEKRDEMEQEGYRILGNSGDQWSDLLGSSMSARSFKLPNPMYYIP

SEQ ID NO: 21512 - protein, 252 aa, Zea mays subsp. mays
  peptide (1)..(252): Ceres Seq. ID no. 15180297
  misc_feature (13)..(237): Pfam Name: Pfam Description:  HlyD family secretion protein
  misc_feature (3)..(248): NCBI GI NO: 23105870 NR Description: hypothetical protein [Azotobacter vinelandii]
  misc_feature (2)..(250): NCBI GI NO: 23018055 NR Description: hypothetical protein [Thermobifida fusca]
  misc_feature (5)..(252): NCBI GI NO: 11362193 NR Description: hypothetical protein
  misc_feature (3)..(251): NCBI GI NO: 29247944 NR Description: GLP_26_54603_52153 [Giardia lamblia ATCC 50803]
  misc_feature (6)..(235): NCBI GI NO: 32042481 NR Description: hypothetical protein
  misc_feature (5)..(252): NCBI GI NO: 32038635 NR Description: hypothetical protein
  misc_feature (11)..(244): NCBI GI NO: 29828079 NR Description: putative oxidoreductase
  misc_feature (3)..(146): NCBI GI NO: 23120317 NR Description: hypothetical protein
  misc_feature (2)..(165): NCBI GI NO: 29247944 NR Description: GLP_26_54603_52153 [Giardia lamblia ATCC 50803]
  misc_feature (3)..(210): NCBI GI NO: 29247944 NR Description: GLP_26_54603_52153 [Giardia lamblia ATCC 50803]
SHPPPRLPAPRHRGRHGGDSKPGHGARRPRPPARHAHPLPPARRRTFPRRVRGGPRAGRVRGGAGRAAAPPAAPARHRAPVGAGRGRARRRRRRRRRGNGRRALRQLAARGRGQQPRAVGGGAARMRAARAGLRHRLRLPLRPRPRGAGVGRLRARRRAGRRRRRTRRLGVRRRRDAALQSPILRRARLRGRVVRPPQVRRVGGKGRGGRHPFQLEALQRGPRAGIQDLPAHGQKRGAPRSHGGEPHKAGVP

SEQ ID NO: 21513 - DNA, 1018 bp, Zea mays subsp. mays
  misc_feature (1)..(1018): Ceres Seq. ID no. 13598869
aagtgccaagtccggagcaacagcaaccaaccaaccacctcctcccctctccgtctcccagtccggcctcgctcgccactcggagtctcggagtcaaccgccagcgcctcgatccggcgaagccagcccagcccatggcctccggcgccgtaccaccgcagcgggtcgccctgctggcgctcgccgtcctctccgtcgtctcattcccgcacctgtccctccccgcctcgtcccatccgctcccgcaggaagctgctgctgctgctgctgcgggtgcggcggcgggaggcgaggcgtccgagcctcacggcaccgccgccgatggtgccgccgtggcgcggcgcgcgtgcacgtacacggtgcagatcaagacgagctgcgcgtccccgcggagctccgcggacgcggtgagcctcgcgttcggggacgcgtaccgcaacgaggtgtacgcggcgacggtgacgccgcggcgcgggttcgagcgctgcgccacggacacgttccgcgtcgccgggccctgcggctacggcgtctgctacctctacatgcgccggtcgggccgcgccgccgggtggacgcccgagtgggtcagggtgtacgagccggcgtccggcgcgccctccaccttctactacggcgacccgctccccgacggcgtctggtacggcttcgaccgctgcgtcaaggccggggccggcgcctctgccgagcatggtgccgcggcgcggacgctgtgacggacggacgcggacgccgccggtctctgggcgacagggcgaggtagcagagcgccactcgtggcgcgcggtcctgctgccgtgtcaagcgatgattgctggggcacggcgtctctttctgtgcaagtggagagtattcatttcgggtggctgctagtagtaatagcttctctattgggtctatttgcgttacgtgtagtacgtgccacgcataataaaaagtagtatggccaaamamaawaaagttggaactggarrrgsktatcgataccgtcgacctc

SEQ ID NO: 21514 - protein, 260 aa, Zea mays subsp. mays
  peptide (1)..(260): Ceres Seq. ID no. 15222441
SAKSGATATNQPPPPLSVSQSGLARHSESRSQPPAPRSGEASPAHGLRRRTTAAGRPAGARRPLRRLIPAPVPPRLVPSAPAGSCCCCCCGCGGGRRGVRASRHRRRWCRRGAARVHVHGADQDELRVPAELRGRGEPRVRGRVPQRGVRGDGDAAARVRALRHGHVPRRRALRLRRLLPLHAPVGPRRRVDARVGQGVRAGVRRALHLLLRRPAPRRRLVRLRPLRQGRGRRLCRAWCRGADAVTDGRGRRRSLGDRAR

SEQ ID NO: 21515 - protein, 244 aa, Zea mays subsp. mays
  peptide (1)..(244): Ceres Seq. ID no. 15222442
  misc_feature (100)..(226): Pfam Name: ATS3 Pfam Description: Embryo-specific protein 3,
  misc_feature (45)..(236): NCBI GI NO: 34910236 NR Description: OSJNBa0089K24.2
  misc_feature (115)..(236): NCBI GI NO: 15227355 NR Description: hypothetical protein [Arabidopsis thaliana]
  misc_feature (116)..(229): NCBI GI NO: 8809633 NR Description: contains similarity to embryo-specific protein3~gene_id:MMI9
  misc_feature (116)..(229): NCBI GI NO: 15241727 NR Description: expressed protein [Arabidopsis thaliana]
  misc_feature (115)..(226): NCBI GI NO: 15241758 NR Description: embryo-specific protein - like
  misc_feature (115)..(226): NCBI GI NO: 26450767 NR Description: embryo-specific protein like
  misc_feature (116)..(236): NCBI GI NO: 3335171 NR Description: embryo-specific protein 3 [Arabidopsis thaliana]
  misc_feature (116)..(236): NCBI GI NO: 13877521 NR Description: embryo-specific protein 3; ATS3
  misc_feature (116)..(236): NCBI GI NO: 15240721 NR Description: embryo-specific protein 3 (ATS3)
  misc_feature (15)..(139): NCBI GI NO: 11360494 NR Description: antifreeze glycopeptide AFGP polyprotein precursor
VPSPEQQQPTNHLLPSPSPSPASLATRSLGVNRQRLDPAKPAQPMASGAVPPQRVALLALAVLSVVSFPHLSLPASSHPLPQEAAAAAAAGAAAGGEASEPHGTAADGAAVARRACTYTVQIKTSCASPRSSADAVSLAFGDAYRNEVYAATVTPRRGFERCATDTFRVAGPCGYGVCYLYMRRSGRAAGWTPEWVRVYEPASGAPSTFYYGDPLPDGVWYGFDRCVKAGAGASAEHGAAARTL

SEQ ID NO: 21516 - protein, 200 aa, Zea mays subsp. mays
  peptide (1)..(200): Ceres Seq. ID no. 15222443
  misc_feature (56)..(182): Pfam Name: ATS3 Pfam Description: Embryo-specific protein 3,
  misc_feature (1)..(192): NCBI GI NO: 34910236 NR Description: OSJNBa0089K24.2
  misc_feature (71)..(192): NCBI GI NO: 15227355 NR Description: hypothetical protein [Arabidopsis thaliana]
  misc_feature (72)..(185): NCBI GI NO: 8809633 NR Description: contains similarity to embryo-specific protein3~gene_id:MMI9
  misc_feature (72)..(185): NCBI GI NO: 15241727 NR Description: expressed protein [Arabidopsis thaliana]
  misc_feature (71)..(182): NCBI GI NO: 15241758 NR Description: embryo-specific protein - like
  misc_feature (71)..(182): NCBI GI NO: 26450767 NR Description: embryo-specific protein like
  misc_feature (72)..(192): NCBI GI NO: 3335171 NR Description: embryo-specific protein 3 [Arabidopsis thaliana]
  misc_feature (72)..(192): NCBI GI NO: 13877521 NR Description: embryo-specific protein 3; ATS3
  misc_feature (72)..(192): NCBI GI NO: 15240721 NR Description: embryo-specific protein 3 (ATS3)
  misc_feature (1)..(95): NCBI GI NO: 11360494 NR Description: antifreeze glycopeptide AFGP polyprotein precursor
MASGAVPPQRVALLALAVLSVVSFPHLSLPASSHPLPQEAAAAAAAGAAAGGEASEPHGTAADGAAVARRACTYTVQIKTSCASPRSSADAVSLAFGDAYRNEVYAATVTPRRGFERCATDTFRVAGPCGYGVCYLYMRRSGRAAGWTPEWVRVYEPASGAPSTFYYGDPLPDGVWYGFDRCVKAGAGASAEHGAAARTL

SEQ ID NO: 21517 - DNA, 702 bp, Zea mays subsp. mays
  misc_feature (1)..(702): Ceres Seq. ID no. 14312544
aacgccgctcctgcgcgccatcactccactcgatcgaccgcctccgtgtccgtgccctacagctggtcatgagcgcccgcccaaccatggcggcggcggcgcccgtgcgcgcctgggtggtggcgctggcgctggtgctggcgtgcgcgctgctccagccgcggccgtccgacgccgcggcgcagcccgccccgcagtcgccggcgacggcggtgtcgtcgggcgccgccaagcccaagtgcgtggccggcgccaggaacgaccacgcgtgccgcgtcggcgccgtgcacgacccggacagccaggaggaggagggctccagcgtcaccatcgacgcgcccgccgccgcgcccgacgacgtcggccacgacgacggcagcgactacaacgaccccgacgtgcccaacaacgaccagctcgtcgtcgtcggccactgaaagctgccgcgcgcgcgcgcgcgccgacccgtggaccatgcgtgcatgaagaagaatgcagggggtgggcctgggcctgtaacctgttaatggatcggattctcggtgccaattcgtgatcttgaccggtctaagaagatggggacttgcgtctttgtttcattggttattatttctactagtgtgtatatggtaaagtcgtgtgctgtgaacctgcgatcatttatcctctgttcattgaattgaagcaatcccctctcccgtt

SEQ ID NO: 21518 - protein, 184 aa, Zea mays subsp. mays
  peptide (1)..(184): Ceres Seq. ID no. 14312545
  misc_feature (75)..(143): Pfam Name: Pfam Description:  TT viral orf 1
  misc_feature (31)..(146): NCBI GI NO: 17027049 NR Description: elongation factor-1 alpha [Chimarra rossi]
  misc_feature (13)..(156): NCBI GI NO: 29247944 NR Description: GLP_26_54603_52153 [Giardia lamblia ATCC 50803]
  misc_feature (33)..(157): NCBI GI NO: 34911576 NR Description: P0004A09.11
  misc_feature (21)..(158): NCBI GI NO: 11024339 NR Description: PKSA putative O-methyltransferase; PKSA-ORF6
TPLLRAITPLDRPPPCPCPTAGHERPPNHGGGGARARLGGGAGAGAGVRAAPAAAVRRRGAARPAVAGDGGVVGRRQAQVRGRRQERPRVPRRRRARPGQPGGGGLQRHHRRARRRARRRRPRRRQRLQRPRRAQQRPARRRRPLKAAARARAPTRGPCVHEEECRGWAWACNLLMDRILGANS

SEQ ID NO: 21519 - protein, 144 aa, Zea mays subsp. mays
  peptide (1)..(144): Ceres Seq. ID no. 14312546
RRSCAPSLHSIDRLRVRALQLVMSARPTMAAAAPVRAWVVALALVLACALLQPRPSDAAAQPAPQSPATAVSSGAAKPKCVAGARNDHACRVGAVHDPDSQEEEGSSVTIDAPAAAPDDVGHDDGSDYNDPDVPNNDQLVVVGH

SEQ ID NO: 21520 - protein, 122 aa, Zea mays subsp. mays
  peptide (1)..(122): Ceres Seq. ID no. 14312547
MSARPTMAAAAPVRAWVVALALVLACALLQPRPSDAAAQPAPQSPATAVSSGAAKPKCVAGARNDHACRVGAVHDPDSQEEEGSSVTIDAPAAAPDDVGHDDGSDYNDPDVPNNDQLVVVGH

SEQ ID NO: 21521 - DNA, 839 bp, Zea mays subsp. mays
  misc_feature (1)..(839): Ceres Seq. ID no. 12588828
tcatcattcatcacatcgatggcatagccagcgaacggcagacggaatcgcgcctcccatcctctgctttccccaaaaggccagctccaccgcggcggcgccgctcctataaaccgtcagctccctctaggcgcgctttccccgcggcagcctgagcagccagccatgcctgggcggcgggcgatcgaggtccggcagctgctgccggccggcggtgacgccgcgacgccgaggtggcgcatgtcgctgcttgagaacacgttcaacgggttcgtgcagggcgccggcgccgaagccgtgttcgcggaggggtccctgttcagcccgttcctgttcggcaagttctttgacccagccgacccgttcccgctgtgggagttcgagccggacgcgctgctcgccgcgctgcgccgcggcaacgccaggaccgccgtcgactgggctgagaccgactccgattactacctcacagccgacgtgccaggtggaagtggaaggagatgcgacgtggaggtgagcggggacgcgatgaaggtggtcgacatcagcggcctgtggcgggcgccgccggcggacggccgggactggcgcgcgggccggtggtgggagcacggcttcgtccggcgggtggagctgccggaggacgcggagtggaggaaagtggaggcatgcttcgacgacagcgaggggtccctggagatcagggttcccaagaccgccgatgcccgccaggccacggcctgacgccgccgagaatcggaaccttgcaatgcgtgcgtgtcgctgaaaaacgatgtatgtgatatgttcttcagtgccagctgttgaattggctagct

SEQ ID NO: 21522 - protein, 192 aa, Zea mays subsp. mays
  peptide (1)..(192): Ceres Seq. ID no. 12588829
  misc_feature (18)..(183): NCBI GI NO: 18423654 NR Description: expressed protein; protein id: At5g54660
  misc_feature (50)..(183): NCBI GI NO: 123555 NR Description: 18.1 KD CLASS I HEAT SHOCK PROTEIN (HSP 18.1)
  misc_feature (50)..(183): NCBI GI NO: 4185754 NR Description: cytosolic I small heat shock protein HSP17.2IB
  misc_feature (50)..(183): NCBI GI NO: 4185748 NR Description: cytosolic I small heat shock protein HSP17.2IA
  misc_feature (62)..(183): NCBI GI NO: 4185756 NR Description: cytosolic I small heat shock protein HSP17.2IC
MPGRRAIEVRQLLPAGGDAATPRWRMSLLENTFNGFVQGAGAEAVFAEGSLFSPFLFGKFFDPADPFPLWEFEPDALLAALRRGNARTAVDWAETDSDYYLTADVPGGSGRRCDVEVSGDAMKVVDISGLWRAPPADGRDWRAGRWWEHGFVRRVELPEDAEWRKVEACFDDSEGSLEIRVPKTADARQATA

SEQ ID NO: 21523 - protein, 167 aa, Zea mays subsp. mays
  peptide (1)..(167): Ceres Seq. ID no. 12588830
  misc_feature (1)..(158): NCBI GI NO: 18423654 NR Description: expressed protein; protein id: At5g54660
  misc_feature (25)..(158): NCBI GI NO: 123555 NR Description: 18.1 KD CLASS I HEAT SHOCK PROTEIN (HSP 18.1)
  misc_feature (25)..(158): NCBI GI NO: 4185754 NR Description: cytosolic I small heat shock protein HSP17.2IB
  misc_feature (25)..(158): NCBI GI NO: 4185748 NR Description: cytosolic I small heat shock protein HSP17.2IA
  misc_feature (37)..(158): NCBI GI NO: 4185756 NR Description: cytosolic I small heat shock protein HSP17.2IC
MSLLENTFNGFVQGAGAEAVFAEGSLFSPFLFGKFFDPADPFPLWEFEPDALLAALRRGNARTAVDWAETDSDYYLTADVPGGSGRRCDVEVSGDAMKVVDISGLWRAPPADGRDWRAGRWWEHGFVRRVELPEDAEWRKVEACFDDSEGSLEIRVPKTADARQATA

SEQ ID NO: 21524 - protein, 100 aa, Zea mays subsp. mays
  peptide (1)..(100): Ceres Seq. ID no. 12588831
MRRGGERGRDEGGRHQRPVAGAAGGRPGLARGPVVGARLRPAGGAAGGRGVEESGGMLRRQRGVPGDQGSQDRRCPPGHGLTPPRIGTLQCVRVAEKRCM

SEQ ID NO: 21525 - DNA, 817 bp, Zea mays subsp. mays
  misc_feature (1)..(817): Ceres Seq. ID no. 12637747
aatcataagtaaggtcatgaaaaaaaacaccagcaactggacacggcattacacacctagagcgcccacctggccgttgcggatgggatagctcaaactatgcgagctgctggcgcgggatcgggccagcgctttgaggtgtcatatcgggagccctcctgtacattagagacgactttgctgcggtggaaaagagcactgtattaagggagacaatagtcagtatggctgttgctggagctatatttggagctgcatttggtggctggatgaatgacaagtttggaaggaggcctttcatcatacttgccgatgcactgttctttgaaggtgccgttatcatggcattttccccgacacctagagttatcgttgttgggagggtatttgttggtcttggtgttggaatggcttccatgacagctcctctgtacatctctcaagcctcccctgctaggatcagaggtgctctagtgagcacaaatgggcttctcatcactggtggccagttcttggcctacctcatcaatctagccttcactaaggtgccagggacctggcggtggatgcttggcattgcaggggttcctgccctagtccagttcgtactaatgctgccagaatcacctagatggctctacaggaaggttgatagtagtatttgtttttacaaaaagtagttcgtatacaagaattactttggattcaaataccacatctttgtctgtaccttatagatagctacataatatagtgagtcattatccaatgccaacacgaggaaaggattatctgcgaaagggaaggaacagaatgg

SEQ ID NO: 21526 - protein, 151 aa, Zea mays subsp. mays
  peptide (1)..(151): Ceres Seq. ID no. 12637748
  misc_feature (1)..(151): Pfam Name: and other Pfam Description: Sugar
  misc_feature (1)..(151): NCBI GI NO: 16974757 NR Description: putative Na+/myo-inositol symporter
  misc_feature (1)..(141): NCBI GI NO: 15235767 NR Description: membrane transporter like protein
  misc_feature (1)..(141): NCBI GI NO: 15220697 NR Description: hypothetical protein; protein id: At1g30220
  misc_feature (1)..(141): NCBI GI NO: 33146705 NR Description: putative proton myo-inositol transporter
  misc_feature (1)..(141): NCBI GI NO: 9652186 NR Description: putative Na+/myo-inositol symporter
  misc_feature (1)..(141): NCBI GI NO: 9652184 NR Description: putative Na+/myo-inositol symporter
  misc_feature (1)..(140): NCBI GI NO: 15227479 NR Description: putative sugar transporter; protein id: At2g35740
  misc_feature (1)..(141): NCBI GI NO: 30689342 NR Description: sugar transporter family [Arabidopsis thaliana]
  misc_feature (1)..(141): NCBI GI NO: 38347452 NR Description: OSJNBa0076N16.21
  misc_feature (1)..(145): NCBI GI NO: 29501739 NR Description: putative Na+/myo-inositol symporter
MAVAGAIFGAAFGGWMNDKFGRRPFIILADALFFEGAVIMAFSPTPRVIVVGRVFVGLGVGMASMTAPLYISQASPARIRGALVSTNGLLITGGQFLAYLINLAFTKVPGTWRWMLGIAGVPALVQFVLMLPESPRWLYRKVDSSICFYKK

SEQ ID NO: 21527 - protein, 136 aa, Zea mays subsp. mays
  peptide (1)..(136): Ceres Seq. ID no. 12637749
  misc_feature (1)..(136): Pfam Name: and other Pfam Description: Sugar
  misc_feature (1)..(136): NCBI GI NO: 16974757 NR Description: putative Na+/myo-inositol symporter
  misc_feature (1)..(126): NCBI GI NO: 15235767 NR Description: membrane transporter like protein
  misc_feature (1)..(126): NCBI GI NO: 15220697 NR Description: hypothetical protein; protein id: At1g30220
  misc_feature (1)..(126): NCBI GI NO: 33146705 NR Description: putative proton myo-inositol transporter
  misc_feature (1)..(126): NCBI GI NO: 9652186 NR Description: putative Na+/myo-inositol symporter
  misc_feature (1)..(126): NCBI GI NO: 9652184 NR Description: putative Na+/myo-inositol symporter
  misc_feature (1)..(125): NCBI GI NO: 15227479 NR Description: putative sugar transporter; protein id: At2g35740
  misc_feature (1)..(126): NCBI GI NO: 30689342 NR Description: sugar transporter family [Arabidopsis thaliana]
  misc_feature (1)..(126): NCBI GI NO: 38347452 NR Description: OSJNBa0076N16.21
  misc_feature (1)..(130): NCBI GI NO: 29501739 NR Description: putative Na+/myo-inositol symporter
MNDKFGRRPFIILADALFFEGAVIMAFSPTPRVIVVGRVFVGLGVGMASMTAPLYISQASPARIRGALVSTNGLLITGGQFLAYLINLAFTKVPGTWRWMLGIAGVPALVQFVLMLPESPRWLYRKVDSSICFYKK

SEQ ID NO: 21528 - protein, 112 aa, Zea mays subsp. mays
  peptide (1)..(112): Ceres Seq. ID no. 12637750
  misc_feature (1)..(112): Pfam Name: and other Pfam Description: Sugar
  misc_feature (1)..(112): NCBI GI NO: 16974757 NR Description: putative Na+/myo-inositol symporter
  misc_feature (1)..(102): NCBI GI NO: 15235767 NR Description: membrane transporter like protein
  misc_feature (1)..(102): NCBI GI NO: 15220697 NR Description: hypothetical protein; protein id: At1g30220
  misc_feature (1)..(102): NCBI GI NO: 33146705 NR Description: putative proton myo-inositol transporter
  misc_feature (1)..(102): NCBI GI NO: 9652186 NR Description: putative Na+/myo-inositol symporter
  misc_feature (1)..(102): NCBI GI NO: 9652184 NR Description: putative Na+/myo-inositol symporter
  misc_feature (1)..(101): NCBI GI NO: 15227479 NR Description: putative sugar transporter; protein id: At2g35740
  misc_feature (1)..(102): NCBI GI NO: 30689342 NR Description: sugar transporter family [Arabidopsis thaliana]
  misc_feature (1)..(102): NCBI GI NO: 38347452 NR Description: OSJNBa0076N16.21
  misc_feature (1)..(106): NCBI GI NO: 29501739 NR Description: putative Na+/myo-inositol symporter
MAFSPTPRVIVVGRVFVGLGVGMASMTAPLYISQASPARIRGALVSTNGLLITGGQFLAYLINLAFTKVPGTWRWMLGIAGVPALVQFVLMLPESPRWLYRKVDSSICFYKK

SEQ ID NO: 21529 - DNA, 558 bp, Zea mays subsp. mays
  misc_feature (1)..(558): Ceres Seq. ID no. 12590378
atcctgggttacgttcctcgcacggcggaggcaaacaaaccctagccgccaggcgcaggcggtcagggagcgagtaccgagcgccccagttcacacgtgagatgtcagaatacaagaacgtcgttggggggaggctaaagctgaagggtaaggcactggatgtgaaggaaggtggagtcaagaagaaaaaaaagaagcatcagcttgaagagtcgtctcagattgagcacgatgagctccacaaagggggaaactctggcttaccagctgatcacaacaatgagcttattgaagctggcaaggtgggagatgaagaaaggaatctacatccagactacgaccacctcacaccggcggagcgacgctatatagatcagaagcagaagatcgacatgcaaaagctgatgcttcttaatttcgtcattttcctccttccttctaataagatttctctctcaccctcggccccccttcacgtgcgattgtaggtgtttgacgcttttgtaataatgcatgctgacatgttgcataaattgctccccaaaaaaatcttatttc

SEQ ID NO: 21530 - protein, 161 aa, Zea mays subsp. mays
  peptide (1)..(161): Ceres Seq. ID no. 12590379
  misc_feature (34)..(134): NCBI GI NO: 18394403 NR Description: expressed protein; protein id: At1g16810
PGLRSSHGGGKQTLAARRRRSGSEYRAPQFTREMSEYKNVVGGRLKLKGKALDVKEGGVKKKKKKHQLEESSQIEHDELHKGGNSGLPADHNNELIEAGKVGDEERNLHPDYDHLTPAERRYIDQKQKIDMQKLMLLNFVIFLLPSNKISLSPSAPLHVRL

SEQ ID NO: 21531 - protein, 128 aa, Zea mays subsp. mays
  peptide (1)..(128): Ceres Seq. ID no. 12590380
  misc_feature (1)..(101): NCBI GI NO: 18394403 NR Description: expressed protein; protein id: At1g16810
MSEYKNVVGGRLKLKGKALDVKEGGVKKKKKKHQLEESSQIEHDELHKGGNSGLPADHNNELIEAGKVGDEERNLHPDYDHLTPAERRYIDQKQKIDMQKLMLLNFVIFLLPSNKISLSPSAPLHVRL

SEQ ID NO: 21532 - DNA, 802 bp, Zea mays subsp. mays
  misc_feature (1)..(802): Ceres Seq. ID no. 15169763
acagagcaaacaaagccaacgtgatcagagagggatatatagctagctagctagcatagcatggcgcttgtagccgacgacgacgccgagctcaaggccaaggccaaggccaaggccgaggtctactacggcgacgaggcctgtcagctgtgcgcgcagctcctgctgagggaagcaggcctccccaacggcctgctgccgctggaggacctgacggagtgcggctacgtccaggagaccgggtacgtgtggctgaagcagggcaggagggtcgaccacgtcttccggagcctcggacgcctcgtctcctacggcgccgagatcaccgggtacgccgagaagggccggatcaggaaggtgaaggggataaagaccagggagctcatgctgtgggtgcccgtcgaggagatcgccgctctcggcgacccggcggccggcgggaagcttgtctgcaagagcgttgctgggatcaccaggaccttccctgcgtcggccttccatgtccctgagaaggcggcggcggcggaggaggtgaaggtggactgtgccagggcgccgcccgccacaccggtgctcgtcctcatggacagatcaggagctccaccagttgttaagaacaactgatgcttgcgtgcttacgaacgaaagcgaaccatgcatgaccccccaaccaagttcatttcatcctttcatgcatgtactatgtatgtagctctacatatatatatatattgctactactatcaagcatgtatgtcgccgttgtggagacacatctattgatctatacatgagcttgtgg

SEQ ID NO: 21533 - protein, 187 aa, Zea mays subsp. mays
  peptide (1)..(187): Ceres Seq. ID no. 15169764
  misc_feature (14)..(157): Pfam Name: Pfam Description:  Protein of unknown function, DUF538
  misc_feature (14)..(157): NCBI GI NO: 18405887 NR Description: expressed protein [Arabidopsis thaliana]
  misc_feature (14)..(164): NCBI GI NO: 18391006 NR Description: expressed protein [Arabidopsis thaliana]
  misc_feature (16)..(146): NCBI GI NO: 34915378 NR Description: hypothetical protein~similar to Oryza sativachromosome 7
  misc_feature (16)..(146): NCBI GI NO: 34915416 NR Description: hypothetical protein~similar to Arabidopsisthaliana chromosome1
  misc_feature (25)..(146): NCBI GI NO: 34911878 NR Description: OSJNBb0032K15.16
  misc_feature (16)..(150): NCBI GI NO: 34915410 NR Description: hypothetical protein~similar to Arabidopsisthaliana chromosome1
  misc_feature (16)..(146): NCBI GI NO: 34915418 NR Description: hypothetical protein~similar to Arabidopsisthaliana chromosome1
  misc_feature (16)..(150): NCBI GI NO: 34915430 NR Description: hypothetical protein~similar to Arabidopsisthaliana chromosome3
  misc_feature (10)..(150): NCBI GI NO: 18422648 NR Description: expressed protein [Arabidopsis thaliana]
MALVADDDAELKAKAKAKAEVYYGDEACQLCAQLLLREAGLPNGLLPLEDLTECGYVQETGYVWLKQGRRVDHVFRSLGRLVSYGAEITGYAEKGRIRKVKGIKTRELMLWVPVEEIAALGDPAAGGKLVCKSVAGITRTFPASAFHVPEKAAAAEEVKVDCARAPPATPVLVLMDRSGAPPVVKNN

SEQ ID NO: 21534 - DNA, 914 bp, Zea mays subsp. mays
  misc_feature (1)..(914): Ceres Seq. ID no. 12633896
aatctcggtttttagcacgcaaacacacggcacgagcagctgagcgcccatggcaggtccccggcgtctcctcctcctcctgctcccgctgctcgtgctcctcggcgcgcacccgccgcagcgcgggtccgcggaggaggggacgaaggtctccctggagctctactacgagtcgctgtgcccgtactgctcgcggttcatcgtcaaccacctcgcggggatcttcgaggacgggctcatcgacgccgtccacctccggctcgtcccctacggcaacgcgcgcgtcgcatccaacagcgagatctcttgccagcatggtccgtacgagtgtctgctcaacaccgtggaagcttgcgccatcgacgcctggccggatctggatgtgcatttcagcttcatctactgcgtggaggacctggtggtgaagcggcagtacaaggactgggagtcctgcttcgagaagctgggccttgacgccaagcccgtaacagaatgctacaaaagcgagcatggccacaagctcgagctcaagtacgcgaaccagaccgacgctctcgagccgccgcaccggtacgtgccctgggtggtcgtcgacgggcagcccctgctagaggattacgagaatttcgaggcttacatctgcaaggcttacaagggcactccaccgaaggcctgtgagggcctggaacgtctgcagatggccctcgagacagcggcggaggcgcgcaacggcgtcagctacaactccggtgtcagcaagcttgcgactgctgaagatgagggtggggagcataaggtgggagaatactagtacgtaattgactagcgacgtgcccttttttgggtcatgtgaagatatgaaggaccgttccatctcgttgtccgggtttttattgtacagtaatagctaatat

SEQ ID NO: 21535 - protein, 253 aa, Zea mays subsp. mays
  peptide (1)..(253): Ceres Seq. ID no. 12633897
  misc_feature (34)..(143): Pfam Name: GILT Pfam Description: Gamma interferon inducible lysosomal thiol reductase
  misc_feature (33)..(212): NCBI GI NO: 30793446 NR Description: 27K protein [Triticum aestivum]
  misc_feature (33)..(209): NCBI GI NO: 18390723 NR Description: expressed protein; protein id: At1g07080
  misc_feature (33)..(209): NCBI GI NO: 25406953 NR Description: hypothetical protein
  misc_feature (27)..(241): NCBI GI NO: 15241015 NR Description: putative protein; protein id: At5g01580.1
  misc_feature (28)..(209): NCBI GI NO: 18413888 NR Description: putative protein; protein id: At4g12890
  misc_feature (28)..(209): NCBI GI NO: 21593076 NR Description: unknown [Arabidopsis thaliana]
  misc_feature (1)..(220): NCBI GI NO: 15235523 NR Description: putative protein; protein id: At4g12900.1
  misc_feature (28)..(209): NCBI GI NO: 15235540 NR Description: putative protein; protein id: At4g12960
  misc_feature (28)..(209): NCBI GI NO: 21593852 NR Description: unknown [Arabidopsis thaliana]
  misc_feature (28)..(190): NCBI GI NO: 7487272 NR Description: hypothetical protein T20K18
MAGPRRLLLLLLPLLVLLGAHPPQRGSAEEGTKVSLELYYESLCPYCSRFIVNHLAGIFEDGLIDAVHLRLVPYGNARVASNSEISCQHGPYECLLNTVEACAIDAWPDLDVHFSFIYCVEDLVVKRQYKDWESCFEKLGLDAKPVTECYKSEHGHKLELKYANQTDALEPPHRYVPWVVVDGQPLLEDYENFEAYICKAYKGTPPKACEGLERLQMALETAAEARNGVSYNSGVSKLATAEDEGGEHKVGEY

SEQ ID NO: 21536 - protein, 140 aa, Zea mays subsp. mays
  peptide (1)..(140): Ceres Seq. ID no. 12633898
  misc_feature (20)..(140): NCBI GI NO: 13592175 NR Description: ppg3 [Leishmania major]
  misc_feature (23)..(140): NCBI GI NO: 11359723 NR Description: proteophosphoglycan, membrane-associated
  misc_feature (23)..(140): NCBI GI NO: 5420387 NR Description: proteophosphoglycan [Leishmania major]
  misc_feature (20)..(140): NCBI GI NO: 11359723 NR Description: proteophosphoglycan, membrane-associated
  misc_feature (20)..(140): NCBI GI NO: 5420387 NR Description: proteophosphoglycan [Leishmania major]
  misc_feature (23)..(140): NCBI GI NO: 5420387 NR Description: proteophosphoglycan [Leishmania major]
  misc_feature (23)..(140): NCBI GI NO: 13592175 NR Description: ppg3 [Leishmania major]
  misc_feature (20)..(140): NCBI GI NO: 11359723 NR Description: proteophosphoglycan, membrane-associated
  misc_feature (20)..(140): NCBI GI NO: 13592175 NR Description: ppg3 [Leishmania major]
  misc_feature (20)..(140): NCBI GI NO: 13592175 NR Description: ppg3 [Leishmania major]
SRFLARKHTARAAERPWQVPGVSSSSCSRCSCSSARTRRSAGPRRRGRRSPWSSTTSRCARTARGSSSTTSRGSSRTGSSTPSTSGSSPTATRASHPTARSLASMVRTSVCSTPWKLAPSTPGRIWMCISASSTAWRTWW
